United States Patent Application Publication US 2009/0119022 A1 - sequence listing, part 7

SEQ ID NO: 5793 - DNA, 6919 bp, Emericella nidulans
ctgccaatgtcgggattcctatcggctgttttgttgtaccagtgccttgcaatttcagcccagccttcgcgctcacggatgtcggcgtcttcgacgagcatgcggtatcgtgacaggtcaccaaggcattctagccaagtgtcttcaaatttgggcacgaactctaagaagacggtcatgtagccatacgccaggtggaaaaatgccagtatcctctctagggagccaggaagtcggtgccgcagcaactcaagcaaagaatggatgccatatcgccacaagcgactaggcatggcgtattgctctgctaggcggttgacggcgggccccgctgcctgttgttgggaagctaagaaaaaagcgtgatattcctcgagtaggacacggtgtagactgactaacatctgccactcttgctgagataattcggtattcttctggaaatggtgcttgaataactctatgcatttcttttccgccatgagtattcccgaatagatggcttgcgtttcatttctcaattcctcttctgtcaaaggtttagtgtctacctgtagcaagagcctagaagatgctgtacctccgtcagccgcaaaaacccctccagctggccgctgttcgttgctcaaacgctgcgcggactcctggccgtagctcgagtcttctgtcggctgaccggatgcgcgcgagagggagccgatttcattctgcctggcgaccccggtgaccgggaaccgtccgtcgtttgagccggagttcgaatggagttgctggtgctgcagccgcgatgtgccaccgtcagcactgccaacatcgtctgtcgagtttacagaataccgaagtcgagactcgctgcccgcgcttgcctttcctgtccagctgtccgctccgggccggctgacggggcgactgcgcggagctcctgaacgagatccctgggctttgcgtggcgggcgaaggccctggcgaagatgtgagaccgcaagctcaacgacattatcgcttgcaggattggaattcaagtcatcagtcctcgtattggtatacgagaaagtagcagaatattgagcgcgattagaattcatcgatccatcttccgatgctaatgccatgggcgtcctcctgcgcatcagttagacagttaccagcctataaatgctccagttcagcggacgcgcgttccactcacccaggcgagctgctcccttccagtgccgcatccgagcccgcggtgcccgccggctgtttggcattaagatcgcgatctccgctgtaccggcgtcgcactgggagcgtttccctaccagcactgacactcttgtcgctcattgtttaggttgacccaagtactggaacgcgtcatctgattgatcagtgtctgaccgccgagtggacgaagaatggtatgaagggtctcggaacatgtactcaaaagtcacatgcgagcaaatcactcaggtgagagatgctgcgcgggatggatcctgatgggaaagtgggggatattgaatctgagaaaacaacgagacgagggtattgttttagcgggatgggtgatgacatcaagctgcgttgcgctgcagctgggcaccaacttacctgcagaaacgacttcgaagaagcatcagagggaacaaaagcagggactgtagattcaattggcggagatgcaggcatttaagatgaagagttaggcaactagtagaccaacactctctgcctagaacacacgatgactggcgcggagtcgttcccgggttccactcagcacatggatagagaagatgttggaatcaataatagttattccggctgaagagataaccactttggttaaagacaaaagtaaagatgctgatgccgtgagattgctcttctcgatggtcggggattaaatgcgactcggcgcctggctccttccaccacggttgccttgcctcgtgctctcaatcttctttactttttccttcgtaccagacattgatatattatcccattgatcgttcaggctctccttatctggctggaatggactcagcggctcactgttcttttaccgcttctagccggtataaggttgccttgagtatgttttgtaaatactcttgcctcctccgatcagaccaaagaggcaaccatcccacctgcatcacctgactactgtcagcaccaagtacctcaactaaaccaccaggtctgtgcatcctaacatcctggatattagcatcggtaactcagtgagtggctgcctcgattcttctccggctccagcctgctcgtgccacttggctttatatcaccccctccgctgtgcacttctcaactcgttttgaagaccagacccaatacgacgggtctcccttgcttaagaaaggacgctgacgactgctacttgatcaatattactctgaattaagagatccgtgagcacggcagtgagtgcgtcaaagggacaacggtgctcggataactcatggccaccaacaaatcattatcatcatattgaccaacaccggcactgggttcaacctcaaggagcggctcagtgcttgaaatgtgttcatttgcgactcatcgtgacgtgaagaagtccgtttagttctgtgtcaatgttttcatatagcacagccttctctgtgtcagcctcgtcagggcgtacatagtattgtatgcgatactgacccgtacatctcccaggtaggaagctgcctgactggctaggttgaccaggccaggttgcgacgattacagaactgaactcggggtcgtgaagatcacacggcaccgctacaaatgaaggcacctatcgccatcgtcagcattgaaagttctgctggtgggcggaggtgccattaccctgactcttttttattggcaccaagggtcgagataaatacggtcaccaccaaaaaacttatcttcgcccttattgttcatagctctcgtgatccttataacgagagcaagacccaggaacaaatcattgtcgcagggaccatttacaagactgcctaaaggatcatctaccttggttaagcaggcgctttatacttggggcccagctgttcaaactgggtcaatgctgcagcaagctgtatagctactgagtctgaggatatggttctctagccaactggccgccttgacgtgtttgagatatagcctcacttacgtggttcatgatatgcctaatcggtctgcaatggtatcatttgtctttcattcttcaactacatgtaggcagtcgtaccctaccaaactcataggatatcgattgaagcccaggtgtctccaacaggtgattggccgcgacggaggtgattgggaagagatacaatagaatatgctgatgcgctgtgcactagtgcccctcactcctccctagatgatacggctaattagtgaaaggctgcaaaatatctaacgccaggatactctatgcaaatgtaggtatgataggttactagtaaaaacatcgaacgtctgactgggagatgtggcacgagcaatgcaatagggggtattttggtttgactgtttgattttatcacgggaaataaatgcggtgctgtattgagtcagtcgcctgcagagcttgaaaaactgtgcttgggaaatttaccttctgtttcacaggctcacgacacataggacagcttgccctttccttgagacatccttttgatggaggcatgagctcgtctgcgcaccagcggcaaagtatcgcatgtccgcagggaagtagtacagtgtcaacaacttgactcatgcaaatcttacactccatgttgatggtcatctcttctgtttccttgggctcaggacgagcttccttgggcgcctctactagctttttggttttactcagtgccggtgttccggctaggctgtttctgtatatagcccggtactggctgggcacgtctcgcagcaactcgtcaaggtacggatcatcatgtagggttcggctggacgcttggtgctgcatgggtgcgtattccaagcgtgctgaaggtctcgtagatgtttcgagggtggtgctgatggcgggctggttgctctggctctgggttgtctgttgttgtatggatggagtgccggtgtaggtcgtggtagaagtcatactcgcaggtcgtgcccgcacgcgtgaagactggatagatcgagctctgttgtgagctgggattatcggcgttggtgtcaaagtggttgttcgctggtttcgcctatgatgagagctccctgcagatgatccagaatgaggaaatgcatgcgcattacgacttgttcgataagatgctcctgagttcgacgcggggtctaaagcactaaaggcaacagcgaaaggattcggagtaggccgatgctgcggttcattttgtacctctgataacctggtgggcgccgtaaacatctgggccgtctgcgcaggggatgatgtatgggtattcacgttggaaaaataagaaaaccgaggcatcggaccggccgttgagatatttgttggtggttgtgaggcaggaggccactggcgcggcagattcgtgaaaacattagacatagtttgggccgaagaaagggtatcgaacgagttattcgtattcgtattcatgtcaattgtacccatgtttgcaaaagtcgcactggttatgggaggtgccgtagtgattccagaagttctattgttcatagtcgaaacttcgtcgttcgggaaaaaaggcccgctgtatggcggcatagacaagcctgcagaatgatcggcctcagtatggctacttttggaaacgcgaagtatccttaccttgtacattggaattagagacagcttcgtacagagaggccgcgtcaaatggctgcggaagatcatagtcactgggcaaagacatgccgggaactccagtagaatgaaggccagcttcctgcatgtatgagggagcaaagccagagtccataatgacgagcttcgtaatgtccgttggctgacggaagctagaatctgagcccaccgttggagacgaagtaatccttacacgaaggacgtgacggagggcagattttcactcaaaggtctttggggatctcgagaacgctgctaccactagtgggagtagctaaaggctgaggcgaaatggagaaagtagtggtatgactattgagagcggggtcagcaagacctgttattctggtagactgatttcgagatcaccgatcctgcttgaaaagaagtagtctgcaccgaaaaaagcgaacaaacaaaggtaattagtacatgggtaataacattgtgaataccgacgcatgttccgggagtttgaacagattccaacataccaaaagagcccaatatctgggtcagttgccttcgtgataagactggaaagaaggaatttcgtcaaagatatcgatgcggaggtaatggtagattgagctcagctggagacaatagatggcatgcttccgaacgtagatattgtttgattgaacatctctcaagccctaatctgacgagcatccgacgggtgaggagaaatatttgtatatgccgttctccttacctctgtagaaggataattccgaccacgggattgatatgacaggtcacagaaagagcagaactgtaaagctacaggagtagtccgaaagcgatgttttgttggtttttgaacaattccaaaaagaaacggctactagagtacaagaactcttgcagccatggcagttcggagacaggcagtcttaagagataaggcccggggcgagaggtgatatatagcagttcacagccatacgctggagactgaaaggcggctctgtggtttgtggaacaaccaggctggaaaaagccttgacaagcacattcacttcactccacttttgttcactgctctccttattttttgtctcagtgctgtggaccgatcaaattcagacgcacgagtcggacagtgaagggcaagagcctgagtaacagtggcagagccgtcgacagccgcaccctaggaataggagtagatttggtcgatgtatgatcgcagatcatcagtgtcagggcgagattcacggtcgtggctgcaggccagtgagctatgaaggagaaaaagatcaaaaagttccagaggtcagtcgcctgaagagatgaagagttgactgtttctaggctggggccaccaccaatgaggctggtacgtactcaaaggtcagcgcacatctaggccatgcaaccacagatcctcatttgctggaaaactacgaagtgcaggggcaaaggggcaagcgaaaaagaaaaaggaataggctctagccgagagagcaagggaagaaaaatgagcacaagagggaatcctactctagtcagccagacggaagtcagcaccgcaagtggtggtggtggtccgacccgcaagatgatctggcagtcagagaatctgccactgctggtctgccagcagtaaaacgccattcggagcatgatgcatttttccttcggctgagagctgccacggaaccttcgttacatatgggcgagaacatggctgtgctcaaaagggcatagatcattgattaaaatatgatgctaaggtctggccgatccgacagctctggtgggttcccgcaatcgccgacccagacgtcatcttccactgggaccatctatcattcctctatggagcagtagctggacaaactagcccatactctcggtggtctgatgcgagactgacacgttcattacttcccaaccacgctctgctacgtctttttcttttttcctttctctttttgtttttgaagagccgcgagcctcggctcatgcttcggggacttaggccgtggcagcgctttgccgttacctcctccagcttgcgaccgcaacttccggtcgcggcgatgtcgacttctgccagcaatcttaacaatg

SEQ ID NO: 5794 - DNA, 4456 bp, Emericella nidulans
tgaatgatatgacgctggccaagcacatggacgtggaggtcttgtcccgtcacgaatcgcgatcgaaggtggtcgtggatctactgggaggagaaggtgttatccaagatactttcaaatctccgcgtccgatctcgccttctaagcgagcacaggaaaatgcgagtgctgggtctccccgcaaactgttccggctgagtgatgcctcgggcgagctctcgttcagtctcgttaaggccggagagccggttcgacgacaggacttcgacggcaacgatgtcttcttgtatgatgtcggcactcagctctgggtgtggcaggggctccgagcaagtcaggcagagaaggctctgtggctcaaggttgcccaagcttacattcggcacctccagagccgggaatccaatcccgttgtttccacaattcccatttcgaaagttgtacaagattacgaaagtccttcttttctaaagacggtggatttttaattcacgtagtacgatgaggattttgcgggtgagcaattagcctgtgtgtacttagatcgaacacatcatggttcaaaacaagttctcattatttttcgtttcagtctcgtaaccggatgttcaccttctttgaatttagacctgctccttctgaaagttcttacattaagaattatggatcacaagtacctacgtcgacggaacgtcagagagcaaggatccagctgacgcgtggtgacccagcggtagtgtatctatgctgttcgagtaaaacatataagaacctcgtgtaattgcattgagaagttatgaaataacgaaccggcatcgtggcagcccaggcctgagcgagccctagccgtcccgccagacgcagctcgcacctctactgccgaggccattaatacccacctaggtctcgaggaactggccctttcacgtcgattatgtgtatactgtgtaaagaaacaagctcattcaattcaggtactagcaatacggatatacgtccctgacgggtcgcaatggcctgggctgactgcctcatgcgggtgctatatcacattcgtctccaagccgcagcccaacatgcaatagactgtttagaggagactgaaaagtcatatcctcgcggacaccgagccacgtaccagtatgaccggtctgataatgcccgcccacctctgcgaaacctgaatatgcttgctagaccactacggcctggccacccatgactatatcgagatacagccggtcgaggctgtatgggcacgcaacgagtatccgagcaaatgctgcattcgtgacattgtagatgctgtgtaccccccgcttaagaggatggaccatagcacgcgctccccaactgcagccaagttgtaggcttttccaaatattgtacttttcaaagttactaataggcgattgtgatcagaaccgcattattcattatccaggagctagtttgctggtctccaaatctgttgatcctatatcctcattctaggagaatatagcaagaaataagctaacaaaacaattcaagaagagaacttctcattatcctaatttgtatttccctcctttgatatcatttgtataccaacgtacatcgtaccaatccaaccattgtgtcaatgacatagcaaataggcacgtattgtctgcatctccggctctcgcgtcgacattgaaagtccacataccgctgctcaaccagagttaaggaagctggaaatctagcaatagctcactgcggtcgctactaggcaagtagccaacttgaatgccacgggcatctcggataacaaggtgagccaaatcattgaaaggcgcagtcctcagcggccatgataatggggccctccttttcgtgactaccatccgtgtagacggcagaggagctcactaggagggttgcattaacagggctatcgcctagaagtgccagctctttctttatggattcaggcagataaccgcgcaggtagataaagaagatacggtcgcttcaggatgtcaacgtcaaacgcgatcatcaagttgacttcaagtagagggggagatcttacacgataatgggcgtcggcgcaatctcgaggaactcaatcttgactatatgatcttccttaggcatgatatcgtatatggcatcgttgcgcctgggcacattctcatgctgggccatggtgtcctcgccgcaaacactaatactatgcggggttagtcttgacaagagcagctagtgcagcggtccaaagatgcagcaaactgtgggagaattgctttcatcgcgtggcagtgggctgggttgaattgtcagacagctctgggtaagtgagcaatgaaggacgagatgattgttggcttcatgtcacttgactgcctacgaggctagtactccgtagagtctagactctagaacctgtactgccggcgatctggtcgagctgaggatatcatgcaggcccttaaggtcgtgtttgacgctgggaatcgctgaaggttaagggccacgatccgcttctcccacggtatcggctactgcatcctaacctcacaaacctggacaagtggcaccatttcatccacaccaagccagaatggccagatcgactagttttgccctagccgatgggtgactattccctaccgtgaagcattgtgcttgacgctttattgttctaggcggctatgccggtttgtgctgaggaagggataataacgtatttaggatggaactactatacgaccgcccttccgacttaagacgtatatgtggctccggcaaaggtggccagactagaggctgacagtaacgagcgcggcagtatgagtattcattatcttaaatgtgattactctcaaaacaaagaccctcttgctaagaaactactggtgaatgccacatggatattcaggctagcgctctatattatgtctaacatcgagttactgtctgtataacagataaagttactatatcatatctatcctacaacactcctaatacatacgaccatagggtgtggagaacagggcttcccgtccgctcagccgtacttaagccacacgccggctggttagtagtatggtgggtgaccacatgcgaatcccagctgttgtatgttttttttatttaagctattcaatctatactggccaaatttagctgtagatacgcttaaaggggaaagggcaggagaaaactgtatcaactacacgaacgtagcctacagaggtcaggctgtgacaaccaatatattagtcagaacttagctctccaaggagggttagccctttttggctgagtgggaagttcgatacatactgatgtccagaatgagtcgcgccgatcccagacacgtgatgcagcgtcttggcaggtatcccaacccctgagggtttgacacccttgtgatatcgagtatcgattggagagctacagagatattgagctaatcatcaaagcgtccgctccttaggaagctacttacgtgtagctgacttggcctcattttgtcttcccccctctgaggtacatacgtattccacaagaaaccaaagaccaacaatggccgataccaatgacaccatatcagaaattcgctggctctcatgccatatggtttgaatccgtagcatgccggcacaaccctacatttaggtcagacttgatcggcaagctgcagcttctggcatttctctagcttccccatccccctgctcaccaattgacaccgtggtgaaacctgcggaagttcagggctcctgtgaagtcagttccatgactaaatcgatatagagcaaatttcaacagttcttccataggtggcgcttatcatgtggacctgactgctcgcggctggcaggaagggtgtaaccacattgatcggtgctaaagcgacttgccattagatagtatgaaatcattgtagatatcgttatacaatttctctcagagattcagcgatagcagagaagtgccatacacgagctcttgcaaggtttaatttaggcttgctatttaatacctagcagagatcggcgggttctggacttttcggccttcaagccgtccttgagacccgaacaaagccctgccccgtggcaccacagactgctcaactatccttgaccacatccaatatccacggtaattctcatacctagacaagctccttatcaatatccgcaagagtgccattgacaatcgccgcagcgtggtggcgcgcaacaaggccataagcgaactggtacctgagaagccgttagacatgccacacaacatatagcagcagaaaacgtactggtcaagaaaaggcagcagctgggcgaggccaggggtgttccgccgatctctcatgagattacagacaatggcaaggaagcccatgagcgtaacgccagccttttccatacgcctgttggcgtccttggcaagccggccattaaggttcacatcttgg

SEQ ID NO: 5795 - DNA, 7785 bp, Emericella nidulans
  unsure (1)..(7785): unsure at all n locations
tttaagataattactagatttctagaaatctacttaaaatatctttctagttaagttatatttaaataatagcctctataagtcagctattattttttatagatatattaatctttatttttatagctaataatgttccttattttagacttgttaaacccaacccacggaacccgccccaacccgccccgacccgccaagaaatgggttgggttagaccttctaattatccattgggttttggatatttttggctgccccaaagcccggcggacgaacccgctgggttgccaagatatctaaataggtatattactgtatttagattatatttgcttacttagatagttataatacagtatttaaatacagtattttattaactatgtagatcactgcttattagagtaatgatatgcataactgggttattttgggttatttaggttgggttagaattatttgctaaacccatgggcggtttactgtgaaggtaacccaccccaaaacccgcgtgggcggatcagctaggcctgaaaacccgccccaacccgtggtttaacaagtctagtctagatactggtcaaggatatactaataacaccctacccccccaacaacctctatatatgcctgcatgtgcttgaacttggcatctgatacctagttaacctacagattaaggtcatcccagccctgggggtgcataataacagccttgcttgctaagctattataccctgtatacttactctcctggctgtagttaagcagtatcttgttatgggatgctcccataacacgcaccgcgtagcgtacgcggctgtggtcacgtggctccccatccatctccaatctctgatctgtcctgtcccgctttctcttcttcagcgattccctcttgtacatacggcacgtttagataggaagatccgtctatacacgtcccttaacatatctataactgacctagatagatcatgtactagatattagggatattaatacccatgcctaaggtacctattgcggcaataatataggtctggctgctctggaactattatattatacctgcctagtccagaatagtactatagtatgccttgcagcccagctcacagctgatagcattaacctggctctttatattagtatatataattacctggctatcaccagcctgctggatgcgctgctggatgaatccctgtatattaggctgtgtcaatgataagggacgtatttagatggatcttcctatctagacgtgccgtacgtacaagaaggaatcgctaaagaagaaatgagaaagaaggattgttgttgtgaggaagtcttgtaggtggctcaccgccttcaggacagcgcaggccttggccgagtcactaaggtctaaggtccttgtataggcaaaggacccataacaatggtttgcataatggccaaagctgcatggtatacaaagctagatgtatctactgctttttacaagatcagaattaaggaaggtgatgaatagaaaacagcattcaggacctaatttagatcttttgaatagctagtcactccctttggtttaacaggtgccccggcgaccttccaaaagtatattaattctgctttggaattccttgatatttgcgactcagcttatattaatgatataatcattgataccaatgggttgctcaaggaacatagaaaataagtcttgcaggttttaaagaagttggaggaagcaggcctatagttgaacattaatgatgtgacgagctacgcccgaagtcttgattcgagtgttgcccgaattgcgacgagctggtccactaggaaccaactgccgattgaatctctggtccgggataagccctgtacaggccgattctcgtatgattattgctgacttccggaatgacgagtcaaggttggcaccaacgtcggtccgtgacacatataggaagctcaacagtcactgtatattagttctctggcgaattcttctagtccaatactacttgttagtatcaacgactctagctcgtgacagtgtcataatagcaggccggatttatggttcctgaacgacggtaagcttcatctaattctagcatacaatcatacgcatctgttgcattgaaatcacaggtcactgacaatttaacctagtcctaaccctaccctgcccgatcatccagaatcaccgcacaacaatctccccaacgtcctcatcctcatcttcgtccaaatccctataacccccatcaactctccgctgaatatcggccagaaccccttttctcttcctctccaagaccagtacaagccaccccctaacactcacatacgcgacaagtccaaccccagcaaccaccaagtaccaaaccatcgccgtatgccaccacccagctcctctatccgcagcaccaacccacgcaaatccccaaattccatttacaacaccaagtaggattcccactcggccaagccaccgatgcatgtaagcaaaataactcttcccaccaactcgaaggaaatgcacatgttggaagtatcccagcatcggctggatgagcagtatgattgatataagtataagcccgagaatcggatgcgggtgcatattccgccccgctgagttccagattttgaaacccagaactgccccgagaagtgcaatcccaagagtgactccctgcagaggtgcgtggattttcattaacgggtacccgagcggaacagagagggcaaaagacgggaacaagaaaaagaaagcaagagacatgaggactccatgtgcaattgccatgtcgtatttgctgttgctgtcgtcaccggtttggtcgacaggatgtacagcatcgaaatcagggtccgagaagagatccttcgaagaagaatctgtgcgcgcacgggataaatcaacaataaccctcccaaactcatcatggaacgcaattcgcgcagtgacatcatctgatctcagcctagtctcctcatcttcttcatttatttccttgaaagcccatacccagcgcgtctctgcaccgtcgggatccatgaatcccccataacccttaagacaggtgaaacattcaatctccgccgtgatatcgccagtgacaatatcaattcctgagtgagaaagaagcgctacccgcgcgttgtggttataccgcggtggaacatgccccggggctgctcggggagaaacagtgatattgcttggatcggattgggaagcgtaaacaaggaacatatttgcgttggccatgtgggttccttgcgcgagggctatccattctatcgacttctgggcttggattcgaaagaggagggatgatggatttgatgacgatgggacgctgatgctgaatgtgatgtctgctcgatgtggggggtggaaggatgccgtgcgggcagtggtagagggcactgcagggtgttataatgtgttagttggaattaggaataggaacaatgaggaaatacaaggttcgtacctagggctgatacccagggcaggagcttatggggtttcatgatgttgaagggaaaacggtttgacgagataggatagcctagattaaggttgggttaatgaacaagagtaaatgggcgatgtgctaatttaatgtgcaatggttgatgatatgggaagcaatgaaccggtgatttactctattggactagagcttattccccgcaaaaacttaccacctcctagtggtgctacgtgacatcatcatgcacaattttgtcagaatcccgtgtcatcacaatgccctgtagatacatcctgtactgtgctctactaaacactatcaaagaaccgcagatactcctccctctccacgacccaacgaaagaccgaatcatccctaagaagctccatttcctctttcttcaaggtcacgccgacttcccaagtctcatcactcacccgacaagggttaagtgtacaaacccgctctgggttcatgtacggaatcagctgaaagtgcaatacgctgcccagaacaggaccaaagttctgctcatagatcggcagtcggcggagactagtcaccgagatgtccggttcctcggagatcgacattgcagcggtaaagactgggtgccgcgccatgtgatcacgcacaaatcgatcgtcgaccttgtttaggttggagcgtaatgcacaggcaatttcagcgattaggtaggtgaagctctcaggggttttatttgcctctggaatatataggtccagtttctggtcgagcatgacgaagcagttcccgatgtacctgctagggatcggcggttggaggcgacgccgaacatcgaccattcgctgcacagtaaatgggacaacatttcccgtagaaactgatcggctgcggaaccgggcgaagcacagagagagaatagccgtgacgatatcatcggcggagactggtgggaagacagagtggtacctttcctgcaattgctgcaaggctgcctggcgtaggtcattagcatcgggtgttggcaaatagatcacnccagtcgtgcagggttgcatcatgcagtagctctgccatcccngctctcaacatcaactcgactggcccggtctgcggctgcaggttctgcagaactgatagtagcaaggaatgcgcgggtaatgatttcacggtccatggcagctgcaagatcaggaggaggctggcaggctgcacccgttcgacagcacacagctatcgcttcgacaagaagactaacgccggaaccgtcaatcaccatatggtttgagaagagattgaggataatcccgtctgcaagcacattaatttggaatcgaatgacggggcgatgagcacgctgagctgcaacgtggattggcgccagcacaaggctcgcattacgatcatagtacacctcagttccagtgttggcttgaccagaggcaggcatcaagcatgatgggaggcggagatgtgtcaattgcttcacggtgcagagaggggtacgctgagccagatcgtaattagaagctggacggatccccatggtcccgcatttgccgtctgtgggcatcacgaccccggccaggaatggaatatgctcaactacctgtttgattgcttcctgcaggacagggacaccctgttcggggtcgtggagacgaaagaaaatggcatttcctgcatacagcatgggaagggagtagtcggctgcggtgagctcgaaaggctggaaaggaggaactgcactcatctttaccttgtttggaggacgttttgttcttcgaggactgtaaacttgaagaatgggtcccggactaggtatttatgttataaccgcgcagtagatcgtacccatacctgcacggactatgccgcgtgatgaactagggccctggtatggacggtgaaccccctgtctatctcggctcgcgctgcacttagggccccgtaaatgatccgagatatggaaaataatcctttgttacataaaaccaatgcgactcgtttgtcgtatctgccaacttcttatccccctccacatactcaccctgtagcagctcgcataacaatggccgactataacccgactccgtcctatccgcagccacagaggctgaccggcgctcttagccagttcaaatacatcgaatccacaccagccttgggaagggagtatatggaccttcagctgtcttccattcttgaaaatgatgagatggtgcgagatctggcaatcaccggtagggacttgttcttcatgatgaaatcagaaagatgagcgctaatgtcctatccccaaagcatccgagcgtggcgtcctcctgttcaatgaccagaacattaccccttttgagctgaagcgactcctcgtgaaactggggaaattgacaggcaatccgccagaggctggcctacaccggtctgccttcccgtctcaaatcacagccatttggacatacctgaggtgggaggatcctgacattttcatcatatcgtccgtggtgagtaccttgctggtaggctgggggccttttctcctctgacatatccaaccctctagacccagaaaaagagcttagcagatgccctgccgacaggtggccgaaagtttgcgagctggggatggcacaccgagtaagacataaccaaacccttggaccctcaacaactctgacgtctagctaataattgcacgcaaatggcttcagcgagtcttacgagaaatacccccctgcgtatacagggttcaagatagccaaaagtcctcctaccggcggtgacactctctttgtctcctcttacggtctctacgaacatctctcggagccgtggcagaagttcgcagacgggcttaccgcgacccattcagcaaaagagtttctccgcttcatggaaaagggcatgacccttgatggagaactccagagaggtcacccggaaaatgttggccttgagttccgggcctcgcagtatgcctccccgctcgctcgtatgctagcctcaaatgtgctaaaatgccacttattagtcctgtcgtccgcacaaaccccgttacaggttggaagggtctcttcggagtgggctttggcctcctggatggtcactttgacaatatgaccgaacatgaaagcaacctgttgaaagagtattgtatgtctgattagtttatactaactgttcattcaacccggctgatatgagaacagtcctccgcatgatcaccgatagctctgacctccaaactcgtaagcgttggaacgacaacggtgtcgcaatctgggataagtatgtgccatgaatcccttcttctctgccgctacagtatgatctgacacaagcctagccgcgctgtgcatcacaacccaacatagtaagtctgcctaaatcccattccaaggttgaggtctgtcctatgggaacagttccattaatacgtgcgttagcgacgtcgttgagggagaacgtttgactttccgtattgcaggtattggagagaagccctactacgacccgagttctgcctccagggccgagtttcttcgcaataattcctaatctatgtcgccgaatttgcagtatccatgttaacgaatcaatgcatcagtttcgttaccaagtactaaattgaaatacgcatcttgtttcccaactgtaataatactttcttactcccattgaaagactacgtaggcctctattttgagttcgcaaagccgaagtgggcgggtttactgcattttgcatgcattgtctcaccaccatgcctcaacagtggaccataccaaaaagtatcatatcttagtccactgctacacgtccaatcgtaactcactgactgctgctgctaggaaggaggaagaaaagaatttggggaaatgatatcagccattgcaatcactaactcacagttgttgtcaaattccgaatattcttaacctgttattttctatctccgcgtatacttagcacccctctaagtttcgtggtcaaatcgactacataacgaaattggttttacaccctctaccttcctcatcgcctgactgaaccactgattccacctgtcccttcctttctctaaacttaacaaaaattggttcttttgggtgcgcaacaaaatgatccttccactcgtgcctcgacggaacgggatcacacagctccaactcatactggccaaaaagatgggtgagggtcagacgaagctgaatttgcgcaagactattatatacgtaagtgtgcttgaagtttgcctcgaggggataaactaagagaacacttcttaatgcga

SEQ ID NO: 5796 - DNA, 6549 bp, Emericella nidulans
cagtaagccattaatgccggccggccaaagcatcccccgtcgcacctccgaagtcggtttttgtcaagatggaagcccggaagagagctgccacatatgagaatgattcggcccctccctgaagaaacaggccacatcggtcaatggtggtaataagcctcatcccgatgctgatatgccatggaaagacgatcttgaggtaagtctttggcccttttatgtgggatgaagtctcgcaggggttgcacaaaaattgattgatcattgggcagttcactgactgaaggtttttgtcattcaacagcgattccagaaggacgctatctggcgtcaaatgcaggaatacaaacgtgacaaggtatccctggaagcgaaattaaaggagtcggcgaaggccaccgcctaccacggcgaccatcttcgcgtcattgatgcttggtacaaccaagtaagtagaggcgtattgtttaactgttatatattttacatcaatctaaccaatctcgcagctgattgacgaagtcaaactcctccttggtagtcccgacgaggatagcaagggtaggtttgacgctgctacggctctctatatatcaacaagaccgttaactgtggcatagatcgctcttcattccaaagcgcgctgcagtttgaggatttggataatttcgagcaacatttgaagtctcgttctcatgatatacgcgatatcatatcccgccttgtcgccaagtctccaacaagcccacccgaggtctcggacctgcagtctcagcttgcacgcaaattggctgaagagaaggcaactcttgcggagcttagcaaagtgctatctgaaaagcagcagttagaagaaagcctggaagaggctcccttacgatatatggttgccgagaagaaacttgatcgcgcaagaagcttgactgtcgccaaattagagaagcaatatatactaggcgcccagcgaccaggtggtgatagtgcgtctgggaatcgggatgagccgccagctacaaacggcgccactcccacgggtgaacgtacgccagatactgacgagacatacagcaagttggcagccatttctgaaaagcagaaggagcagatacagaaattggaagctgagaatgcaaatctactaagccaaatcacggagataagtattaaagtgagaaaccttatatcgcctaccctgctgcgatgctaatatatgcgatctagaaaacgaaacttacggacgatgattatgcacatacagatctgtttaagcagttgagatcgcaatacgacgatgtggtgaaacgactaaacaacctagaggcggttaacgtacagcttcgcgaggaggcagcgaaattacggtccgaaagaactgcataccgcaatcaagtcgacgaagaaacacagattgttctggccgagaaagaagcacaattaatgaaaactgaaaacgatttggcacggatacgcaacacacgagatgagcttcttgctgaccagcaaatgcggaaatcggcacaagagcaggagaggacggcgtcgctcaaaatccaggagctagcagacgctgggaaagctcaaatagctgcgttagaatctgaggttgagcggttgcggatagaagttggacgagagaaggcgaaacaagcagacaccaacgacatcacgatcgaggatttgcgcgtcaaatacggcaatctggaacgccagtactcgatgctcaatgcggaactggcatccatgcagactgcttgcaagaaatattcttcactggcatctcaaagagttgccgagttcagcgctatggaagaaaaggtgtctcgcctagcggcggagaagtcaaaggcagaccaaaaatacttcagcgcaatgaaaagcaaggaagcccgagacatggaagttcggacgttgcggatgcagaattccaagagttctgatatagtttcgcaactgaaggaatcggaagcagccacgcggtctttactcgccaacatggaaaagcaggtcagcgagaccaaggaagcattaaacagcatggtaaacaagtaccacgtatcccagcaacaaatcacagagaataatatcgtgatggagggtttgcgagggcagatcgcagagctgaaggcactatcggtttccaaggattcatccctggcgtcgacgtctagtgcttgtcgtcgagctgaaacacaggttgaagggctcaaagcatcacttgcagatacgaagaaaagtctggagaactggaagaacaagagccttgggaactcgtcttccgagtatgagatgctgagggtaagcacaccgtacttgctaattggaagctcacatttgctaactttccgacagactttagctctttgcaccgtttgtcgtcgaaacttcaagaacacagcaatcaagacatgcggacacgtcttttgcagagaatgcgtggaagagcgactaacgtcccgatctcggaagtgcccaaattgcaaccgctcctttggcaataatgattatatgcatatcacgctgtgacctttccctggtcgatttcgcaccctcaccttcatgtatcatagtttcttctgcttctctttcctcgtttcccgatgtttgggtttattacttcttgcgtttacgctgattttaatctatggaaaaggctcatggtgcggtgttttgtctacggtttagcaggataggtactctggggctggcgttttcactcttgttgccttttatcgaactcctggtcttggggctctgtttctcgaacctctctttctttcgatctcgtttcttggatacctacggtgttccgggtatctcaaaccacacaagggttgtgtcggttgtaggactagcaaggagcctttgcatggagtcatgggaatgacgatggcgcaggattacggaagtttgtctttctataccacttgtggttacagcacggcagtcgatttagtcaaaatattatgaattaaatattctgctataaagaagctcatggcgtccaacccataaatctagcgggggcactacctgtcctgcgtcttctatagcagtgtgccaatcccggtctattcgttcagtaatcatgtcctgcaagtctttgctagctagcacactctgcgcctgatatgggcccattactgacgctcgaacagcagcactaagaacagctttggcgtggttcaacatgaacacgtacgctgtttgtcgagcaccattcccatggccaagcacacagcaccccacagcggtgcaaaatggcccttaacccctagctcgtcgtccatacagcatttcaacgcttctgaaaagtccgcgacggccttgatgccgctctgcacccttgagcctctgagttgacagttcccattaccatgcgcatatgtgcttcgaaatgcccgctcccatacacccagcaatgcccgtccctgcgcgatactcgcacgctgcgcaacagggcatggtgttgatgcgtcgagatcgttatccagcgtttcaagctcgattgggttgcggtaggctgtgagcacgtaagggagtgagatacttcccattgaggcaatggaaagtttcaggaagcgttgaaatgaggcaaccggtgttattgtgcgagggagaggcttttggtgagctatgtaggattctaagccgctcgaataggcgaaagagcccaaagggagggcggagtctgataagagtaggagggcatggtatgtttcggaggaagaaattcctggggaaaaataggaattagccgaacccaggacaataattcaaagacaatttggttttgtttagatagagtatctgtgaaaaccataccgttcggtggaggctgcggctgcggctcggagtcgcgcggggcggaaacctgggctaaacgggactttgcctttcgtaaacgcgcttcgagatctagaatctcttgctctatgtcatggatggtaggagtgcctgtcatgtcgcatactaatcataaagaagacgaagaaggggagcattgcgatggggaaaaggttctcgttctgcaattttgctgaagattagccatttcacagtttcatagataagcaactgataagcttcggttcagactgaggggagtcgaacaagaggcggtaagctatggcagaattgactcgaaaagaatctctagaagatgacggaaacaaactacagcaaaaccaacgggatttaaccatgcgagtgcgttgattacgggcacttattgatattgaaatttaattttatattcttatcagtgcattggaacgttatgtcaggcaagcgtctgctcgacgctattcagttcctaaacgtcgccaagtccgtcgcgacaaagcaccttgcggtgcggcaacaacagctcgatatatttaccagaacgtcatctcttacaaaaggcattaagagccaaactgatgggctgattcttacagccaaagcagctgcggcgcttgctaagcgcttcaatgatggttctccatctcaatcttccaccacttccgcccgtccttccgaatcctccccttcaacgcagaaagaccaggatatcgagccgaagataccgtcatcagttaccggtgcaagtacaaataacggaggaggtcaactgaaagccagtccacagcaggaggaattctatcaaccttcgcgggagccggctgcagagccggccgggacgccgcgggtgaaagtgccaaaagcgacaagtgatactcaagttgggttagacgaagatatcaatgcggatgtatatcaactgtttgcgaaggcttcacctgaaagaaatactagcggacacactggggcagatcgactaaatgtgagtgcgcagcaggaggagacttaccggcctgcgccggaccctgctgcagggcgtgccagggctccggatattgttttaccacaagcaacaagtaccacgcagacaatgacgaatcagggtgtcaatgcagacgtataccactcacccgtggatcccaaggccgagttgcaacagcaggaccttccagatgaaatgataagagaattgtttcacagcccaaaagtggctcgatctttatctcagaaagcagcagctgactggagattccgttccatctatgcaaaagaaaaaggagtgaagcaagccgaagaacaaattgttgaaaatgttgagccacgtttagttgaggataccttccttcgacctccaaggtggacgcagagattgttgcagagctcaagaaggacgaagatacctataaaatggttgaatcacgagtcccatcttcccggctaggccgactctggcagtatggtggcctagcaacttctatggctttcggagccgttggtgagagctttcgcagggtaacagggagcgctgaagcggctgctggatcacttatgtttagtgccgggaatatggagcgtcttgtagctaagctatctaaaatgcgtggcgctgctctaaagctaggtcaaatgatcagctttcaaggtatgttttgattctttgcctcttgaattactgcttatgagtttgtagactcaaaaatgctccccgactctattcaacaagttctccaaagagtgcaggatcgcgcagattacatgcccgcgtatcaacgagataaagtcctgacagacaacctggggcccaactggcgtgacctcttttcgtcttttgatgaggtccctatggcagccgcctccattggtcaagtccacggcgctaccctcaaaagtacagggcaggcagtggccgtaaagatccaatatcctggagtcgcagactctattgactcagacctcaacaatctctccatcctcctaacagcgtcgcgcatcctcccccgcgggctttatctcgacaaaacaatcgccaatgcccgcacagaacttgcctgggaatgcgactacacccgcgaagccgaatgcgggaaccgcttccgtgagctcctcaaagatgacccggttttctacgtcccgcaaatcatccccgaggcttccggcagaaacgtccttacaatggagcgcctcaacggcatcgctgtcacaaagatccaaaccttcacccaggcccagcgtgactggatcggaacccagatcctgcgcctgtgtctccgcgaaatcacagagtttaaatacatgcagacagaccctaactggacaaacttcctctacaacgcctccaccaaccgccttgaacttctcgatttcggtgcctcacgagcctacccagactccttcattgacaagtacgtccaagtactctgtgcggcgtcccgtgcagacagggagacatgccacgctctctccatcgacctaggttacctaacaggccgcgagtccagcgctatgatcgacgcccatgtctcctccatcctcaccctcgctgagccgttcatggattcctcacctgacgtctatgacttccgcgaccagacgattacacagcgggtgcgtgatttgatccccgtatatgataggcgaacggcttgcgcctccaccggaagagacgtatagtttgcaccggaggctattcggtgcagtcttggtctg

SEQ ID NO: 5797 - DNA, 7590 bp, Emericella nidulans
gtggtagtatccaactgggtaaatgcttgacgaatgcgaaagttcatggagctctctgtgagaattatgtcattaatgtacagtgtacttaattatgcataaaatttatcaatgctctttatagatgctttaatttcaacgctaatcaacaataaggccggctggcccaattggcaaggcgtctgactacgaatcaggagattgcaggttcgagccctgcgtcggtcatactttttgcattttgcgcccgttttcgctaaatggtggatactggagtttttgtggagcaatggtgtgtggcggagccgctacacccgtcaatagcaacatcactatctaggctttctctgggctgaagggttctggacgtataagttccattccagttgagatacgcgccataatttgctatcttgaggggcaaggctggtacaactactaattgcagctgattcgtgcccctcctgattcagcatacgtttccgcatcctgcctgtgccttgtgtaaatcttggcgctcgatggtcctgcaagaagggcaaagtaagatgggtgcagcgcgcaattgctcttgaaccccttgtcagtgatcagctcattacaaatgcagcacgtggtcggcattgaatagttcattgcctccggtttgccagcaatgaataagacagcagcgcttcatacggcgctactgtttgctcaagctatcatttccgggcagctactttggtacatatagctgtatatggctctggagtatattacacataattctgaattatcaagcacaaccagtttttaggactcttcccatgatgaccaccgaatacagaaaactgcctgtatatagattgcgtaaggtactatgaaggcagcagtcttgcaaagttatagattgcccttgttctacaccttgcatattacttatagtcctcgggatcaggaatgccctcagggccataagaatgctcaaccaaggtttctccaaggtatgactagagattgaagtccttttaccaagaactgattgccgatatcatccgtaggtttattaatattctcaatatcatggaggcggtactcctcagctagcatccttctcaatagttgtaacaatatagtgcattcacacagcgctacatgccttacctaacgagaaacgggatctggtcaagccctttggtgaggttaagctgagagcagcaatgctgtatttatggcccagcactcagagtaaggccaccagtcagtgctctaaatatggccgggaaaattacgacagggctgctgctcgcatttcaatttacatgtatacaccatatttccaggctcagtggctgtagattcatgttcctccaaatggttccgtagacagaagatgaagtagattgcatgttgaaacagtttagtagccactagtgaccggattcacttcgggctcgacatttgaataccacgcagcatataggaaatcgaactccgggttagcagagccgtcgaaaatagtagagctgttgagaacgcaagctttgccattctgaatggcaatgacagtatattcagaacggtaacagataaccagcgttccaacatgccagccgggtttgactttttgactctttgtacgggaggaaaagaccccttttcgcagactagcaagttgtatagttcgatgaccttctgagctgtgcggacaggtcaagctccgcaatatatattgcttgaggatgtcgcggatccggagcttccatttcagattgcggatggaaactactttccccgagacgaattcggatcttcagattgcattgcgaaaaattgcgaccaaggaagaaggtgaaacagacctaagtgatataagtaaatgtgattgatcttgctgaccaaaccatatgcgaatatctggaggctcgcgcctgtctaccggtctctgcgtactatgcattttagatatttagcttgggtacatgtcttcggtcggaagtggtatcgtctgccatccctttttgccctcgccccgtggaacggccacctgaagtccaagccgtccacaaaaagcatcgtgtctagcgactcgttcgatagtctggagagaaccttctccattttcgtcaaatacaacgatagtgtcctgcacaatttccccgggaatctcgtccagtcgggcattgaaccaaggcaagccgacgaggtggttgccgatggtgtgaatgggagtgtagagcttctcgaagtgacgcgtagtccatagccacgacagagtggtcgcatcgtatgaaacgcgtacaaaaggattcatgtatataccagtctcggcctgaggttcgtcatcttcactactggtatgcagtggtttctgaatatcagcgtggatcagacagcattcggacccatcccagaaaagatcttcatctcgtagggcgcggaagcgagcgggggtaacctcccctgctatatcgaaaatcggcccggtgctgttttgaaagaactgagcatcgaacgctgccattcctccccaacagctgcggacaggtaccgcgtctttcccagcaaggacgtctctccgacttcggccgttgccagaggttgagaaccatggaaagaaaggcaggcccatgctatagccttccaagtcacgcgtggcatatgtatcgtagaatttgaaaggattaataaaatccacagcgcaagccgcacggtactgcgctaccccattgtcatcaacgttggtagaaaacaagagctgcagcgcgtcgactggatcaaaagctatgtcattcaagtatagaagtttgtcaaaccgagtggtagactggtcgagtggtcgaagagcgcggttgcgagtctcggccaagtaggtaatccgcttgacgcgcttttctccgcccggaatagtaacttttaaaagctcatcgagatccaagtgctcatacactatagacttattgcattcgactcgcgcgtctagctccttcagagccgattccccttcctctccgctgtcattttcgtagatgctcaggaaaacattgtcacctccaaggaggtcgatgagttcaaggacgctggacgcccagtgaccccgtgcaaggctcccatccgggtcgagcaggctagctgcaatgaagaccgtctcattgcgcggattcccccgcccaggatggcttgacttcgatacctggtcgcggagtgatatgtagtgagacggaggtcgtgtatatgagggaaagaatgtggaaaagagaagtccaaggaccagaacggccgatagagcgacaacgacatagtatgccagccggaatagaacgcgacggtaggcgcgagactgagtgaaagctggggctaaaggcctatagccgcggccgtacctaaccgaccttaccaaaagatacaaccgctgcaagacccgttcgagcagggactgctccttttcggcctcgtagagattgtagctaccctgggattccagagagaaccgccgatcagggctatagctgggagggtgggcagacatgatggcggaagatcatccgtcgatggtatactattcttgtcatctggagcaaggatggcgaaaaatgtataccggcagtcagaagcgatccattgcaatgagcgatgttgagaattgaacccagaagagaccgagctccgcagttcttggtgttctctgcgcagtgagagccagacgttccagatcagatttggttagtgcacccgtttgccgatatctgccattataggactagcgccttggctgcgatatcaagctcatatggaacgctcagctgcaatagcatcagagacacggcgccgcattgtcgattgctcatgagggtacattggtccagtctcacagctgctgatcagtcttgtggaggtaggaacagggtaaattgggggcgaaaataccctgtaaggcaaaggatgactaggtacttgattagctgggacaggcttacgaataccacgccgtacggcctcgataccgtacctcaacaatacgttgacataggcttacccagtaaacgagttaccaggctgtacacaacctccttttactgtaccatgaagccgaaataacagcaagatgcaaggcatcgttgccctagctgtcagtcttactctaggagccatgccttgtttgacctccttgaagacgaagaggtcctttccaccagcacccttgtctactgcaacaggtatgagaagtaagtttagccgggcaccagagaagaataattcctttttcggattcgactgacagcgtctgctatacagctgaaaggctccagcgaaccctccgcatttaccgactaccagacagcccttcgcaacatcgacacctcgcaatccatgctaaccagaccggattctctgttggcgacgactgtgtcgtctacgccagtgacggctcggtgagcagaaactagcggccagaagatctatggcatcgcaatgaccatcctagacaactgcagccaccataaggagagctatgcacaacaacagtggcgagtgccatgttatgatccactatcgcgtttcgagaaattcctatgctatatagtagctcactgtagctggtctgtataaaataaccgcagtaacttgtactaagattactttagggcacaatgatacagtacgtcacaattactcgccctgtgcaagacatgagtgaacaactagctgaagctcctagctagcagctccgtaatttgaatcttttaatcatatattatcaagagtagtttgagaagcgtactttatcagctgcatgtaattcataccagttgctgcctggccgacggcgctacttagggcacagccgccttagtgaaatcaaactaacacccgagatcggaggcttacgctatcctagcgaggtaaatcgcatccttgaccctgatgtatagaagtctgcaggtcccgaaattgatactagactctcaaagtagattgggcatccgaacgtggaaatccagtagaggtagtgagaggattgtttaatgtaagcctaccattcctcgtaatgagcctcgtcgttaaaagtaccaacaggggattgtagttttgcgatgttatttcttacgtctaccagttattcttatttcggaagtctatgcctcaaacagcttaggtactgctactgcagctacttctttttgcggaatgttacgtatcctcaagcatcctcatcatggactgattcttgttaaaccagtcccagagctcagcacccggtaaatcatctgtaggcccacgtccccgaacagccccatgcgctcggcagtgtgtttgacaaatttccaacggcttggtgggtacccaacgggagacagattcacaagaagacaagatgcagcgtgttcaagcagccgcgaaactcgcctttgcacatgactttatccagaacctgccgcaaggatacctcacgcggatcggagaacgaggcagcctgctctcgggcggccagaaacagcggattgccgtggcccgcagtatgatctcggagcccaaggttttactccttgacgaagcgactagtgcgctcgacccgcatgccgaaggaattgttcagcaggctctcgacagcgcctcagcgaaccggacgaccgttatcattgcgcacaaactcgcgaccatgcgcaatgcggataagattgtggtcatgtccgagggcaaaatcgcgaaacagggacagcatgaggagttggtagttagagcggcgtctatgcctcgcttgttaaagctcaagacctcacgccggctaatgtcgaaggaaatggcaacttgggagagacaagcacgtccgacgaggattcggaggagggaaacattcaatctctgctcaggccgtggacaacaaatgcgcaggcgcagcagctggcggcactaaaggaccaagaagacgacaagttatatgaagagacgggaatcattcataatatatggaaactcctgacagggacacccggactatggctttggttcgtcgtcacaacagccacatatatcgcaggaggtgagttttcaacagagaaaggctttcatagttagccctaatttctcgcacttgctcacctgtgctatcgcagctgccgtcaaccccaggcaaattcttttgttaggcaatatcctgagtgtcttcgattctcccaacttcattgctcgtggtaatttcattgtgctgatgttcttcgtcatgtcgattggcattctcgttatatactttgtggtgggctggtctacgaatactatcgcgcaggtaagagctgaacttcatgtaacttgaggcggttgatgtccaagttccgttttgatcacattggcaaagctgacccaagcgcaccattttagaccctcagcagaaagctgcgtcgagtgatcttcctgtcctttctccgtcaggacctccattttttcgatcaacctgagaacactgtcggcgcactgatcagcagactcgactcttacccgcaggctatactagaactgatggggttcactgtggccatcatcctcatgtcggcaatcaacattgtcgcatcgagcgttctcgtgatcgccgtgtcctggaaactaggtttagttggtgtctttgctgggttgccacctatgatggtaggaggcctcgcgcgtgccagaattgaggcgaaaatggacgaggaggtagggcagaggatgtcggcaagtgcatcggtggcttcagagacagccctggccatccgtactatgtcatcgcttgtactcgaaaacacggcattaaagatgtatgttcacgagcttgatatggcaatctcgcagacgagccgggccatgttccacatgatgtgattctcgctcacgcaatccgtcgagtattttgtgctagcgctaggtttttggttagttttgcctcctatattaaggggcgtcatgttgatcgattcccacgaacagatggggatcaaagctgatcaatgacggcgaaatcagcttgtatcaatttatcgtttcattcatggtcgtttacttctccggtcaagacaccgcgctggccttcagttcgccagcagtgagtatggccaagcgcgttctggcctatagggatcattggcaggttgggtcacctggattcaccaagggaaaccaagctgccaactactacttctggcttgacatgatcgacgggacagtccgtggaactgacgacaaccgcaacgagggccctaaggacggatgccgctctattgacttcgaagacgtgcgctctgctctgatttttcggattgaaccatgtccggcccactaacactacataatccagatccgacgcggcgcctttatagccctcgttggcgcattgggctgcggaaaaagtaccatgattttcgcttctcgagcgcttctacgacccgacaagcggctccatagatataaacacgtcaacgccgctgccaaccctaaacccgcctatcgcagacaattatcactagtgcaacaggaaccaactctctttttgggtactatccgcgagaacattttgcagggcataccagacttcggcctcaacgcatcaagaacagaaactggatcaaactccgactg

SEQ ID NO: 5798 - DNA, 6660 bp, Emericella nidulans
ccatacacacaaaaagccccagctgtgcctcccatattcatcgccacattgaaccatgcagtaagcgtgccacgtatctcgcttgggcgatctcagcaattgacattggcccgatgacagtcagggctcctatgcccaaccctgagatgatgcgtgaaacataaagcccactcagagtgggcgaactggttgcaactacctgaccaagaatccagatggcagcgtacagtcgaaagctccaacggcggccgagaatatcattgaggaaaaaggaggctcctccaccgacccctgcgccgacccagacaatagatacaaagttccgattcgcaagggcgctgttacccgaatcaaagtcaaattgctcttggaagcctggtagtgagggtatagaagaagcagaagcttggtcccatgctattcatactgtgagtaccagaggatagagcttctagcgttcgttgacttacccagaggcacggcggacatggcatatagtatgcatgagaagagtaatgtccgattgaagatcatctcacgaggtgcatttcttacggcgcccacatggtgggctagggatgagccctggaagaattttctgactgccatgctcaactgcgatggaattctgtctagcaatggtattatgggttgttattgggtaagtcatcgtagtttatatgtactccaactcgcaccggaagaatacgaaggtagtctctcattggctttgtttgtactatcttatcatcctggcaaatgcggagtaaaacgagattgaacaacaagaggataatgtgactttcctaccatgtcttgaacggcatatgactgtagtaaatggcaatgataagctgtctggttgcataccgatgcaaatatagagttcagccatggctttctgtgatacaacctcgtttatgcccatgtaggtgattcagagtatgacagccctctatatacaggacccgtatgctgttctgcctacttctgctcttaaacaatatctggtagttctgggaatacaaaatcgtcaaaaaatccattcagcagccggtcaacacctgtggaaatcccggcttcctgggagatcccagtcatccaatccaataagtatgatgggaagatcgtatcgtgcctcgctgtcgtttgtacggcggtcgctcctgttgccgtctgaagtgcgtttccttcctgccaacttgtcatgatggtcattgtgttgtttgacagtatctcaaaaacatctctataaggtgccgcatccttccactgctctgcaatcgcgacaaggaccattatgcagtcggtgcatgtactactcacgcgatctggccgtatgacctccctcgcagtgggtgatatccaaaggcagtataagtatgtcaaaccagcaatgaaaagttcgtgcagagcgctccatgtatatgtcgttggcgtgccgataaattgtcgccgaaaacaacggcagctactttcggcggcttgaatgcactccaagatgatgtcaaaaggcgcggggaccttaacattcgtaatttgtaagcggtatagctgcaagagggtatagttgtagctacattggtaccagtctggcgttgtaaagaatgacagagccccgacggccggtggggtgattggcgtcgatggaatagaggtgttccaggtttttaggacttcgcggagattttctatctgcttactgcgggtctcagtgtctgaggcactcgtgaggtctgcgtagagcgccgtctgaatacgaccctgaagagcacggatggaaaatccaggattagcgtaggttaggagaccggtaggtctggggtttcgtgacccatctgcatcatattcgacatccaatggaaactgtaaggtggtattagttcggtgcatattgtacgactgtggaatcaaagacagggcctacttctgcatcaatctcgttatagttcagactcaggggacgtccaagcatgactgcagccgcacactccatagtgtaagcgctccagaaagttcgtttttgcatttcaacctgagctgggctgacattcaacccgagacgtctgtggttgcgatggtagccaaggttgatgcattggcgaagggcctgccctgctagtttcctacatagagtcagtcaataagcaatatcaattacagcttggagattaccaatgggatgtgcctttcgaagaacggagagagtaggttgcactgcagagaattgcttggatgcactccaggttatcatagcacaggatatcatcgatatagagcaaggcggacgcgtacaactgctccggagagtatccagagtttggcagtaacagtgcaccaacagcgtaagcctaatcaatgccatcagcacgcttcccaacatatcgtaggtctactagccttcataccatatttaagaagtaaagaggcactcgaccggaatcagtcaatatggcagcgtgtgtgggattatacaatctcgtctcccattgacggaatgttggttcatgtaagaatgggtactgagtgtggatattgccaaagtatgcatcactaagctgaacagctatctggtacgggggtaaagggcatggttgcggcggcaagtcactatactcgccacttacacggggaggcattgaggtaatagcctgtcgaatgacaggttcaacgaagcgggcaaaggcaaaggcagacgacgagcctaggtaatgaggctctgctccagctgcattgagactcaatgtcccaatcatagatgacaagtcgctgagctcattgtcctgaacggcagttctatcgttgctggggggtgttgcatgcatcccgcggataacgccttccagcgtggcgacacgttgctccagggtttcgaggtagtttctcggatgatgccgcttcgttgccggatcctctacaaggcattctagccatgaatgttacctttatgtcagaaccgaaagagttttggggtagcacacctgtgttatatcggcggcaattggtacagattggcacttgtgcatcgcactatggctcaatatcagtgtcgtgtcttctacgcatatagaatgtaacatactcgcagtttcttatctttgcagccgaggcaagcaactgtcgttctactcccagtacgtacgcgctgcaacgcacctctagctggccgaggtttgatgggatctggcatgttggtcagggatggcgatggagaggtggagttggggtaattgcaagttggagatctgtcttatggagaggagctaactaaaactactttactcttgtcaatcaccggaacaatacgaagggccaatcaacaggtctttgcagcacgtcttcctcggcagttcccgatccacgttattatctacccggtggagacactgaggtcatggcaaatataatgcgctttctttctgctttttagcatgcgtttgacattcagtgaacactgatgaatatggcgtctcatatgtccagcaaggccgcaccaattgtggttgtcggtgccggcgtcttcggactgagcacagctatccacctcgcacaacgcggttataccaatatcaaagttcttgataaacaggcttatcacgaaacactgtactcgtatgataacggttgcgacgctgcctcggcaggtaggtcttcaatatcaaaacatggttgtgtacccaagctaaccctgactggagacaataccaaaatcatccgagctgcctacggctcccaaatcgagtaccaaagcctcgcccttggtgccatctctcgatggagagaatggaacaatgagatcaggtcgggcaaaatagtcccgcccggattcaccaccgaagacgtcctgttcgtaaacaacggcaacctgactcttacatctagcgagactctccctgagttcgagaaacagacaatcaagaacatgaccgaggcgggactggcgaatacccagatcgtccttacagatcctagcgatgtcgagcgggcaaccgccaacggctttgattttgctatcaacccgctgaaccggaagcaaaatttcggcttgctcgatacccaaggcggattcgtctatgccgataaggcctgtcgctttgccctccagaaggcacaaagcctcggagtgcggtttgttcttgggggtaccgagggcactctgtcgaagcttctgtacgacgccacgtcccgggtcattggcgttcaaaccatagacggcgagtcacatctggctgaactgacgatcatggcttgtggaggttggacaccgtctcttgtgcccaaacttgacggtttatgcgagacaactgccggtagtgtttgcatgttccagctgccacggaactcgtctcagtgggatcgttttgcacccgagcgcttccctacgtggacatacgatattcgaagtgggaagaatggcggcctctatggcttcgctcgagacagcaatggcatcgtgaaaattggataccggggagcgaaattcaccaatccccagacacagccagacggtgcagcgaggagcgttccgatcactcgatggactccccaatcaactcgccaactgccgttgtcagcggcgcaagttattcgaaaatttgttcaggagaacttgcccgacttgatagcctgtcccacaaagtctcgtctatgctggtacactgactcatttgacaatcatttcgtcattgactttgtccctgactccccgggactgatgggtgcgactggagggagtgggcacggatacaagttcctgccaaatctttgttcgcatgtggtggaccgaattgagggcaaatcgagtccgtacctctcgctatggcagtggagacatctgaaaccaggtgttgcaccatacaacaagatcatggagggtgttgccagccaacagacacttcagaaccagccactaacggatgaggataggcttactgggaccgcttgtcatttataaaggggtaaatgcagtcaatcgacggtggtgacacattcatacagtgtaggttttcaaggcttacatcaacactgcaaagctaaaaaaaaaaaaagaaagaaagaaagaaagaaagaaaagaaaagaaaagaaaagaaaaagaggaagaggaggagggaggaagaaggaaaaaagatcaaggaaaggaacggaaaggatgtagcagacattcaaggtttactgtttttatcgcactcgtcccgagaattgtaggaggctcattgtagtcaaggtcactactaccatgagccgtcccaaaaaaagtcattaaaagcattgggtataagcatctggaggctctgtccttgtcctgtacgccggcgattcaaaatctcaaacccagcgcatgttggccactgctcatctgcagcttcattaccccgagtcacctgctagaaatttgagctagaagttgaagatatgggcctcgaagctttaactggactctttcgcgaaaaggaacaattcagagtgctcctcggaaaaagaatctcattcctctcctcgacactgcgcatcacaacggctgctggtcttcggctgctggttcattcagtactagagacattgcattaggattccagcggatcaaccgcaccaaagctcaattactggcctccccgtccctcttaagtagcactatagaattgccgacagtaaagcgtttgataatgcgcgcgggaagctttgcttctccagagactgtagactattcttagttttgaggagaactcaaataggtttgacaaacaagcaaagtgcacaggccgctgacgacggacaaacggaacgcattcagatccaaagcatacttgctgttgacgtatctgaggaaacagaacgattcagtcgaagatctgttacatgctgacttgagcgggaccattgctggtcgaagccgtgctggattcaaatacccgcacatttcctcactatccgttctgaaatcaactactatgaattgtgaaaagagataaccacgacaacgggcaagaatgatgacgcggctgcaatctgagttgcaacaaatgagatggtttccttggaccaggcaggggtggaaaccggcagcgcggagcaggttagagtcaagatatagacataaattttgtcgagcagcgagcaaactgagtaagagaagccatatgcgccgcattcgatgataagcggcaacaattaccctattatgcgtgatcacgacgagcgccgcaccctgcctctacagctcacccacacccctcccactcacctttctcaccaaggcgggagattcagggcggccctactcacccactagagcaacaattgaattgacattaacatcgtagctgttcattcggtagatcgaaagaacccaaacaaagcccctgtctggtccccgtgaggctctggcatcggcatgggtccacatcttccaccaaggttcctgctccccagccgatcgcctcgatcgtcgatcgtagctaagtttcggctttgtgcttccccaggtctaggtaaggaccttgtgagttggcgtcatgcttaaaccaacaacaagcgccagtaaacaatttatgttcaaagaagtacacagccgcctgacaactgggcggacagcggtatcgaagtatgactgaagtgagccgaggcttactgcggcttgggccctcacaataaattaggga

SEQ ID NO: 5799 - DNA, 6469 bp, Emericella nidulans
  unsure (1)..(6469): unsure at all n locations
aggcattcgcatccttgcttgcttttgtagtgattatgatcggtaggccatgaaccatacccatcgaagggtcatatggtcgtttgttctatcctgccatattttaccgaacttccatctatatacattataaaaggccacaacatttctcatctaactaggccacgagtctaagatcatcctagtttattatcattcaaccgtcctccactatcaaatcatcatcaccacctagcagaacgcttcagccgccttgccaactcgacagtaaacaacaccgacacgttcgtctgcacggtcacgatttcagcccggatgtgattacttgtgcttagttggccgccaatttcagtttgccagttctgtacgtcccactcgaaacccgaggttgtgatccttgccgggccagagacaggaatgataccaacattctcctctagcagatgcttcccgtgctcttcgtctggcgttggtataggaggcgattggtatcggtcagtggaacggggccgatttgtcctaggcacgtggattgtgttctgacctggttggagaacgaacgatatactttcctcggatatcagataaagatctccgtttgtttcggcttgattctgattcatcatgtacagatgatggacctgcgagaacgcctggtccactcggccgccaagaccgccaaggatcagaatcgatagtttgtcatttgaagataacccggctgaagagaggatgtcactctcatgtttacgtatataccgcaagctcttggtgaaatcggttgtgtactgatcgccatcttggacgatattcacgcctaggtttgagtagtgggtgcggacttcggaacgcgccgaatccatgtcaccgactattgttgttgggagctaaagcttgttagtcgttcctttgatcagagtgggttggaatatatacgcaggtggaacaagcagcgtacatcatcattctccctgcccttggactttgtccactcgaagaaccggtttgcaccaccgtctgcgcagacagttatgagcgctatcataccattagcctggctagtttgcgatgcgtcccgtaatgtttgatagtgcactataggctcgggacatgctgacagggataagcgccgggacataccatgtttccacaagacagcaagagcggtctcatttatcggctggttcagtaccagaaggacaaatggttgtcgtggcgtgtcatcctcgcggaagaactgcgttgggtcccattccatagtgatatcggggttgtttctgctaggctgttagtccagtcaatagccttgtttttctgattaccatacctggtttccagactacgggcccaagtatgacgcctgttcagatgtaaaggcgccaacaatgttaggaacaggtcgatatagaggactagatcagtctaagaatgttaaaataaaaaagcaattcccatttgggcaggtgggtgtgcttcagctgctgagtcagcgggtatgaattccatccactcgttcatggtcaggttacaggtcaagtgattcatcggaaaactcggatgatggccccaccaaatcttggcaacccgactagtcaactgagcctttaaatacagtagttaattaccgaatttcattttcaattcgtctcctttattatttcttcgtactcccaacgtacaaaccactttcaaagtacttcccaatcagttctagagtgattttataatggatgacaacatagatccagttgattgggaagaagatattaatgatattctatcagatacgtttgaagaggaggtaagagaggatgtattggaggtaaaatataactgtatagctcttaagtactgcataactaaatatatatcttaggaccaaccaacaactttgacagaccttaccgatgcaaagttacaccctttacagacgctctatattgaatatatagatgaccttcctgagtatccaaagactcatatcaatggtcatacgtatatcattgcagcagataaaatgtcacaatcagaggcggagtaacaagttcaagacgtaagtacttcagaactgttccgtaaccgcttaagaactgtttgttaattgcttgaagattcagtattctcgttcaagcctccatgggctaagacatatcaattccagtttcttgaactgtaaggttaagaaatggagttggaaatatttgggagcttttgtctgtaaatatatcaagccaagtcttcgacttctttattatacataccttgatgaaaaagcatggcaagaaatccaaacaattcggaaagatattgaccttgttgaaaataatatttggaagaggaatgtattcaggtaagtactttggaactacctggaaactaaatgccaattacttacaaggaattgcttctattcagtctttattgcttgaagaagagattcttcaacagtggcaaagcttgtatcgaaaacctttcaagctgtgtgcctgtatttcaaaaatctttctacctggtaagtccttggaaactgcttattaactacctactaacttactaaaaggacatcaataataagcactatctatatattagctgcataaatagtgtaccaggtcctctacagaaatattatcacagctctctgaaaggccatacatcaattgatcttgaattcttagagtggttatttaataagtccattctcccgtcgcaggaggagtgtgctgttattgaaccactaacaacacggcgcaaattctgtggtaagtggttcccaactactttaaaactgcttggcaacattcggcaaaccaattctaaactacttctagactttgaccatgttcaaggccccggcaagctggaacatataaaatgcagtgtaatctttactgcattggtaccagttaatattcaggaaactctctatatcctctttactttacatggaattcatcaacatcctctaccaccaccacacaagccaccggagtagattttgaaagggattgaatcaataattagaaatatgcggaatccaagcctaacccttggtaagttgtctaatactatttgattactgttcgataactagttaccaactactcaatagcaaaattcctacgaagtcctgagtcagaggctttttgtcaacagtataatgcttctacaccagctgaaatacatgcctccctttctaatattgacagaatatctgccattatacagaaataatatttacttacatatcctgaaggccaggatttcaatagtgtggtatacatatctaacataaaccctaccttgaaggtaagattataaatattttataactagttgggagctgctttataacaatatctagcaatatatctagaagaaataccgtgatcctaatggcattataatattatatatctataaggagcagatcatgcttctaaacaagttaaccttatttgaagttgatatgtcctacaaaaggataagacaaaaaaacatgaatgaggtagtttttgcaacctacctacatgagcacgggaaaagtaggtattctatagccagttaataactacttggaagccacttacaaactactctagttattaccttaatatatatgtttataaaccaagaaactatgacaggctactatcttttattcaaaagaatatttactcttgttgagaaagtaacaggtcaacctgtggaatttaattctatctatagaaatagaatatctggaattattattaacatggacacaaaacaatatgctggtaggtcaattattaatcagccacttgggaattacttgataagtagttaacaactagctaggcctggcttgatatcttaaggagattaatccctactattgttccctattatggcaactacagagtattattattttctgccaggtttattttttctggactattactaaggttgttggtaataataataaaggaacaggcgtgtggagttgcatggcaagtctggttaattataaatcagaagaggattatgatcagttatgtaacttacttgcaggtaagtatttcataaatatttggtaggtacttattaataatttatcctagtatataaggacccaaaaattcagaattaggctctctataaaaagaatgtagttattaaagctgggcttaacaaaaactactctaggattccatcatctttatataattctatacaaaatcatactaattcagcagagcagtcacactataaagcaaatactagtagtaaacagcttttattaattaaggctgttcagaagtaagttattagcttactaactacttcctaactacttcctaattataaactaactacttgtattaatatagctctgcaaagcttgacaagcaagatattatttagtatcaaaactataactactttggagttcattacttgtataggacagcaaatatagaagctaattacctatactatttagctcataaaggtaggtatcttctctatcaatatattatattagcaattaactattctagaatcttgaaaatgccgtcggtcatcatcagcacatttatcttcacaatctggttgtatatcatgatcataaccaaggttaatctggtgtgtggataatatctctgccaatacttagtaattacttagtatctacttactaaccaccttataaatagttaggtcatcttctttagaaagccttataagacccttagaggatatattattttttaaggaacagcagcaggccttagagctggagcaaattaagataaagctgaaaaaagaacaggaagaaatttaggttttgcagcttcaaaataaggagaaggaattagagcttatagaaagatggaagaaactgcaggaaattgattcataactagctgtaaactaactagtaacttattagagaacttctaataattcaagctctataatgcctgacagaacttctagttactatgaagatatgtcttattctttgtctttgtccttgtcctcctctagattattctcaaaataatagaagtacttacaggtattctgatccttgcagcagtccttagcagatggatatttattacagggtataatatagcccagctctttgatcttcttgcgcatgttagaaatataaacctaagtagttagtaagcagctataaagtagctaacaggtaattaatcttactgttccatccttctttcggggcagggaaggtagggccgcggacaggtctgacttagactgggcttgtagattgctgataatttgctgctgaacagcttcatgtttatctttaatagcaactggctggtgtgcatcttgctcggagaagaggcccttgtactattctaagtagttagaaagcagttaccaagtagttagagatcctcatgtatgcccagattaattatcttgtaagcattgcgaccccctttgctctcctctaatttacagtcatgctgatcgcggagatgggttcggagattattagtggtagagaatggcgactaagtagttgtaaaatagttaatgaacagttgacaagcagctagaaaatagttgaatacccacatgattcttcacacaatcttcgtagcgacagaagacttcaccatagtatatgacaacattctgattcgcatcctttgacgcagtaaggacttagcaagtagttaattgataatgtagtgataatgaagcctcacaaattccaaagtaggcaagtcaagcttgccacttttcacttcttctttatatcttttgaactatttgttctgtccaatcaaagacattataggaacctttttccagtcaaaaatgattgaaaactagttgcaggcctgatgatcgcagcttcaatgtgtacggtaagcagatgaaattctgaattgacgggtaaatgacactgtgggtcagatgacccttaatttggtcacgtgcagcttagcgagacacccgacatattttacccgccgcctcacctgtgtactcaaccgctaggcccacacttcggccgtcgacccatagaggttgtatggagtcttggtaggggtgcttgttcccgtttgacgggctaggcaaactacccacttcagacctggtttggtctagccactatttggctaatgcaagctcgacctacaggatgacgcacttgctaatctggatcttgccttccgtaggcggattggttaccaagccaagtagatgcctggggcagagctaaccaagcagggacaagtaactgctgcaggggaattagggtagtgtaaggcgcttgggaaaatcttcatacaaaccagcgtcggaagccctaaggcagctacaggcaaacgcctagttgatagaacaagcacgtccttttncgatgagatacgaggagagaggtaagtcaaaggagaatgaatcacttggaagctagggagtttaggat

SEQ ID NO: 5800 - DNA, 4825 bp, Emericella nidulans
gaaaccaaaaaggtggtttatcggatataggccattttaaaaaacggaaagaacgggctgaagttcggttgggttcagtataaccggaaacccaggtcaaataacagggaaacgtagcgggttcaaaccagataaccatttgttaggcggcgaccatgtgtttaaatgtacccggcccgaccggttcggggcggagccaaggtttaaatcgagcatgcaaaagacactctaaacggaatttgaaaaagatcgattgtatctaagggggcgcaactggactggtgctgaggagatggcaataggacgcggtaacggatcatcatgtgttgttcttaacttggctgacagaatgacatccagatactatcctaacgcataatgggtccccgtaagacagatgtttgcattccatgtccaagatgagagaagaggacaggccgatctggatccaggctgtagtctggcgtgaaggcgacgcctggataattgcggtcattgtggctttctgccttggcgccattagctgattgaagagtggacatgcatgtctccaatgtcctagagccaaaatactggagaagtcttggtatatgcgcgcagtgaggtattagaacgctggctatatattgcagccttagtgttgattaatcggtctcgtaagaggtcagggttcaaggaattcgaagaccctctatgagaattcagcaaacaggccaaggatagttaagtatgcctctggctcgctagctcgccgagatcagaatctggccctttaagtggctttgagaggctagctgagcaggcagggatggctactccaaactcttaaatctgagacaattagcagcaacaacaaaagaaaatcctagcagccatactctggagacgcacaatatattgaaatcaattcagttgcaagatattcagtagcagatatcataagatcacgtcagactgcattgcctcttcaaactctagtactgcccaaaacaaaaaggaccacaacatccaaccctaacccatgtccactcaagttaatccaatcaccacgtgtatcagccgaagtatggagcagtccaagaacctccgtcatgctatatttgcgtctcagattaccccggagtatttcactcttcgcgatcaagccgtcccaccgtctcagaatcagcactggttctttccatgaagcgcccttataaacgtcccatctctccaagcatcgctaaaccgctcgtaaaaattctccttcacatctgtaacaaatagccaagccgcccgggtccgcaagtcccgcactagctgaggcagctcatccaccggcaccccgctaatcatgtacccggcgcgatcccggtcgacggggtgagctgccagccagttctggacctcgtctgagcggaagcgagcgtatgactcttcgcaaacaaaggtcacctcggcaggctgggcgagacggacgtcggggggtgtgcctgggttgtgagcgatctacgtgaaccgagtcagtgggcttggcttcagccgtggcggcggcaatgaaggttccagaaaataataaaaatatgatacagaacagaatgaaaggtgggccacgtacaagcttctcgtccagaatccccggacactcttttacgaaactcgtaatcgatctgagatactcttctttctctcgcgaataatggttcggcgtctcgtccacaaagatcccgcgcacgccgagccccgttgtctcatagtgctccgaccaggacgcataccgcgcaatctcggctagtgcttcttgcaggggtttccggcagtagtcgacccggatgtagccgattgtgaggacattgcggtaggcattcagccgtggcacttgttggctgtagctggcatcgggggaggggtgttcagggagcccagggccgctgttggggttcacgatgaccaggaaggtgagagtgggattcgtttcaattctggaggatatcagtggacgaaatgctgttgggactttttctttctttctttcttttttttttctttttttcctttttctttttctattttttttttctgggttgaggacggtttcggctagggtggtgcgtacgctgcataaagaggagcccaggactcggcggacaggggataaatgtagaggggtaccacgaccgccgattttaccgccgatttttgtgcttgcatctttgacaagaggttgaaaggccaatgaggaacgggtaaactctccgtggcagatctgagtgtgatggatggagggagcattgtgccacgacgccgcagaccatttataagccgacgtgtatcacgacagccgcagcaggatacaggactacatcactactactgtcttttctgtagcgctgacaccaggaataaccgaaaatgagtccatctcgaacgcatagtgagatcaggtactacaggggaaacctggccaataaatcaaccacgattcaccaatgattcacctaatgatccccctctaacacagtctgaaccttagtgcacgccacgcggcgccagtaccattgccagcgccagcgcaatccccactggggtgggttgatgatccatcaagtcggcacggcgtcacaaaactcctcgagtctcgtatcaaaatgctcgtagtactcggttgaccgtgtagttgcatacaagtacgccgcctgacggctgatctcgcgcacaaagctgtccatattgctgttacccatctgcgggacggagtggaagatatacgcccaagagtcgcggtccgcggagtcggcgaccgcgctcagccgggactcttggctggtcttgtagtggtcgtaggactgctcaaagacgacggtgatcgaggtcgtgttgaggactagctggctgtcggggagggtgcccggattgtgaatgatctgtcgcattgaggcagcgttagcgactgggccaagcgaattgttgcagggaaaaaatctgggaactgttccaggttgagactggcgaactgggccatcggcatgcatgggccaatgtccagtcaggcaattgacggcggcgagcaaaggaaagatcgcatcgctccactccactgaggcgccgagatggagactggagacagatggatcggcatcgtcgaccaggccgagacctaagagacccataacgccatgccacgggtcaaattggcgatgccatcaccataggtatgccccattttccacgcttgggctcttcaaatagaaaccagtcgaaactgtcgaagctgtcgaaactggctaaactgactaaactggaccagagctggaacttggcaatccgactcaccgtcttgtcgcccccaattcccgaggcatttataaccgccgcattgatgcgttccagatattcgaccgtctcagcggcatactggtgcggcgattcgtcgaagaatatcccggtcacggctagatctgcggattgcgacggccacccagaataggttgagatgtcggccagcacctcagagacgttgcgctgggcatagtttgttcgcacgtatccgatcttctggacgttggcataggtattcagctgccggatcgcggtttggtacgcctcgtccggggtggacgactagtcatgtcctgcttgattaataaagaatgcgagatatcagattgaagatggcgagctcgatgtgtaaggataggagaatgattatccatcatgctggcttttgttttgcgtagtggttgtgacttccccctgcgcaccttcctctaaggccaatatagcatccctcactgccgcagacaagttgtggacctggcagagatgctcgaggccgacgttcagcattactccaataacaggttatgataatggtccaacattcaacatattgtttcccaacgagagttggattccacaggctgcaaaggtgcgaccgcatcaggcaagaattcacactgcgaaccatccgaacatgacagatttgcctgattatgctgaagcagatacccacaagcctgagcaggaaactctaagagccgcaggacaaacggatcagatgatgcacaatccaggtacatgcagatggcagcgcactcggacttcgcgcgagtcttcacccaccaaagatcaaccccgttcatgagcgcgagccaccaggcaagaatcattaaagccggggtatctttcgcaaccagacgctcgtagtaatcgggtaagagacggcccatgaatgtggttatgcgggagtacgttctcagagatggctcgagcgtcaacagcggcgtaagcattcgtagcggccagaggtacgggttattctccgttgatgtgaattcgtttattccgcagatattcgcgaggtctggatgaagcccttctcttccgggtcgttcatcttcgaagagatcgttcctggactccatgaatatttcccaccacatgctctttcgcacccagggcaccgcgcgacttagcaaatggcgcaaccccgactggacaaatagccagttcaggcactcgactggattcggcgagaacacgaacgattggcgcgggttgtacgaattcaacgcaaacgagttcacggtcatgagcagacaggccgagaatagcgcgtccatgttatgggggccaatagaagactgcagctcagtgctgtattggcttattgcgcgctgccagtggtgcgattcgaggagggcgtagttgcccttatggtctggaagaacattacggagatgtgcaattgcgacgccaataaggctgtgcataaggtatggcgactgccaggagcatattagcttggctcatttaaagaggtggtatttgcaattacctgcaatgc

SEQ ID NO: 5801 - DNA, 4589 bp, Emericella nidulans
ttcttgatgcggtcaaagtggtttatgaatgcccattgtctgatcctgaaggacccagtatatcgacaaagctggccgccataaaatatgctataatgaaaaccgacactgcttgggcgcagactatctatgagtcttttccgtccgacagcgcctcggaaagcatcgggattcgactcctatggaatgccgcgcaagggaaagatgcgtcacaaattgcaagaaatgttgaatccctggcgtcgaatgaaccagagttgtggcagtcgcttacgatctcttgcgtgaacgacttgatgcaatatgcgaatgcgaccaataatcctactttagcctatgaatgcatgacattagctcctgcatggggacttgtccctgattcgcaaactcagttattacatcttgagtcacgtatccaggccggtgatttggctgaggtgttgaattctattggggatttggagggcctaaataccacagcgcccgaagctcttcctttgatgaacaaacttatcacaatgctctgcacctcgggccaggatgatacggttttcaaccacatctcgtctctccttgatcccctgctagataataacgtgcgcttcgaggcggacacgctcacagcattaacgcacatgcttctctaccgccacgacctggaagctgcctccgagttacttcgccctcgcctagggtcctacgatacagaagaaagacacaagatccgcaccgcattaacaaactttattcaggatcccagccaagagagcgagcccgcatgggaggcatacatgctgctccagctcgcatttccggaaacaggagtaagcatgcgaagcacaatcatgacctctttcttccaacggaaccggagcgatctcgccttcctcgtgttcggtcacatgcgccaggctgaagatttcgcgcagcggcccaaaccagacacttatgcccgctgcttccggggccttgcacaaacacaagactcaaaacacctcgaactggtgcacaatatgctcaagcttgataccgaagtcgacctgaacacgcgtcttttgaactggctcatgctcgcatatgcggaatgtgacatgcctgaaaagagcatgcagattttccgtgagatcctccagtccgaagaaggcccgtcgcaacgtacaatcttcttcttcttcagagcttgcgagaagcaccataacggtacacatgaggctatgaaaatggtggagaaaatgaaacgccttgagattgccttcgaccgccggttatacacagcttatgtggaagccttagctgcgcagtgtgagttcgaccttgccacggaagctctagacgccatgaaggatgtgacggggcattcgccaacttttacatcgtaagtttagctgtctaccctgattctaacagtacccgaaaccttataattttaactaacttgtccattcaagaatcggacacttatacaacgccattccttaccagcattggaaggacgaagtcgagaaatgggccaaggacaggcatcccaatctttgggcgcacgtagagaaaattgagcgtgaggagcatgaagagggcctgaagtttaagctacctaggaagagagacttgtcaaacttggacgggagcatgcgatgatttggccacttattcatgatatatactcatccaaatatacccgctagagcagcgcatgctttcacatataccatcatcatagcaatttcttttgcagtctagatgctccacgttaagcatatataaatgcaccgggactgctgccgaagttaatccatagataagacacctgatactttgcttacggccagaataaacagatatgaacttgtgatgtgagattaaaactataactatcgtggcttttttctatccccaagacaggatagagtaaggtcataaatcgatactcgtgacgctgcaaatgtatatcactgtggaaccgaagatactgtttatggaacagaagtcctgaagtctagacggatttatgctttggactgtgcaagtcttttggtcatgctgtagttcatcttgttagcaacacaaaactcgacaagcagggcggtagccacttacaagttgaagaaagagaattggctggggctgctgccgtattcgtacacgaagcggctcgcaaggtggctgccaaagatggcccgcaggtagttctcaggaacctgcagatttgtcagtctgcttgtcattcggcatccaaaagcacaacatctacttacccgctggagaatcgtgtcgagacctatcttgtccagaagcagcttgggcagagcgtcattgaggacagacctgcggagctcaacattatcccacaactccgtcttttgcagctcttcatcaagctgagtgatggcaacactgagcctatcactgaggacgctgcgagggattccggtctgctcatgctcgcgccatattgcttcgaactccaaggtggcgttctctttgatgacctcttgtacttgcttaacatattccctatagaattcaggaacgctgtcatcatctccaacgcacatgttctgcacaaaaccttggtcgtcaaaagatagtgaggccaagacttccaatgaggaagaggtaacgccacccttattggcggaggcatctttgaaaagaatacatccagctttctcaagtcggagcttgctgtcttgcgtaatgaacaaattggcaccctcgacgatgtacggaatggtggatttgccgttctcaataagcttgccaacatttgaaagatcaattgactcgggcgcccgccgcagggaacaaaagtgtcgtatgttagttccttgcgcagatggaacatgttgcggaataccattccgttatgaaccagctctccgcttggaaggtggacattgctctcatccaccaacacacgataaccattaggtgaaagctttgacacatcaaactcggaaattgtcgcccgcttcttcgcgagccgcacaagttcttcacggttcaggccttgcggatccacgatgacaccggatccgtcaacaattgcagtatacttctcgttggcgaggaggatctcattcgagccaaggtcaccgtcaggtccaccagtttgcagctttcggattgtggaggggtcaattttcagtttgcgatagattccaaggacatattggcgaacagatagagtagtcattccatatgtgtcatgaggaattccaccaagacgagggctcttgccggtgaagaaagacttccaccaaggggcaccgcggttgcgagcgtgctctgtggcccaatcaactaactctgccgtgttctcgtcagggcccataaagaggatctcgtccttgccgtatagatcgacgataggatccttaatgccggggctggctggtggtaacaaaagatctaagatactgtcgatatatttctcgaaagcaacacgagctttgtcttggtgattcacgtcgagaaggatgactccctttgctccaccttccggaatatccttgttcttgcgctgctgtgtattggcgagattgtaattctcatcgaacagtgatcgagcattaatgctatacgcttccttgtttcggctcttcacaatacggatgccacctcgggcaatgtctcggaagcgcagatggaacccccggaattcggagctgatgaccaagaacattccatacagtcgctgaggatactcgtgttccggaaggaaatgtggatcgagtcggaagctgagagccaccttggtcggtgtgaaaaagttagttttgaggatggaggcattgaacacgcggaaggcactcatgaccatttcgtcatgttcattggccgctgtgctcgagaccaattgcttcaactgccgactatcgagcacctggtcaacctggagacgtagataactcagcgtcggaaggaaatcatcctcggtcggaccttgggtctgcacgtaatgagtgtttgcaaagtcaaggtaaagcttgtggatgagatcagggtacttgttgacaatctctgctatataatcagaagtgaatgtctcggtacgcagcctcttcttgatcttcgccaacagctctgcgtgtgtgctgttgttcgagtccaatagatcggttaaagaagtgtattcagagccaagacgattcaagaattgctggacaaacacccatgcgcaatgagcgtaaatggtctcctgtaagctgagacgtccgctcgcaaaatgatgctggaacctgttctgagggatgcaatatagtagagagatttccttgatgatttggtgaactgcggcctcaattggggggaacttggcagcaacctctgcgttcttcagaggacgcaggtaaagagagatgacagtaattccattggagaagttctccaagtacttccgagagcttgtcaggcggtagtagtgatataggtcggaaagtgcactgaacagacccatagcggagcctgacggtaggcgataacaagacgcttttcgcgagatccttcaatctcaaacatctcaatgacgggaccagcccgagcaacagcgttgctgatgatctcttggtaaatggctttggtgttag

SEQ ID NO: 5802 - DNA, 7480 bp, Emericella nidulans
  unsure (1)..(7480): unsure at all n locations
acagtgcctgggcttcaatcgccgaatgaaactggaacgtttgtacaaaatgcaacttggtctcaaacagctgtgtcgcttcctcaataaggtgattgagtctttgcattcaaagtactctccatccgtcttgttccactcttctaactactgcttttgctctgcagaaagaagttcaagatctcggaccggcgtcgctccccccgacgcagccttagcgaacaagacgttcagggcttcggcgatatccactaacgtcttctgtcgaaaaagggaccctgagaagtgtattctaacctgaagtcttccacctccttcgcacaccattactgctagaggcaagccagcaattagaccctcacacttgtttgcatctgcgaagataaccagaatgtcgaataaccccattctgatgagacttaatccagcctcccccggatgcatttcttgcttcctcaattggtttaacttttccatactctgaatctcctgcatcacggtctgtccttgtctgctctcatggcagacaattgagggtgtaatagtgtatgatgtcgctatgttattggggtcgtcacccacatcgatcgacgcagcaacagtatgtgagccaccaccgaaccctttcaacacataatgcactgcaaactggatcacagacctcatactaatatctcgtgcaagacacatttcttccatcgcgacaagtacttctgagggaaaaggaaccgagtactcattgtagtcatccggtccatcactgaacccggttaccgcaagctggtatttcgtcgagtttgttgcaatactgctcagatcacaacgttcagttattttgctgatgccggctttccaaccttcaagccctcctgcaaaacacacttggacaccaacacccgatttgctagggtcaatgttgccattgcctgcatcaacgtcgccattgcccccggcgcttttcccattggactgcttccaattaacctttggcaccgtagggtctgcatagccgccactgtagccagggccgtcttcgctcaatagcccgggagggctcattttgattctcttatttcacggagggcaaaagcctgaggggatatcgcttgagaagtcagttgacggcctagaagtgaggacaccgcgaaaagtccgcccacagtgctaaaccgagctcccctcctagacgaggggtactacagctccgcctggccgattccagtcgaagcactgccaagaggccttcacaagattagggactgacttcgctacccggcaatccagtaccgcagcatcgtaccatcaagccgtgccgtggggacggccaagcgacaccgtcacggcctagcatcagaccatgctaggtactagtgccatagggtacgcaggagatgatgtttcacgtctcctgcagattgtcccaactggctctgcaccgtaatattggccctatattgggggaaagggccaatcgcaaaagggtaacaagcttcgttatgatcatttcccaatattctctcgcttagggctgacgtagtccattcctactcatcaaattgtggtacgagccaagccctctattcctggcggggctattgctgcagtgtcttacgctgattcaatttctgcagggtaatggttttaggcgtcacccgacgaaggccgccatgactatacttgtctacagcccctcgtacttttgcgacgagtgtggtcggctcgatgtccaagccagtcctacccggtcgcttatttgcttggagacttgcgcgcagacgggaaaataaataaaccctgatggaaattcgcagaaacgtctgttcttcgccggcaattcctacccattaacctacacaaaccagtccaagccttggggatccttccgttaccaccgcttcttcatcagtctcaactgcttgccctcattcataatgggttcagtcagcaaagccaatgttccaaagatcgatgtttctcccctgtttggagacgaccaagcagccaaaatgagagtagcccagcaaatcgacgccgcttcgcgtgatactgggtttttctacgccgtcaaccatgggatcaatgtgcagcgactctcgcagaagaccatggagtttcatatgtctatcacacctgagtaaaagtgggaccttgcgattcgtgcctacaacaaagagcaccaggaccaagtccgtgccggatactacctgtccatccccgggaaaaaggcagtcgagtccttctgctaccttaacccgaacttcacgcccgatcatccccgtatccaggccaagactcccactcacgaggtaaacgtgtggccagacgagaccaagcaccctggtttccaagactttgccgagcagtattactgggatgttttcggtctctcttctgcactgctcaagggctacgccttggcattaggcaaagaggagaatttcttcgctcgccacttcaagccagacgatactcttgcctcggttgtgctgatccgctacccttacctggatccctaccccgaggctgctatcaagacggcggccgacggcaccaaactgagttttgagtggcatgaggatgtatccctaatcactgtgctttaccagtccaacgtgcagaacctgcaggtagaaactgctgccgggtatcaagatatcgaggccgacgatactggctacttgatcaactgcggcagttacatggcacatctcacaaacaactactataaagcgcccatccatcgggtgaaatgggttaatgcagagcgccagtccctgccattcttcgtcaacctgggatacgacagcgtgattgatccatttgatccccgagaacccaatggcaagtctgatcgggagccactctcctacggcgactatttgcaaaacgggctggtgagtttgatcaacaagaacggccagacctagaagcgaggggtgtggaactagcagatagcacctgtggacgggagttggatttagcattatccttttagggaattgagaactaagaagaagcgagttcgagaaaattagagaggcgctacaccattttagctagtttaattcttctacattttgttctttccactccactattcgatcgtagcaacggaattgaagcagttcgatcatatacagtgttaagatcaccagagaatacccaaattcctccgcgctatttgttttctaattttctgttactaatgataactgtgagaacgaaacagtaatccctcccaaaagccatcaccatatggcgtggagaactgcgagagggtctctcagaacgagtcattcgagctgcagaattgcacaggcccttttcgctccacccgcagcgccacgaatccggttggcatcggcgcgatgtcacctgcaatggaacggcgataggatcttgatgctcaccagccaatcacaggttctccaagaagcactcgggatccacgggttccgtctcagtagcggctgcgtacacgatcctaacctaaaagaaccacaggccaagcccacatgcatagcatgttgatttccctggcccggcgccggccgaacctttggtctagggctttgtgcgctctgtcgattccgtgtcaaaactggaccaggcagcaggaacatgtctgtattctagatctcatcggtacttgccgccaactcacccaaatcgcgatctcgaatgcacctatctagctagccaccctgttcaatattttctactggacgctccgaagaaaaatgcttcacgtaacatgacaaggtaccccctccgaagtaagtccatacccgaatgtatgtttgcccatatttaacgcctatacttccagatcggctatcaccatggctctgctgccaaaggcgagattgcgatagccattgacttcgcaactgccctcattcatggcaaagcaaaaaagacacagccggagcttgaacagctcctcagggagttggagcaggtgatgaaacagcgctggccgagatactatgaggaaatctgcggtatgtttacctacgttctttacttgctgaatcaccccgttgacggaattttcaggaatcgcaaagggtgcggaacgcgaagtatcggagattgtcatgctcaacactcgtacggaattcgcgtacgggctcgtagaagcccgggacgggtgcaccactgtttactgcaaaacccccaatggagcgctacagggccagaactgggacgtaggttattagatccacggtctgctatctattttccttgctaaccgccattccggcagttcttcaccgcaaccaaagaaaacttgatccagttaacaatttgtcagccgggtctacccactatcaaaatgattacagaagctggtatcattggcaaagtgggtttcaacagtgctggtgtcgctgtcaattacaatgcactacacctacatggcctccgtcccactggcctcccctcgcatctcgcgctgcgcatggccctcgaaagtacatctccgtctgaggcgtatgaaaaaatcgtctcgcaagggggcatggcggctagcgcgttcatcatggtgggcaacgcacacgaggcctacgggctagagttctcgcccatcagcttgtgcaagcaagttgctgacaccaatgggcggatagtgcatacgaaccactgcctcctcaaccatgggccatcggcgcaagagcttaatcccctgccggactcgtggagccgccacgggcggatggaacatctcctctctggttttgacggcacgaaggaggcatttgcgaagttgtgggaggacgaagacaactaccctctctcgatctgccgggcatataaggaagggaaaagtagaggctccactcttttcaacatcgtcttcgatcatgtgggccggaaggcaacagtgcggctgggccggcccaataaccctgatgagacctttgtcatgacctttagcaatctggataccaagtccgcgatccaagccaacatttgaccaatatctctttccaaccgatgccttctgcagtcttctccagccatagcgtactacaccgtgaacacttctatgtatcttgacaactagatacaagtcaaaaggcgaatcaaataaagtcgcatgtttgggagaatgcacgccagagtgaaatgctgaatcctgttggctttcacaaccaggtgcctaaagtatagcaatgcaacgaaggcatgcctagtctagcttctttccctaaacatgctttaaatctaatacgagaattatttaaagcattccagaactactactaacttcctattaccctggagtttcctgtttcggaagggttgacctctcaatccttcctaaccttgtgagtctagagtaagctctgcaatcttgtttaacctacctaggactcacgaagactccctcagtatgaagttgataaaggttctttgtgctccgagcccgcaagggaaatcagtgctgagatatactggctgggctctatatgttgtagagtcaagtgttgacaatttgaatcctcgctaatgtcacggctctgcaagccgggatcccgagttggtaaagcatgcaacagcaagccccattttatctacatattagctacgattatcctaatcattgcttttagaataatctctaaatttggagccagcaggtcacagagctcactctaggcaccccgggcacagtgctcgaaatagcgtcgtgccgttatccagcttcatacattggtgtaaaagaagaatcgagccatttctggccacccatctgataaagttaggcctagctccgtgaagacattccacaaaaatctctccatgaacataattcttctcagtgcttagtttcttgaacatgagctacagaatggttttttgaatatttcaattggctttccaccataatatatgattatagttactaattagactacttctatagcaaagcttatagctgccacaattgttctttagtatacttatatgacaggttagaattagtagcttgccgatcagagcggggtcctgatgtattcgatgttcatttcctgctacctgtcgctggcggaacctccagggtcaataatttaggagtgtttggttactataaaatcttcagatggcttaatatctgtacccgcgtggttttctggcgcccaggtcccattgattctgatcctaggcgtctcgcgggatgctggataagcacggaagtgttatgcaggcagctgtcgaaacacctgaggcagctactggcaagatccctagtcggttcgcgtctatacttgttaaatatggaccgcttgtgaccgctagtcacatatgaacttccttattttggatatcgggatcctacgctccagctcgccaagatatatgcaaaagttcttgctatttccacggttcaaaggttataaatctcttccgaatgccgaattaggccaggttgcgtattgttcgttatatatataaaccgccctattggatcggaagaattagacctccatacgtcggtgcgtttgacagcttccgacgcaaaataatgaccacgagcgttctactgaaatgaaatccttgtaaccattgaacaatcgtactgaggtcagaatctggtcacagcatttgaagtatcccactttgaatgctaacttggtcaccaatataccaccgcctagctcgtcactaacctagaaggataccgcgcgttgcgcgattattagcatggtgctgtaggtctcatcttgcagacctagatttatcgaacagtggcgactgtctagtttccactgtatatcactgcgtgacgttcaagacgcaggtgcaaaggtacctggtgcttcgaacaatacgaaaatgcataccactcctcttccgagtaactttaacttcgttcgaatggactccctatgttcatggagagcaagaaacatcntgnagataatccctgacgcagcaaggctgacgcctaagtaccaagctcttcgatagccccttaagagatctgttctgttttggttgtgatcaaccccgactattgcaccaaacatgagacccaaagaggacgcataattcatgaaggttgcaactaagctggctgagacctgcaatcacaattttagttattttctccgtctcaatgctgaaccatcaaatagcatcaacacgcttagcttcatggccttttgaaagagtttagtagctaatggacttactccttgatgttcttgaggtatcgcgttggaaactagaacattgcatgcgggaaaagacatttccctggttacagtcagtaagtgtggataccagtccgaaatatatcatgaagtaactcacattccgcaaggcattactaatatcgatgcaaacagctgcccctagtagctctgtttgataggcatgatggcataaaaaatgtcgggtgtgcaaactgcagagatcatcatgaccacactggcaggcaaattttgaaagattaatcctgttgtaa

SEQ ID NO: 5803 - DNA, 9588 bp, Emericella nidulans
aaagtagagcacttcgatcattcaaattatcttcttggcttagcctgtcattatccgctgatttgtttatatgtctcccttggcggggcttagggagctgaagcagaacaaacgaggtcggctgtgtggtagcaaaggcccatgacctacttcgatctatggaggtacccaggatagccctatcaatgcaccgaggatgtgattttgtgaatgccaaaattctagtaacttggttgtctgttctggcaagctgcatgaacagaaacgagaattaggatctgcgcgaagcggtccaactctgtggcctgggcctggcagcactgcacgatataatatcagcaagcctgtcaatctaggtaactcggctttgctcctgatcagacgctccggcacactgaagagatggaggacctgaacagacgtggagactgcacggatacaccagctgatcacccagtccaaatatcaaagcgcggaaacgtcgtcgcgaagaccgcaatccgtgactgaatcacgatcaccgcattctactagatgcgaatcaaaggtccttcattgcagccaatctaattgagtgtacggccatcaaagagcttgtggataaactgaaacggaagacaattacaaaggagcgggtgctccaggaaagtacgcgtaaccatttaaaggacgaaaatgctgactccttcggtgaaaagcaatctgagacggccgagtggcgacggcggcgtggagaagacccagtttgcagcgaaatactacagcgcttctagactcggtgtgagcttactgaggagcgccggctggtggcatgggcaggacctcatatcccgaccacgcgcagcggcaactcggcgggagaaaagtcttgtgcgatcagaattgccatgcttgagatgtatagttatggaagagatgctgcataatgtgatgaagacgagccagccctaaatacactgctttgtgctcatagtttcactttgagttgtgaaatgattcactacatgtctcatcgggaatggggacagactagtaaacttcgcatctttgaagttggtggtagagggactgatcaatataagctggtttatactgatataaaaatggtatactttgactaccggcgccaatccagggcctagggcaggccaacgctcgtgaccttgcatccaattggtagagatacaaaaactgccatgagggacggtataccaagacttatttctcctgatacaggttcacgggcttacagtggctaagtgatctttgatgtgcgactctgtagttcactatttcgatcagccgtgtacctgtgggatgggctggcatcacccatatgcttaggtcactaggccgcaactcaggcttgactaagccctaaggacagactctatatcaacatccacaagatatccccactctatatcaggatccttgctgatgtaaagcgtcgccacggttccctccgcaccgaatttgtaaactggtccgttccggggtcggtccgcagcacttttggccgcacactggggtaatatgaatcaatcacgtcttcgagagtttcgtgttcaacgcccgttgcaatggaacaccacacggaggagttatggatgcccagtacgactataaacacagctccattcacgttcatgtatggcactccggctgcccagccggagctgcgtatgagaaggcgccatgatggctgccggtgatggttcatctccaatctcaaccctattccttggtcaatgaccagccaacggtcgtccagccgcaaggtctgtcgctcggttggatggagcccattggcttggacggcggattcccggagactgaaacagtagtggttggtataactaatggccgtgagattctgttggagaccgggcctggttgagttagcatagatctggggtttgacccttgcccttctttaccagtagctcaactacgcagtcatgtcctccactttgtgccgttcacatggacgttgtattccagatcgtcttgcaattagcatcaatcacacccgtctctagaaggagctccacaacgggctcccgcccgtgttcagcagcatggtacagtggcgttctactgtacgagtccgtgagagctgggtccacatttaggtgtgcaagcagcaccttaacaacagctggtgtccattctgcgccgcgcacgagagtggtcgccagtacatcgactgggaataattatcgacagctggactctgcaggagctgcctcaccaccgtctcattaccgtttcctgcagcccaagatagggctgttcacgagtaaacgtccccggcgtctggtgcaacggcggtgtttttcaataaatcccgacggcaatgtcatgtccatttttggctgcgagagccaattgcgttagaccgcgctcgtctctgatattgatctctatgtccgtggccaggagcaggcgctctacaactcctcgcccttccgtatcttgccgctcacgataacaggcttcttccgtgacgatcttggaacttgatatccaccttaccacctcggagaaggaagttcacgacctcaacgaaccctttctctgcagcccaacaaagtggtgtgcggccatgcgtatcctccggatccattatcaattcctggaggctctcacacaggcgttccatcgtatacgcgagcccgaattacgccgtcatatggacgttggtcacctccatcgccagccgctctcgatatcccggaagccggaattcacgggaagaagcatgacctgcgcagcgcagacgagcatgtcgccacgaagaaactgtagaactagttcttggatctctcgctcaatggctccatctccctctccgtagcatggagtccccaattctgcgccgcatatcccagaagtgcgttgctctcgtcttgtagcagcgcttctaacgctctctccgacttgcagtgtatgtcattgaacatattaaaggaaaggtatgtaaggcaagctagtgcaatatctttttgggcattcgggaagtactgcctgcgccggtcaaggaagtgatcttcggtggatttgtgcaccattcggatgactgcactcgtgtggtcgaggaccactgtaccgactgggatcatcatcccactgatcagctgcaccatgtcatttgttgggattggagtctcttaacctacacctcacagttccctcacgcggcagtatatgctgtctatctccaaccgacctggaaacgataagctgcctggaagagacatctatcaagtctaagataagggcttttgacagtttgattcagctaaatagaaagaagattgaagagattgcttgggccaggctgcttctgttcacatcacatggtttgttgtcaacatgcctgtgtacaatctgctaggccacgacttacagccaatgcgcggggcggtccttgtactcagacctctcaactagctgagttctacctaacttgattttatcaaagctacatatagtggaacctgcggttattctcctgatctctgtcgtgacgatcgtttactaggttatccaccttatccttggctagcatttagggttagccatacagcctacctagtatagcctcagacggaatggtgcacacctacctcctcgttgctcaatgagtagcgactcgattgttcctccttatatctaacctataatccacaacgcgataagctttcgactgctgctcgaccgttttcgacccattgacgatggaagcatgacgtatcccgtaagcgtgtggcccacctctgtaccatatatgatggcgcctttccatactatattatcgcaacaaagtaggttgtaagtaatgctataaaactgcggtaggatatgttctatatttaacgtctttctgagctcaatgaccttaggtttctaaataaatagtataatacttataaataccataattacagctgtaatatatattacccagagaaatacttatctcaaagaggctacttgtatatacttatacatctctaaaccaacttcttgttgagatattagcgtatgaatagacactagtttataggtgacccgctcgcttgcaaggcccattcgcttgcaggatacgttatcatctgaactgagtcagccttctctcatcctcacaatgcaatattcataagctggtaatgagcgcgaacttacctggcagcagctggataggccatcgtaacacggataccgtaccacgtgcgggctccgtcgcactaagagggacatcccatccaccccgacggagatatctcgaccccggctctgttgtgtagccgttcatcgggccgtcgaacaattgataagatgcatcgctcgagtcattacacaaaccaaagaaattgataatatttagtggatgtcgatggagaacgtcagtgctcctgatgctaaacagacgtcttggtcggacagtggggctcgacggttcagggtctgccctcgtatttctcggttctctcgtatttttgtctcgtatcagaaatgacacccatatcaaccacgcccaggaccagttgaatgataacgcgtctggcaatggattagagcagaagcctcgcttgatctcgtcgcttttccttactataagaacatatcccatagaatgtttatagaacgttgagtggcatccgcggctgcggagccaggggctgagcaggatgacatcacatgccgccccccccttccactctcagttccctatgacattcccttctagttactccgttcgcagctccataaaacgaccatgtcgtcgttctcattcatcgcccattcctttcgatgacgaacggtcctggctaccggctaactccactgttccagcttcgcccatgatcgtcctgtgtctataccattcccctgaacgactcttcgcactcccatctccccccttccaaccctgaactagtgcccggcaatgagcatccttgacgcaccatggcattgagcagtctttcaatcggggtcgccctcacaccgaccgtcgtttccacgctcttttctcatgtacgtcgccctcccgcgctttcccggccgtgatcgtgtactgacagcacagtacgccaaccgtaaaaccctccacaataaacccaatgtccacctctcctacgatgaggggatctcggtgatccgcgagtttatcgatttcagctccaagcgtccgattgagtatatccaggaattcaccgcgcagcgcgttcccgcgccgcactgggtgcggatcgagcgagtctcggtcgcagaggagtttctgtcagagtcggcggccctaatcatcaagcaactgggtccgcggggcgttgcgcaggtcgggggtgagaaatggtggcagtggcgcggtccgtcaggggacaagaataatggagaattgcgaggcgagtggattgagatgcatagcgactataatgcgcggaaacacgctgcgaaaaccgactcgagcaacaggcgcatcatgctgtacattcatggcggcgcgtactatttcgggagtgtgcagacgcatcggtatcagctgcagcggcatgcgaggaagctcaaggggagggtcttgcacggtatgcacattccctagactttgttactatgtttaattggctaactgctctagtgagtaactttgatttggttttaaacctttgctgacgaatagaagccgactaccgcttgtcgccgcaattcccgttcccctgcccacttcaggattcattggcatcttacctctatctcttacgagaccatgcccccgaggacatcatctttgcgggagactctgctggagggggaatgatcctctcgtgagtcgataccggttacttggagtgatcctcggctaatgattggcaggatgctcgtcatttgccgtgaccaaggactgccgctaccggctggcgcaatactgatttcaccatgggttgacctcacgcattcattccctagcatagtaaaggacaaccctggcgactatatcccgccccatggcttcttgcataagccgtcgctagcatggcccccgccgaacgaagacgagatccgagagattaacgaagccctgaagaagaatccagccaccacggataagaagaacgagaagaacgagcctccgacaggagaggcgaatgtgttcaaggtcagcgagtctgagccgaccctgggccacggtcgccgacccccgtctttcgtgatgaacggcaaaacgatagaggtaaaggaccagattcacatgtacacgaccaacgagctgctcttccatcccctcgtttctcctatcttccagccttctctcggaggactcccccctcttcagatcattagcggtggcggcgagatgctacgggacgagcagttctacattgctcacaaagcggccaaccctgtggcctacccgccgaacgacagtctcctcgccgagctcgaccccaagcgcgaaatagtcaacaagtaccccggaacatacgtccagctccaagtctgggatgatctgtgccacgtggcccccattctcagcttcacccgtcctgccaaatacatgttccgatcaatcgcgcagttcggagcgtgggcgctggcgcgcgcgcaggatacaacggtcgacatcgtcaatgatgacgaagtctcccccatctcatcaagtgagtcagcaagtcccgagacatctgacaacgagggcagggaaaagggacctcacgatcgaccgggcattgccgtaggtaaagctggtgactcgctgccaccattcaaagaccggatgattcgccagagggtggataaacgaggccacatatacccccttcctcccccccgcgactgtccagcgcttcaactgcccccttcatccgtcggcacaatcaaccccggcctcctcatgaaatggatgctagtcaaggaagaatgggatcaaaaatttgcaaaagaaaaggcgcggatacaccagttacggcttgcaggccttgcttccggatttcaggatttcgacggcgataccccgccacccagcgcgctggccgcgagacgcttctctccaggtgcccttccaccaaagggtctccgcaccagctaccctatgacgatgtgggccaggtttgccaccaagcacgataagcggacgattaagcgtgagcaagaaatggacagccggtcacagcggtcgaatcgagccagcgtcgacgccggacgagcaggcgcctcgattgagcaccaggaaaccaaggacaaagccgcgtcaatcccgacagagccagcgcaacagttgaatgacaaggttccctattctaaaccgccgagcaatgataacaagcccaccgactcgaacccatctcttgcccaggcctcatcgaacaaatccttcgtccccggcccgttcatcgtcctgccgaactacgaaggccctgacaagtccgaaaacgcgagcacacgcgccctcttccacgtccccggcaccatcaaacccacagcgcaaaccgcaggcacgtccaaaagttcgcaggatctggaccaacgcccatcgtcgcagggcggctcggcgaccattcgcagcgggtttacggttcagtctgacccggtgacggacgacgcagggagtactattggcgacgaaaaatcccttgctgttaccacgttgggtggtgttgatgcggcaagtacccgcgccgtgctaaatgccgatggagtgttgaggccgtctacggataacaactccgtttacgtctctgctgacagccttccgctaactaacggtgcggatcatgagaagtagatgacatattgtctgccaatatcttttcatctgtaatatatatgttggagctagattgatacctatcgtgttttggtatgattgctttttgttgctgatgttggtctatgtgatgctggtttggatgtacactcgaatatgtcgagatttatgccctcttgtgtatctatacccatgctatatatgccctatccttaatatttaccctggcttctctgttcctgtatataacaatttcattctaaaacgggtatatgcaactagtatacatctctaattttaccgaatgtgatacgctggcaagaaatctaccactcaaccccaaccttcttcgcgaccttctccgcaacacccataaacgcctccctcctcgcactccgatccccctcctccgaaacaacagtcggcattccgcgatccgcatcctcgcaaacccgtgcatcaagcgggatatcacccagaaactcgactccaagccgcttacactctgcaagaacaccccagtccccttcgccgccttgatcaccaggaccatgatgatgcaaccccgccgagaagatcttcgtcttggtcccacactccgggcacgcaaagaacgccatgttcctcaccatgccgagcacggggacattcatgcgctggaacatgccgaatcctctcacagcatcgcggagcgatgtcctgtggtgtggtgacaatcacggcgccgtcgaggatgatctcctgaccgattgttaattgcacgtctcccgtgccgggtgggaggtccagaaataacacgtcaaggggaccccaggaaacggagtgcagaagctgctgcatggcttttgtgaccatcaatccacgccaggatatcggagtcgtgtccattgggactcgcgagtgatgttgtggtgtttctggggtaagagatggggggggagggaggagatagcccattgacatggatttgaggccgtagtttgttagtggaataaggcggtcgtctgttggacaggaaagggttaacaaatgtgtatggcagtgaagttatgttttgttgagacatacgttcatcaagtctcggctcccccgagagattcagtagtgttggaatggaagggccaaagatatctgtgtcaagaatcccggtgcgtatgccgcggcgcgcgaaggcgagagctaggttcactgttcgtccgtttcgttagattatattttcaaggaaaccagtacgaggttgaaacgtgacaaaagctgtacccgcaattgttgatttccctacaccacccttcgcagaggacacggcaatgacctttttcacatcgcgtatcttgcgcttctccgggagaccgcggcgacgggggaatgagggcggggtgccggagcgtgggaggccctgaaacgtgttatcagataagttccagaaagaagaataatttagacataccagcggattatcatgttgcagacatcggaatgtcgaaaatagtctcctttgcgtcgccatgctgttctgtgcttgtgatgtcgttggactagaaagctatgaagcctgaggcctggaattgcaatactgccggaaatagctctcaccgcttccaatattaagccaatattgacctctctgtggggcaagatagctgaccgcctccccgatcttcgaaaatgttatcgcggcagaaaaataatttctgcggatcaacatcggttaatttcaacaatataccatcgcagaatggggcccaaattgttagcagaacagatcgttgttcttgaaaaccttcaccaggggttttgggtcttcttatgggaat

SEQ ID NO: 5804 - DNA, 4233 bp, Emericella nidulans
cttctgtggatgtttgtcgataagcagactatactgatagggcatagtcttcataatgacctggcagtgctgggaatggtgcatcagcggatcgtggattcggcgatcttgacaagggatgcggttgctggtgcgaaggaggactgcgccagggtcaggaagcttgctaaaacgttctttgaattggacatacagacaggaaagggacatgattgtctggaggatacatttgccgcgagggaggtcgtgctttggtgcctgggtaatccagagaagctgcgggagtgggcagcgggtgagagggaggttatggcgttgaagaagggacgaaagtagcttgctttaatgctagaagtggtggctcatggtctagaaggcggcagtcttacccttgtcagacagatcggatctttaaggatcttatttcatgcggtaaaagcttctttgtggttctgctagtgtgagttgccatcaccagtggtcaggagagggtcgaacatagtaaggattttgtaatttggagcggagttcatgtcaacagcgacatcgccatttcactggagattgagtatgtaaagatcttaacttttcttttgcttctctaactgggtctgagtgtccaggtgaaatagagctttatagccgttgtgggctcgggactctcaaccgacgaaattgcgctgagagattggcgaaccacttggcctggatggtcctggagtctacagcccaaacgttgtgtcagatcggctggaaggaaagtcaaggtgcacactcatctagatagtcttgcccatcttcctcactcgagccatctttgacctgtttagggtgcacatcgtatcgcacactttcgctctttaggccatgtcaagtgaggcagttctcgctctgaacatgaagggctacgcctggccgtcttgccggttgatttgccgagccggttgacgctggcttcagggttcttggtctggctcagtgttattaagaagctactagagcaatgttagctcttttcccgctctgaacgagccacaaactcccaactatccgtcaacaccaaccccctggcaatctcactttcacccgttgtctcctcccttctccctgctgcgttgaatccgctcagactgtcctccaggcgctccgaaacctggccgactctgaccgaatcgaggcatttctgccatctcagattgaagatgcttttgcatccacgttcctgctggacatcattggcgtcattgcgtcaattctcgctcccgatggaacctggcttgagaatgctgattcgtatgatgtactctccaggaaggtgaaccttgcagcgccgttagggaaagttgaattggagtgtttgtggagggctgtgaggcctcttacacttgataatgcgaattgggactcttttgttggagagagaaggtggtagcgagagccttgatatggcaattgccgggactgttgcggggagtagcaggctgaaaagtgtgacgcctggcccagactaagagctcgactgtgatatattcactatcgcgcgacggttggactcgagccgcaggcattgtttgacctagcggatcagttggacgttcaaagggtaatgaatatgcagtatgttgcaggattcccgccatgattctcggtgctgggcttgtgagaggatgtagagccgttgtagataggtatgatgcatttggtgctgtcagccttcagtgatccttagaggggtgcattcgacattgtgaagagacgtacaatgaaaatgctgtactcagtcattctgggctgattgggctcgataatgcaactacacacccaggccaatgaggtgaaatcggaagagagtcagaagctattctgacattgatatgaccagtctattctttctaacccagggacttgcctacaggagagattctaattaatcaaaccactgccgccatcccaatatggctcctccaactccctacagtacaggagttttctccacctcctctgcccaccttgtccgcggcctcccgaatgtagatgtgatccttccatataaaatatcacccagctgcgcaatgggcctcagattctccagctcaatgtggctgaggtcttcatttgcaacgcccttcttgactagaatcttgtcgccttgatcagcaccactccactcccattcattccctcctggcgggctacgaattgtttgatatcgataacttcttctatcgagaagacagactctctcactcgaaccggacgtacagtcaagctggagcctttgttagaccagagatctcccattccgatataccatacagcgcatcgagggagatcgcattcacagcctcaatcatattctcagagacgttgttaatcacacatctcctgtctctttgagattccgaaacgtatctttctcccgcccaggtcggcccgagaagcccagaattagcatgggcggatcatggtcgactagctggaagtagctgaatggagccagattctcgacaacctcccaatatttcgctaatgacgcggaaacagtgctgacaaactcgattggccgcggtgtgatagctgagatgagaaaacggtagttgctgactgtctccctggttgaggcgtagggatcaatttcggtatggaagttgaaccggcttactccgtccaggacgccctgtccatactcccagtctggaaacggggattctgtgacttcaatggggcgagttgcagtgcttgaagggtgcctgggtggattctatcattttaaagttgccgacgtcttggataatcttatagctttttactttatccactgctatagaagagctcattctgatactagcatctggcaatgaccttagtttgccgggaatagggatctggtggctgctagtttctgttcgatcagtttgggagcttactgggtaatcagccacaggctcggtcttttaagaccgtcaacagtacagggcatgaggaggagaatatatgatgagagtcacggttcgagatcggggttctgcatattcttctctaacgcagctggttctgacaaatccatatcaagatctcggttaggggggccgacatttgcggccctaacttgatgtcatggtgaaccgactgtgcttaactgccgaggtcgccccccgcatacaccgcagcactccatttgagacttgaccgatcgcttactacgctatcatcttggtctttccacctgtaccggtctcgccactgcctgcgccttcctcgccgcacatcctcgcatcgcgccgaaacccgtacacagtacgcgactactacaggtcttgtgcggcataatgacccagtaaatcagcacaaaagaccaattacattccacttcttgactgaagtattgataccgacaaggcctatgacacgagagttccattatttctgtttcctttgtttccgatgggagtacagctacgttaaattggtagcgttgcccacaacactatgccgagcatcaagcttatactgtccgggtaccagtgggactagggctagtatgacggatgagccctgagccatgatgagtccgcagtgagcgcaatccaacccctgatacttaataaactgacggaccctggccgagcgtctgtgaagagaaggcagctagaagatcaggaaatcgaggctatagctaaagagcaggatttgacttgagttagatttcaattgccttggctatattccctgttcaactacgcgatgccacagacctacactcgagaagcctaatcttttgaaaataaacgaaatagtagttccgctcaagtacaggttactattctatggtacagttggtgaggcagtgagatcttcatctgctcgtcttactttacaaagatatacaagacaacgctgacgactcttttatggttcttgctaatgttgtaaagaaggtaatggcaaatttagtccgataattagcggaatgttggtgaacatttcaggggtctcatttgatggtcacagcaacctactcgcttagaggtatgcgatgtctttcctttagtttatgagtttcaggttaaatctagtggctctgccgccctcctccagatcagtatgccctagagttatagagctcggaagaccgtccgaaaacagataagagattagtcatgcggggttcagattgactcattagctcctatgagacaccaagttggtaatatctctatgttgtctccaata

SEQ ID NO: 5805 - DNA, 5415 bp, Emericella nidulans
tgaaatttttacatgagctctaccaagaccttacgctgggaaagtagccaacattaaataattctttttagcggctaatgggagggcgaccagcatacccagctctttgatgtagtgaatgccagcttcaccacgccctcgacaccttattggccttcaagaagcggttattaaagacattcactgatttcgaatttggcttcttcctcattaatcccactcttctactttccagaccttatattgggcttgagttttctcagtcattactaccatgccaagtctgcaggatctccccagcgagttggtcgccacggttatcgaccacatcgatcctgacaaggcttcgctctcacgtctcgcccagacgagacggcgctttcacacaatcgtgatgccccgtctcaaccgggacgtggtgatccggaacaaccaggggttggcctacagagcgatgcttggtcggctccccggcatagcatctgccgtaaggtcactaacaattcactatcatggcgatggaccgtgctttactgttcttacacaggccatgaagtctttaaccggacttgagaatctcacggtcaaagggggtgggccggccctagacagccaaccatttcgagttcacaaatggcatgtctttcgccgccatttcctggcggctctaaaggaaggagccttagcccatctcaggacatgtatgtaatgacttgtctttggagatgccagctgacttggggagtttagtggaactaaacctgaccgataacgagccatggtgctgtgatattgatgccttcatgagccacccgaccctcaagaaactgtctattctcggggctcatatttcttgctgtggctttcctgtcccttttactcgtagtactgctctagaagagttgacccttctgtgctgcgacttcagtgcggagacactggcccgagccctcgctgtaccaaagggtctccgaagcttcacttgtaaaggtgaggtccgtgagagtcccaacgacagcaatgaacccaggagtgaccctaaatcttatattgcggcactcagtcagcataaggtgactctggagtcgctcgacatcaacttctggcccttcgaagatcgttattccgaccccctggacatgcgcgcattctccaaactccaaagactcacagtccgagtcgaagagctttacagccgcatgctctatcgactcccacttccagagtgccttctcccgcgcagccttcaagagctcgttctctggactacgctgtatgattcatctgagcgcattcaagaagaggtcaggaaagagatcgatcgctggctggatcatctgccgaacctccaatccctcattcttgaaactgggacaccgattatattcgagtacggatacccggctctgcatagacaggttgacgttcgtggcgccgattcatgaatgataggtactggccgctcgactgctcgaactgccattatcagcttaccgtggcgagacaccctgataggccgagtgagaatatttagatttctttttttcaactaattacgctcatatgcgttggtctgtaggagagtgcaaggactattatcggttatggtatcttggaaggagtcatgtatttccctgtttatgcacagccattggatgtaatcagcgttcctgttcatagagttaagtaagggtattttgaactcttttacctaacacgaaatatctgacttcctgagttctcttgacgctttatcgcaggccaccgttgaaaattgcctgactagtatgcgattttaggcggacgtttgttgaagaccacttgggcttggttcagcaactgtgcaaattgcaattatatagattgccaggaatgtctaattctcttcgctcattcctggctgtcttgcccgagacgccgttgatttcctatccatatggagtcatgagaatgctgggaacgatacccttgcctagcttgtaatatcctttccatcagaggccaggtcataggcgttagaagagtagatctttgatagatattttggaagaacaggcgtgagttaacgatatccttgctgcaatacatatgtctgtgttttgatgtgcgtctgccgaacattgaattgcatcgtatcatgaagcattgatcttaattatctatctcagatcgttggtggcaaaacgtctttagacgacggaaacctctgccctcttttctttggctgtcttctgttctgttgccgcaggcaactcttcattcccagcttcggatgggatagcagtcccagagcttctctcacatccatcgcaacccccatccactccctgcaacacaaaaggtccatccaagtccgtccccagcaccgggaatagtaaattcaatacccaaaataccagcaggctaatcgttaaacccacgataaacgtcagattatacagccgcagccacccggtccatttgtcttcagtccacgagttcacgtttgctgcgaggccggctgttgcacatattcacacacgttagctgcgccacctgtataagagggggaatagagaggttaaagggcaggagtacgtagaagcggccacatcccagcggtaaacgcaaccagcgcgcgccagttcactccgtgactgaaccagtagatgctggatggtgagccaatgtacagatctgacagttttaggcagtgtcgtcgaatgatatggtagtccgctaacattaggccactaggttacattgtttagctagatgagctcaaattgtggaagattcatttaggagaagcacgcacgttgccggagccataaagacgccgaagccactcagtacggacaagaatttagtcgcggttgagatgagctgccagggtctatagatgtgttagtcttggagcggctgaagagaatttgaagcagcgtactgagtagctattccaataatggccatgatatagctgcccctcacgatgtttaggtatcgcggccacagaccggcgaggtccatccccgtgctgacgctgtttagcactacgctaatctatatttattcatcagtaacgtccatcactgcatactcccaatgagaacggcataccgagaactggcttgcgacacagccaagactggcgaagaagacccccgccctaacacgcggactgcttccatagtattcctgcacatctgccagcaggtaaatgggattccactggatctctccacccattatctggttactcgcgcttgtaacaataattccgatcgttgccgttatggagattgtcatcggacacgccaccagctgagataaggtaggtgcatatcgtctctttgagtaccgcacccagtctgactgaccgagtgtcccgctgccccaggagccgaggattgcggtgattccaaacataaaagcccaaccggtattgggcgctgtcccgggctcgtggaagagctggcctgcgccgtgcgcttgagagacggacctgttgcacgcaaacatcattagcacacctctaagccctaaaggtgagaggattgtggaagagaagttttctttaccaaataagcaacccaaagcaggttccacagaaaagcacaaagcaagagaagaacgggatttgcagtttctcgggttttatcaggacagcgggaataaaacccgccatccagatcaccagcccaataaagtcgtttgtttgcaggtgcgagctggcagagaaatagttcttcatatgggcgaagcctgtctctttcagtaagcagtggtcttccccccaatggaagtagtaaggtaaatgaaagatatggacaaaccaggtataatagcaccgatcataacccgcgtcgcttggcctccccagaaggcttgcatgccgaaccacatgcatccgacaaagctgcgaagaatgacggggactgtagctctcgtcagccttctgccgttgggcccctttggatgagggcttctgaatggcgtacagtaggaccctctcattccccaggagaatcggctggacactgtgaaaccgatatgatgcacctcacccatccagccgcagaaaacagaaagtaagcccgtgagaaaggagccgaggatcttgaagaattgtcagattagctggccgttggatgggggaacctacaatcacgcctattgcctgctgcgggctcaatccgaatgccagcagcgtgctccctgtcgaccatgctgagacgcaggcgccagagacggtccagtatcctgcccattcccgccttagtcagtcactgaataaaggtgttcaaacaagcgaacaagcgactttagacggtatgtacgtaccaaagtaggaccagactccgtacgtcctccgctccggcggaatcggaataaggtctcgattgcaccaggtcgtgttttcgtagtcggcattctcgtcgacagggctgacgatgaaggtcagcaggcatactcggggtcaagaatggggcaggaaatgtatggagggaccattggagccgctgcttgatgtcgggccacgacaaagtcttcatttctctcattcactccacagctctctcttgaggaaccaaatgatgtagaattatagttgaacgtggtctctgttggggtgcagctcgggacgcaagcgggtctttagagcgggtgtgcttatcgttgcgcaagtccaaccactctggattattggactgatgattggcactcaagattggaaagcatctagtggcgcccgtctgtgatcgccgcgagctggggattggggtcgatgttgagcgatcaagttggccgatctcgtatcagggcgtacctggcctggatggagagcgctagcggaagagggagaagtttcaacgtctttctacgtcagcagatgcactgttgggacaagagtatatcagcaatccaaagcaagtatcacacatttgatctgagttccccggcacattcatgacgacgactcccatactctggcacatgaatttatgtggtttggctggcggggccatggattagtcacatataatgacttatattctatactgatggctgattcttgggcacatagcggctcgtgacttctggccttcaccgtagtcctaccggtatatggcatatgtagcagttggaacgaaggagtcatgacatgattgacattgtggcttttgagagagaacacaagtacattgaccgtctcggcctattaacgattgggcagttcgaatgacaattaccccattgctcttggagtattcctggcatacccccatatcgcagttagtttcggtgtggtgtctagaattgtacgttagttggccgatcagtctcctggttggggttaggttggagagcgctagacatcaaaacttccttgcgggatcacggcactgtagacaaggggataaggtattgccc

SEQ ID NO: 5806 - DNA, 8156 bp, Emericella nidulans
aaaggtgtttccaacaacttaattaggccgtagatgtactccatcaaaattcgcatggggcagtctcgcaactaaatataaatcttcaatcttagcatatcacagccatcagaaatatactccggttattatgaccctttagctctcaccagtctttatttacctaatctctctctgtaggacaaaggatcttcgactccaacggggcctgagatagtcccgctgcgaggaaacacaacccctacgctattcccgcacgttcgcaccgttttccaccttccagagcctcaacatgatgtagagtctcttatcaaatgccaatatgttatgcgcgagtcttcaatgcccggtagcattgcaaagcttgcgcatcagccgacatcttttcctgaataggttcagggacggtacgtgtcattcgatccacgccgcatacgcccagtaagatttcatgacgtgctatatactttacatccatgagacgatatgatttatgatgtctgttggttcaccttagatgttcgggcatacagtacgcacacagatcgatttgagtatggcctatatttaaacttagcacaggcttgaggagctaggatatactggctgcttcgaaggactccagtcttttgtgatatattcttgatgaagttattggatttacaaggctgtctgtttcatgtatgtactcacaagagcgaagcgaccccgtgagtagaataataaaagcaccaaatacgaacctattgatttcgttaacaaatcacattaaggctttattatcttgaaatgctggcttcttcgtatgaccctcgtcggaggctcgtaatagtcaaacaacgactggtcgggcggggacaccatccttgtagtcacagccgtacaacagtgcgtctgattatacgacgacggtaggcaaaatgatgaaatgcttgccacacaatattatagccaccaggacacggttaccatgaaggtctaagagtttgacaagccccgtaggcacaggacttgtcctctgttactacaggaaatatggcgtaattccagtgctgatctctaataatatagctataaatgccatgaaaccagcgcaagaccgcctcgaacacgcctgggtgtttgaaagtagagaccggcaaaatctgctcccctaaagatggagtaaagccacatttctacatgtcatagcagatcgcagcgaagacagagggagcctgctattggcctaaaagagctagttcatccatcggaagccatattgaaacttgtatagtctttctgcctgaagcagaggaagatattctcagatgaagtagaacaaggtaatacgtaggaggatcgtggtatggcatatactagtcggtgaacgtaaggtcacatgttctgacgataatgagattgctggtgataaggaagctcacaagcagaaccgtgacagggtctgatttgcagctatgtgatgaaggatgaactgctgaaggaaggctcgcgccctgttggtcgaaattagtatacctagctccatcatccgtcgcagaaacccacttaattgcgcttgccgacgtgtgggaaactggtggtttcacttaagatgcttttctccacgctgtggatgtgttcttggccagacaattgtcagcagcattcgacgccaccttcgggtttgcgctcggaagctggcctttgaaatagcccctaagggcgcagacggagcagtgatcgtccaatagttaattctcccccgacgcgcacggccgaccggatgattcaagtcttgtcagatgtcaagccactctcgagaaactccatactgatcggcaactccacagtttaacaaatttacgcacagccacaagagtattccaatatggcctaaagattgtgaatattatatctacccgagaccttgtcaactgttgtattgcttctagatgcatataaagatgtagagctgccctgaggttaaaatgatatttcattagattccagtcgcatctccattacaagacgaccaaccccgactcccttctttgaacatggtctcgtctccagcagacattattgccctcatcacgcttcttgtcgggattccttcgtcatgcattggcatctggaccttgctctcgtgcatgaaggcccgcaatcaaagagcatatcgggagcttcacgcaggttactcatcctctaaactctcctttatttgtcttttttccacacctaacttttctctgcgtgcaagtaagagagtcttcggacccaacgatggagctcgagatagtcccgctgcggcgtgatacaacccaaacgccatctccgcacgctcgtatacccacattttttcgtgttgcagagcctcaacacgacctcgagtctcttactgaatatcaatatgtaatgcgtaagtcttcaatacctggcagcatctccaagcttgcgcataaaccaacaattttccgtgactaggttcaggaacaatccgtgtcattcggcctacgcagcacacgtctcctgcggttctttgacatgctatgtaatctacgatagaccgtgagaccggatgatttatgatgcctcttgatttacatcgggcgttcgggatatgggtggaaactgggatttttattcgattttaaacatggcgtttgggtgaaacttggcacggcgcacggatttcgaattatggggctcgcatatacagggtctcggatggttagaagaacgtcagcagcataagaattgatagtcatcggatatacagagttgtctatatcgtgtatgggactatacaggtaaaacgatcagcctctcttgtcgcacccgtgattagaatactagatatgacaaatgaatttctagtaagttgaatagcgttcctcgaattaaatatttattctcttgaaatgctaatgtattcgtgatactctcggtcggaggctcttgaggtggaacaacggccgaacgggcggggccattctttaagcctgttctggttagaccggcctcactacgttttgcagcattcgagggtacactcgagtactgtagggggttggggtccagacaatatcaaagagagcaaatcctagttcaattcaatgaagagtctcatcactacagaatgattgactgagttatcatagctatgttcctaagataaagatacagaatcggtgttccttttgaaaccattaagatatgcctcggataataaatattgcgtctccgatcgtaattgcctgtcagtacttaagtatatatgcgagatttcatacaaaactaagtgcctacacccgtgggctctccgctatcattatacgaaatatcagggcattttggttagtatgcagatttgcatatctgcaagtacctaggccagcttttaccggcaaccaaagcccacgccttcgccatgaagataatttcactgcgctcactttgtggcaattacaacgactgtaggcatttgcatgcgatcaccaccataaatcttacccggcgtgtagcttagcacagctggacaaagagaaattcctgtttttacgccctatggctatgtatatagaaatatgcaaagctgcctataatatcataagcggctgatgctcaacaatgcccctgacgcgcagtacaagtcaaaccaaagaggtcttaagcagagaatggcgtcgtgagttccattaggtctcttttagcacctcaaatagagcctcaaatcaatactatagggactatagcgctaaatctagggacatgttctaaattaccgcttgagtatatagattaactttctactaatagggatatctttccctaaagttatactggttctccagttacaggatgattatcctagtctgagatatgtgtgccgtacgtacaagaagggactctggggagaagacagaggaggagagaaaggaatagaaaacataaagctgtaaggcactcgggacaacgctcggcgggcagccgtaggagcgcgggggccagcaacgggcgaaatgcgtggtcttttcggtggagagggtaatctacgatgggggcacgaagaggaaggaaggccaggatagaacagaacgaattgcttgggagctaagtcgctaacaacctcgtaagtctatatccgcggtacccgcgatcggccacggccggctaggtatcggcatggtgttgccctcatccggttgttcatgccgggtgagccaggtatatctggctcgaaagttgactcatgctgacgggtcaggtgtccgtcgtcacaaaaggggtatatgtgaagcgaggcaaaagtcggggtttggaaaaggatagttgatagccaagtaataaacgcgcaagtgccttgtacaagaagctattcttaggatgttcttcgcttttgctgatcttgctaggtatgcttgtagtcacagccagtacagcagcgcgtctgattatacgacgacggtaggcgaatgatgattcttcctacaagacggccacacccgcacaccctgcacagccaccaaaacatgattaccaacaaggcccaaaagttcaacaagcccgtctggacgggactttgcttgattcgattcctccgttactacaggaagttttcggtccaatcccaatgctgatcttcaataatgaagttacaaatgccaggagttcagtacaagaaccgtctcaaatatgtctgggtgttttgggagtagaggccctgtctagctttttactttaaaaaataaaaagaaatttgccaaaaaaaaagaaaaaaaaaaagtaaaaaattagtattcttatttcttaaaaaatctggagcctgctcttatgcctcaaggctcgtaatcggagagcatatcggaaactttacccaggttcatcctcctttaagttttctttctattctattttttatttacctaacatttttctgtcgcaagtaagaaaatcttcaaccccaacgtaggagttcgaaatcgtccccagcgggacgatccaacccgatcgccatccccacacccccgtatacccaccgctcaacctatagagcctcaacatgacatagagtcgcttaccgatatcaacatgtcatgcgtgaggcttcaatatccggtataattgcattgcgcacagctgacgacttttcttaaaaggtttgggagcaatccgtgttattcgacccacgccgtgcacgtctgctagggtttcatgacgtgctagatgctccacaatagcctgtgagagcagctgattgattcttacaattggttcaccttgagtttcggcatgcgggtatatacttgcggttttccttgattttgcgcatggcgttcggttgaaacttagcatggtcttggggatacagggtctcagctgattagaagaaagtcagcgttacccgggaattgacttggcgtctttggatatagagaattgtttgtatagcatatgcaccaagaagatttgaagtaatcggcctttggctgtacgcaccagtgttcgtgatcctctcggtcggagtctccaacagcgggcagggactcagccctaaacccacctgggtttgtacaaggctagtcaatagctaattaattgacttgcaggtgccttgtacgagtggccgtatcaactcttaaggggtttttctttaaggtcggtattgctacatattcttgtatccacagccagtgcagcacgtctgatctcacacaacgacggtagggcgatacaattgacaaagttagtaaaaacgagctgaaacgctcaggaacgctttaaattcctctgcaagatgaaaacctttttatggcaaaagctagcatatcatctccgcaaatgtcggcataataaccgcaatacgtgggagtcgcccgaaggccagggagtccagacatcactcagacaaatgcgcgattcaaatgcatattgcccttcggttctctcgaacaagctatgcgcgcaatatttaacatatattgactgcagaatacgcactttaggtctcacctgccaatcgccgtcctgctatggccgtgagtttgctcccggcgtacaccgatgtgtcaacgagattggatcgtaaagtgtaggtagacaagtaatatttgacaagtctgactttggcgttgtagtgctgagtttcccactaaccaaagaacgtctgtagcttttcctccctcatcacgtccaacccactgaccgaaaacaagcctcaatctctcttgagctcatgctatctgcgcgcattccactccccgcactatccgttccgcgtataccactgaatcaaaaccgacagattcgtattggttagtgatcttgttcatgacgacccgtctccagtaacctatgatgacgttagcgttagactgtgacatgatcccctgactcggccttaaatacttatgaactagaataggacgctgtgattgtatcgctgcttgtgtagtcccttaccaaccgagtcaatagcccttttccctactcatgtcgttatccttgatagtgctcatcaatcgtagaggacaaataaaggtatggttcatgaaccctgaggtcaataccaaatctctcttcgttactgtcgaggcgcaaatttccccggaccctgcttccacgacatgttcccacaataagcggggatattgccggcaactggcccgttctcggtactagacgaatttctgtgaacatgcgcagcgcggcctggggggatgtggcttgtaggctggaatcgctccgggaatgagtccaagaattggaccgaagatggtccgactcgctgccagagctcaagtaccgatggtgattatataaggaagcatgcgaatctgcaacaaatatcatcttcataaagaattggacattctacttgactcctcaaaaaaaaaatttttttttacattacacaaaatggccccgagatcgaccgggacccgattgatccgcttcgttgctgaagacgatggacaaacacatcttggtgaagtagatgcagcccaatacccagacattggcctctcggtggtgaatggagagcgagtcgctgtgcgacaggtcacagggtctatcttcgatggaatcgtgacagaaaagaccttgcatgttgcgcgagttagtaaccccgtctcttaggaccctccacttttcccttgtcgatatctgatgacattttatagcttcctggccccgatcgatatggaagacgttccttttatccgatgcatgggtcttaactaccgagaccacgcaaaagaagcccatattcccatttccgacgtgccagtactattcattaaaccccgaactgcgctgaacggtccccacccagccatgattaacgtgcccatgatagcccaggatggctcgagcgactatgaggccgagctgtccgtgatcctgtccaggacaggccgcgacattcccgagtgcgatgccatggattacgtgctgggctacacgtgcggcaacgatgtgagcgctcgtacgcagcagtttaagaatagccaatggagcttctccaaaggtaagcggaaaccacattggcactcccagcttgtcttgtccctcttgaggctgatttgcgattgttagggctcgatggctcgtgtccgctggggcccgttttggtggctccctctgaactcgacccgcaccagctcgatatcaaggccattcacaatggtgcggtggtgcaggactccaacacaaggtacggtccttattgtttattttttattttattttattttatttttttgcgagtcctctaacgagaagagcccgtgctgattagaatagagagatgatattcgacatccctaagataatcgcgttcctgtcacagggcactaccctagagcgcgggacggtgatcatgacggggacagggccaggaattggggcaatgcgtgatcccaaggtcgtgctgagagatggcgacgatatgcgggttcaaatccagggaatcggcacgctctgtaaccgggtttactatgaatagtctgcatagcttggtagagtacggaatatactctggaccatgaaatgatcactacagcaataattagcccatcggggcatttgtaagagatttcggggtgatttcggacgaattcccacgtactacgctcattctccaccactcctcttcctccagtggactacta

SEQ ID NO: 5807 - DNA, 2212 bp, Emericella nidulans
acgtcaacttgtgtaccggcgacctttccacaaatggtcattgatggccttcgcaaatgtcgaacaccgggagtacgcggcgtatattttcggatgttgatggtcgagtcctggcgaacaggaggaggagcgaatgaaaggctgggatcaatgctcgagctcgaagactcaacagaaatagactctgtgtgctgctcaatacccgtggagtatgaacgggggagaagagaagacacgcatcgaaacgggagtcgaatgcccctaaaggcaacccgatgctgaagcatattgaacgttaggctcctgtgggacggattcctgggtacgagtcaaatgtcccaggtgcgaaattgtctgaatcaagcgcgctgattattgctgaaccatactactcccagtcccgcaaagtgccgtcaaggaaccgtgcctgacgagttgcaattcccaatagcacttccactccggacgagcaaaaatgtctccggatgatttgcgggtgcggcggtgcgttaagtcacgtgaaatgtaccgcctgttctgtggctgaagcagaggtgacatgtgaccatggctcgtttgcccccaaacccattatgaagtccagttaattgcccgggtaaccgctgtttgttggtgcaatgtcccgttcaggagacgcgcctcaatcgcgagatcgcgttgttccgacctcatcgccaggacaacctccgctcccgctggcgtttcgcttcctgaccgtggtcccgtatcaaatggttaaatatacccttaggataccgtatttcgcgacagcaggaggctcttctaattcacttctccccttttccattttcctctccaccatctcgaacttcttctttcgcctatccccaagagtcctaaaaattttactcccactgtacatagggaccactgaccgagcaagtacatactcctgttatcacgacgtaatcgctcgcgaccaagaaggttcaggttgtgccgtggcctgtgggtggggcagcgtctttcccagcctagcacgctaaaagagggccaaacaacctctttgccctttcaagtggcctacccgtcttttcctccagcatccacctcatcaacatacctaagagctgcctctacctcacacttcattgacgcctgctgtattttctcgcgtcactgttcataattactcttgcagactcctctataccctatttcacaagcctttttgcttctcttgagcgtgctgcgcgtccctgaatatacgtgtcgaacccgattgacatcaacaaaccacatatacaccaagatccgaaaacttgtcccacattcttctcggttcatctcattgctcttgcattatctcgaccgatttcttgaggtcgacatacttgcgtctggtacgtgcacccaatgctgttgttgcctgggtgtctgggtccaccgtagggaatgctgactgaagtccagcgacgtgcacagttactgaaccaagacattatcttaaatcttgctataatctgtcgagggcttttcctgctcctcgcgctctcttcgctatgcctccggtaaggttcctctggatttgacgcgttacaatgagtcacaactgcttcaccctggcgacgcgacttcctgtggctaacacattgatttctgcttaggctcgaaacctccgcacgcgaggcaccatgaatgaaaacgacgagaatggtccctcaacgcgtcttactcgcgccaaagccgccgccctgacaacagacgcccctgctgccaatggagccctcaagaaaccccttcagacaaagaaagccgccactggcgccaacggcacacaaagaaaacgtgctgcgcttggtgatgttagcaatgtcggaaaggcggacaatggcgagaccaaggacgcgaagaaggccacatccaagaccggccttacatcaaaagctaccatgcagtcggggggcgttcaaaagctcagccgcagcaatctatcccgtaccgccgtcggagcaaaggacaacaatgtaaagaaacctgccacagaggcaaagcgccctggaagtgggtctggtatgggaagcgcgatgaagcgcacatccagccaaaagtctctacaggaaaagaccatccaacaagaagagcctccccgcaagaaggtcgacattgaaaaggtcgtggaaaagcaggctgaggctgtctcggttaagggggatgataaggcaggcga

SEQ ID NO: 5808 - DNA, 10255 bp, Emericella nidulans
tgcgctcagggcttggaatctgcgtgcgtcctggaagggcttcattgacgtgatctgatttccaccggttcctgctgttgtgttcttgcctgatgctgggctaatcagttgacttggacattaattttaatgaatgaattggtgttgacccacccatgcacgtgtaaacacaaccgtcagtaacgcatattagcacatactctcggaataccatggatccttggatgcaccttcgtggggagtagatatagtgtggagccactgcactagcgaaagaaagaacatgacaaaccgtctatatatcgaactcgaggtaatgctgagtcaggctgtcacgcctccacccgtcagttcttctgaattcactctccggttgtccaatacaggcgaggtagaccttccatgacttaggctctgatgcctgaaatcaatatccaacattcaacagagcactatgaagccagccgtgaagaaatgcagaatgcgttttacaccatttcgcatcaccatttcctttggatcatgcacaatacatcaagcaaagccaagcacatcagagactctctagcaagtgtctggatccgaccaccactaccaagcgtcgccctccagttacagggaatagatctttctgactgctcatggttcagcccagctctcttcatccaagatgccgtcagctacatccttccccttatacacatcgagtgctcgatcctcggccagcatttgacagaggccacccgcatgacttggcacgttggcggatacagtctgacagtgggcacgtttatcctcgttgcaggtaacggtgactggtatagatccaaacgcattctattactcggctgggtctggcttggggtctgctcgatcgttgttggctgcagtgctgtatttagcgataacccctcctgagcctaccataaggcataactaccaaggcttttttgactctaaatgcgtacaatacttttcttgggtagccctagacagatccctgagtctcttatttaatagactaattacctggcacgtccaactgttgtattttgccctggctttcgactttgacgagctggatagtttggataggtgcgaccaagtagccggccgtgctggtcactcaaaacgagaaatatccatcacttcccacaacttcaaaattcgtcaaaggttacaatgggtagattttataggacgtcacacagtaagtgaaacaaaccaaataacagtagcgagaagagctctgaatggttcccgctttacaggtaatacttagaatcctgactgggtgcatgtgagtgcgcgtgagtgcgcgtgggaagggtatagtagatgcttgattgagcaaaattgatagtcacaatgtaaaattatatacgttgcgtacaaaccaacctaggaatctgaccctcgtgatccgggtggtgtcagcggtacctccaactcaacaatcttctccatccacctgacacgaaagtcatttatatccaagatccagcactctgacggccttgttatatagaccaagctgtcatgtatcctcgaaaccacgtgatccggtgcaagacagatagcagtgtcccagagcgtcactgtccggttagtgctgaacatataatcataatccgcgctttctggccatctctggttcaggtttccacgaagctcttctggaatgcccgcatctgtctccatgtctgccagtatctccccccttgtgtacagccatgtgtatacaaccatatagcatccgtcccccacgcttcgaagatcggtaaccttggcgtaagttttgggggtttcagggtcttcagactgtgcatcccccaagagacacacggtcacaatgtgcccaaggcgaagcccaggtctccaggaaggcatactggacctgcactaggctattccacagtcttgcaccatttcttggaattagggagaaacagctccaaccatatccttttttcctcatagaggactttcgcagccggcggttttttgatcattaaatcatttgtgttgaatgtgtcaacaggtgccaaggcttcacgtgctgtcaacagttcattgacctctttagttggaaccttcaagaggagctctctagcataggccgctgctactgctgctgcatatccttgccatgtctcgttcctgtgagagtcggcataatcagaataccccgaataactaggcatggaaagtgattcattaaccctgaagcctccatttctacacagtatacccctaggtcctgcgcaagccgatctcgatatttgccatttctcaccaatcaattcactgacgcaattagaccgtagtgaatgtctggttcactgaagttttgtgtaggacatgaaacaagtttggatttgtcacagttatcacaggtgttcggtggtccatccaggtatgcatagtctgcttggtataaataatcctcctcctgtactagccgggcgaattttgcagctcaacgcgccctaactcgaatattatcgagacactcagaagcccgactatcctctatataatgacgtgctttaagccgaccaggagcagttagcagaggccatggcagctagtttagcatccctgtgcgcttgaattcactgttgcctagtactttaagaagatcatattgtaccacccctccagatgtattttttggctggctcacgacaatatcaccctgttggatatctgtatgagcagttggtactcctccaccaaatacaaaccattaggctgaaccggattttggaaaagggagataataaatgtgtcgccactgttgcagcggctgttataccatatataccctgtggtaaaatggcaatggtgatattttgattcccaatactgcctagtacgtattcgagtctgctggagggactagtaaatcctcgtgtatcgcgtctaacatgagctttgcagccgtcatctcgatgggcaaggcacacatccaccaactgtgtagtcggcatgagtacgacggggtctgctagtcatactagaccagtaactgtcggattttgttgagatataaggttgtcttgattagaatgcttgcctagacaaagccccactccaagtctttgttgacaagcttctgcacggcacacttgtgatggataataaaagtagactttggatccagactaggttcagctcagtaaaagtctcatattggtatgctatgcctgcgatttcatctaaattgatatagaaaatttgctctgggcacatgttaatagtaagcatttagctccaaactaagattatagttatgtttttaaatagttgaagcaattttcaattatcaggtgccgtggtctagtggtatgacgtcacgttgtggccgtgccagcctcggttcgattccgggcggcgccaacatttttttcctcatttctacttttagaaagtaggctttttgacttggcatactctctcaaatgttacagcctttggttttatatagctcgagagctcacctcaattgcccccttcactcacatgcgtttcggaactggaaggcttgtccttacaatgccaccgcaaaccgcgatggtatgcatattctgagacataattactattatccatcccctgttaattgtccggctttcagacgacgactctcttgaagctgatcaagggaatcaaatattgcaccctgacaagctttggtttaagggttaagcggtcacgcttgactgaaaccgttacgctgaaacaagcatgggcatgactgagaccgaggctgactgtctcacacatgtaccctgttgcgtttgtagtggcttaagtacctacacttgtggccagcaaggatcccgtagttcctgagtccgtagattagagacaacttgcccttgcggtgttcagtaatatgttactgaaaacgaagccagataaatcaccagtttctagtggtcctacattgactattatactgatggggaatggtttttaactgccgaaatggcagagacattgtcttggttgcattgctctttctaaacggccgggtggatgagttgaagatcagcaaccaacttaaataacagtagtcactccgagagatctcgagaccagcagctcagtacaggacggctcttcatccctaacctgacgagcgtagataatagtctattcttcctgtgactatgcctttgacatattgagcttagaaagccgcgtgttctaacgtgttcgatgtagagtactaccagacagttacctgtctcgcagcatggaaacggctctgaaagtgataccggatgtgcccatcaccctcaactatgcggacttacttaggggcacggttcaagcgaggacggatcccggctaagacgtgaagaagaagacggagaaacaagggaacgaaataaaaggccatatagagaaatgatttgatgtactggcccacaacgcgttttactagaaagtacagttgtattataagaattagacatgctgacaagaaattggcatgttcaatcaatggttgcaaattaaccgagtaaaactaggttttcctatgctagtgtcggtaaatatgagatatgaacgacgataccctttcagactcttcaatatgtaatgcctagagggatgacacacttaggatgtttgttatgagggagcaaggacgtgagtataatgcataaccttattttgcacggagaaagaaagtaaaatgctagcctgggtaatctataatgtaaacatacaggtggacgcatggaacattagtatttgaccaatactttttagctctagcccatggagtagtcaactcagttacaggcttcccgtcttggaacgcaacacgtcaacagccgcgtgatcggtgaaccaactgactttctcacccccaccctggttgaccagcgcagacggaaggctcctcccttcctttgcatcgaagatttgcttgagaatatccttctttcctccaccagtggcgacgaaggcgatactcacagcatgcgtgacgacgggcaatgtgagtgtgatgcgctttggtggcggcttcggagagtcgctgatagcagacacccacgcatccttttcccgtagcaattcatgtccagggaaaagactgcaagtgtggccatctggtccgcagccgagaagaatgaggtcgaaaacgggcagcttaacgctgtccttggccgcaaaggagcgcatcagctcttcctggtacaaatccgccaactcctgagggtcgccattgacatgcttctcatcaatcgtgtgcacattgggtgagccgagttctgaaggtatcttgctaagtagctcgtccttcagaagacggtagttgctgtcctcgtgatcgagagggacagcgcgctcgtctgcgaagaagatttcccacttggaaaattgagcagtatcctctggggtaccatctccgggagcgaggagagctttcgcgagaacagtagggagagagccaccagatactgcgacgcggaaagtgttgtgacggctcagggccgcgttttgattgcggaggacatagggccgtaattgcttggccagggcatcagtatcttgaaagctgaaaaggttcggagctgggcctggcatgatgggatggcgatgaactgacgtatacttgttagattgtaaaggaaggatggaagagaataagtagataagagaaaagttgagggattggtgaggtcactgaggggtgatttcggtcagagctaaggtggggtggcggggcagaaaggactgatccatattgttccatatatgtccgtcgttgcccggaatgaggccgtcggctcggggtcgggacctcctccgatgtaactatgatgatggggagcaaatgtgctaggtagtggtttcttctagaaagcagagcagggggaatatggttgcgccattgccgctggtgctgagaaataagggtaaaaaaaaaatctccggcagaaaaaattggcgccgcccggaatcgaaccggggctggcacggccacaacgtgacgtcataccactagaccacggcacctttttgctgacataattgtcagcttatttgtatattatggaaattctagctttttcgagctacattgacacattgctttagctctgagcatcagggggaattccccgcaagaatcattctgctcccaaatatttgatccattcagaggtttgagagggtcgttccttttttctagaaatcggactctcaactggagctttagatctgaattcgattgcctaaagtgtcgcgtgcctcctctgcagcagtaccaagtgccaagctccgattgttgtcagctgtgaccgcagctttgatctgatctccggaatcagctactgagcgcctggagtgacttcctgctcctccatttcctttcccttttctaacctgcagctaaagctgtgatctcaacatgccaatccccacgcgctcggtttctacccgagagactcggaagcaggtaagatcagttgaacccagagccctccaactcgcccctcacatctaaaaagcctgccgcaaatgtagggcgcacggtgtcaaacctgaagccctctactacctcacaattgaccgatgaggctccatccaagaccgaaactacgagaatcgcttcctccaacctaacgcgtcgtcaaagcctcgtccgtccgagtcagctgcggattccatcatctgcaaagcccaccactcttccaacaagtacaaggagtgttggacggattccgacatcccctgttaagcgcaatgtgaccgttagacagcaaaatggagaacctgttgtgccgaaaaagacagacatgccccctcccgcgcgaccggtgcgttcatcctctctgaggcagccgacacgctcgagcaccgtaacatcgacggtgccgcgtggacatgctagacatcagagtcagatcgtcacgccgtcttccagaaatcttgctatgccgtcgacagcaacatctacagcgtctaaaacacgaaatcagttctctacgtatcagcagcaattttcccccaagaagacacaggaaccaacggcttcgacacccgacaacggccccgacgaggcctcttccctgataccttcgtcctggccagaggtagcagcgctacagaccgagcttcttcagcttagtcttttataccagtccatgcagcaacgcaatgaccgatggcaacgagatgcgcaggcgcacctaaggaagaaatatacctccgtagccggtgactacaaggctattctgaacgaggagaaagagttgcagagaagactcaatggacaggccttgcattcctggctcagaaactcgggcgagcacaacgggcagcagagatttgcagaacatgttcagcttctatcccaagtcgccgacgaggtgtatggtcttagcgacagtcatggacggcacgcaatagccattttggagttcgaggaatggctgcaaacagtcgagaaaattcaagaagctcgggcaaatataggacatgaaggcgacgacttcatcgaacccattcggcgcgagtggagggaagaaaccaacgcgctgataatgaagctagagctggcatcgaggcaattgcagagtcttgatattctaggacacgaagacgtggaagcgctcagccgttctgctttaattcgaatggctaaaggtctcggtgatctggtcagtcagatggtcgaagaactaaatgtcatccgcaaaattgaagccgacatagtaaaatctgaaaagtctcgggttagtgagatggcccaacaactggttgagatgccaccgatcgaggaactagcgatgccgagaactggactttggacacgacccgcgctcaaatcatgagagacagtccaaccaaccaatgctatccataatcccgctaccaccccccctctttcccgtggggtgtgcgatagccgtgtccttatcggttaaaaccaggggacagaacctgtttttactgttctttcggtccttcatgataccaccacgaaggtgcgccctcagttgcatttaaggcaggcgcgcggtctaccagagttctagtctaaaggattcaggctcaaaaaccggttttagaacatctaccattctgggtatttgccatgctcatccatcgtggtaggtggaagactaactgtcgaactgtacaactgcgcacgaggtgatggtctcaatgttcaaatataaaaccttgtaatgcactgctgatttgagtcgttctatctgcacctcgacctattcggttgaaaccttttgtgagtcaggagagacgcgggcctcacatgccactcagctatgtgaagctgtaaagattcgccagagacacactgttgtttggttaacatctcgattggacggtttataatggacttggtttattagctctgggactccgtatataggataatgatcataaatatgatcataaatattgattaccatcaattgtataagacgacttgaaatgcagtggaaggcgtgtatgccaacgtggaatccgaaatctgtctggactaaatggtggggcctctcgacggctctagaatccagcctcgatgacagtttccgcgtaaagcaggttttcgctttccgaactgcgtcactacgtcattacagattggggaagaacaaaagaaaagccgaccacctgttctacagagtacctatatcgctcattagactcgctgctgtgtctcttgcccccagtccattactagactactataccactgctacccctccctccgaacatggagggtgagagattccgtccagaccgcgatggaactgtctagaaaccctggattggacatggaagcagctctgccagtctgccaccacacggtgacaagtgtgacatcaccgaccatggtgatgatgctggactattggggatcgtgactctgcgataatatggagggcattctgccagagcgccttccttatccagatagtacctacagagcatttcgtactacgagcttcagctcgctgtacagcgccatagtctgcacgaactgctccgcgtaggatctagcacaagaccaaggccagtaagagtgagagaagagagtgtgagaccacacaaagctcttggcatggtggatcactggatctccatccaacagtgctcccagtcgctctccagtcgcgctttctcgttttgatctttcctcgccctcccgatcggtcgttccttttgcttttcgtgcaagcggtgttgctcccactcagtcccagtttcagactcagtcccaatccaatctcagtccagtcccagtcccagcgcctccagccaaagaaatccatcaagaggcactactactgtgacctaccgtgacctacccctgatctcattagtcctctgcgtctccctcccccgctacaccaccacttgattcagttagagacggccacattcttgatatccgttgcgcgccttcttgtctctttcctcgttactgctatttttatcgcctggcattctgattcaagatacttcgctcttggatgtctccgtagccgtgccgtctcgtccctcaagccttcgcctacctggcgtcactctggcggctcggtggtcgtaagatgacccaatcctaaacactcaagcaaggcagtctcactccacggaccacgaccgacgtcgatccgaaaataatgacgaggtctctgtacgaccgcatctggcttcgggaggccggtggaggctcgacgaaggccaatattcgcggcatctacggttcaaaggaatgggtcaacgatctggacattgtcaatgagttgagggggccatacggactgtgtgaatgcgttgaggtatgtgcgcgaccctcgcccgtcccacttttcagcatctctttgtcggcgcttcttaatcattcccagcggctgggaaactgatgatttgcagctggtcgcgatctggtcgccttctcgcgtcggggtcggatgattttcacttgaatatatactcgtaccagccagactcgtccactgcaccgtttgcactaaacaccagcgtcttcaccggtcacacagggaatattttctctgtcgcatttatgccgcactcaaatgaccagactcttgtgactgctgctggtgatagccaggtccgagtttttgatatcgagtattccagcagccggaatggctcgcaggggatgccgccagcgttcgccaatcaagcaagaaacccgcatttgaaccgagtttttcggcaaggcgcg

SEQ ID NO: 5809 - DNA, 11622 bp, Emericella nidulans
tattctacctcatactccacaccaatcacaactacccagctaaccaatgttaacagcctcttcctaaagacgccgggattgccaccaaagacgtcctttacccgtatgacgagtcatggccggcgaccagcgagaaactcacgcagcagggcctcacgcgaacaggactgctcccggcgctagaatacaacggagagatctacacccaggtacgctatgcccacgccggcgcatgccttgaatatcctgcaaggcaacccgggtatccaggtgctttgccttactaaactggcccggcttgcagcacatcccaaccctccggttccttgcgcgcgaactcggcgcgtacgacggcgagaccagccacgaaaagtacattgttgacgcggtggccgatacctatatcgattggcgggtgcgcatctcctcttcctttcaaccactagtatagcggccgaactttgcccaagctgacctggaccatggcgcggcagtctcaatgggtcgccagcctaaagggcgcgacggacgaatacaagaacagcgtcgtgcccaagtactaccgcattcttgggcaatactactctgagcgtccggggccgtacctgctcggcgagaagattacgtatgtggatttcgcggtgtatcagagcatcgataacgagaggaggacggggactctcccggtacgtacctagtttactgcactggttaagctgttcgagacgaagcggctgattattgtaggagacgcttccggagtcgctggtgaagctgcaggatgcgattgaggcgaggccgaatatcaaggagtatattgcggagcataagtaggcgttgagcgggatgctacttgccgctcgccacttgctatgtgaatggctggcgaatggatagcggttgttgtttcatggtagtctatcaggttgagtatcttacatgctgtacgttccatccagaatgccggggaattacttgtgtggagagccatatattacaccatccactccctgtaagctgcggctctctacctagtatcattaagatgcaaccttccatccatcctcctggcaacactaaccgcctcgcgaactgccctgcccacgccccccctcacacctctctcctccatcaccatcagccccccgatcgtacatccttcgggactggtcccctggtccctcaagtccccaggctgcagcccgctctgcagcatctccgcagacccccgcatggactgatagatcatcgcctgcgccatggatctcggtacaccgacggcgacagacgcatcaatcatggagtcgacaatgacagcgaacattgcaggagtcgatcccgcgacggcagtcgtggcgtcgatgagactcggtggaatgatgagcgttttgccgactctggagaagatggaggtcgtcagggagagcgcttcttcggctgttttggccgcaggatcgacttcgatggctgtgagggactgtcccacaagggcgcagatgttggggagggtgcggataatcgttgctctggccttcccctcttcagctagcccatcgccgtagatcgtctctgtaagcttcttcacggtccaccccgctgcgacgctaatcaacaatttctgtcctagagcgtcgcggaagcccggctgggccaatccggctggaatgagagcaggatcaagagcgagaataaccacgtctgcagctctgatggcggcaatgttgtcatcgagtgcaattgtgaggtttgcttgatctttaaactgaaattcgagacgctctttagatgaggggctacctatacaggcaatatagtgggtgaagagccggtccggctctggggtggccaggacggatttgaggatggcggtgccgagatttccttgttattggtcagctagacatgctttctaagtgaatatgacaacgaaccacagcccaggatacagagggtctgggtagtaggtttggtggacatggctagaataagtatatgaagttgggttccaacgtgatggccgagatacacctgcaagatacggtaaatgaaggggttgggaaacttattttggagcccttcatgcctcttatttctccaattttaatcttatcgcagtcgggaagcgagccggtctcggttttccacccgagttcttaagctcaacgattgcgttgcattatctacgctgcagaactgatattaatatgcacaattccgtcgaactagaggttgatcgatagtctcctgagagacatatgaatctttaatgggagagctagactgcctttgcatctcataaaaatccagtgcataactcagtccatagagtagccctaaccctaacaagaacagctcgacacctcaccccaagccgggggattacttaggggactaaagtaaggagtaccatgactgcttcataacagtaagagctagtttactctctctgaaagatgctattgtagagtcatgctaactacaagactgatccaattcagatcaacatattcgttatacccgttattatgtactgaaccacgggactgaacaatcataaatcataaacatcacgtccacctataataatcatgcgaacgactaccttgacagcgcaaacagatctttacccttctagccatctccctcttcagggctcgatactcatcctccgtccggcctaccgcgtcccgattctcaaccgccctccttaccaggtatgccagacactcgctcagcctgccccaggtcgagcacttatacaccatcggctcgttacgctcattcttcagcgttaacaacctaaagctcacctcatcggatatcccatgcagctgcccgaatcccaccggcacagtcggcaatccctccttcagtctctgcagtcgaagcgcatgcgccttcatgacactctccttattatggctcgccaggaacaactccacagatgggaacggcttctctgtcccgaacgcgccgagctgccggcacagcaccccctgtgcaatcccgttataagccgcatctgtatccgccttcgtctcgtggatcaggctccgctcgtctgagaaaatgtatgcgccacgaacaagtttaagtcctagcgtaaaccccacgtcgcttgcagcttggagatgccgtgcaattgtggcgggtgtgctcttcaggtacgcctggtaggtattgtagatgcgggcgtggccatccttattgaattacgcattaggtccagggtgacgcggaggatgccggtcaagaagtggtgggattcggcgtcgacgaggatccgcaccccctttgcagcgcacttagtgctgatctcgtctagtgcagagagcatctgagccggtggggggaaggtcagtcctgaacgcggtggtgccggaggaacctgcgcctgtcaatctatgctagcttgtaagtagaagatgccagagcagaaaagaaaccaactttagagccaggtaatcattcgcgcccagtagctcaatcgtctcgacagtctccttcctccacgcttctatatgcgggcaaaaggcctcgcccctggccaacgtgggctcagtaacttcctgtttcccgtacatcttggtactaacgcccaagcccgtctgcatcttggtctttgcagcaaaccccgattccgtcgcatatgtcatgattgttccctggaaccccataccggcgagctggcggatggttgagcgcacttcgtcgggcgtctcaccggcacagaactgtctgtaaaaggttgctttgaggataaagtgcaggatgggattccggtcgacattgagcagaggaccagcgcggggcttgcagaggaatgacaaggctgagagggaggggatgaggagggagggtttcgaggaaatggtagcaatgagcagggagcgaaggagaacgggggtggggagggcagagagaggatgagcagcggctgttatagcggcagactctgattcagtcttggtgtcgccggctggaagagtctgggcagatgtcgttgagttattgtggacctctactcgttgggaaatctttggattagggttgaaagttgagatgcgcctgccactggtcgacgatgcggtcacggcgacaatgcgagggaaggccggtctcccagcggataagagagacaggtgctcttgtgcccgtgatgcggcaaatcacagtttcaacttacagatagtgccagaaatacttatagaggcctttggatagaaacctggtagctcggttccactcccggtggcatatctctatcttactgcggggggatatgcaccatcgatagccatgttaccaggacatataccacgtgtccatgtatctccccttattgcgtacaagcctctgcctcgctatcaggcccgatagggtcaccccgcagataggcatttggcctggtatcggacgtcgtgcctatccaatgaacggatggggcaccgggtctgctgcgatgccagcatggttggagtaggtaaaccccagagaagccagccagtatcaagtcagacatcgtagtgaatccatctaccgagatactagttccttttattattacgcaaatggctgagactgagaccaagacagccagtacagcaaaagagttcatggtgggagcagcagggggcataacgcaggttatcatcggtgcgtctactattctgcctagtcttctataacaaacgaaaaatcctgtgcactgcctcattcaaagaacgcctagaggtgggttaggttgggacgtacatgaataacaagcattgtcgtcactatcaacccaggcaacgcaaatccgtacgcggttttcttgaccgtcggtcctgcagagcccaaagccggggatgccacatagctcccgcaacaatagtacactaccgtaccgatggtgatgtagactgctgtaacaccagacaggctgatcatcagactgcgggtgtagtatattggatcacgcatctcagaaacaattgcgaataaggcgggcatgccgcagtatgcgaagatcagcgacgagacagccgtgatcgcctcagtgaaggaggaattgctgacgagcttgtagtcgaagggccaggggccggatcaggggccagaggtgcgcggtgcttctgaggggcatttctggacgccaacggcgatagtgacggtaaagaatgggatgtcaggtctatctagggctagaaggggatgtgacagggagcgtactggcagtaaggatacaagacaatcctatccaagcaggaaagcccaatctgcctagggtccttatactttcaaagacaaatccgataattgctgcaacgacgacgaaaatggcggtgcatgcgccgtacgtcgagacggcgttcagcccgattgatatgcctagcattccggagccggcaacgaagatccaatctgacaatcagtcagcggtctacactatgcagagatacattaaggatggatatgtagcatacaaagcacgaatgcgcccctaaagaacagccttccaactcgtccaaacataagcccaacggcgtcagcaatggaatacacctcacggtgattcagcttgaagacaccaatcatgtagtctgaccacgtggtaataactgcaatagtaagcatgcagatcaaacccggtatcagacccaatgtatcgatgcagacgggatcgagaggatgcccaagccgacctgcgtcttcattatcagggcgacggtgccgagccagtcgacctgtacctccagtcaattgcatccttcttgatagggaagaataaatggaacggcagcatacatcacgatagttcggcccgtctgcagagatactaccgaagacatcgtcatgggctgtggctagatggggttgtatttcgcccgttcccagtgtggaggtgtcttgggctagggcaaggtcttcaggttcctgtttcatcttggattctgaggacatggtgatggtggttcaggaagtcatgtataggcgtgttgaggactgagggctatgctggggctcaaggtaggggatgtgctgtccttttatgccatctacggctagggcaggctgtgcgccctgtcttctcctgatgcagacaggctatctgcgctagttacatcacggccagatgagaccactccggggaaaccgaaacgctaatcaacaaactgggagcaaatgtcatggctctagcgatttgctctgctaacatgcagtgggactcgggaggcccgccgtgcgccatttatcaatcccaaatcaggagccgtagcggtatgggggatcataccggagtgtacccggtccttttggctctcctcgtgctctcctatgcttattgttcagtctgtagtctaccagtcctcagttggttattcctggcgactagcggcattccaaaatgacatcccggcctgcattcgcagaaccccataccccgaactgctatccaagcactcactcctgtattctcgagcagcccgcatgtaaatgctcgccagttccagcctggaagttttgcattggctgcactcgctatggacaatgcatggtcggcgtcctttatggtcagtgagactccaaagccgggccgggtgtttagtggcggggcgtagatgccggtggttaatctgtacgtctctaagcctgttgactctatatcggcagatgccaggttaggtcctgtacgtaccgcttcgagtatcccctgcaacagttccaaaacgactcggtgattagctcctccattgccgctgttccgagacctgttcgctccgcggagacttgtgcttccccgacagcttccatgagattcaaggtgatgatattcctgcatcattaggataccctctctgatccctatagtaaggagtacatgttagactcacccccctatctttaacaaactcacactcctcgcctctgtcccacactcaatcaccttcttccccattacgcctacgatgtaccgtcggatatcgagctgattctggttctgactcggtccgccaaaagcaaacaccagctgccccgactgcgcaacagctgggcctccaaagactggagctgcaaggaagaccgcgtcgagaccagagagaatatctgaaatggaggccgtagtttctgggtggacagtcgagcggttgacgaatgtcttcttatcaatgatcgtggatgaggatgtgattgcattgaatgtttcggtaaggattttgtctttgaagataggtacaaacgccattcgtcaacggttctgatcaaagatactagaaggggatgtgacggaaatagagggtaccatagtaaagataacatcactcttcttgaccaggtccagcaaactcgctgcagggattgcgcctagttctctgagagggtcgccagcggatagtgtgcggttgaagtaagtcaggttccgttcgtctggacttttggctaggtatcgctgcaggttcgcagccatagtaagacccatagagccgaggccgtactggttatttctcgctaacatctatatagatattgtttacttctgaatggagacttacccagccgatgcgcggcgccgttacgcgcttgaggatcatggctttgaatcactttctcgtcaagttggcagggcgaatacggtatgctaaagcacttgtaatgtagttatccgtcggagtaaatgctgatcgtgatattgtcggaacctcgatccgaccgcatctggaaaagcccgcgcagtttcggccctcctcccgagacggtgtttgtataataatcctacgcgctaacatatcatagtactaaactgagaatcgaaaaaaagaacccatatctctcaattcaaggaatcccttaagaaacaaaatgtctttcccccacgttccgccgtccggcatctgggttccagccgtgacccccttcgatcacacagccgataccatcgacatcgaatctttcaagaaatactgcgcctacttatcatcccatctaactggcctcgtatactcggcacaaacgccgaagcattcctgctcacccgcgacaaacgattcgcggccataaaggccgcccgcgaagccgtcggccccgggtatcccattatggcaggcgttggtgcacactcaacaaagcaagtccttgaacttgcgaatgacgcttcagaagcaggggcgaattacctcttggtcctaccgccagcatattttggcaagcgacaactcctgcagtggttaagaggttctttgcggatattgcggcaaaggcactgcacccagttgtggtctacaactttccaggtgccacaaatggggtggatattgactcagaaacaattgctgatattgtgagaacgtcgaaggaggcgtcgggtgggaagagcaatgttgtcggtgtgaagctcacctgtgcgcaggtcgagaagatcacgcagttgacggcggcattcgggcccgatgagtttgccgtttttgaaggacagtcggatttctttattggtgtctgtcagtgggttctgttaggtgtatcgctgcgtttgtcaatgtcgtgcccaagacgattatacagatcgaccggctgtacaaggctgggaggtggagaaggcgttggctctgcatcgcaaggcggctctggcagagtctcctcgcaagagcaagattgtatctaccaaatatgctgccgcgattgtgtcggcctgtagggcggggattgagaatgcagagaagttcatgccgaggactccatatgaggcgggagagcccgcaaaggctaatgtgaggaaggtcatggccgaggttatagctattgaggatagtctgtagtcgtatctagcattatacattgatcatgagtcatcagttaaaagttttttagaagtcaccagatctgattctcagtaactgcatgcgcaacccaatccacgtcccctgtgtcgatggattctgccactgccattatctcggccgttgtcaggccgtcattcaaacccggtagctctgggattcgataggcaggtggcaatggtgatgacatctcgagccccttctctttactcatatcatcaggttggcgatccgttgcgaattgatacatgagggcacttaaccgctcgagctcggtctttcggtactgcgcaatgagattgccccgggaaatcatgtcgtccagtatcaaatagctcttgtctagccacggcctccgactttctagaagattatggtcaattgcctgtgccattaaaagaactacactggagacaaaagtggactccaagtcgaagggcaagaaagctgtctgcggggttcagctcagcatgtttagtccagcaaggctatataccgagaaaactttgttcgtataggctattgaggatgttaagctgctgctgtgccgagtcgatacatacttgcagcagtcggagcacgttggccgacgagttcaacgtctctagacatgcatcagcagactgaaagcgcattttcaaaaagcgcagaagtaacgggcgtgttgcaaggacgatgcactgcacatgtgagcatgaactgccgagttcttactgggtgtccaaaacatacctggtggtagaggagatgcagatgggccgacatcctggagactccgcttatagtcgatttgtccagctgcaaatcaaacgacgtctggagatcaccagtcaggtcggtagtactagccagcgccgctttggttctcagcaggaattttcggttgagtcggccgtccgctccgtatacagctacttaatcagttactttcctggcagtattctgggaaacatactgctatttatctctgctataatctggcacatgcggatttgcatacttagcgctaccaccttttgaggtgacccagggaaggaaggaagctgagggtggatctggttgtcttggatcgactgtggtaaccccatcagagaggtcatttgtcggtctaggacatagatcgtccaccatatcttgcggcatctctggacaagagcttctccaaggtgttgcaccggcatgtcggtgtgcatcccttgggcgagggcaatcatcatcgcttggccaatctatatcgttagttgctgaacaacccagtaagagtattacatacaaagttgtatgcagagttgcgatggtcgagcgcttggagatataatgcaacaccacaaagaatctccgttgctataattgagtctctagcgaggtgcgtcgtatccagcagcaactgcagagccctggagatgaactcacatcccgagggcgggtatctcgatttcgctgaacaacaagtgctttcccaagggcaataattaccagatagtgaatgtaccacagtccacctgtggtcatctgctgctgaggatcttcataaaaggcatataatcctcccatgaacgtcccttcatcaaaaaggtggtatagctgtcctgcgtgaaacttgacagcgttgatcaagtagattgagtagtcgagggttggaactacaagcgcttctgcataaactgttgttctcaacccgttccagcccaggttgtatgttgagccctcaaatagaaggctatccgttggaaggggagagtgatagaggttctcatgggtcatgcccaatattttccgagcaaatgaccagttggatgaagttcctaagtaaactgtatccgtgagcttcttttcatagataagattcgaggacacccacaagtccggccagtcaatgatgttgtaaaggccgataggacagtagacaaaggattcgtgagatccacgccttcaaagatctgactataccgaaagttcgccgggtcatcgtcccctcctgcaagggtcagataagagtccagcaaacgtagagacgcgtaccatcttccggtctagctctatcttgctcaacccaactacttgaacttgctagctcattatcgccccgttccaataaagcaatccttcgttggaggtctccaataaatctagtcgacgtcaggtcgcacggacggagcagaggttgttacgtaccctcgagtaacgagtactttctgatctcggtcatcgaaaacacacgtcaatttgcgcttatggcatatattgcagggctgaaacccggagcacttgattttctgtttgcggcaccgctggcacctgcaagcataccttgggtcagctgggccgaagggatgtcatagttcacatacgcatttgttgaccgcttcctaacgccgttctccttatgtgatccgtccattatgataattgtcgagcgtctcaatgtaactcatgtaaaggctcaaactcgcgagtatatgacacgacattgggaagcggacagactccgaaatgcggggagaaggatcgctctcgccctgatagagacggtcaaactggctatcttatcagagcaggaattgttgccctgaataggtatgttgaggagaccgtgcagcagtagtcaatatttggctcgtatctgccatgcctgctcgttgataacagcagtcgggagcgcttccggtctgatatccaggtatcggctaccctgccggagttgggttaggatgacgatcttcgtccccagttttccaatcgaaagggccagttccccatttcacttggcaggctcctccgcaattctcgaagcagatcagac

SEQ ID NO: 5810 - DNA, 5013 bp, Emericella nidulans
cgacggagtacgttggcttcccccagtatatttccagcctcgcgaaccaggacacctggtctagtcgtgagtactggcgctcgctcctcaaaggctgtacaatgccggccatcagctcatcctcgcaacccagacgtctaccatctagacaggtctaccacgattctcgccgtgttagtttcaaaacccttccagcaggcatcactctctcaacgatcgtgcgatcggcgtgggctctgaccctaggccaacacgtagggaacccagacgtactctttggggaggtcgtctcaggccgcaacggcgaccccattgccgaaagagcagccggatgctgcgcaaatctcgttcctgtgcgcgctactatccacccagcctggaccacacatgacctcctcagatctgtgcagcaacagcttgtttcccgcctgccgcacgaatccctcggattccgcgacttgatgcgcaactgtacggatatgccagttggtacagtcttcacctcgctcctgaaccatctggaccaagcatccgagtggacgcttgaccttgatgatgggaaatacaatgtctctgttgcgaagactgaaggtgcgggtgatgtctctgatgtgtcggttacatcgactgctagtacagactatgttgagattgccatggcttacctcgaagatggggttactgtcgaggttgcggagaagctactcagtcaactgtgcgagactgttgatgcgtttatgaacggggctctggatgctgagctacctactgttgattgtgtgtctgagctaaatgctcaaggagtgaatgaagctccaaagtttgaaggcgatctggttgatgccagtcttgttgcctttgaactccagaagagaggtcatgaagtaactgttgatgaagttgttgaccgaggccttagtctgtctggtgtctgatttctgtacttttcatgtttttcgttttatctgttccgcagtagctatattgtttgcttgtttattaacaatgtcaatatttccccaacggtgtccactttaaatacatcaaccaaacccctgtagaagcaggcccccgttataccgtggaaacatcctcaattctttgtgtctctacccccttctcagtcacagtatcgctctcagcctcctgcctgtaaatgtgctcctctccaaagacccgccccatctcctctagtgttcgccctttcgtctcgggaaacaagaaataaatgcacccgacatacagcacactcggcacaataagcacaagatagaacctccacccaacacgatccaaccctaccggcgctgcaacaagggtcacttcacttgagagataaaaccagcccagtcccagcgcaactccctgactgcgtagatggttggggaagatctcagcaatgtagcgcaaactgcgtcgcgtccacgaagaaacaccaccagaagatatagaagaagatgaagaagacggcagcccgcagtccgggggtgttgtctgtattcaggaaagatgccgtcagtgcgcacaagaagaccatgcacagtgtgcagcctgttgcgccggcgagcaggaaacgacggcgcccgaagcggtcgatgtacagtgctgtccaggtgtttccgataagcgtgaatgatgtccagcaggcattcagaagcaacgggatagaccctgttagaccaagggaggcgtagataaggactccgtagttggtcagcacgaaggtgcccaggaactggtttccgatcatgagaatcgtcgcaatgagtgagcgtttacggtttgcgggcgtagagaagagtgctagcgctggccacctggatttcacgatacgcgactggtcgagttcgagctgtttctccatcaggctgaactcttcccgcgctttggtgttgtcgccgttgctatgcccgttggtcgagtgcagtttctgcagcacgcttagagcttcaacccctttaccttttgccaacagccaccgcggtgactctggaataaacggcgcaccgacgagcacgcacagcgggaaaagcacctggaaggccagcggaaaccgccatgcaaactgcgccgctgggctcgtcgcctccatgaaccagcaggcgtaccctaaccatccggcaaggctatagccgaccgcatacatgacgcccgtcacgcagaccatggcacccctcgtctctgccgtcgacacttctgcctgatagatcggcacactacacgctagaatgccagctcctagaccagcgacaaatcggccgaccagaaacatggccatatgcacggccccagcgcacagcgcgccacctacaatcagcaccgccgcgcccaagcggatggtggtcttgcgcccatatgcgtcagagctccaggcttgcaggatacaacccatgaaggcgccggcggagttgacgccattcaaggcgccgatcatattcgtcgtgtgcttgtagtcgggatcggtggtgtcggcctctaggtcgaagaaggtgtagaaattcggttggccgacggtggacccaatgacggcgaggccatacgctgtcgagattgtgcctatggccacgaggattacaacggtgaggttgtaggtgttcaccgtgaggtgagggaggatgggcatggtgatggtcgttgtagcggctggattgcggatgcacagttgtgtaccttggagattaaaggcaaagccagccaatattaaaggctcgtcaatcgtttatagggcatctcagatatagatacatgcgtgacgtacttacttgatcttcgtccagccccggctactcgggcccatctcttgtctaccccgcatatttccccagagccaaaccgaacgcttatctgtgcagacctgcatcccctatggaatagcacggccctcggctgtagagcaaaagcaggagcggggggattaaaccttgatgaaatgcggggaagctccagatacgccaggatcgcccttgatctacgcatctacacgtactccaacgggcgggggcagggggtagggttacgcctttcgtcctcgcatcacctgacagagccatgctgaagcgcatggctctgacgaggtcggtggagatctgagggctctgaagacatggcggagatgatagttatgatcggcgtttagctactatcagagatgcagtgtatggccacgatacgtgcgcctaaagccgccccagaatgctcaagccgtagtagacagactcacctattggtgatacgtgcaaagcagggtcggcattcgtatttttgcccgaggtaaagtaaaatcgtctaggtaggggtctttcgatgacgtcaaagagacagactctagccgccattgaggggtcgtcggcaggggatagtaaaaggatagggtatatggatggaggagtcaagggcaatttgggtaggatatcacctatggaaggcggctactggccggttctgatgcatggtactgtacgtatatgggtatatttggcgtgggcaagactgttatgcacgctagtaaacacgttcaagattctttcccaataaggctgcaaactgattcagctccgtcgcgtctagtggtcgcaaaaagtacccgcagctcttgacgagctggactgcgtcctgcggctctgcgctagggcaaaacgtcttatgtcttggtgatattggcagggataagaaataggccaaggcaaggcttacggtatggagttgtggggtagctatcaaccattattgaacagacgagaagaaaagaaaagaagaagagaaagctggtaatggttagaatacgtgagtcaatgttcgagaaatctgtgatctctcacgggctgcaattagggtcaggagctgaaatgaccaatggattctgtacagtcccaagaagactgtaagggagtgtgagatctacactccgcagaatatatttccagaaggaatggactctgagctctacacaagcagaagcgaggccaggtataaaccaatccaaagcaatcaattattatctgaataaagagatatcagtttatctggtgaacagcctgtcaattcagccacagaatgctcatcgcctgcagtcgccttaggcttgctgttagtcgcaggcgcacaattgatgctggacaagtaaacacggtgcgctggcacaatctacacagacaattgaagcatccgcagtttttcccactggtattcagatatcgctcaaatacagctgcataaggactgcttgatgccatcactattcgcgccgttcaagcggaggcacataggaaggatattacgagttcgatatcacagaaatagtatgaaacaaatcctcgtactgcccaagcactcttctttgtcgaattgaaattgccaatacaggcccggcaaaaatcatttacttcaatcgaaccccgctacaacttcctaggtctgtctcttgttaaatatgatatggcagcatcatgcgtatcttagcatcaatgccggactagactccctttatgcggaagctataggctgacgttagatactggttatactgatgcaagattggtgacttattaaggccggcggcgctgcttcgatatggtaatatctttgaatttctggcgtcgttaggtatttaggtatttgaaggattgaacactgtccagagtagaagccactgcttagtgtctgcttcaattcctttcgacggacaggcccaagacaaacatcgactctaaagtgctgaaatccggaatatattgatcttcaaggcgcctcgatgagcgtgtctatccaaccaaaaggctgaaatcgcaagaagggcaattgtaagaataatcgtgaataaggaatatgcagcgcaatgagacaacaaaggccgggcctaaagccatgatgctcgtggcgtaaacccgctggtacatggtccttatagatgggatttgcagagtagatatcattctctctgaccttcattgacggatgctttcacgcaatatccctagggccctctggcacactctgtgtacgtaatgaaccctg

SEQ ID NO: 5811 - DNA, 4694 bp, Emericella nidulans
caaggctatcacgctatcacgctacagcaggttcggatgtagacggtacctaagagtttctatgtcgatcaagattcgaaagatacgaatttagaacggcgacctgaagtctttgtatcgggtaggatgaggaatagtttcgacttcttgagctcaatacaagcaaccatatccaggaaacaccatcggtcaggccaccgtctgcagggcggagaaaatgtccttccacctgcgacatttccatgatccagcacgcatggaacataagaaagttggtaaagtttgtgttaagcttttgtcgatagagtaagaaggttctcccaatcatttatgctggacaatggaaggtactgacgggaggatatgcgactgaacggagtaatgcatgtccatatttcaggacagcgttgctgtctatcttctcagctgctcgttgagactctaaaactgcggcgttttggccttcgatcccgtatacttgggcgaggcatttcaatatagatataagagcaatctgaggcccaagatagaggtaaaggcatacgcatatgagtcaggtacagactcaaacccagtgaaaatgtggaggggactttgttgggatagaaagagagtgtcagaatagtaaacgctatatgaaataatagaatatatagacaatggtaaccgctaattgctatcatggcaattgggttagggttacagctgttaaattataataaagaaaggggtaaacgctcattctatgaataatattgatgccgaatttctagaaagtaaagttgcagccagacaggattgagcttggatatccaaatccgcttggctttcatcgaagacagactaaaggtgactgggaagtaatagggaggccaagttataatctgtccaaacaaactgtgtctgggcaatagatatacaccattcaagactgacatggcatttggggataagcagacgcaagccaaatgtgaaagctgctagggaaagagatttgtgactgatcatatacaagtgtttacaagggaggctgctagatgtcataggcaaagacccaaagaaggactattatataaatcgaataaatataaaattgtggatagggaaggatgtacaacctggaaaaattgcagttctatgccaataaacatacaactccttagatatccaatctggtgccgcaggtaatctaggacagaatccaatgttcgcaaggggtcccaaacaaagtgcaaaaagttgattgaaggaatgcaacatgcatgaacattcttgttaattccctggcatcatggaacagcccaattgtctatctgcaaccgtcaccagatacacatccaaatgtcttgcttctcttatcttcatcagacaccaacatctccatctaatgaccctggtccggcagttccccaacgaaacgagccctagactcttgaaacgcttcaagacatctgttcaactctattgaccttctcaaatggccttccatccactccgcaaactcacgatctataatctcaacagtaacatcgaccatccccagcgtcccatgaaacaggtccagaatttcaggcagtgcagcttccgccttgcagcggtcctgctcgaaatcaagcgtcaccagcacagttgggacggcgcgcccctcataaaggttgtatgattgcctcgtgcacacgcagatcatcgtcctggagcgcgggttgtgatttttcagaatatccttgacgagggcaaggaggatgggcgcatgctgggcgaggactacttctgagttcgagctcgagttagggtctgcgtagaacgttatcgcgggaagggtgcagagcagtccgccgcccatgcggggatgtacggggtcgatgtatatggaggtccaactattatgacaaggggtgtgcggcgagacgaagggctcgttggggaagatagctgcgagtcgggcttgcgggcttagatcgatggtgtcctggatgtcaacgaagctgaaatggttggagccggtggaagtagaacagaggctctcatccagagtccggtgctgagccccagcaccaacaccagcaccagtccccgctccaggaacgaagatctcagcttttgcactgagttcgcttccgctggacggactgtcctgtgcagagcgggagccggggctgaagctggagatgaagcctccttcaacggcagagcgacctgcctcgttagcacatagggccaaacagaaaagtgcagcaaatagagagtgacgtttaccaaaagcagggtataaagcatagccattgccgagttgcgcgcaatcctcgggagtaggtcgaaaggcatcacgccaggtgttgaacatttcattcatgaggacatcgtagcgcacgtcgtccggcatctcgaggtaatgtagatataaaaggtagcagcacgaaagggttgagggcctgaaagtatatctgcagggtaaattccagaaaatgatggggagaggaagcagtcgattcattagcaggggggacgggtatacacaggcgctggtgacgatctcgccgcccggaacatgatcgcgaggccttatcgcgtgcgcccgaggtcttccagaaaccttgcaggagtgctgggctggtccagatctaatcttagcaacgcggacacattgtccgcgtatcagggagcgacggcggctcacaactcttcatgaccttcagtggcaaggtttattcgttcgacgttgactcaaaaacatcgagaacgctgaggaggaatgaattggtctggaattgtcaggaatcgctctgggtatgagaagatgcaaaccatgggcctaccgagttgagagactgcagtgtctctcgtgtcttttcgacctctccaggggcgaggcgggcattgagaatctggatgagcctcgatatcttctcgtcatcggcaacaattggtcccaagataggacccaactggatatcaaacaccccgaatgtaaactcgaagggagaggcaccgacgcttgcgttccgtgcgataccattattcacagagatcagataactggacgtaggctcgctcctctgaagatccgcaatcaccagccgcaactcttcaagcctttctgggtgcgttagtcttattcccgcgtcgagaacgctctgcagatcctcgagtgctgaccctggaacaaggaaaccttctccataataaaccagccatgtccaaacacgcgctgggagcctctcatcgcgggtcccgggaggtagcagcggccgaatgaggtccaggaagtcacgaaggacttccaacattccaggaaccgttacagctgccaagctgacttgatcgaagaaaaagtggagatcttctgcaaggcctgccgtgagaggaacagagcgcttctgcatgataccagctactgcgtttatagtctgactcttaaatagggaatgcaccgcatcaagaaagctctcagcctcggaaatgccctccgcggtcgcaaactgcgtcttgatgttcgtccctagaagatcgccgaatgccttatattcgtcacggctcagatcgaagagtccccgctcgtcaaagatggttctcagtcgacggactcgttcggcagtcaacaccttcttcgcgctccccattgaagcggagattccattcagcgtaaccgggtcgttgacgacaattaggaactcggctacttcgggggacgtgagtgccttccgccataatgtgactcgatcagtcagagcctgaatatagcttggttggaaggtagtcatgagccagtgcaagccgcggtatacggaacccaacactgggccaaggtcagcacccagtcgctcgaagaatgtcttgaagtttcgataatgcgatataagcgatgggttcaaaacagtgcttaacgaatctgctgcaaggagtgcaaatgagcgatactcatccggcaccagcggactggagcggataaaattcttcagtgcggagaggacttccggcgtaagaacttttcctgcattatcaaacatccactgaactgtgggcgcgacctcggggtctgaaatcatgtggtggattcgttcaagaggagagagtgaccgaaattcctcggaaagtttggagagtttctgagcaagcctgctgaatctccgcattgcttcgagacgtgtgaggatgtcttgagtcggaggctgggcattcttttgccttgtggttggacttccagttgacttcgaccttgactgctttccggcttgagagagcggccgttctgatgttgatggtcgacagcgtgtactgtccacagatccgggctgcaccaaccatgtgaggtgctgcaatgcttcaaggccatccaggatattcacgcttgaggctgggggtgggactgaatctgagggaagacactctttaagcaggggggatcctgctctcgtccccgttgtccctacaaccgaatcatcttgagcaggagcaagtccacgttcaccactgtcggattcccccgatctgaacccgtcagcaagcactgcatactgttgtaggatatctcgagcattgttggcatttgcatccacattcgtagccgtagccgcatccatgcccgagcaggccacgctgtccaccaggggcactggcgttggcgtatttcccatgttgttggacaattttccatccatacttccagattcacaggaaacgagccagtcaaccgt

SEQ ID NO: 5812 - DNA, 6307 bp, Emericella nidulans
gaaagtgtttatagagtacaagaggcgtaccgggaggaaagagtttgtacagcgtgcaaatagtatcttgtgtgtgagtgtgcgatagcttaactgacggcatagtatctctctctaatcttaatgccgggaccagatcgaggtggaatgttgatctgctgtttcaccaggggcagagaggtcaagagagtcaatagtcggacaacaatgtcctgatcactaggaacaaacttttattcttaagaagtagagggagacgcggacattcctcagctatttttgcactggtacggttgctaaactgaacagaacggcggactgatctgttccaagacaggtggtatgtctcttgctgaagtcgcctctctgcttggaatatacgggtcataccatggcctagataaaaggaatccctgcctagaccttgtctttaatgagctattctggcagactttagatggcttatgaagaattcctggaagacggcagagctactgtgaggcgaaaaggctaccaaaacatccctactaggtctatcacgacaacacacgggaaacatatcaatactgtcgtggctaaacatcttgaccattggcctagcgccgtaagttgtgcaagtccgattgaaggccctaagtgtagcggcgcaaaaggcgcttctggctagcaatggaggttataggaataagtaatcgcgttggttggcaggacccttgtgccgtgaattgggaatttggatcacataggttaagggtattcgcatatggtgtgcgactctaggaggtgatgccacattaacgaagtttgcactgatttgatgaggctatagctaggactttatccacaagcatgcgtcattcaggatctgtcaggtcatgctgtttcctcttcgctaagaaataagccgttgacttactgataggtcatagcggcaggtcctcagtacctagttttctgaggcagactcaagctaccaactcgccttctcatctttttttcatcctgcctcaatcatacacagcaatgcccacaacatcaggagcatacttcgtaaatcccccttcgcccccctcattgctgagcacaagctcgttagttccctttatccacccatctgtcagaaccccaagtcggccagaatcccaccacccgagtcctgggccaaagagctcactatggcgtcccgatagcggaacctccagtctgactgggttattatcattgactttgattgtgagattccgcgagtttgcaccccatccccaggaagagtcaaatgcgacctcattgtttatgtagtcgatttcgaggtatttggaccccgacgttgaagagttgatgtgggccgttgcggcgctttctgtgctgagatcgacaatcttggagccagcgggaagacagtatgcgtcagggcaggtatatgcgcctgctggggatgtcagagtaaagtcttgcgcgccggtatagtaggttggctctgggggactgagggtaatggaagagaggggaggagcgttgcggatggtgatggtgttattggagccggcgattaggctgacggatgttgatatcgaggaagacccagctgggatagaagttgagattggcctcctgctgctgtctgtgatgatagttatatttgtcgcagctgcagtgacttcggtaagggtgatattgagcacaaagttagggcttgaagtgatggcgtagacgtcggagaatgtcgtcacatcacttgccatacatgtcaacatctaccagggcattgatcaaaggaagcgaaactcaccgattcgtggccgcaaacacatctgccggatacactccctcctctaccgtctcagcaagctgcaccagcatcactccgtgcgcctcgacaacactgctgtagcttgtcttgaccccattcacggtttcatccgcccagacattctgcagtgtctcagcgtactgcagcccaatgtccggcaaatcaagcgtgatctccctatcctcgtccctccagttgatcaccgccgcaatagtcctccccccttccaaaggcccactccatacctcatacccttcgtcactccacctccttctcaaggccgcgctgacaccaagagcgtcctggttgaatgcaataacatctgcattactcagaatctccaacgattccgccctcatacccgggattgcagccccaatcgtcaaggggctcttgaggatactccacagcgagaaatgcgtctgctcctcaggcacggtcaacactccatcgagcccgacaagcaacatgtctagatctggccactggcctggcccggcaaagtcggtttgcggaacggcctggttgagcgtgcggaagatggagcgccagtgaggtataatgtcgttcccgatacgccacgagtggccaatttccggggcccagagggcggggaagtcgataccccattcgcatacttggaataggatgtcccggtcttgggcttggatgtagcgagacatgtttgcaaaacgggggtgcggggatgttgaaggcgcgtaattgacgtttgggtagttagttgcggcgtcagagtagcagttgtcgtctgacttgttagcattctaagactagagaataaggatatggtatagagtacatttcagcgaatcagctccccattcggcgaaggttcttgcatcgatatcctcgtagtctgtcatcccaacccaatcagcatattttcgcccggcaacaagcggaagaaggcaaagaaaagaagacatacacaagctccctgtaatgttgggcggactcccacacagcagaatacccgagtcgccgtagactccgaacagtagacccagatcatgcagatattgacccatcgctgggaagccctgcggaaagagctccgggttccaagtgatcgtgccattgggcaatctgtcctcgacgccccagccgcaatcgatagtcacatagcggtagccgaggtcagcgaggccggtgtcgactagggcttgcgcgttctcgtgcacaatactctcgttgggaaagcagttatattgattataggtgttccatctatatcggcattagtgaaacgatctggacccccaagaaagggaagaattagctgaccccatctgaggcgtgcgtgctagcccgtcatcgagacggggcttgagggctggcgctggggatgccagggccgtggcggcaacgaccattggaacgagggctctcatgcctgcgatctaacactgactggctgggtacgaatggactctgattcttcaatctctgctccagatcagaccatgggaatttatagattgctgcaacgacagctgccgggaaatttcctattcgagatgcagatcatgcagctccaagaacgcggttaggaccgcggttaatatctgcagctcgcacggtgcggggtatgctacaatgaataataatactgctgtgctatagcctttcaagtgttgcttttgtccagcactcaatctcgccctgcattgagtacatcgcgctggagaaagttgccgcacctttgcctgttctgatatatggacggccgctagcagagccctaatatttcttatacaatcctcaatgtcttgtcatattatgctgttttcatcatgctgtcatccaatgtcatagtctcacagacgaacagtacgtattttttgattgacccccctgaaccccggtccaggaaattgaaccccaacgacattggtaccggctcattgcgctaaccacaaatacgatgatcaagcaagcatgcacagctaaaaatctgtcaaattaggctgaatacgtttgctagagaataggctatactgtgtccgacttgtacctagcaccatcttccacatatagtacagttgtttgctcagatgccaacactcgtctgcgcgggcttgtctctagctggtccatacacgacagagaactggcacgccgggaaaagtgtccggggttgtatatcatcctcgaacggttcaaggagtaccaaagacaccagcagcaacacaaagtctcccatccccttgcatgctccaatagtcactgcccaccgtcgcagctccatagagcgcgtgacccgggtcatacttctccttgacctgcaaaagcgtgtcgtagttagttccaaaatagtccgttttccaatctgggttatcgaaggttgcctcattcgtatatgcgccacctcctgcgtcccttgtaacttgtttgagaagatcctgatttgcgttcgtcagcgcctgacgacgcagaatgatgtctgtcgacgcccccggctcaaaataagcatccatattcagagtgtagagcgcatctcgccaggcaggaagcacggcatttgaggcacgtatattccggacccgggtatgcgtgatattggccgcaatcccgttgatacggatattcgggtgagaagttatattgcgcagtgcggagactaattcggggagcttctcagcgaccgtctgacggggtatcagtcggccaccgacggtcgagtttgtgaccgtgatgccatagggtaaggcgggcgtgtagagtgcaaagtggtcgtagaacgatgactgggtgtttgtttcgtaggtgtagttcagccctaaatcatccagggtctggacgaagggtgctaatactgcagagagagcagatgcaggactatccaggagcgtagcggcaactaggctgaaagaggtgtttgtgaagctgaatagagtggtcaatttcggtgtcttgtcgtggaccaggagttgggtgtgccaggctgagatggctgtccagtatgcctccatctctgcgtcggcgtctgtgtcggcctcgttgccgccagcagagaatgagagcgaacgccctgcgactactccatcttgatatgcctttatcgtggccgaaagaacgaccgcgtaagtcccccctccacccccgctaagcgcccaaaagaggtcctcgtactcggaaggcgagacgacaagatgacgtccacctgtagtgatgacttcatattccagcacattatcggcggccagaccatatgcaccctgtagcgcaccgtgcccgcccccttggacgtacccaccgaccaccccgacagtcggattaaaagggccggtaactctaagaccgtaccttgctgcgaactcgtagacctcgaagccttggacacctgcgcccagcctgagcgctggccctgaatagaccggaccggtgtggttgaccacctgcatcccattcagattatgcatccacagtgccagggaccctgcaccggtagaccgtccaagaaagtcatgacctgtgttcttcacggacaaacgaatattgtttctctgcgcgaaggctagcccggcgactacatcctgcgcggaggagacgtttatcgcgtagggagcgatgtttccgagactgcatggagagtctctggacatgaacgggctgcagctgttattttgccagtataaggacatcacattgacggggtccatgaagctagaagcggtcgttagcaggaaaccagactggagggcttgttccaaacatatgtggcgcgttgaggcatcacttactaggtaggcgggcttgcccatctctcctgaagtgtaccgcatgtgatgttgttatattcttccccgtggcatggactagccagtgaaatgcctcgaattagacggccaccgaccgagtcgtttagttgttgccactgttcggtactgggccattgggggtcgtttgggaggtaacggcaggagctattgatcgtgggacagcctggtgctgcagcaacgcctgaaagcactgctagcaagctacatgtagtaagcagatagtggcgtgacatgctattgggatggaagctgttgatgcacttatagaaacgctgagctgtcggcgtccacagcttttttataaatcaaacggcctctccaccgtactcgcctcgacctgctgctagaaattagattcagcctcgcaataagaaaatattaattatgtcattgtcaaagatggccttgcccaggttattatgcccattatctcgtgagcattccgtactcgggcccgcgggcgtcagggccagagtcctaatggttttacttccaggtttactccggctcaattgcagaatatgactggatagctatatttatttcttaccttactacatatctaccaattgtactggtacagtcattatatgtatcacggtactcctatctgtaagaagaacagaacgtcatcgacccagaaagagaagggttatccgcgttctattcgtgctgttcttcaataaaccagctg

SEQ ID NO: 5813 - DNA, 5565 bp, Emericella nidulans
ctcactcacttggacgggaatataccaacgagtgatgtcttaacgaagaccgtgattgatgctccagactggttgaagtggacaagcaaaccttatcgttcaaaggggaccctccagcggatggaaagaacagcaatgtgacaatatcagtaaaggatatttaccagaacgtggccaaacttgtcgtttcgttgcaatattctgaattctttcaggaaggattccgagacgaatgtgatgccatcattgggcaatatttcttttttacattcaatagcaccgctctcaccgatgaatctgctgagctggatgtcgatctagataaacagctatcctggcttcattacaatcgtgacaacaaaactctctatggagaagtgccatcggatctcctcccaaacacttacaaagtgcggttgacagcccataaagggaccgcagagggccacaaaacattgatgatcaacaccgtaactgaggacgacttgaatgaagatggtgcgtcctcagcggattctaatggttaccatgcaggcaaagctggcattatagtgatggcgatcttcataccacttggatgcacagggattgctctgctcctgctctattgccgccgccgcaggcaacgatggaccaaagatgaaggcggaccagggtttgaagagaaatcactcgccccaaacccttttggtccgggattgtcgcactgccagccgtttgagaagaccacaccgggaaacccaccagccattcgcacagctccattgcctgaatcaaagcctgcgaaattggagctagagccatggtggaacgttagcagcgagattagaaatggatatccaccaacagcctcaggtacagaaaatactttatggagctcgacgatcgattgggacttccttccactactgtgacctggaggggatgagaacaaacctgctgaagagcctgctggcaagactcaccggctctctttacagagtagccctccggtgcgtagaggtacctcaaatcgttccggcagacgagagccacttaggcagattcagccacgaaggtctacgaaacgcaactcggcagtatcgtccagatccaagaggtggtccaagcggtcgagtggtatctcttctatctctgcgggtctcccagtaaggcttagcggcgcaggccacggagcgggtggttttgggcctccagggcatgggttcgtgaagcttccctggcaaaatacgcagacatccttgcaaagtgaggagagcagcctaggaaatctagctccgctgttccctcgcccccctgcccgcacgggggacagtcaagaccccacgaagaggatgagtgtgcacacagtggaccgtgatagctcgacactttctgattccgattcgttagaggcatttgttcaaggccgcgcaagaagccgtcactcatccaatcccttcattgctggcccgataagccgtcgagtttcttccaagacccgtgccctgcaacgagcacgaagcaatgctagccgcgcggatactgtcaatacagccatggacaatgatgactatcaacgtcgagagcgcccctggtccctggcaatgtcaggttccgtgtatactgatgactaccgtcattccgcatatctcagctccttgtcggaagagtcaccgcgcacgcagccactaaatgctctaccaagtcaatcaagccttgcacaacactactctaagatcatctcaccacttccccgttacttcagcgagctgagtttgaacaatatcagacacgatgaaactggaggagcatatgttccggccgatcagcagaatctctcaggtactcgtcgttggtctcgatcaagcccgtcgttacagaattggcgccggtttcaaaaaagcccttcagcgtcgtctttcccgtacgacgcgagaactcgccgcgtgagtttaatgcaaacggctgaccaagactcgaactctcagcgcggcttccagagggaaccaacaggaagcgtgttgagcgatatagccttcgtttagtactaaatggtctgttgtttcttatcaggttaagataccatttcgttcggtttaggagagtttcagtgttcatattgtgtaactagtataattgcaaccaatttttgagaaagaagtcatcgattcagctgctcaaacaccgtcttccataatcgggtggccaatgtggacgaaagaaccccgtttcagctgggcttttaggtctcacccaggcatcctaagcgacggcgatgattggctcagaaagttccttctcgaccgcaggatggtgtgattgacagattttttcagaccagcactggtaccggagtggcttgacaggctgcaatccaggctgcgcatctcatttcaatgtatggtttcaatgtaatatttatcagggccaaccctgctgaaggtcatgtggagtaagcagcgctaagcgtatccgtcggactttcatcatcgcccggcagcacgcgactggaaatttgcactcgggcatgctcttcattcttagttgcgtgagatttcttttcaggacgccgttgacactggactcgagattatctgatacgatatctaactcaattgtagaaggggaccttgcggcaaatagtatctctactgagtactccgtacctatcctgtaattatacctacatttggctaccttgtggcaccgaggttccaacgccaggatgatatttggcatcaatgatccgggaatttgaggacttactcttcataaaaacgatttaaaaaacaaggactggggctggtgatatgatttcattaacagttccccacttgagcatcatcccttgagaacgctcttcaaaagagctggcctggtctggttctcacttctgggactgtcccgcacgccgcctatcaattctgccctcttgccctcctctctcccacctgattcttgctccctccctccccctctcctcttgcccatatttctgtcattcaacctcgtgcagggtctctgtgaatctggctcttcttccttttttccaaaagttaattgtcgcctgttgaaatcatgggccagactctgtcagagcctgttgtcgataaggtgggtgaaaagcgactgaatcaagttcgctaccttgagacccctctgtttcccattctccccacactgcaagccattccagacgcgattccaaatattacttcccgtctcgctttcgctgtcgaacttcccaatatactgccgttttgcatctcgcctttttttttgcttaccttggatcgggccatcctgcgtgatcgtcatcattttgtgcttttcccttcgctggagcggttccagatttgtgcctcatttttgcggggactccattcaagcaagacgaaaagctttcctctctacgatacaacacgcttttttccccccttctattctcatttacaggaaacccaatacgtggatctccttgcggccttgctaacattgtttgattcgtccagacttcctcagaaggccaagatgagtgctgtatatatggcgtctccgccatgcagggctggcgcatcagcatggaagatgcccacgctgccgttctagatctccaagcgaaacaatcaggctctaacgaccaaccgaccgatcccgacaggcgccttgctttcttcggagtatacgatggccacggtggagacaaagttgctctgttcgcgggggagaatgtccataagattgtcgcgaagcaggagacctttttaaaaggcgatattgaacaggccctgaaggatggatttctcgctactgatcgggctatcctagaaggtttgtgaactgttatcctgggagggtcttgcgctcgtctcgtgcttccgggctcctgtctgacccaattagatcctaagtatgaggaggaagtttccggctgcactgccgctgtcagtatcatctcgaagaaaaagatctgggtggtaagtttgctctaggggataaggggaacttgggcggtaacacactccacaggcaaatgctggtgattcacgttccgttttgggtgtcaagggtcgtgcaaagcctctctcgtttgaccacaagccacagaatgaaggtttgtgattagtttctattgatatgtcccatattctgatgaatgggtgtataggcgagaaggctcgtatcagcgctgcgggcggcttcgtcgactttggccgggttaatggcaacctcgccctgtcgcgtgccattggagattttgagtttaagaagagccctgaactatcgcctgaacagcagatcgttactgcctacccagacgttacagtccacgagctcacggaggacgatgaattcttagtaatcgcttgcgatggtgggtttcccctcaactttgccgctctgttccacaatctgatatactacaggaatctgggattgccagtcttcccaagccgtggtcgaattcgttcacggcggtatcgcggccaagcaggatctctatcggatttgtgaaaacatgatggacaactgtctcgcttccaacagtgagactggtggagttggctgtgacaacatgacaatggtcattataggtctcctcaatggaaaaactaaggaagagtggtacaaccagatcgcggagcgggttgctaacggcgacggcccttgtgctccgcccgaatacggcaagtctctcgaggaacccacggcctccaatccctactgactgaaccgtgggggttgcagctgaattccgaggacctggaatccataaccattttgaagagaacccggacgagtacgagatcgaccacgatcgctcccgcccattcaacgtgcgttctggtagaataattcttttgggagatggcagcacgttaattccaggaaaacagaatgacgaggaactctttgaccaaaccggggaggagaatcacccagaccaagtgcaacgccagaataccgacacagaaagaaatgaccgtgaagggacgcctgggcctcaatccgcggctcaccagacgaacacgtccgcttcggatggctcagagccttctaacacaccgcagaaacccgcctcttcgtagcttcgtcatgagatttacgcctgattcccttcattttggttcctgaaacgactcgtgatttcacgatccacacccgccgccccatctccacgcccggtgccgaagcctcacaattctgcccccatacggtcgctcattgattttctgtttctcacgatttgaaggcgcattggtgcttgtgaccgcgaagatgcgaaagagacggaccatatcatccccttctatctcttgttttaatcccatcttcttactttttacgagctcatccagatcaaatcaccttcgtgttactccaggatggatatctttgagaattcgccgaatgggtggaggcatcttctttccctgtcatctttcttctctatgtttgcacatgccgcaagcggcaggcctcacgagagtacgtttgtttcatgtctcgacataagataccgcaacaaccactattgacgaactttataacttccatgattccattcacgtttgacatttt

SEQ ID NO: 5814 - DNA, 8077 bp, Emericella nidulans
  unsure (1)..(8077): unsure at all n locations
tattggcttgtcggtcagtatgccactgacctgtcgtccctttttaccactgtggcatccttcgtggatttgaagctctgggtcagactgtggcatgggcgtaagttgcctccatcaaccagagaatatacggacgagagtcgctaacctgaccaggatgcaatccgaaggtaatgccaaccactttgtgagcatcggtctcaattttggaattaccctccttagtgttatccccacatggattgtgatatcggagctcgaacacagccatgaggtccaagtcgttgttgaagataccaaaaccgctggagaacctgagaggaccgtctgatgttaaaatatatcggactaccgcacctatccgttgttgacgtgtgattatgtgtatggttcgctactgtcgtccatgccattgtatctagattatagaatataccccaataccgactgttaccgcctgctgttcatgtaccgtagggctcaagacataccggctggcccatagaatgttacttctgcattcctatgctcctagctgaccgtcttgaggcttaagtctgctgtcattcaggactggcttcgtcacgtgatctgagatctttggcgtggacgtcgactttgcaggatgaacctaccagctttccagacaagtccaaagtccgacctccaacgttcagtatgccaccacccaagacaaaggtcgcctgcaagtcgtgtcactcgcgccgagtacgctgtgatcgaacgcaggagacgccctgctttcgctgtcgctccactggacaggagtgcgagccgattgtgtcgaaacgcggaaagtacgtctgattgtgcttattatgcttaatgaatacgtaaattgacagcatagacataagcgcgaactcttgaggcgctccgggttcaggcattcatttggcccggtgcctggtgcttcagagtcaggcacagatgtgacttccttgtcgactccagcgacgtttgcgagcgagaggagtgcgcgagaatctatcgccacgtatacctcacgcgccaataccactgaatataagagcggtcgcaccatctactatggcgactacttcaacctcgagtacacacgcagggagctcgatgagagccacgaagactataaccctcgcatgagcaacacccgccttgcacacgttgaccggctgggatcgcctacgaggcggtttgttgacgactatttctgcagggagcgtgcgcgtctagatgaactaggcgcatttgacacgcttaacaggaatactagggataaactcctctgtactttttttgagatgataaatccggtggtccccattattgaccgtaaggacttcctcagcaaactagaaacaggccatgtttcacagctcctgctgcaagccatgtatatggtctcattcttacacagcgatccgtcaattatagcggacgccgggttcggtaacaggtatatggctgcatttacatgctaccaccgggcaaaggcgctttacgatgcaggatatgagacagatgccgttgcggtgatccaggcgcttctatgtctgtccttttggtgggagactccaacgcaacaaaaggacatgtggtattggaccgggataagtgtgaaccttgcgcagtctttaggaatgcatcaagagtaataaagctgcccttcgccgcctgtacttgctaacaaatctaggtatacatacttgtccttggaccagaggaagagcaaactatggaggcggctgtggtggactatatatgtgagctcttcctcaacggattggttattaactaacagaacaccagggtcatgacatctccactgcagtgcagctaggacgtatcccacatgtgaacgacgcgtattgcacgacaagattagtgacagaacaggattttgatgatgatgatgataatgatgaccctcctgataggttcggtggaaacgcgacaaaagagactcggctggaatccgtctatctggcggacctttgtctacggggtatgtctctcctgaatttgctagcctagagcagggtactaatcttaacaagtgagcggctgttatcgatcgctatataccgggaactcagacccatcaacagcgttagggaacatgaaagctttagcggagtggaagacctcgttgccattagagctgcagtgtcgaacaacccttacactacataatggactattcgccgcattgctcaacctgacgtatttgtacgagtgccctcttgtaacttgttttgggtatcctaatgtggtgcagttgctttgagattatcctgcgccgcaatcattttcggaaccccgagatgatgacaccggggactcccgtattcgaggcagcggtcgagattgtcagggtactggaaaatattctaacagcagagctcataaccgcttgccctttacgactgtaagcagggtccgttgcctccaatgaccgctgactgatctttgtaggctaccgccaacatttgcagcattgtctgtactcattttgaatatgcgtctccctgcgcgcgaggtaaatgaagtttcaaagcatcgagcacgactatgcatgctggtcctaagtaagctggtcgaccactggccacctggacttttatattatcggctatttgcacgaatcctcgccgctcggggctgtgaagttccggatgaacctccgccaccagccggcatcaatgagcaaccgaccgagttttgtcctccagtggtggaagggcactacagcttcccaacgacgagcgactttctgataagcaacactatggctggcgaagaannctaatcggagtgaactcgctcttcccgttttcagcctttcttaatgaggagtttatcgagaacgatctaaatccaatgcgctctgccaacaatgactctctccagccatgaagaatatgacgaggcggcttgatacacacaacgcttcccgtactactggtccgcttcatttccgataccacatcctcgtcactggtgtccttctaatcttcctctgcagcgtgaaaataccttgcagcaacgcctccggcatcggagggcacccgggaacatagacatccaccggcacgatccggtcgactcccctcacaacactatagctatagtgatagtaccctccgccatttgcacagctgcccatacttataacccatcgaggctctggcatctggtcgtacagctgtcgcaaggcaggtgccatcttatttgttaaggttccggcaacgatcataacgtccgcttgtcgaggagaggcacgaaagatgattcccagtcggtcctggtcgtaccgaggcatggaggtgtgcatcatttcgacaccgcagcaggcgagagcaaaagacaagggccagaaggagccattgcgagcccaggagataagggcatcggtctttgtcctgtgatgagtcaccatacttgttagtcacagatgttttggatagtgagtcaagctggagctattacagaacatagtcgagcttattgctcttttcaactttggtttgggtgcttgttagcgtagtcgctgtgtttttctgccagttcgtggcttgtcggacctgtatcgatatataaggaagtgccgcttgtcggttaacttgcgtagaagccgtggtaagggtgagccccggcgagcgaagaagtttcattctgctcttttgatcgtacttgcgaagtagctcgagttcttgaagtgcaaattagaaggaaaacgatgaatacctcagaagaaaacaacccatggggtatacttaaacagctgagtcggcgatatgaatggcttggcgttacaggtgcaggtcggcgatatactttttcctctttcggacaaccatgtacaatctctgctaggctactcgctattgctgcccaccataggaaagctccaacaaagcagtaattatcagacggagctatactcaaagcgaaacttacggttcagcagttgaaccgaatggcatacgcatttgtcaacaccatttcaggggacctttgcaattgcttagttgtcccctataatactctagcagtgttcagcgaaactcccttctaaggtcacgagctcgcatctgattcgacacatgagcaataactgtataaaaaacagtaaaaccatgataaatattatctcatccacttaaatctatctagcaagttctattgctgacctccggcaatctcaagggcaatacggttcattgacgagactggcttattaccttgaagatataagccaccccgtggagagaagcaattgttcgaaccataagtcgggagacgcactcgggcctacccactggaggttgagcaaatcactgtatgcagatattgaacagtgagcatgcacctgtcgcagcctaatacctacaggcttagcagtatcaatgcacatgttttcatcattacagctcttctgtcgactcaaggaaaagccactcaaggttccagggcagatagagttccctcgcacggatgtagtaaagtgcaggaaaatcagtctctgatgctacggctgatgtaagaaaccattgggccgacagatagttgttgttactgtgcgatgtacgctccagactccaggctggcggcgtgttgatggataagccttctggagttgctgggactatattgtattagatatattctattcaatgtacatagttaagcacttaccggaaccgttctagggcggccccgacaagaagtacgctgatgttcgtttctgggtgccttttaggcaactccttcggattgcacgtccacttctcagggtcaaactcgtgcggatcgcccacgacaatgaattgatgttgtagcgtttctcccatttgccactgagctggagttcaataccagtgtttggacaaggtcagccgggatcctaaactcagattctctacgatgggaggagtcggttaaggtcttagactgttgtgattaaatacattgcttgccgtaatatcggtgctgaacaatgggtcggtcaaagcgcatcattgttaatttgcccatattcatggaggatttgtccggctccaccatcggctgaaatcggttgtcggtacattccacatctgccctaggctgccagctctagagtgcttcttgcgtttatgcacactggttagcgttatgttatattgcgagacataatcgaagccgccaggtcgttgctcagcgactgggagaaactacaatacttcactaaggacaacagttgctgagagtcaccttccagaggagcaaccagtgatctcactaatatatcaatggttcatggatgcattgactttaccaagatcctgagacactgaatatatatatagagagccaggagagtgcattcaaagctcgtaattttcgtagcatgaacgatcgattgagtcttgagtaaaaccagaaatctcgtagattcatcgaaattaaatcatgtccgtttaagttcactttgagataaatgagatcttcgctctcataggggttagggcttataccccgccggccggctggacaagtctattcattgatatttgttccatcccccactccaccctctgaacgatgaacatcaagtcaaggcaaccaaatcaaaagcggtcccaaaatcaacaagataactgtattccgaatctgaatgctcttattcgttccatgcggatgctccatcaacaccttagcatcggcgatccccgcccatgaccaacaaatcaggaagatgcctaacatcttcttcttgcgtaataggatcatgccccagacaaaaaagccggcgcccaggttacgacctgtcgcgctagggaacaggatgaggttctctggcgttgcggacgggaggccgaagccttttgcctccgatgtaacggattattgcttcggtgaggagagaccatcaactgggacggggtggaaagggacgtacaacctagagggttaataaaggtccctatactccagagtagagaagaagggagccgatagtacttgtggccgtatcgaggaaatacgagagatttgacatggtatggagggttagctgaaagcaagaacagagccgatcagggattacttgtatgctatcaggatcgggcttcggggggattcgattacggcatcgggatttctatgtccagtcatacaacgctgcattctgccgttgattgttagactgcgaagtaaagccggccacttgtctgtcatcaatgttggccagtctgaaattatcagtgacggcccttatcctggcccactttatgatacctaggtttgaagctgggaggtcatatctggaggtaaagaaacaaaacatatcagtccatttggttcaactcgaaactaacagttattgtctacttcctaataactattctaggctcgtccactgcatccacctattattctcgcgtttttctcgacctctcgctcagtcaagaggccttatcagcggcctccttatcctcagccttcttggcttcatgatctggcaatttcttgaacggaactatcaaggccaggacgacggtgaggcaggccccgccagagcgaaggcgaagacatccttgatgccgaccatgtatgcctgtcgaatcaaggcaaggtctttcccgtggaaggcattcttcaggtcggtcacgcccatatacaaaatctcaaaggagctgatacgcggagctgtgacagagagagtcttcagcatgtagttattgaagatggaatttccggctgatacaaaataggcgccactgatggattggcacactggaaacactgttagcagcaatcatggcagtcgactccggacgactcactaaaggcgacgcccatcgtggcggccacagtttctggagtcgcaaagccctgtagcgccgtcacaggcacctggtttcccagcccagttcccaggccagacgggacctgcgcgccgatccaccaggctttgggagttccgacgtcaatgcagtagatcagagcggcgcccagcacggcgatcagccccctgacttgctcaataggctgtagtagatgggttttcccgacgagaatggcgctaataatggcaccaagggtgtagaaggccatgaacggcaaactatagacaccactcatgatggcgggcgagccatgcatggactggaaatagatgggcaggtaaaacaggatctggaagttgcccaggttggcactgcaacagtcagctaggtggacggatctctcttctgaaagggaagtacgacttacatccacgcgtagaggagatgcgaccagaatgggcgcggcttcagcatgcgcagtggcattatggcatactctccctggaaccactcgatggccacaaatgcaatggacaaggccacccacaaggccaacgtggcgatgacagcaccgtcactccattgcttcgctagactccccactccatagccaatagaagcaaataacggagcaaaacagcacggttcacccgctgaggtcgagatggcggagaatctctgtccatgttgctgaggtgggcttgatgtgcttaggcatgcggaggaagagaaattgcagaacaatagctgtgccgccaacgggaaggttgacccagaaacaccagcgccagctgacctcgctggtgaacacaccatcaagcaacggtccaatcgtggtagcgatcataaaaacgcccatccacagcccaataagcattggacggaatttggggtctgccgtgaagttgatgatcagtacggagccccccagcgtcccgcacagccccagccctgtaggcacgcccaacgatcaaagcaatgctgtttggtgcagcagccgcggccacactccccaccgaataaaagccaagcgccatcatgtaggtgtatgtggccgagaaaaatctgtacatttttccccatggggcagaggtggtgccgacgagcaggaagcaggccccgctgtaccacccaatatggtcgagagcgtggaagtcgctcgttattttttggaatcgctgtagcgacgataccctgtggctcctagttagtttgatcctaggtaaggcgcaacgctacca

SEQ ID NO: 5815 - DNA, 5458 bp, Emericella nidulans
tattctgcttggccggagtgagcggtgaccaggtgacgactgaattcagccagcgacaacacagcacagttcttcaaccgttgcaaatcgagatctttgattcatcccgcttcttcccctcctctggcacattctacaggcactgtgccgagtgatatacctctaaccacgaaattcatattttcctatgcgacaaggttccattcagcttcgaattcgtcattgattgagccttgttgcctcattgccgctgagaccgggattccgacgggccttcattcccccacgttcaactcgactaaagcatcgcccgaacctaaataagggattttttttacccgtttccccttttcttttgaacgctgccgttattttgtttagcgaataaaaaacggcgaggtatttgttcaaaaaacgggattgttaaggtaagcactttgttgcgtccgactggaccttacacacgtgcgatgataccttctgaatgagatgggaggcctgcgctggattcagacggcggtagttggcttttcttgaagccttttcttatgttgaacaactcgtttgatcgaactccgatattgaatggtgcgttaatcataggcattgcaggttccgtttagcctcgtcgctggtaccgagcactaccggctcaacacccctgcatgtgctccttctctcttcttgccacattaagttaggaagctcaggtcttgtggggagctcttcgatatggcgccagagatgcggaaagaagtgttagatgtcgagaatggtgtcacgaatcagagtaagcctcatttgatttccaattttggattgtttggataagacagaataacctggtgtgggatttgtagcacctgcagacgattcccaaacgtccgataacgatggtggtgagcgtcctgtacgaaacaagttaaagaagactaccattacttcggccccaaaccagcgcgatgattctagcagggcgagcagccggggcaggaagcggtcatataatagcgacgaggagaatcccgaggacgattctggtcataggcggaagcggtcgcgggactcgaatacggaggaaatggcagacgcagcgccagcggaactcctcactcctgtatgtcttcgtcctcacgcgtagcaggaacactgccaaactcgagagcgaggagcgagatgctgctgccctcatcaagcacgatgagacaagagcagccattgtcgttgagcttggcgcgaagattgacgagaagctgggtgaagtaatgaccaagtatgatgaggctcggtcttcgattgacaccaagttcgccgaagctgctgagcgcggaaatgcgcaccttgaggcagtgaccgacacaaagtccttggcagaggatattaaacttgtcattggatctatgggtgacagtgtcaacgaagcatgcgagcggatgagcgcagatcaaaacattcttcgaaaaggtcgacatctcgtacagcaagatggaggagatgcattatgaggtaaaaacacagcaagagttggtctcggtccgatgttgaacggacagccagctgctacggagcgagtcgagtctaagctgcacgagttccatccccaggttttggagtctatccaggagatcctttctattgtggggcagcattacacccacgcacagcaggctacacaagatctcagaatggatctatccgtcataccgaccactatgacaaagatgctgcccgctttgccacctcccgagccggaaaagtatgatgacagccaggtccatgagaagctagacagcctcatcgagcgttcaatggacaaccaggtccaggagagcctcaacacattgattgaacgggttaccaaggaccaggtgcacgaaaagctcgaccagctcttgagcaagacgacaagcactaatggagaaatttacgaaaagctgaatgaactgcttgagcatgcaacgaactccaatgggcccatccatgaaaaactcgacacgctcattggccacgccacgaacactgatcagtctgtccatcaaatgatgaagcttgatgagatgcacaaggatattatggaaacgtcgcggaagatgaacgagatgatggcggcccaatcagctcttatcgccgaggatactgagcgcaggcgcaaggaggctgaggaagccgccattgtcctggagcgcagaactgcacagcgagagcagattgaagcagagatcctcaacctcaaagatgaaaaagactcaatgctcgcaatgatgcagaggctcaaggctgaaaaagatgagcttgttgcccagaacgccaagctccacaaagaagtctctgccctggagacggccctcgaactgcggcatgaagagatgcaggtcatggaagagcgcgccgacagcttagagaaacgcattctagagggtgtgcttgatcatgctcgtactgttcttcttagtcgccccaacagcacacacgggttaaatatgaaaaaagtacgcagcgcacgcggccgcaatgtcagtgtttcgagtactgcaagcaccgccaaggacagccgcagcgtcctcggtagtagtctcgggctggcattgaagaagcgagctccacctgcgttgcaggcagggtctgctactgcgtctacagcgagcaaggagaggaggatcttaagtctcagccacgttacgggaaaccgtgggttatcggacaggcagtcaggtgcatccggcggtcttacgagcctgaaaagaagtcagtctgttaagtccaactatacttaccgcaaacattcatggggcgggaggagctctatagccaacaaggagaatgaaggtttccctgaggtcttccccgaagaagacgagaaccagagcggagatgagagtgatacaggtacggagcggaggacgagctacaccggaacttatgcggaaagcatgacatatggccctggaagtgtcatctccacgaaccggcaggttagtaccgccagtactagaaaccttgagtctgttgcggatgtggcggaagaagaggaagaccgagcaatggcgaaagacgaacacgaggaaccggacaaggacgatgaggctcagagctctaaagcagatgagcctgaggatcatgcggccgttcctcaagaagcactcgacgaagaaacgtcgaaaatggtgctgtacggacaccccgccgacagcggactgggttcggagatcacgagtacagcaggctgatcatacggaacccgcaagcggcttcaactcgacttttattgatagttaagcgctactattctggtggtggcttgggtccacctcccaggaggtaatgataccgtggcctttcttttgtactttcctttgtcatatacttacgattggctacccgcccacttcgagcaagagagtctgggctgggatcatggatgcatgtggtattgattattggctagatgtaactgaatgatatcctccttttactgaaagttgttcgttcttagtagatctattgtggtacttgtaggtggaaagagctgcttgcccgatgaggaagtgccgaggctaagccttgcgggtggggactggggactgccccaacgatctttaacctagcaaatcaggcaccaaactggcaccgaactggcacgcggtcagcttttgttgaatcactctgggtgtcgtctgcttggtctgctcggcctgattccgtcataagatggactctcctctgtcttcgcatcccctgaacactctcagtgagcgtgataactcgaagtactactgagttggcggctcgttttctccactggtatttattcgagaaatatcccaggccccgtcagccctgtcaataatacctgagctaacatcttgtcccctcgcaggcatcaccgttcttaccaagatggccaggctctaggcttctcgcacgcttccaaaccccgctctgttcttctctttagcgcctatcgtcatagttcccgagtcagccttatatcggccttttccccgacttccctctcctaataaatactgtcccatttcttctatcctcagacggcataccctaagtatctagtccgtggcacgcgagcatgctggacccaatcccgcctcctccagagtggttgcgggagtacactgagccctgggctcaacgtttcaatcttcctgctctgactgatcactctcatgaagtcattgctgcctttatcggctacctattcattcactacgtcctctcgccatggctgtctccgaagctattccctcgccactaccccaacctaaacaagcgtaccaagcttaattgggatgttcatgtcgtctcgcttgtccagagctccttcattaacgctgtcgctctttgggtgcttttcgccgacgaggagagaaaatccatgacaattggtgagcgagttttcgggtacactgggtcttgtgctctaataaactctctcgccgtcggctattttatctatgatttgataatcagcactctctacgtcaagatgtttggtattggcatgctcttccatgccgtctctgcgctatgggtgttcagtttcggattcgtaagtggctccattaccgcgagcggggactatcactgataatagtgcagagaccgtttgtcaacttttacgcccccgtctttatcctctacgaactctccagcccctttctcaatatccactggttccttgacaaagttaacatgaccggctctaagttgcaatggtacaatggcatggcgcttcttgtcgtgttcttctgttgtcgtctcatctggggaacttggcagtccgtcctcgtatacatggacatgtttgctgctctcagacagacttggtccgctggctcttcctcgccgctagaccccgttaacatcacggctcaaatcttccagacccgcgacgatggctcactctgtatcaacgaagcctgcattaaggcgaatcgcatataaccaaatactccaagcacacggccgtcggcgttcctacctggttggtcgccacgtacgtcacctccaacctaatcctcaacagcctcaactactactggttctcaaagatgattgaaactgtgatgaagcgcttccgtcctcagaaagagcaatccaaggtggcagagaaacttaaggagcataacaaggaagctagcgcggtggaggagcttgcgcagcaggctgttctcgacgccgcatccaaactggaacaagaagagggaagtttattcctaggggataacgaacagccagttgcctcgggcgtggacgcagtacttcagatcttcggaacaggaaagcctaaacacatccagagtctaaaggtggattactatagtggactggcccaagagaaagacggtgatgtagaaggctagagggggcgttggcggcgctgttctcacgtgtcctggttgcacttcataagaagtccttatatccttattcgttattg

SEQ ID NO: 5816 - DNA, 2877 bp, Emericella nidulans
gtccggggttccggctaatctttgaattttccgaaaatgaatttttcaccaacaagacgatttccaagacatacttctataaggaagagaatgggtatgggggcgattttatctacgaccatgccgaaggcaccaagattgattggaagcctgaaaaagacctcaccgtgcgtgtggagagcaagaagcagagaaacaagagtatgcctctgtccatggatgtatatctaacgttagctaaccataacagacacgaaacagacccgtgttgttaagattactgtgccaacagaatccttcttcaacttctttgctcctcctcaacctccggcagatgatgatgataccgttgcgacggatatcgaggaacgtttagagctcgactaccagcttggagaagatattaaagaaaaacttataccccgagccatcgattggttcaccggtgaggctcttcaattcgaggaacttggtgatgatatggaccccgatgagtttgacgagtttgacgacgaggacgacgaggacgacgatgaggatgaggatggcagagggtcggaccaagacgtcgatgactccgatgaagaggtttgtgtttacccgtacacctagtcttatagcacttgttctgagcaactaacgttcggtaggacggtacttccaagccgaagaaagaagcggctgagtgcaagcaaagttaactggtgtaacacgacgctaaagaggccaatgacacagcagttgtgctagcttgttttccgttccagttttcatcttctcttgctctccaatttgttcttatttttctttactcccatttttttgcattaactagcaagactatctaatgaccctccgatgacaagttaagtatgtgtgaaacctacaggatctcttaattcgagatagcgggccaaggtcattcttcacttatgtcgctttgacagattactccactttacgcttcgttcgcccttccccccgcgcgttttctcctatatttaatgttgagtcaatagtggcgcgaggagtaggtacactttcatctaatttgttcttcaatatgtgtgctgtcaacacaaatgtataaaaaatgcataatgaatggatttcaacggtcatgaacttggtcgatgagtctactctaataatatgcgttggcaagcgagcccacctgtgtagtttacagtctaggactctacaccgtatcccgagatcgggttcgcttcgaatccaacggtggcaaaacttcgaagggtttatcattaactcacgcatggtgttttctattttgtgaccaacaaactctaggcattcgatcaattttacccaatgctatctatccaggactacggagtatcgttcagtaaaacagtcctccaaaaatagaggttggtattgcagacaaagtctctcttggcgtgggtaattgagtggagaacggctcagccagtggcgcggaccccgaggctcctcaggggctgcgttggagcagccagttggtcattcatctcggaatttctctgcttcagtgaagcatgggagctcttttctcagaatcagcaacttcttactagtgccctggaaggcaactctttctttcttttctccagttttttttggaggttgagtttctgctttttcctttgttacttttttaaatgcctttgacttgagcaacgaacatcttaccctgtgatatttctccccggacccgcagcggttttcgtgttcacgatggcgcataattatgaggtcgggacgagggcctggcaacctgatgctactgagggttgggtagcctccgaggtcaaggagaagctggttgatggtgacaaagttcggcttgtttttgtcctggagaatggcgaggttcgttcatattgaagttagtatgaagcaatactaacctcaaaagcccaaagagatagagaccacacaagccgaattgcaagtggataacaatccgaacctgccaccgttgatgaaccctgctatgctcgaagctagtgaggaccttacaaacctatctcatctcaacgaaccagcgggtactacgtcttctcgagcacctactgaagcttaactaacccgtcgcagttctacaagccatcaagttacgctatgcacagaaagagatatatacatatagcggtatcgttcttatcgcaaccaaccctttcgctcgcgtggattcgctgtatgtacctcaaatggtccaggtttacgctggaaagcaccgcgcatggcaggcaccacatttgttcgctatcgcagaagaagcatttgggtaagttctgtcagtactttcgacggtgaagtattactcattgttggtacgatacagggacatgctacgggatgggaagaatcaaacgatcgttgttagcggcgaatgtggcgctggttaaacagtgagcgcgaaatatatcactgcgtatttcgcgacacgcgagtgttgcgaccagcccttgaagtataccacgagaagagccgatgcaatcagcgaatcggaagaacagatgctagccacaaacaccgtgatggaagccctttgcagtgcgaaactacgcgtaatggcaacgtctcccggcttcggaaggacattgtagtaatgttcggcggcaagaaccacattgtggtgccaaataccgcctaccttcttagagatcccgctagttttaagccctcaagggggaattatacatatttttcacttgtgtagggttgggaccaaaacaaggaatggccaaacttggagggtggccctctattgggggacccttttgggggggtcaaagccattttccccagagtttggaagggccttgacacaggaattggtcagtggtggctggaaaaaaataaaaaaaagga

SEQ ID NO: 5817 - DNA, 7321 bp, Emericella nidulans
ggagctgtatcaagcctgtccagatactgtcggggtgatcttctaccccctaatcttaataaggcttgtaaatcaagattatctgtaccctctaaggtattagggagatttatagtctctctacttgcctgattctaatcttcttagagtaattcaaggagatgtcagcttagtaagtcctctctttcttattctgcagattctgactattcttctgcttctataaaggttcctggcatctaatttaagctagaattgcctgagtttggtattctatcaggtataggtaatagcagaggcaaagatagtatagtttttctggcagaatacctatatttctctatatcttccttgcatagttcctcaacaccagcttctcctatcttagtcaattttttgttatttctaatgctctgcttattgggagattctgcttgtattatactaggtattatatatttagagagcttaatatctatattaattgcttccctgttggccctgccaggtaatatctatatctctactggtagtataggtaagctaatacttaacttgtcctctataaaaggatctaatagattgtatagccttgttttattaaacttaatatctcttgctgtctcaactcactgcttctttaggttctatataaactatatattagaggctatatagcctactagaataccttggtaagctcttagatgttatgggtcctttgcctatacaaggaccttagaccttagtgactcggccaaggcctgcgctgtcctgaaggcggtgagccacctacaagacttccttgcaacaacaatccttctttctcatttcttctttagcgattccttcttgtacgtacggcacgtctagataggaagatccatctaaatacgtcccttaacattagagctatttttatacctttttcttactgctgatatgtataagatatacaactaattaggtagaaattagctagatttagcttctttcctatgagtatctcttatagtattttctattttatagctcttgtaggtgttctgttaataatatttacaactaaagcaataatccagggctaaaggtcttgcagtaagcaggcacctattagaacctgccttgcctttgtaataagaagatatcttaattattctgcagctttattctgatttagtattgtaattactaagtactagtaagcaatgccttctgctgctttaaatattgtaatctgataccctagtattttctcattattacttttcagatatttgatagtaaggccaaaaagattcttcatctggtttataaatttctgtacagcgttgacatatttgctcttctattagtaggtaaagatgaaatgtattcttgtggctttattatagaaataggtgatctatttatccctgttcagaccaggttgtattttgataaggttgaagtatacttgctctagcagagcagtagtagttattattagtctctgagagatttgctgaggtgtatttgccaacttgcaatcttcacatggttgcttagaatcatggtttacatccagattattaatcttgatgcctgtaactgcttcaggaagatgctgcagagtattaatataagtataagctattctttgatgccaaatatctatatttccttttagaagtagtggttttgctgattgtcaattgtccatagttgcaaaagtatatgcattgttgctttgttgctccacaacccagagacctgataggtaatctccaatcttgaagacaatattattttctttcttaataatattattgtcaaaatcctagctatatctggcttgtttaagtcttctagctccaataatgctggtataaagacctagcacataggctatattagtcaaggtaataataatatttcctgattctctactataatttagacagatcttgacactcctagtgccttgtatccttattattggattactagtataaagaattctggttgctgatggatcatagttttcaaaccttgagatattattgcaaacatgtattaaagctctagagtctaggataaagcaattctttaataagctgctaatttctgcactaaaaacaagtattataatataatacttctctggtttgttgctttctttctgcttattgcccttattttgttgcttattatttactattaaggttttgatctttcttctaatcttattatcttttgtaatggctttgctaatcttgcttttaatctctttgttaggtttctattattttggttgttttaagtatattatataccagcaactgctgtatatatagttctttttatatatatataagctccagtatctgtttttgttgggtttgctttggctataaagtattgcaaatactattccagaagttgttgtcttgaagcctttagtattagccaggtaagtctgatattgtcctaggagtatataaaagttctccgtcttatataacaggatgtttattatctctacctgtctatctgcaaaggaataggaaactagtaatatagctgccagaaactgttattttatatacttattattactttctaggagattgcagtgtttaattgccaagtaagtattatcaaacttgttgagccatgcagaaatctttccttgtcaaattaattaagatctgacattgttatagttcttcaaagctttgaaatctgcctcttgattacttggggtatattactgtttcagtatttataatattttatatatttctttatctgctataagctctcttatctatagagctactaagctgtaaatagctttatttattaattagattatatttcacatatccttctattcctgcaatattatttaataatatcagtatatattttccaaggccttatttgctgatagaattgtcagtttagttggtagctcaggccttgttttgttatcagtatcaggattaaaatattcccatacttcttgcttgtttgcatggtctttaataacttaaaactatacatgccaatcatcctgcaagctcaggatggcttggacctttgtggcgctgtctttattatatgcaatcgccattttttgtcgtcaagatattctgatctcagcggaacttgttgtatatttgaaggagtaggctccgggttgccagtgtcctttgggtaatgttcaaccacctcctagcttgtctgtatagctcggtacggggctgcagatatcttccatatgacaaaaagaggtaataattccatatcccagtccctagagcaatgccgggctcataactatggattattagggtggttatgtaatcaatatctgtagtgaacgatttcattgaaggtcttgatctcctaactatgatctgtataggcaatttataccttttccaaggcttcaaaaagaaggttctcgcttatgcaggagatatccttgccatacaaacagtatgaggcatcaaatagatatccctgccatacaaacagtgtaaagcattaaacagacaggcaaatgaacaaggtgctgaacattgattagtaaggaggaatctcctccggttgacacttaataatctcttatcatcacgtgcttgggggtgcagctcacatgagcttatcaaaaagttcggatgagctgtagacacgcgccaagtctcttccaccgagtttttctacattagtaagccatgctatgggcccgttcggaggtgctatctccaaatatctcgatcctcaagggcagcttcgttctctttattctccgctgaggaaatccaagctactgacctgactgggtcctcaggtctagtcgagtgctctggaaaaaagagtggcctttatgcgattgctccccagtagatattagtctcggagccataggaaacttactcagcttgcggaagggtatcctctgagacagcgcctttaccacgctcggaaggccgaggagcagagaagctacttcaaacaacttcatattttgctacattcctattcccattcctatcccatctgaaggcatgctcagactcggtccctggaagaagtagttccagaacgacatgtcaaacccctgcattgtccagtcatcgaccccaagcccaacatccgcgtaccatggctgcggctgttgcgaaggcgccgatgcttgtccgtatcgcggtccaactgccggcggctctcctgctggtggatgattcgttgtgtcatttaccagtggatcttgggccaccggcgttgtcggccgaaattggagtatatccttgccgtccataatctcagccgcagaaggcgtacgctggataaaaccccgtacaatcctgacaaacccgaaccagggtatacagaagcggagacccctcgtgagtggcgggggaccgcgctccgtttccactttgacctcctcgggagagccgatgctgtgtactacataggtggcagagccttgcgccgcctcaccctcaatatcaagtagacagctcagcaaatcggcagatttggcaattatccggtcctggcttacccaagcggtcttttggaggttatctagtgtttgcgagatcatgccacggtcgctctggcgctggtgggcaagggggctgaactcacccgggctgcgggtatgttggcggagatgagctaggaggagaaggagggctgaggagagggtgaagaagtcgattacacggcaggaatatgcaactctgttggagtttccgagaacgatgtagcgggtaaggatctcgcgggatgcgttgatgcaggttgtttgtgagtaactttgtagttgctcagcgttcgcaaaccgtagcatgtaagggatgtggagttggttgatgaggccgtaatggttgatctgcgatacgaggcgcatctcccagccgatagagccgtctagttggactatgttcggcactgtccaccactcgctaggcatcatctccgctgctttctgtagctggttgtcaatatcgtgaaccttctctaccgagtatatccccgcatcattctgctccaggatccggtgagcgatcacgcaatggacccgttccagttgccctagcggcgtatcagcttcaaagggcccgcctgtggccatactgcagtccatcgagccttgaggtcggcccatcatcaaacacataaaacgatcgatataagtagcccggtaccacaggaacgagccgtccactttacaacggcggtcgagcaagcgcaatgaatggcccggtcggtgaatcccaattacttgggctaaggtcatcgccttgcgaaatgcaatccaggcaggacagtaatatccgctgtttgcctggtagctgccctccatcatcacgcattctatgccctccactgtgccaagcagctcgtcgcgactggtgacgaggcgaattgctgtttcggccagcctctttgccatcacctgcggtgcttccgaaagcccagtgagcttcgcgccacatttcttgagatctagagactgaagtgccatcacaattcgcagcatatgccttgctagcaaagccgggtggggaaccgggtccgggatgttgagaaatgatctactttcaacggagccacgactgtccttctgcacgatgggatatgggcacgttataaattcatagaatagaatagggacctggtcgagtacatcgcagataatgctgagatcattgcgcgatggtaagctggcgtacaactcctgaaagatgctcgcataaggatcctagtcgtggtcagtaatccaaccaaagatagaactgctgggctctacacactgccaatggtgtcgaaatagatcgcctatcacgctcagaatcagcaattatacgctgagaagggaatcttgggccaactccaggagaatcagcggctgccgggctgctaggctcaggcactctagccatgcgcctaccccctggcgcattttccacctcatcttctaccggatagtcttgagtcaaacatttcgtactgggtttttgacatgctatacagacgccaccggggctgtccacaagactgcaccgaaccttccgccgtttacattcccagcagctggttgttcccttccggatcttccggcgcttcttggtaagcacagaatcgtgattgcttgaagttaaatgggagggcattctgagagagaaatgcaaggtgagaggaagaggcgatggtgttttacgctggcttcggccgttgggtgacgagtcgtgtctggtaaggcccggaaaggtatagcgccgatgtggggtggtttaagtgtagagttgtagaggccgctacttggtccctactgcttgtttactctggtatttttttcgatagctccagtgaccttgttgataattttagaagtgtttctgctccgaaacataatgacattagatttccgtcttctggcgtggtgatgtctgagacttcattattgccggcccacgccactacttgcataagcgcacaaaaagattagcatgcaaatacatgatggggcatttattcgagcaattatgaaatgccttcgcaagtatccccttatcacttgcatcttagccaatactagtccatcaaaacgcgctcattcaacaaattctcggtgaacttccacgtctctgcagaatcatgtgaatggaacgcagcacccgtataaaacgtattccggtatccctgcagcccatacaagtcgcgatagaacccatcagcgatatcctctgaagaaacgtgcaacgcatacggaacgtggggacgaaaggcaactatttctgggtccgatataggataccctgcagcgcgcagtgacagagcgttatcgagtatagtttgtcgagcctgcttactagatatcggcgccgaccctcctccgaaaaatgccgtccataagtctcggctagcagtgggctcgaatacatgtgtagatggcacgggggcgatattatacggtgtctctggtgccttgttgacgaattgggtcccgttgccggggaggccgacatacgcagaatcgccgggaaataggagttattatcgaatcggccgaatatttccgattcacgctcatcgagatcaaagttttctaattctcccagtagtggtggaatggtgacaatgaccttgtcggcttgaacgcgctgttgacctttcggagttcggacaacaatctgctgtggccccgagtcttcagcagagccctgaatatgggctacagtgctgctgagcaagaggtcgtcctaagctctccttcagctgccctgtaaagatccgagttggctcggcttgcagg

SEQ ID NO: 5818 - DNA, 14321 bp, Emericella nidulans
  unsure (1)..(14321): unsure at all n locations
ctttagaatcagaacatgccatcatggatatacttaaggattgctttgagactcaaaacctgaatgaaagaatgacgaccgaactcgtgggcaagcagcggacatctcagccctacaaaagatgggcttaaccaacgtttagcctggttcgctgggtcggacctgtcttatcccagtcactgccgtttgactagggtctaaaagagaagttgggaggctgcaaggctgaaaggctgaaaccaacaaggcagcgcagcttgcattgcggctgaggcgagcgatcggccccaactacacgcaatttcaaatcccactgccacgcgaaagaggggggctccgccacggttggggctagcaaagggatcgtcgggaatttaatacgaggctcgcgcacgaataagagcctcagctgagtgttggtttgcgtgactgccatatccacaactggcatagcctcgaagccgcttgcaaagccgcaaggacagcagatcactgtaggcaattctggctattaataaggagggccacggcggtgttagtgagctcttatattcaccatgattcctttcaacctgcaaagattgtgcatgacagatgctggcaaaaatgcattactcccgatcgtcgtcgtttagctccccgtcgctggccagtaagtctggactttgtaacccgatgtccgagttaagggctcacccgaccaggcgaatgcaagaaagccgaaagaattctggactcgtttatcaaccccgaagtagtcagcgtcgacaagcagatcccgcgcaaggtgctggaaaatgcgaaggtgagaaccgttggcaaaacattcttagcgaagctaaacagcaatcagggcctcgcgatattcagcgtttttgaagtcggcatgatgcgttcttttcgcttcggcttcggtgttgtagtcgcccgtttctttaacggaacatgggcggcccccttggccatcacgaccgggaaaatgacgaccaaaggccaattggaatggagcatctgagttcgattactgctaaatacgacagggcctggaggcgttctcgcaggctaaagcgtactttgggcgaggacgtatcaatagcagtcgggccattcgggcgcagcgccgagctcgcgggggatgcatacgaggctgatatattcgcatactgcaagacacgcacagtttttgggggttcgacattggaaggagcgactataggcgagagagtagatgcgaatcggaagatgtatcaaaagacagtttcaacgcgccagctgcttcgtggggaggtcacgctgcccccagagacatacgggctcatgaagatcctgcattcaacgtggctgcggccggttacgaagcgaccgtccgttgaaaaggcccatcttgccaggatagtcacgcagcaatcgacaaccattgagccgcgatcccgggcatcaacaatagcatcgccggcgaagggagagaagccgttttacggagagcagattttggtttccacatcagatcaccatagaaatcacagactactcagcggtccagctgccgagtagtctgacacaacatgaggagacgagggagtcgctggattcagaggcatcgtcctccccaaccgggcaccctcctatcctcaagcctggaagacgaacctggagtgcgtcgtccaacggggtttgggataatcatgaaccgctacatttctaatgaccgcttttgcataattgcctgaatcacttgtatatagacatcagcctcagataccctagacattaacgaagagacggctgtaccgttcaaatgctctggatgtgttgttcatagtgagtggaaccatgaggtgcctggcgcctagacgacggtcgcatcgcggatacatattccacagtcattctagtcatattgacaatgaacagtccgagcgaacgcccaatttggtctttttcgagaggctctcgtcgcattagtgttcgagaccttcccttgctctccacgacggtcgaccaggcagaaaggggtagagcagtggtgtatggcgcggaaaccacagcgagctcaagacaggggaagcccataactattctaaaagtcagagcataccttgtccttttcgaatggtgaaccatggccagtatggatgaaacgattgcgttgcgatgcacgaatagtacagatcaggtgatgttttaatgccccaggctgcgacattgcggaaacggcagaaaaggaacgaatacgaaagactttgcatgacagcatcatcctattcctatcctggtcgctatggacaacgaacaagctcagctgaagatacgatcccgaaagacacatcgcaagtctcgacttggatgtggcaattgcaagaggcgacgggtcaaggtaggtcattctcttaaaagctgtaccacgcctcgcggatatatctccgcgcaaacacagcggtattatttgctgatggaggaacagtgcgatgaaaagaagcctatgtgcacaaactgcgtacagcattctattgactgcgactttcgactctcagcttccggatctccatcagagggaacaacactatcgcatacacaacggttcaaattcagagaatcaaagtaccaatctcagatctctccatcacaagagcaactcaggcccaattaccgttcatctggagtccaatgcgactcagtcccaacgatcggcttcaagggaggtcctggggaaggtatctcgctgacagacctctaccttttccaccactataccacatcaacgtactgcacctttgcaagcgaagcggcgcactccgtttggcaggtccacgtaccgcaatggggtttcatttttccttcgatcatgcacctgctctttactttatccgctctgcatcttgccttcataaacccagccaaacgagaggtttacatcaaggaagccgatgaccatttcacatttggtgtacgctccgtcacaaccgttcttgcgttggatacgctagattccggcaattgccagcaaatctacatggcggcggtcatgatctgctttgcgtatttcgctcgcgggccgagagacggcgagtaccttgtcttcaatgtaaaaggcaagtctgagtggctggtccttttgcatggagtgcgtgcaatcctagcacagaaacaagcggagatctttacaggtgtgcttgccatttcagagaaagagcagccagcggaaattactgatcatgaactcgacatggaactctcgcgacacgttcagcatctccagaagattaaggcaactgtcattgctgaggttcaagcggacagaagacttttacattcaggtgactgacgacctgatcggctgctttggggatgcataccaggcgcgcaaagccggttctgctccaccagaactgatgccgtatacgatgggatggacgtttcgtcttccagagatgatgattgagagactggaagaaagagagccgatcgcgctggtgattatggcgcactggaccatcctgcttcgctatatgggcgaggcctggtttatgcgcgggtgggaccaacatatcatcttggggattagggcctgcttgcctccagcctatcatgaccagatttcatggcccgaggaggtcatagcttttggaggatgatgtagcataagcaccttgatattgactataatctaatatatctaagcatacggatggaacccctcagtgttcgtcgtagggctatgagcccgttatacttctgccttaatagcgatttgtcgaatagcatggtctgctatgtatccgcatcgaagaaaatccagcaaatctttcatgaaatctacagcagccctaaaaataacatgcatctccactaaaatctcgaagctttgccgccccacccgtattcgttcctgaattaccacaacaggcaattggttgaaacaggttgatggaccctgaagttataagagggttgagcacaagcagctcaatctctcttcaacgattattattcacttctcttctactgcaagtcttccattatcaagccctgaatatcacactctctatacagcaatggactttaccttccaccccggagtcaacggctcgtctccctgggttgaattctatccctacaatccttccctcccagctggctatgctttcatggccattttcgccatagcaactcttgtccactttgtccttatgattccatacagagccgcatattttattccattcattctcggcgggatctgtatgtttatcccccttcacccaactccattagctccacaccaacaaccccagtacggccagtacaagccaagaatgacgagatgctgacaagttcacgcaggcgaaacatttggctaccacggccgtgctcgctcgcacaataaccgcaccggactcgggccctgggcgcaacagcaaatgctcctcctctgcgcgccccccttactctccgcgagtatctacatgacgctgtcccggttgatgacagctctgaacgcagaagaacactcacccatccgtccgaaaagactgactgtgctctttgtgctcaacgacataatctgtctgctgacgcagctcgtcggcgcgggcctccaagtcacaggggacgagaaaatcataagtattgggaacaaagccgtcctggcagggttgatcttcacgctctttgtgtttggatggtttatttggattgcttctatgtttcatcgacggcttgaagcccatccgacggctatttcgcttgatgaagcaattggcaattggagggtttatatgggagttttgtatggagtctgcgggtcaatggttgttaggaatctggtaagaacaattgagtttgggagtccgcatggagcggatgtgagaagtcgcgaagtgtatatttatttgtttgatggagcgttgatggcatgtgtcatggtgctctggctggtttggcatcctgggaggttgattaaagcggcgaggagggtaaggaagggggttgagggaggtgtagagcttctggggggtaagtaggccgactatgcctgtcttttctaaatactgcttttcgtttaggtttgttcaggcgtatctgggagttctggcgctaggcgttcacggccgcggacactatgttataacttaagagtgctgggagtgtttagatcaataaatctcagattcaaatctatatgcacgcttcataactcatcaacactcgcggcgtctatgatgctattcagaatttacgcggacttgccaaacaccttgaagcggtcctcgatgggagcaaaggtcttctccagaggaccagaggtgggagtaccaaaaacgagctgggcatcaagcttccagttggcagggatattccactgcttggcgatctgctcgtcgatcaggggactgtagtgctgcaggttggcgccgaagccttcagaggctagggcggtccagactgggagagaccgtcagcaaaaggatcatattaaacatactgcctgcagattgatgcatacccaagtactgagacatggcattggactcgagagcaaaaggatcaaacttgtcagcgtagatggcaaacttctccttgatgtccttgagagcgtcgtagtcgacgaagaagaggacctaagcttgtcagccactacccatgcattttgatatattattggccgggtagttaatcgtacagttccgtaaccagcacggaatccctctagcttcggcttggtcgaggactcaaacgcctccttgggcagcgcacccgcagccacgagaccctccattgcctggagggcaatgtcccagaccttctggtgttcctccttcagcagcagaaccacgcgcgaggtctgcgtgttgaaagagctgggcacgtgcaggacggcatcgcggacaatggcctcgatggtgtcatcggagacggggctctcagccttgaggccgtagatggtgcggcgagccttgacggcctcgaggagggtggcagtagcggggttcttgaactcgaccattgtgacttgcgctgctagagacaattgtatgtacagtctatggaaatagaaatcatgaagaggggtagaggggcagcggtcttatatcgccaacagggccaaactgtgcgattgttaattccgcccaagccagccaatgagaggcgggcgacggggccctctcgaggggtttgtcagcgagacgcgatgattagaaattcggcgggacgccatcgcgcaatcataactgggcttcgatagtgtcaggaacttactagaccattgtaccagctcagaattcgggttacgaagctcaggcaccggcattggccaattccgtgcaccaacagcccacggtgcctgagccaagctgccgagtctccccgaggaggccgatcgcagaggcgttcctgggcacgtgatgcgtggttactgtcggggcatactgcccttcagtaccgcctgcccctggggttcgacctcgattagtcattaattagtaagctagttgtttagataggcaggccattccggccacccaatgaaagaactatcccatctctcttcccacacgacagtctgattctgccgctgaagaccgcttgaaaaagccaagccaggcacccaggcaccaaacagagcaccagagatttctcaggcgcgagccgtggaactcatcgaccatttctggtcaggcgtgggactcatccaccagacttctcaaatctcagcccctgacactctggtaacaggatggaagcgaggttgccttttggattttcccgccacccaggggttgccgcattgatagcaatgtgaaatcaggttctcccacgtttcggcggacgtgcccgatgacaggcttgagatcgtcaagcgataatcgcgtgtgaacgcagcaaggggctggtcacggactctattactaattcgcttactatttcacagattcgcagcatctagtaggtcgggttgattagtgcgaactccctcatacgatcagcaacgagtcagcgagtcagcgtcagtgagtacgacagcagtctcggcagacaccccgccgtcgagcgcaggancaattgattcagtgccgattccgaaagtaatcccggtggcgcctgcgaggcctccgatacaggagctggaagggtgaatttgtcctttctggaggctgggtttcatcggccgagcctgacttttcctgaactggctttgaccgaatggcagccgcctcagtagtgctgctagcgagtctagcctccggaatcggttccaggcggacactccccgtgcaaatcagcgaggtaatggatggcgaatccgagtgaaggcacgattcccattcgacgggagtgaagtggtatagactagccgttgacagttcctctggctgctctgaagttcaaatcaactctaccgacctcgtttattatcaagtactttattcagcagtgagcgtcaaggatatgcctcgactatttgatgtggacccagccacatccctggggattcgggcagtttcggaggcagacactgagacattacgaagcaaatgtcgggaataacgttgacggggcggaggtgcatagcgcgggtgcgatacggaattgagcagacaaggacagtcaagcatcaatgcgggcttagcagtattagctgcagattggcgctggcctcttttcgcttggcacgggttcgcactcgcaaaaccaatggcttggtgcgcgcatctttgtttgaatttggtgagtgcaatcagccgaacaagaacggcggtcatcgtcgcttctggaatgctgcatggttcgtatgagccttggctatccaatagacgatgactgcccgatacgtcaagcgagcacgtggcaagagggatggagatactgttgggaagctggggcatgtgcatgcgaccgttccccttacagattgcaacctcattctttccgtgcaagcagcagtcttccggcaacgaatcactgtttggtgcatttattcgatgcgacagctgaggacggaccggccaatgctattgtgacatatcactgcaagggacgatggggtttactgggcatgccgagtaggacaatcggccccgaggctacggattgccgaattgaaccctaagagctgccgcagtatgatccatgcttgccctgatctctcgtgccgcgcttccccagggccagtcaaccttctcggcggcgtgctctgtcagctaatgctcgtaactcatacttgcataccatccgtgattaattcctgctcttatcgcaaatctacttcagccgtgaacttaccctctctacctttaggcaaaagagagcgccgcccttacccaacgttcgacacggcgccggtttgtttcttaaatgcgaaccgccctctggtccatatgtacttgagggggcgcacattatactatggacagacggatgcagctcaacggatacgccagagttgtttgctgaccgctttgctgttgtatgacaaactcagcattcccgcgcagagtacgccttgaagaaatttctcgcgaacgcgtctgcttcggacacagcgtgaagtactgcgggaggtatctacgcatgacatggcagtcaaccgttgcgtagacagcctgctctcattggcgcgcctgccgatgccaggtcctgaatttttttggtagctctgaagtagcctgcgcatgtattccggtcgtagtatggtagcaggttaatatattggtgaaactggattcattcataaggcagccaatgtattgcctgacaacagtaaggggcagcctgctgggtgacggccggagattatctgaactggtcgccgagctgagcagtccataggccaaggcgctggccctgcagtcaacacaggaaccgaccactaagaccccggtcagcgcaataaattgcactgcagggaatacgttctcgacctcgtttgtttgtttgctagggtttcctaatcggcgaatatgtgcagctttatggatgtgaatgcgacctgtctcaacaggagggcgtggtcaacacgttgatgcggcacatgacttctgcattggtcccaggggtaaagatatcacacaggtataaagagcccagttgcagcagaccggtcgcagctgaggcatgcagagctgaagcatacagagctgaagcatacggagctggaagcatacggcgagctagcagtcattcctcacctttctctagcactgcttccgctagactatgcggttctggacgatggcggcctcctggctgagactcgtggctctgatgctcctgctagtgccatctctggcccgcaatatccctcgagctggtaattgtacctcgctcaacaggaggaagtcttggtgcgttgctttccgttgataatgtcaagtcattcacgccattcaagtcattgaagtattaaagtcattaacgatattaatgtaccaggaacgcattgacgagggtcgaaaagaccggtaagcgcgccttcaaccgcgaccaagaggccagactgacgaattcagagtatatccaggctgaacgatgcctgatgaaccatgcccctatagttggaaacgtcaaagacgcaaaaaacctctgggacgaactgcacgacttgcatatctcgcaaggcaattacgtccattacgtgggccatttcctcccgtggcatcgttatctggtgcgcgcccatgaagtgctccttcagaccctctgcggatacaaaggggcacacccgtactgggacgaggtcacggattatgaggctggcccgttacagaggtcgcccgtcttcgacccggtggttgggtttgggggaaatgggttcggaagtaggcccacacctgccccgtcttaacgcggtattagagtgatgaatgataaggatatttaaggttgtttttgggcgatgcgattgtaacgcggtccactgcggtgggcggtctaaataggaaaccggtgtattcagaacggcccctttaaggacacgacgctgcgcatccggtccaacgaacgaaacggcgaatactgccttagccgcgctttcaaccagaccgtctttacatgggcaaaccgccgcaatatcgaggaatgttttgcactgcaaaaatatacggatgcttggcaatgctacaaccagtatccgcacgcagcggggcatattgccgttggtggcgtggtgagacatcgtctcgattactggtctgggcgataataatactatggctaacgcgggattaatctgcagatggaggatccgaccgaaagtaacggcgaccccctgttctacctccaccatgcgtacctggaccggctctggtggcggtggcagcaggccgatctgcccgggcgattgtctgatatgggagggcctaatgtagtgccgcccgacctaatgcgtctgatggggatgccgcccgtcagcgcggcactgttggactacaatggcgacccgggcggtgagaccacactggcgcacgtactgtggatgaacgggctggtgccgaatgcgaccgtggctgaggtgatggacattggcgggcaggtggtatgcgcggaatacgtggattagccggtagagtgctgggtgctcagtactgaggactgagtactccagagactggagaatgggtctggagaatgggaattagcaatctggagaagatgccacgttcccccagatccagccatccaagataagtgccgatcttgattcagtgtgattatgacatgtagtaatgatcttgtaatagtattcatggattggttgcgtggtgttatcagtgatgccatcgtgcggttcgtgtaacttctcgaaggccgagagacccgacactagcttgatgcggctagtgcaggagacgatcgtcggccattggctgatctgctcgataagcccctcgaacgcggccagccaagcgcacgccacaacgcttgttagtcacagaaactcaaaacggccagccgctggccaaccagcggccggctagtggggcgtttactctttcctcttcgggcatgcaaaatccggcagcagtttccacagaatccacaatctgggccctcaggctcagtgttacatctgctgaagtcagatttcttgatcctttgtctctcgtcttctcttaacctcgtctagtaccccggtacctctgtggctgttcagaatccagtctcccagtctccccgcctcccctcaacaccgcgccagccaacactcgatttcaacaaccccagggactagggacatggcttcctctacagagatctcggacgctgagtccaagaaggtcaccatgccttcgggggccgaaaagttcgaggcgccgcctaaatacctcccagcagaggacggcgaccttgtggctgagatgagcgagcgtgagcgtaatatctatgagcacggcacggccaagttcaatcgtctgggctggaagcggctcactatcgtcctgatcgtcgaagccatcgcgctcggttctctatcactaccgtctacgtttgcaactctgggaatggtgacgggtgttatctgcacagtcggagtggaattccatgctatctacacctcgtatgttgtcggacagggcaagctaaagtttccaatggtgcaccactacccagatacgggaaaactgtctgtttgcccggtttgaatatcacctcgttaacttcatgctgatctttcagctacttttcttgacgggctctcatactcttactggggctatcgcctggatcgatattacccagagcgacgtttgctctgtggtctttgcggtcgtttccgccattatcctgttccttcttgctgttccacctagtttcaccgagatggcgatcctgggttacatcgactttgcgtctatcatccttgccattggcatcaccatgattgccactggtgttgagagcaccaatgcccccggcgggctcagcgccgtgaactggtcggcctggcccaaggaggatattaccttcacggacgccttcattgccatgaccaatatcatcttcgcctacagtttcgccatgtgccagttctcgttcatggatgagatgcacaccccctcggactacgtcaagtccatctgggccctcggtctcactgagattgtcatctacaccttgactggagctattgtgtatgcgtttgttggccaggatgttcagagccctgccctgctctcagccggtcatttgatgagccgtgtcgcttttggaattgcgttgcccgtgatcttcatcagtggttcgatcaatactgtggtcgctgctcgtgtcgttcacggccgcatctttaaggactcccctatccgcttcatcaacacgaagatgggctggattacatggctggccatgattgctgttggtactgttattgcgttcatcatcgccgaggtcattccctttttcaatgacctgctctccatttcctcttcgctcttcatctcgggcttcaccttttacttcccggccctcatgtggttcatgctgatccgtgagggatcaatcttctcctcacgcaagaatatggcactcgccgcgctgaatgcgctgtgcttctgtattggtgtcgtgacactcgtggctggtacctactcgagtatcaaggacatcgtaagttatccgctctgttcttctttcgagtcattactaattcaatacagattgacaagtacaacgccaacgcggtccgcggagtcttcagctgttccaaaccgaattagacgacgtttctcgttctttgcatttattgtatgagtcatagcgcgcgtggatgcatttctcctggtgtctctcggagttcaattcgacgtacattttttccttgcaggcggctggcccagagtgtatagtaacgcatattcaattctcatagcatgttttcatacttcgtagttgtgctgtattgtaaccaagttaggcattttctgagacatatctacacgtataatcactctttctccacctgtccgacaatatcctccctcgagatcccactgcgctcacacatagccctaaatattccatcttccttctcccacagattcaatggtgtatctatctccgcgatcgagccctgatccatgacacaaatacgatcatagtggataatcgtcttcagtcgatgcgcaatacaaagcaatgtcttcccttcaaatccctgcgccatagtctcctggatccgctgatctgtcgcaaaatcaaccgacgaggtggcctcgtcgcaaatgatgatccttgcgttccgaacaagggcacgcgccaacgccatcagctgccgctgacccagcgagaaggttagaccctcttcatcgaccgccgtgtcgagcgttagtctctgtgcgttggcattgccatttggattcgaggcatcgactgcggaatctttcgtgtcagagtcaatcaaatgagcttttcgtaaggcatcccacagctcaagatcgctgtgctcattaaacggatccagattcgagcggatagaaccccggaacagcgttgggtcctgcggtatgattgctagccgtgagcgcagatcatgcagtccaatagtggatatatcgacgccgtcgatggtaatccggcctgatgacagctcagttagtcgaaagagcgcagacatgatgcttgattttccggccccggttcgtccgacgattccgatgcgctctccgccggatatgttcatcgagaggtttttgaggactagggggagaccggggcggtagcgcatggcgacgttgtcaaatgtgatttcgccgtgtggcggccatgattctgggactgggttggaagggatgtgggctggtgcttcttcttccagttgcgtgccgtagtagtgcacgcgttcggtggcgttcatgttgttttctacttcggcgagctgacgaacggtgaactgcagcatctgagcgatggctaggatgtagcttagcactaatccggagatggaaggagacacgtcgaaacgagaggtcacgactagcacacccgttacgaagaccaagaggacagcgacagcgtcgaggcgcacggagagccagcgttgattggagaaagttaggaagtacgcgccgttcatggtgtcgacggagtcacggagggaagagcggaattggttctgtacgccatacgcgcggatgctggctgtaccagtgatggcttcgctgaagcgggcgtagacggcggagcggaggatggactcgtggcgtttcatttcgcgcgcagacgagcgatagtaattgcttgccgtcaaaaagaggaggaaaagtgggaccagagcaatggcgaagtagtggtagaagacgatgatgagaatcatgatggag

SEQ ID NO: 5819 - DNA, 8611 bp, Emericella nidulans
tagcctgtggataagccttcttcataatcaacttgattgaactcgatcaagtcactgacttgctgatacccgtactcaaaaccctcccaacctgcagggacgttagcagatatcgcaagctcaaacgtgaactacggacttacgatgcgaaaaaggcaatcaacagcagcttcgggttatccaggacatggcgccatcgatttttgtatagcgacttcttgcgctcttcctcagcggcaacatcaacgggatccatattgtgatctcgcatgcacagaaggactcaagagtgccactccgtagctaacagaatttgcaataccccgtggacaagaacagtctggggggaatactcctcgtaaaatagctgtaggtcgattgcaatatcttccatgttatctatctcgcatgaccagttcataatggctgttttgtgaaatatttctaaacttgagcgcctagagcttcccttttggatgtccaagcgacgcctcggtcgagctaagatcaactagaaggaagctaggttgaatctgcactatagcctcgtccggtatgcctaagatcatcagggctcgtgccgatgagggcctaatccttcccgaataagggactcgggttttccccgataccaccgtgccattgcggagccccggttttctctacttgcaagtgacaaaaaacggcaaatgcttgagtccagatctgtgtctagccctgcgagagatgtggggtgattaatgtcgtctggcaaggaatcaagagaggccgaggcagcaggcggactacgtataggccgtgcgatggcccgcttacatactccacagaggccgctgcggggatgaattcgttgaagaccctatcattggtaggatttttggcccaaaccgtgcttggcagcgtcaatcctacatcttgaggagacgtggagactcataagatgagaagggaaggattagccgcagagagccttatgatacatggcgtggcattcgggcaaatcgttgttaatgacggtttaatgctgggtacggtcacccatgggacaccataagttatattcaggctctatggttgctacaatgccttgccagatatctttcctggagctggctcgcaacaggtgtaatgcccgttggtgctgataggatagcaagaaagcaatcagactgtcagtaagtgctcccagagcagcacatccataaacaatttcgttggcggagacgagcttagcttcaccataggacgctgacatcaataatcatttacgactgaaagttgtgagcgcaaggttcgctgatatatatcggggcacgaattcgagcgaacccgcattggttgggaccctgttcaacgatcgagagcgattacaagctggatttcacacctgcagcataggcagaaggatcgagtgatttagaaatagctactgctctgagttgctacatgagggtctcggatcgaaccatggactttcggttgaaatctggttgggaagctcaatgcgtgctgggacgagggtaacccacttgcgaggccttcaaaatgaacacgacaagaagacggcttgcaggtgagaagaagtgcaaagagtgaaacttgtcagtggcggacctggcagcattcatgcggacttttcgcggaagtgggcgtttgacgacacagttggcacttcgggattccctagaggtgattgcagcccggcacattgtcaatgcaaaagcaattcgtgataacctggaggacattcgaggacctgagctctcattcaatcgttacaagcgccgaagtgagagggtcgagggaggcaggccttggcttcccacgtgaggggacacggaaaatacctgattccttctaagcgctggtcaggtatgggaactcatgcgagccattcttaaatggctattagagtcccgtgcaactagtggagaagacgttatcgtctctgactcgatgcaaggaccagaatcagccgatttgagctgaattgaacagaattgtcctacctgcactatgatgttgtgatcgtttccacgcttacagagctgaaaacgtgcctcctcaatctagagaataccaagccgttatcaggaggagctaggagtagcagaggcagattcaggtggacttctcgacatccctgcccgtttctgtcggcactgctggagattggagccttgaagaggccttgtcctcctgtaaagtcttcaagaggatagctgtaacccaaataatcaatgctactgaacaaccgatcattgcatacatcccgcgggtgaatcgcggcgccagatctgccgagtagaacagaatgctccaccaagcattgacagcattgttgcccagattcatgctagcaatcacaacagaacgatgccgttcctcctgcatcctcatcgcatcattacaccatgcgaaaaaggttgcttggcaagcataaacggctccggcccaatagtatgcaccaaagactgtagcggttgagtcaaaccgagtcagaataagtatcggcgtgatgatgccagtaatgccgataaaataacccacaatataccgcttacccccccaaaaatcagtaagcgtcgcccagaacagtgtagagacaattccaacagcgggcacgccagtagggtagttgttaagctgggcaatggagtaatggtttgtggggtgcgacttcatgtaaagtgccaacaaagaattggacgagaatgactccgtctcgcctgcaatcacccaaagaatgacaaacgcccaccaataccaggtcttgaataggtttttcaggaatgttcggttaaatatcggggcatgcttcgctaccggcaatcgggacacggccaaagctcgctctgaggatgtaaggtatggagcttgggttgtggctggagtatcaggaaacaagaaagctccgtacaatgcaacaggaagggttatcaggccatcaatctggaatggttagctgggatgaggcagaaatcgccctggataagagtggaatatactcactatgaaaagccatctccagccggacagccctgcagcaccatctaacgacgaatggatcccagtttggatgaaaccaccgaacatttggcccgcgagcccgcttgcagtaaagatcccgctccttttgcctagttcacgctcggtataccatgacccgagtataaaatgagtgccactgaaagtgcttgcttcggccactcctaggaaaaagcgtatcgccattatgccttgtgggttgtggacagccgcggtgaccattgttagacctagaacggtggtaagcgcagtacgaacccgtatcgaaggcatacatacaaccccagcagagaatcatagcagggaaaaatatgcgtggacgcaagtaggtcagcgccagattagaggggatttgaccgagtatatagccgacagtgaaaacagtgtttatttgattcaactgattgccccggaaggagagctcttcctccatgccacttacatacgcgttggtcaggttggagcgatccagatagttgaagaaataagtcacgcagcagaaagacaagataaaccaatcgatcttgacgagtagctttgtctctgggtccttcgcccaccacattttggatatcaagacggttaggctacgttcaaggcgttggtggttgcagtggaattggagggatatatcgcctcctgttgatcgaggaataagaacatcattccactcgctgggaagtccaagattggatgatgcaacaacaataccacctcggcattgataaacgacgatcttcagagctctcgggtgaaaatccagctcgtggactgggagattttcttttattggtgccttatagattaggctgcaatttctacgctgagcttcactgccggcacgtgaacgacttcgtcgccgcctttcgacaactttttctagctctgccgtgacatcgacccccttccctcgtttctagaacgtactcttatttgactactagtttctcagtatactatgcggtcatctttccgttcttttattgatgtcgccgtcgtcggagccccgggttcctctcaactagtcgcagtcccacgaccaacagacaacttcgggctgcagctgcccgatcgaagccggggatgaaaccattcaagcttccctggagggtccccaagaccgccaaagagccgcagataatcagtgatgaaaaggatttgatccccccagagcctacgcaattgaccttcttctcctcgcaactggattcctgtatccaggcctcgagcctcgacgatctcaaagccctctacgaaccgctttgcccgcttctcgaggatagaacgtacggaggactgtggtggctggatgtgacggcaccttccgaagatgatatcgagacgctctcacgcatcttcaatctgcacccgctgacaacggaagatatcaagattcgggagacacgggagaagatcgaattatttggaccctactactttctatccttgcgtcccgcccgccgggtagaatcagatgaaggagtgcgcacttcgccaatcaacgtctatgcagtcgtgttccgcgatggtgtcctcagcttctcaatgggcagcaatccccacgtcggccacgtccgaagtcgaatcaaggagcaccagagtcatttatacttgaccagtgactggatttgttatgcactcatgtacgttccttgttagcgttccatctcctgcgctaatcgtcgctaatcgtctacagtgatgacatcgtcgacggcttcgctccgttcattagccgagttgaacagggcgtagacacaatggaggatagcgtatctatcacccggcctgacgacatcggactagctcttcagcagatctaccgttgccgaaaggaggttctccacatccgccagctgctgaacgacaaaacagacgtcattcgttgctttgcccgccactgcgatgcctttggtgcttctccgtcccaagtggggctctaccttagtgacatccaggaccacgtcttgacaatgatggccaacctcgacgcagccgagcagatgctctcgcgcggacagtcaaagtacctcagccagttatcgttcgactcgactcgcatgcggaaccagatctcgcatgccctcagtcggctaacggtcatcgccggcatagtcgtgcctctccagttcgtcaccggtctctttggaatgaacgtcaccgttccagcgcaggccgacaaagcggacagcttgacggcatggttcagcattcttggtgtgcttgtcgcgctggttgtggtattctttgtcgtagcccggaggctgcgtattctatgactatatggcctcttaccgtcaacgcattctatacatttgttgtgtgtcgcactcaagagaccgactaagagactgatagtttctagtaatagccaatgtgatttttctttagttggtttcgcctctacgctctaaagctgaagtactgtcctccaaacttcccattactcagggattttgagctcatggtccgtttatcaagtggacgtattgtcccatctggcttagcccctgtaggatcacgtgagtgagtagtgatcaactctacagtgacaaggcttgtcttctgttagcagccaacagaaaacgagttcgtcccaagttttatctgtgttgatgcgactaacagctattactgttctgggatgatttatggaatgtcgacccagggcccgataccttatatatttcctccggtccactaaacttaaagaagacctcactgggtgattcctgtgttgtggtgcacgaggttatcgtttcgcaaggccagaatggcccactggagcagattcaaagagtcagaatcttcatattctattgagacttaatatactcagaaaacagtatagctaaccaaaactccagtaggactccacacttgaaccagacagcttggaatacacaagacaaagaagacaaagatagtcacgggttactagtgaggaaacccatctcccgccacctctctatatagcgcctcacctcttcctcggtgacaggcccttgagcagccaacgtggccgaatgctcctgagaaagcgttgtgtctaagactaacccgccgcaggccatatgctcgaaatctcgcgtaaagaaatccatgatcttagctgcgggtatctcgcggtctcggtctagtggagaggagcgcagaaggttaaggaactcttggtagggaatgactctatctgagggaatgttgagcgccgatgttatgatcggcgtcatttccttccagggctgccccaccgggttgtcgatgtggtagactggatatgcgtcgggttcgctcttgttgagggttgtgccagtttggttcgagtccgactcaataccagggagaaggagatcaaccattgtctgagcgacagtgtcaacggggacccagtgcagaggtccgtcaagatccggccacgcctgcagagtctgtgcggtcttgataagcaatggcatatgctccgtatgcggccaacaaccggtatgactagagccggtgatttgaccggggcgcacgaccattgggcggaaatggtcagggtaacggtggagcgtttcatcgagcatgcgctcacatacccatttagcctctgggtagccgatgggcaaggacgagcgaagatcaacccgttgctctagcacacgctgctgggctgcggagccgactacactgattgaagaaacgaattggaagccgaccctcatgccgttcgggctgcaattgcacgccatttcgcgtgccaggtcaaggagatttcgcaacgcttgaaactgaggcacaaaggtgtgaatgggacgcgctagactcatgggccatgcattgtgcacaatgtgagtggcattccgagcgagccaggtgtactcatccgctgcaagacccagatgcggctcgctggtgttgccgtcaagcatgcgaagcttgctggattcagcctccgtcagttgtagcttgcgcgttgagagtgcttgactctgtcggagggtgcccggggtcttgctacgccggtttaagcagataactgtacgaacggacgggtcgcgggcgaagctcgctactaggtgcgacccgagactcccagttgcaccagtaattatcacgacattaccgctgtgttctcgcgcggatgaccgcgacgacactgggggaatgaaccccgctgtatatcgagccacgtattgttcagcgatctcctctcggtcagtattttgttttgccatctctacaatcggccgttgcgatttgaggaaggtgtcgtcgctttccgcaagagagaggacctcagcttcatctctagacgaggtaatgatgaatggttcgcgaaaatcatcagtagaagagcatgccacagtaggggtcgccgggtccgactcgcccgacgagtctgtatcgttaggagaaccgtgattgtcgatattttcagaagcggccgaggagccgggtatcgagcttgagatatagttcgtcagcttctcgaccgtagtagcctcgagcaggtcgttgtgatctggtgagaatttgaatactccctctatctcacgagcgagctccatggccattagtgagtcgacgccgagatctgatagctccgcattctggtttatcttcgccggttcaataccagaaacactggaaagaagctggcagacttgacctgtgatatctcgtttctgcacggacttgtgcttccaaggtgcttcggctaagacgatttcttgtgcctgaattatgggttgcttgggcgccgcagtgacgatatccttttcatggacactggggttgcccggatggaaatcagacaagattttgcgcataacggtcttcggaagccgactgaacttggtgcccatgatgacttctgttagggctccagtgcgcgagtcgaagacgaatacatctgtcaaatatactttgtcggacacgcgcaaatgacgagcaagaacatgccatttctcagtgccgtcttcgcccttctccttcacgtcggccagacttggagaccgcatccatagctcacacccagtggcaatgaagacatcgtctgggctgcgatccgtcatacagctgacccagatacctcctgtctgcataaaacattcgctcagcggcacatcgagccatgtttcatgagaccgcttgcgtatcacgcacccagcactctcattaccacggcccacgagccgccgaagactacggtacaggggtgtgtaggagatgacatcactgaagccttggtatacgttgcgcccttggaggacgtggatctcatcgtccaggtcgtcaggctgtgcacccgccaaggctaaaatatccgtacactgacggtatggaacgagcctctcgagacgcgcaaaatcattccggtagagcggatcctccggactgcggatctgcagggagcccttgacatgcagaagactcgaactacttccttcacgcgtgcttgtgatgttccagtcccatagcatacacgactcgtcagcagcagatagctgtagccagaattttcgtattggatcaagacaaacagcggctgagttgactatgtctcttagcatgggttgga

SEQ ID NO: 5820 - DNA, 3622 bp, Emericella nidulans
agattgcactatcacaacgactgggccttcaccgtatcgagacaacctttcgaaattataccctgatctacaagtgccaatgccacccaatacacccactctagcccaggctggctgcaggtgcacctttctcgtctctgttaaaggtaacgcacactggagacaggcttgtgggattttgtccagcaaactggagcgtgtgcggtactcgcgctccgagaaaaatatctaatagctcgcctgaggacgtcgagcccatacaatatgtcgacatattctacgtatttagtcaccttcagcccaatccttgcccgtatgacgtagcggacacattatcagaatggcggcattattatgagataaggcagtatccttagtcatgagcgacaggtgtctatgtgcgtgaattgtcaccgtggaagtgccattacagaagtgactttgaaggcaggttaaccagaagctatcgttctgaacaaatatgaactactcccaggccggtccggtcacgaaaagcatctattctcccaactttgtcggacgtaatgaggattggaaaatagtttcgaagccttggtcggtacataacgaaagacggccgtcgctcttgtcctgtctgggaaatcaatttggtgcacccatggaaggagcgtccatctggtataatcccataagaagtagcacccatcttatgtttgatcgcagcttccgtcagtgtttctgatcgtccctgggatgagtgatagacacccgactcccatcgcaatcgcctcatcggaatgattaccggaatcaagcgatttcaaaagtgagtcaggaagttaagcttgatataggaaggatcaggatggctgtttttgagggaagatacaatggttctgagcgggaagtgcgataggccaatggccgggccggctctcaattgcatttacttattgagaaccccattttcgaaaggagatggcgttagccaaggcccaaggcaggctcggccaatccggtgtgttgattgtttggaggcatggattcgttcaattcggacgaccgatcgccggcttgttacacctggcacgtgtatgatatatacgcattaattcactatacgtatagcaggcaaaatgagcaaaaagtgtaggccttgagaatatgcatgtgactgttatatgcattgcgctcagtatatataggtataatcatgtacagtcattcaaaaatctatgatgcaaaggagtgttgtatccgtgccaacgccgatagaaaaaagcttgcaagtgactgaaaatgctaactagaagaagcgagaaaatgccggtgtaggtttagtgccgagatgttgcgcaggaaaagtcgtactgataatggtgaaggctgtatagtggtgatagcccgtctgtcggtacctattaagaggtcgtaaacgtatgcaaggtggtatcggagtcgagcaggtagtcattatgtacaatgaatgtcaggaaatcgatcgagctgggtctatcaagcagtgaacatcaggcgcaggcgactagaccgtttcaccttttccttgggtttcttgctcttgtctttgtcggaatatcgcgactcggatgttgagggagcccttgagggagccttcgagggcgcctttgacggggctttggaaggagcggccttagtgcgtcttgaaaagatcgattctgccctcgtatccactttggttggggcatggctgtgactgtgcgtagatcgagaatggcgggaacggtgggaccggcgggaagatgcaacggaatcatcatcgtcgaacttgaagcgggggtcccgggacatgcgggcggtggttatgtcgatgccggacattgcggcagccctgggcgtgatgaactcgccgtccacggttgcaacgctctcggcctctgcgtctgctacacctcgtcgccacatctccacggagttgaggcagtcggtgttgaattcaatcatctcgtccatttgtctggggtcggattgttcttcgaatacttcttcacgcagagcacgcgaaggctgttgtagctgcttgacaatcttgtagccgccgaacataacgatcgtggctgtgaggccgacaccagcggcaatcaaaaactgcgggctggcgagtaaagcccaaatcattggcgctgaggttttcagcattgtgagcgccgacggcgccatcttgccagcaacgttgctgatttccgcaagagtaagcgccaccgctgccatagcatctgggttcttttgaagatggtcgatggtggctgtcgcggtgtgctggacgcagttggcctcctccaataaccactgtgcgcggcttacaaggccgttcagttcgggatcgtcgatcgactgaagctgctgatcttgtggagatcctcgcggagctatggcggatgggtggaactcgccataggctaggtccatatctatatgcgcgtcggatttggagcgagcagtaacagggcgagcgtccggttctcgaatggtaatatcatgatgagtgtgacgccggaccatttcagttggaggctcgtagtgagaccgcgcacgcgacgcggaagagtgtagatcctcttcgtagaccgatccgccgcgggggcggtcgtattgatattggcttcgactcgaatgatgatgatgatgatgatggcgatgatgtcgcgaacgactcctctgcgaggacgcgacagatggggcatcttcaatagtatagttctgaagcgccctcagtgcttctcgctcagcaattttctctgcgatcttcaaattccgctcggcttgaacttgagccttgcgctcgcggtaagcgtttttggcatggctgaagacaccgaacaagtgtttgctctgttatagcatgaattagagtcaactcagttatcatagacaggggtactatatacccaccgtgctgacgacttgcccagacttatcaatgaccgcggtgtctcgcgaacggcatattattgaatactcgtgcaagaactgacgactgcaacagtaaactggcggctcttagagacctaaaccgaccaaatgagaatcaaatgacgaggagcattgataaatgatcggcgacgtcaaaggcctcgctaggaggacgagcggtgtagtattttgatggtctatattaagacgatgccggtaagtcgggtccaggtggggatttaaccgcgatcttcttctgtacccacgatgcggtctggaccttatattggcgttctaaatgggtgacggatatgcagagaaggcgagttttttgcaaccggtgttgctggaaagctgttgcctggcgataaagttggctgttcagctgagaaaggtggtggtatatgagcaggaaaggcgaatggcggcaatataacaacgcatatgcacagcgataaccgcgccacgacggagttctgatagagcacaagaacacagagcagggggtatgagactgaagagaaaaatagaggaggctggggtttgagcgatgcggcgtctaaaagggcacgaagcagcgaacagagaccaggttacagagagagaggatgactggttgggtgtcgatgaagctaggaacaaggcaacaaaatggtgctcagactgacggccgcagcacccgaatggc

SEQ ID NO: 5821 - DNA, 4053 bp, Emericella nidulans
gagagtagcctaccccccccttatgaatttttattacccccaccaaaaattcgggttttggggctaggggccgccaagaagattttaaagctctccggacaactctccttcaaaggaggctgggttcacttgggtgcggggggctcgtaaacaggaaggtagcggttccggcgtaagaatcacctagccggtttctgctctaaaggacggctctttgcgcatgctcaagcaggacatggcttgtttccttctgtcatccgcctctgtcgtagaatgacaagcctgctgctagcatgaactgggcccgtcatctccctccatggcatgctcgcagcctctacattctttgcgtgtcggtaaacgcccaccagtcccagagtatccagccgacagcagtcccaacgcttccccagcacacgaccgagacagggcttacccggccctggacgatacccgcgaaacagcagacgaaaatagccgccgaacagacatgttgtacgataacggtcgagtcggccaccatcggccaaaagtcatacggacgcactcgaggatttcgctgtaaatggtcaagaaacgtctccgtatcggtgtagttgtccggatctgttcctctatcagcatgagcggcggcatgacagacgccaattcatattatgcgtacatgactgtttaacccaaagcaattttttccaagcaccctttcgcttcttacgggcacctgttcgcggttttcggttctcttttcgagtgacagccccggggactgctggcggcggtcgcaaggctgcaacggacgcggcagtagcagcggcagcagtcccgctcagggaacggattggatcttcataattggagctacccggtcggattcgaagaagagaaggtgcgtagtaagcgtcttcaggagcgagtcgagtaggatcagggagagcgcgttgttctgccgccggaggcttcagcccccctgttcggatgggatgggtttcgactgggactggaggaggaacgggtggcggatcgagtcaggcaaagaaggcatcgggtcagcctagtcgttatgctagaagcatggcggttgtggttgagtggaataataaaagcagcttgtaaactcagagcatggaggtcagggccgaaataaactaatttgtccatgcgccagagctggtctagtgccttccatttttggaatggtgttaattgcttaactccttactactgtacgttatcttataagacatctatactgattatagagaaattcgtacggaacagagttcttctatcgagatagggaatgtatctacaactaaaagacctaccgtaaaggccagatgttgcccgtacgcaagcaacgtctcaagcctgccgcacgagcctgtacttacatactttcgttgcccgcaaaaacgtagtattcgatcgtgaagcaagctggcatgaaacagtttcgacctcgatattccgatcatctatcctataaagagcgggccctttcaaggagcgctttgttttgcgtcaaagagagaaattacggtcatgctagcccgtgaattctcggaagctttgctttgctttgattcagacaacagcaacagctctgggtatcgaccgagtatagaaggggcctatgtctgcggtacttgcgccaggttcatcgtgaaggtcgactggagaatgccccttgttggcgctattcttctggcgaatcagtcgattaactcccatactgtagtcgcttttatcacgcccaatcgatcttcgagctctcatcactctagactccatcaaactgtagaattcctgggagccagggttgcttgcctttgcatccgattggcgtcccctgttgttagacatgcttgtcggccccgaaggggctcttagccaggaggctaggctccttgctgcgctcctcgctgttttcttgctgtgttccctgctggtcttactgacgccactcttttggaccgcccggacaccggtttgtattcaatgtcttccctaaattgccttagagtcggaacatccgcggctcgagctggaagcccccagtctaccttaagccggcataagcttgcgaggagtcatattttcgataatgacctcaggaggtgcggaagattccaaggctatttttgggaaacgagcagcaaccactgagagctaaaaccaggcgttgatcgggagatgtgtcaagttcaacttttgccttcacgatcaaacccttttacggctgcttgccatatcggtatctggaggtgtaatgagaaattctgaggacaggaccaccttcctctccccgcggcatatttcgagtaccgttttgagcccgggatatagctctacaggctctgttgtttgcctgggctctgcgattatcgattgtgtgcgtcgagggctggttgaattcaggcagtaatattgcttaccgaccgtcgtactgtcgacgatcgctctcggcctgagcttcgcgcgttcttctttgctttcagtgtccaacgtgagatcgtatcggtcagatttctatgcaactgaggaaatgttagtcggacggaaacccaagggaacccaatggatgcagtactgcggtgtttccatggtgcttcgaactattttcccagctatacgccaccagtccgcccaataagtccagaagaatagttgaaaaccgagggatctccgttgtattccccgcgctaaagaatctagagaatctcgcggaatgttttatttattccgaggcttgcgaggaaactcgcaagccctcgaatggtccatcgaccttggcggggccgcgctggaatcaaggtcgatacatcagtcatgtttgatgttatacacccaagatcagatgagttttttctgggcagtgtagaagcgtttattatcgaacaagaaagaaagaggaataagcggaaagcatctgaaaacaagccaaccccagaaagattaaagccagatctcgagggcacagagccctacaagacggcggcgtcagtgtcctcctttccatgcgatggccgaaagttcctaagcaattggatagttttgttgtcctctatttctaggagcgggaaaaagaatacacagcgtttcttgaaatagcaaatgcggcgtcatgcaaaaaagcccgaaaggtcagtgcagaaaccaaacaataccatgtacctattttatacagacgcgtgctcgaaagagagatgtctttgtagattctggcccgcagaaaacaaaatcaagtctggcgagcgcatgcacggcaggatcacaccaagatgcatagaatatcaacatgattaacgggtatcaaacgctcgatatcggttcggagacggccggtggttgccgcctaagctcatcaaatctatgtttagagcccttgagcaggcacgtgctcatcaatactgttccggcggccccagttaactggctttcttcgtagaaacgcgccgactgcgccgatgtagccctcatggcggagaaagtatgcctgcttttcgcctttggaccagaaacggatagcgtaggataatgtgttcatagtttgtcggtgtcctcgaatgaacgagccaccgaagtagatgtgcttgacctggtgcttttcggactgcaagtatgcgatttgtccaatattattactgagacggttagtgggcgatcatactgtaaggatggacgctcttaccttatggcgtatagtaggcttctgctcatatcttcgtgcttaaatatcggctcgtcggccttttggcgagacccgtcctgcggtgcctccccatcgctcgccacccgctcgcggttctgtagccggaagaccttcccaaatgtgctggcgatgaccgtgctcttgagacctatcattccgtagtccatcccgtagatgtcgccaactaacatgtccacgccgctgttatcccctcggtccgccattgctagcatgtcgtcaaaagttcgggcgccagtcaataatgacatgatgccccagaatgttccaccacccaggtgcgttccgccaacaaacaaaaactgttttggccccgacacttt

SEQ ID NO: 5822 - DNA, 5492 bp, Emericella nidulans
tcgtgccatcgtgccgacgcccgcgttgttgatgagaactgggggatcgccatgctctgcgcggatcttctctgcgacttcggcgatgctggcggacgaagtgatatcggccttgaagaatgcggtgccggatgctgcatccagtcagtcaataggtgaacgaagttctgaacttgttttctttccacgtacgcagcgtaaaagagggttcttgaatatcaagaattaccacgcgaacgttcgccttggctagatcaaggaccatctgcttgccgatgccgctgcagccgcctgtgagaaggaccagttcgcgttcatggtcaaacctgtcgcgttcgccgttgttcattgaccaattggtcagtattcggtttgtctggcgcaggaaggcaagcgccagcagaaccaagagcgctttcggagcgaggggatgcagcacgacatcctggacggacggtggaagctgctcgacgataggctgcagccattgtccaaggacaagagacagatgcgagagggatagcgacatggcaggcaaagcgggcaaggcagatgcgaaaactaggaagagtaatcaggtggcatgactagattgcatgatcacaatattaaatatccagcttggaccttgatcgccatcggacgaccgaaccgaggcattcgcatggggttcccagggatgtgagggtcttgttgttgaggcgaaaatatggggaagctgtggtgggttttccgctttgggaaacacttgcgaactggcgatgggcgatcgcctccagtaagtccagtgactttagtcttccagaaagcacggcagcttcacatgaagtgcacgggctcaactttatctcctctcaactccgcaaccacgggcttgcatcttacatcattcaaccattatctggcagcctgttcccgctagatactcactgactcagagtacgcatatatcaacctcggttgcctcgtcacgggctacggtatcgatcaacagattgaaatgaacgaccgaagatgattcctatgctcgcagccacgcttgcggaggccttcatcctgcagcgctctgttttcacagataccccgttgcggactgttgttttcggctcagcagctgttaatctgcttatcctagcgatctacaatgtctggatatggccattcttcctcgatcccctgcggcatcttcctcgcgcccccgtaagtgttggcaggtgctctacaccagtgaacaatgacgcgtaaactaactcgcgccaggggaggttcaacatgctccggttcatcttcgataaccctcgcggtagacttcctttgctatggatgaaaacagtacccaatgatggtcttatctacttccgggatctcttgaaccgaacccagctcctggcgacaaaccaccaggcgcttcttgatgtcatgagcacgaatacctacgatttcgagaagccctggcgggcgcgcgagttcctggcccgtatcatcgggtttggtctgatattgtctgagggggcggcgcacaaaaggcagcgccgtgcgctgacgcccttcttcactatcaagaacgtccgtgccctctacacattaatgtgggacaaaacaaaccagcttcttgtggagatggacaagcaaatcagtcggtgtccgatggaagggactagtccggacagcggctggggcaaggtcgaaatgagtgtttgggcgaggtatttcaccctcaggtaaaacactggatagcagctaactgaacagtcgtcttactttggatgttattggccccgcggccatgggacgagactttcggtctcttcagaacgctgaaaataaggtcgctgatagcttcctcgctattctagagccgaccaaagaaaaaatcgctttcctagcgattaacttcctcctaccgcagtggttcgctaagaaactcccatggcgtctgaaccaggtgattgaagagcaagttggttatcttcgtgatctctgtaaggagatcgtccatgaaaagagagccgccatcacagccaccaaggtcacggcctctgaactcgaggctgacattctcggctccatgatgcttagcggtgactttacggacgacgagctggttgatcaaatgctcaccttccttgcagttggtgtacgtcctttccatcccatactttagtgctagcgctaataacagtagcacgaaacaaccgccagcgccctaacctggacctgctaccttcttactctccacccagaggtccaggaccgtcttcgggctgaaatccgcaccgctattccccattccacccatccggttacacattctgacctcgaatctcttcccctccttaatggcgtttgccaggaagtactccgcctttaccccacggtgccttccacaatccgggaagcagtccgtgacacgaccgtggccggaaagcatgttcccaagggaacaaagatcatgttatgcccgtacgcaatcaaccgggcacctgagttttggggggccgacggcgacgcgttccgtcctgagcggtggatcgatacagatcccgtaactggaaagacgagcgtgaacaaccacggcggagcagcaacaaactacgcgcagattacgttcctgcacgggcagcgtagctgtattgggaaggactttgcgcgtgcggaactgaggtgtgcggttgcagggttggttttgaggtacccagtttgccatgctagatccctaagcaggtgatccatatctatgatgctgtgaccacgaagccagttgagggaatgcatttgcggataagaagggtgaagggatggtgattcggatgtatggtatgggagcagtcataagttgtatgtattgcagacgattgacgacgtatatgcaaatggaagatacctatactggatgttggggcatgtccaacgcacattctggccatcatgaagagtgccagaaactccaccggataggcaccggtatcgatatcaacgactccggaatcatactatacctaaaaaaccacggtgctgtatgatatccccaccaaatgatataggccgcgtccaagctccatataccggcccttgtgagcgccgaagcgggtaggatgcgctcaagggtatgagttgatactgcttcctgcgcagcaatgaaaaaaggcaagaggatgaagaagaccatcatcatgaaaacggcattggcgtctctgataacagcatacgtccccgcggagtgtacgaggccggaaagtatgaacgagagagatcccactagaaatctgcgcagagaagctggggtacgttgcggaatgagaactgtggacgtgctgaccaacgcacgacggcacaggtcatgccataacttgccccatatgtctaagaaaactgtcagaatttgttattccgaggatggtagggtaaatacctttcagtcggggccaaagaatataccgccacgaaccgaaaatggatgggtacatccacggatctgcagccagcctcggcgaaacgacgtacagaccgcctacggcgagcaatgcgatagcggccctgatgccatcgacaaatccgtagcaggctacccagcacgcgggaggcagcagaaatcggcggataaactcttcgcttgtctctggggagatgtggtattggaagccaaggtgatttaattcaaaatgctggagtctgtctgagttgaccagggcctgaaaattcgcgcagagctgagtatagttccttccaaaccatgtcctgtagacatcaaaggcaaagtaggctacgaaaagcttgatagcctcttttgtgagaaatgagacgcggtcctgagacgcatgcctcaggataaatctctcgcctttgttgattggatcacctctctgcttcggctgcggcccattcctgtttggtgttgtagatgtggcgctcagcttctccagttcaggcagatacttcttcgacccgtgtgcccacccgattcctcttgggttgaggagcaggtcgcatatccatagtagccgtgttaagctcaacgccggtggcatcggctcccagacatatatcgaagatgaggtggaatcatgcactttcactagtcttttcaaatgtcctggctgattgacaatgagcagctcaatggcgcgaagagcaaaagcaaccgagagaaacgcgtttccataagtgacgatggtcaggcctgaattgggcgggtaaagaactgaagtgatcacgctagatgcgatgatggtaaagaacaacgctcttttcaagcgcaaagagagttggatcttctcgtcggcgaaaagaaacaccccgaccacaaagtatggtggacatctccctctatgagaaaagaagagaaaagatttggtcactctggcctgaattccgagagacgaacgaggagagacatgccgaaggattggccaaggcccagattgttagtgtctgtcagccagaacacaatcgcatgtcctactccatgggtgagagaactcaagcaattctaatttgaaaaagaaaacggcctgaatccagaggacatagtcaccgtgtcccgtgcataccaggtgtttcctcaccaaggagaagatgagctggtcccatcggccagttctagacactgatatgaactgatcattatggtcacggagaacactgaggtgttctctgccgcagctatcattgattgtatcaacaccctctgcaacatggttgagaatcgcgacaattcgatccatgttgggacctcttctacaaaggatcagggcggcttcgaggaatggagcacaacgttcagcaggtgcaaatcgaagaccttccagcagaacctggaaaattggttccatgagaccagcatctggctctgcatccataagaagaccaaaaatgttcctgcatgcttgtgggttgttgtactgggtaaggatcttcttcaaaatgactagctccctgcgctgtcccaaaggcctaatgaggtcgtgttccgtcaacgttagtgaaaacctctcatttggaagcgcttgtcgttcatcttccgagaccggccgagcggtaaaatcaattttcgcaagtaactcggacaagaggtccataagcttccgatgcgaaaatctcctgcccttttcgagcagcttatagtaggtagggtattgacgctttagcctcatagagtcctcagaatccagccataagatctctaagcatttaagaagaaacccatgttcgaggattactccgacttcttggctgccgaaactcgccagcgagcataagagctcaaagtaatcgtcccatgggcgactaacactgtgcaacgtcggccacatgccatcgagggtagcaataacaaactcaagaccatctaggtagacagcattccacttctccctctcaaagcttccatcttcggttgttatgacattctctcgaagcctcgccagggcgtgtacaatgaacctgactgacccgttgcggatttgtggatgacactctttagaagatgagga

SEQ ID NO: 5823 - DNA, 10455 bp, Emericella nidulans
  unsure (1)..(10455): unsure at all n locations
ctaaatccccaaccctccttcactctctttcctctctttcttggccatcctcgtcctttcgttctctttcatcctcgacattccttctcgaagcaggtagtcagtttcactctttcaactgctcaccttgctgtccattctttctccaaacctgacccgggccccgtttctcgctatcgagaaaacaaccgacgacagacgaatcccacgatccactaccgaccgatatattccctctttctaaataaaccaataatcacggagtgcctgaagtagttatcagaattgatcacaacttgctgaaacatcgaccctgtttcattccaagcgtgcattccgaacgtggctacagcaacatcgtcgatcattgaacctacctcatcacacgcagaacggcaccattcccatacacacaattccatcactgctttgagcacaaaacttggaacttttggaacccttcgcaaaaatgaaccaaataatgcaccaattttttgcgagggatgacgccaaggatgacggcttatctgagtccatggtcgatctgctgatctcgctgttggttcttgtcctgctgggtattgtcctgatttgcaccctcctcgttcttcgacgcaggcggttgaatcggcagcagtccgaattacccgtacataatggtcaatgctcgacgcatcatcgcagcgtcaccatctctgcgccgccatacgcaaaaaccgagtctgtgtttgttatcgatgagaagcgcaacctgatggagaactcgtccagcccaccacccagccccgtacccgagatccgcatcacatttcctgaggaagaggatgagtctggaaagcgcaagtccggcagagttgtggtagtaaggataagtgaagccggtagcgttggccttgagccgtacaatgaccaacttccaccatatcagtcaaccgatgcagaccgcttccagtccctggacatcgaacgaatgggtggattgaaagagaaggatgacacgaagcgctggggataagtctaacaaccagcaaaccccacccgccatagcccaacagttgcgtcacttgactatgttcatcttccttcttcaaacttccatgatcagcgctaagcacgactccaccccgacaaaattctgcttcgttcttgttgtatatcccgccctcctgttccaccgtgcatatgcgactcgcaatccgcagcatccagctcgattacttcatattaaaaccagctttgcctgaacgccctcatccccctttctgtttgcctggttgcgggtgccggctccagtaactagtgaggcggacggacattcgagttgcctcgtcgaatattgtgggatctggcttttactattttgattttaccttcggcgttcgattctcgtgctttgtcactcgtcctctccgccctgccacgtccctagggttggagagaggttacgttctgctttccgttgaggctttcttaccattcttctacgctgctcacccagtgttctttctactattttttgtcactactttacccttaccttctcggtctccttaccggtgacttgcagctggataatgtatgtacttagtcaaagctttacattggacggccgccctgcaggcgtgagcgtcgatgaatgtatctactggccttcgagggctatatgatatcgcattgtcgccatctcatctatcaccttttcgcaatctaggcccagccttactatagggaggtctaaacagttgtccgtttaggggaatgacccactggcgcagggttttctgatgatccgtgccgcccccaccagtaggaacgcgccaattcgtagaatgagatgccgaaagcgccgactcccccacgtcacggtcaggattaattggcgcctttttagctgccaggtgggaagtgcttgtggcctttgtccacagtccacacctgaatgtttgcaattgcgcagcgccagcccctattcctttccgtgtccaagtagcacccggtgtatctgatggagctgcagctaggctcataagctcaccaatcttctgaacgcacgcacgaagaagagcccgagcatctgcagctcctgaacatacaaccccaacctttggaagggagaaatcccgagagggatcaagttcaacattgcgtccgcttgggtgactcaagtcatttataccttccagaagccctaaccttgatatagccttataagccgcatattcctggtggagaatcgagtttgacctgccgagtccgatacctccgcgccttcaaatctccaagttggggagaccacacgatataagcttcgaaaggtcatctttcatcggtaactgcaacgatgagctcgcgcaatgatagctctaccgccgatgcgttcaacaaacccgggctcttgaattcgtcacccgggccttccgaccctcccagaacacagagcgcaaagatgttgtctcacatgcagtctcgtacggcgaataagagcagattaaaggatgaccatgtggaaaagctggaacgggagttcaaatataagcacctgagtctgcttggtgtgtttgtctggatattgtgagcatcccaggtggttgtttgattttcagagagggccgtaatctaactactggttatttgactagactcttacatgttgtcggtatcttttttttcaccaaaggctttctcctcactagaatggtgttggaaaataagtcgtcctgtgatgatcttcctttcgacgactcgcgctctgtaccgaatcagtcaaaccgtgaaggatgctggcacccaaaatcattcgacaaggccattgttattataatcgatgctttgcgctacgattttacagttccgtttgcgccaaatgccgaatctgagagcgcccagctcttccacgacaacatcccagtgctctatgaaacagccgtcaactcgccgcaaaatgctttcctccttcccttcattgcggacccaccaactactactttgcagcggttgaagggattgacaacagggacgttgcctacgtttgtcgatgcgggatccaattttgccggcacagcaattgacgaagacaacatcgttgctcagctccacgcggcagggaaaagcattgtgcagcttggcgacgatacctggcaagcccttttcccagattatttcaatgccgaccttacccggccgtttgattcattcaatgtatgggacttgcatactgttgacaatggagtcaatgaaaacctattccctctcttggaacctcagaattatacgaagtgggacgtgatttttggtcactacctcggggtcgaccacgctggtcaccgatatggcccgagtcatcctgctatggcagcaaaactgagtcagatggaccaagttatccgggacctcattgatagaatcgacgatactacgctactggtcgtgatgggtgatcatggaatggactcaaaaggcgaccacggcggcgaatctgatgacgaagttgatgctgcattatggatgtattctaagaaaggggtttttggacgtaccagccaggaaacaattatgccaccaaagtacgctcgcgaaagatttgttccccagatcgaccttgttccgaccctctcattgcttatggggcttcccattccttttaacaacctgggctcgccaatcgaggaagcgttcattggcactagtggaagtgactgggaaaatctggtaaatgtgaatcgcctatcttccgcgcagatcaagcgatatcagcaagcatatgccagaaaccgcgggtcagaagacagtgggaattctggatcaatggaatattgggaaacggcggaaaggcagtggcaagctcatcatggtagacccaacccgaagagcttcgtctcaatcaatgaggcatacaagcagtatcaacggcataccctccaagcctgccgcagactatgggcaagttttgatgtgccaagcatgatgcaaggaattggagtactccttgcaggcattgttttacttgttttctatgctcgtggagtgcagtctgaccgaacgctacttacaggcccgttactttcccgcgtgggactaggatccatcctgggcgctttggttggcaccctaatggccattcttgggttgactgagataaaagtgcttgagttatcggctctactggctgccgtcgggagcatctgtggcgcttcggtcgcaatcttcggtagctcacagcgcttatcgctgcctttaccgaactcactttggggttggcttgccattctattcaccgtcagtcagtctattggcttcgcatccaattcttatacgatttgggaggatgagatcttactattctttctttctacgttcggagttgttgccggcgtctcttccatgcgccaacagtcaacaacggacagggttctcggggtctaccattcaatcgtgttcgtcatattaggaaggatagcatctctatctcgcctttgccgtgaggagcaaatgccattctgccgctcgacttactatgcctctagcacatcttcaacctccgctccgtggcagctgactattccattcctcgtgacgctcatcttgccaacagtcatcaaaggtttctatgccggatcgaagtcctatgaaggagcggccagtctgtggattggtattggtttccgtctaggactgtttgtcacctcaatcttctgggtcctggaggaaatcgacagcaaagaatggctacctctcagcgatgaaagtctgaagacagtcagggtattcttagcccagcttgtcctcggccttgcttttgctgctggcacaacggctttcacgtactcaaaaccgtgcgtgagcatcagcgtggcacaaacaaatacagagcccgaaccgaagcgtccctcgctcggcgaacaacaactcccaagaactacggtcacaatccttggcttcggcaacgttcatggcacccgcttcttcttcctcgcaatcaatttttgtctagccatcaccctcatgcagaagcccatgggccaaggcgccatgggcctcctcctctggcaaatcctttctcttcttgaaatccttgacacaaacgctctcgtcaccaacaactcctccatcggccctgtcgtcctcggcctcctcggctccttttactatttcaaaacaggccaccaggcaaccattagcagcattcagtgggaaacggcattcatccccctcacaaccgtcaagtatccctggtccccgctcctcgtcgtcctcaacacctttggcgcgcagattcttaccgctattgctgtccccttgaccgttttatggaaacggccccttcaactcaacgataagagcgcctcctccacctccgaaaagccagccctcagactcctctccgacgttgctcaggctgcggcgacatatatactttactttgcgacgatcaacctcgccacgacaatgtgggcgggtcatctccgccgccaccttatgctctaccgtgttttcagcccgcggtttatgtttggtgcaattgttctgggtgttgtagatgtcgtccttattctcttctccattgctggtgtgcggtggagtacactcagtgttggagaaatttttggttggtgatctagctagccgcggattgaaactataatgaccccttagagggaaagtagaggtgaaatgcaaatcacatcgaagatatcaactgcgtttcttctccctgtcccagtggtccctatatacggccgtgtactacttagtggtttattcgcattacatcggaagacacccatctgtgatgctctgtacttttaaaaagatatttgcatgtgcttggctaatccttcgtctactatatatatcaaaatagactgacgccaacaacattcagataagtttggctgtcgcaggcgcgggcttctagccttcatgtacatattccagttttacaaagtatgaagttgaatcgccaacccatctacttctttcctgtcccaataagagaacattctatttgacttcatgcaattcccatccatatgtgatatgatatcacgtcagaacaagaagatagaaaatgtaggtacgtaggtcgttaggcaggagagagaatgaacaaacaagaacaaagaaatgagaaaagaacgctgtcatcaagtcatatcaaaacacaaacttttagtgtccatcatttccttcatatcataaatataagtaacagtcaaccttactaccgtatcgtaccgcatcgctcgctcggtttttgaaaccccgtccaactcctgtgcagatgtacagtaggtatacatggaaatgataaagggagagtgaaaagaaaaataaaattgtcgataagggcggtatcggacatgcagagttttattgcatcaatccacggtcaagaatgcatgaccgtggtcttaagtagtgaaacaagtgaccgctcaggtaatataaagttggcgggaaaaagagtaaccacatataggcgacggcggagaagtgtcgatcaatggcacactcttagttttaggaagataggtactccggtgactgagaaacgtggggtttgcgcagcatttcacttagcccagcgcgaaaagtccagattttggagaatattcgagtctgctgtcgcgttccagtcggttgagatctcggattttccggagctggtacggaccggcacctcttcggagaagatgttggctttggtgttgcggcgctgggtagggtatgtggcatccagtgtatccgcgttctgagattgtgatcccagtacccgttcccgtaggcgtttgatctcacgcagtctattgcgccaggatgaaatatgctcgccctgactgttccaaacgagggagaacaccgaagcattgagtgcaagaatgcgcacaaacggggcgagattcttgcccgagatgatttttggcgacgcagcaggggagatttcaggaaaccctggtttgctcattactttgacgcagtagaacatgttctcagggttcgatgctgctgcggaagccatcttgtctccttgagtgagtcgagagacaggactgacgacaatgttgaagaaattgaactgggagggtatcgtgttaaaattgaatggagtattggaacgattgaaaatgatgttcacgaagtcattccctatgtgacttttcttgaggatgcaggatggatcactgtcgaaattggttggcatcatcgtcgccacgtggtaaacgatttcggtgacacggtcacgccatgcatatgtgaattccccatctgtttccgcgtgcaaaccctgagtgttgaacctcgcttccttgagcgacacctttgtaccgagttgcgagagaaaatactcgtaatcaggactgccaacagtgttcgagaggatttctgcctctgtggtctgaccgtcgtcaatataaatgacaccgatcttgtggccatccacgatatcattgcgatcaaatgtgcttagggcgcggcgcgtgatgtcgtcatccggtagtggtataggctggattgtagtgggcgtggggaaagccgttgccgtcagttgaagcattatgtgactgggaaggacattggtgtgcatgctgtccgaatgcagatgagcatcgtgggaaatcgggatttgatgaggcaggataggagcagtacgctgttgatacattgcataagttgttcctgatgcttgtcttttggtgatttgtgtcaacccagaaacaccggcagtctccagagtgactatgctcatgcccacaatccaggatctttttataaccggcccatcttcaggagacggggggaatgtggcataggggatagtctcacccaaatccgagaaagcgaccctttgcattaaatcaaggaatacttggctttgctcttccagagtctctttcccatgctcatccgtgaaaatgagtctgctagttatccagttgatatgtttcgcccgatcttgtagtttcaacgacaggaaccagaagatcatgacgtggtgtgtcgaggtataaatgtatgtagacatagcatcttgagtggacggctcggacatttcgttgccgggcaaagctgcagtctcaccaacaacactcccggttcttgcagcgccttgggggttcctgttcggtgcttcggtggccttgagtctatgctctcgggaggtctgcaagagtcgaatgcatattccaaagacggtgcggatttcctcttcacgcaggttgatgtagacttcgggcagtcgtgcaagaagcgccaagaactccaatatatggacagccagattggacagcgtaatgagcttggagattttgtcaagaattccattcaaagccttggtgactgagagcggaatttcatgacagcaaacggagagtgcatgtatacaaccccgggaagtgcctccccaagacccaatgatgcccatcataaatgagcgaacaagttcatcctcctcactctttgcaaagtgctcgtgatagcttatcaacacgcagagagaatcaaagatatagccagccacgtcagactttttcacgccggtatatatcgggggttcacggaaagagtcatttttgatctgatcgcacagaatgctgcgtagacgttgatttgagggacagcgttgtcaaataaatctttgttctgaagttgaggtgccaggtgggtaagaacgtagctgtaaatgtcccagttcgtctcccgctgaagtagaataatgatcgtttcaagccatacattcgctttcaatgcgatcctttgagctggctccgaatctaattgtggcgatgtgtttggtgtcgcacgggcatataaaaacggactggatccatccggaggctcctccggcaaaacctgcggcgcggcatatgcccatacaggatgagacagcttcggtacacgctgattatagtttgtgatacgtccggtagacctagacagagcactggaggatgttgcacgggtcggatgccttttttgagttgaagacaggcctggatcattatctgcaatgtaatctccagtagcgtcttcgagatcgttcgtaagagaaccaacttcaaggttgcggccagatatgctcattctaaagtcatcctcgggcaccgagataacgattatggagcctgaagaatcgcatcgaagcctaaaaagcattttgagtgcagtcaagcgcgagtctagaggtcggtccgaagattctgctatcttcaacagcgcttcgtaaacttttattgccttggctgctgatagattcagtgaccttaggaacgttctcactaggccaagagcgcagacattcgctaaagaggcctctaacgcgaagctcaaagagcggccttccggcggggagacttgaactggctctgattctcctgggttcgaatccttggccattggcgagctgatgatatctatcaaggatttgaaagcagtatcatcacatgagggaacgatattatcgacgaggaaggacactaaagactccaggaatagaatgctatcttcattactgaagtcctcgagcattagatccagaagccgctctttatgaaagagaaccatggactcatagccatggaaggcctccttcaaaatttccagggccgtgattcgaacttcagttggcttgctacggtcacggacgaagtagttaatcacttgctgacagcattgaacccatcctgaggtctggggatcgcaaagcttctcagtcctcatggtgtttagaatcagttcagcttgagttggctcaatgtgctggcaaacgttggataagaagtttgtgatttccagtctctgctgtccattcaagctgtgccataaagatccaacagcggacgcgatttgaacaatattggccaagatattaggcttgacatcattgatgacactaccccttgactgaggtgaatctgggctgagtggttttgtagcactgtattcaggttccccaacaacctttctagaacagaaattgaggatactgtcataagcctgtccagtcttgtgttagagtaacttgagcgacctctccctccaaagtgttcaaacatagctccaaaaatatctgcctctaatcggccatcattcttttggaggaccacttgaagggagttcatcagaggtgcgcactgcagttgtgctataccttcctggccatgtgcacggataaggtcagcgaaaacgtactctgcgccgcgcaaaacgttaagattctgacagttttccccgtttgactcgagcaaaaatgagtgaagggtagccaccatttcgtgttttcttatagactttgccaaatttcgaacagcccttgatgtagggcctgacagggatcacccccacgcattataataccccctcgctcaagcatgggagtaaaacttccaacaaaacacatttccatataggataactgcatcaaaaacggccccnccgtgtttgatatgaacagcaaca

SEQ ID NO: 5824 - DNA, 8962 bp, Emericella nidulans
gttacggccggaacataacatttcttccagccacggtaacgcctatgataatgtcgtcgcctgcatctgtatattggctcatgaggagggaccaggcggcccgaatgagagtggaggttgtgattcctgatgactgactagtggccgtgaggctgaactcgtgctgatgaatgttgttgacacgaggtttgtatgtctgatagggcaattgcgggaacttggggggatttgacgaggacagataggattcccaaaaggcatatgtggcctcagcatccatgtctcgaagatgggcaataaatctgttgaaaggggcaacatgtggttgatgtgagagtccactgcccttgtacgcctcctctactcgtttccacagaagcggcagagaccatccatcatacagggcatgatgagcagtccagataaatgtcgataatgagccgcccggggtgcctggaacgagagcgtacctggccagtggctctccatatagcattgtctgctgcgcatctgatttcaagtactcttccacgctggctggatatttccagtcgatggaagacggcttgatcacaacctgatatgtgctcgcagtgtcggtaggaagcagggtggtgcgcaagatctcggtggtgttgacgacagactcccaggcagcacagaacttggccaggtcaatatccgctggcagctcgtagacgttctggtagatgtaagtaccgggctctccctgggtaattgccataagaccttcttgtaaggcggttgcaggatacgcatcctcaatgcttgaccggtccaggccccatttcagagtgagctggtcgatgaattcgaaggcattctcaacatcaatgagtgaaaatggcttaattgacccaatctcagtatgtgacagctctacggcgatttgagacatggcttcaagtgtaggatggccgaagatcttcgccacggtcaggctcattcctgtagaccgcgcggcggcggaaagcttcatagctgagatcgaatcccctcccagccggaagaagttatcgtttaacccaaaactctcgtatgggatcttgagcacctgggaccagagacttgctacagccttttcagtttctgtgacaggctcgcgcttggccgtattggtgcttcccgcgagagagaacgagacaaggtcctctgtggaaaagcctgcagccaagtccttgagtcgtcgccgatccagtttgccatgggcagtagttggcatatgcgccatggggacaaacactgagggggtcatgtaggccggaagatgtagaccgaggtcctccttgagttggcggagctgctgtcgtcgcccttcagatatatagcctagcagctcagtttcatcgttctcgtcgtcttcaaactgaatgaacgcgcccaatatcgactgatcattataccctttgggcttaatgacttcagccaccacggcctgccaaccagcgtttaaaaggctcttgatattgaattcgacttcctccagctcgatacgttgaccgtttatcttcacctgtgtatctttccggccgacgatgttgaaggttccatcgggactgagaaaccccagatcagctgaacggtagaagcgacgggcagggctagctttaggtagccagtctgggttccctacaaaggcagcattggttttctcttcatcatgaaggtagccgcgcgccaaacccggtccttcaattaggacttctccgaccgctccaatcgggcatagttgattggggttcattggattcgtgatccattgtcgtgctccaagagcatggccgatattagaggcaggagtggcagggctcaacgcggcacgaccggcgcagagaattgtggtttcagcgggaccgtacatgttgttcaactggacgtgatccgcccaggcttgaattatatcttgtttcatgggttcacctccggtggagatggttctcactgaggggacgtttgctggggtcatcatgttcagaacggtgggggttagaagggcccagtttacttccaggcggcggatgaagccctcaaggtcatccagtcgttcttcttcggaaggcacgcagacgcacccaccgtgcatcagagtgttaaaaatttctccgacgctgaggtcgaaagtataggtcgcaaactgaagagccctcgtagagctgtccaggcgcatgatcgtgccgtgaccgatcatacttgaaaccaaagcgcgatgctccactacaattcccttgggctccccggtacttcctgaagtgaagacaacgacagccggggtttcagggcgagcagcccggacgaggcgtgttgcgcgacgctcagcggcaagctggtctagcaagtcttgcgtgacctcgacggagtgtttgactaggccgggaaaagttccggcgtagccaggcccggtcaatatgacctgcgcattgattttgctgagaatgactgcttggcgtttaacaggatgggccggattgagagcgacgtaagcaccgccagctttgaagaccgccaacatggccacaatcggcaacgtggatttctcgaagcagagtgcaacgtacgaatccgcgccgactcccagttcctggaggtatgcagccagattatcagcctgcatgttgagttgctggtaggtcatatcgcctccagagcctgcgactgcaagcgcatgaggctgttcgagtgccttgcgctcaatgcgcgtgtgcacacagtcactgatagtaactggcacatatgcattccagtcgaaaatcgattccctatcttccttactgcaaaggtcgatctgggtgacaggggtcgagccacggttcacaaccgcctgcagactcctctccaatgagcctgcaatgctctgcgcatagacggacgacagagcagaagcattatactcgagggaaattcgcaccgagattgggctgacttgtgcgaccacctcaattgcgcgctgcgccattgttagcctttgtcattcaattcaggttcagcggatctcacattgtgccttggccccgatagagacagagacgtactgggtgagctaatatgcttcacccttaatccagtatctggaaccacatgcaagagctgttccagctccgctaacggtatatcctggtgcgtaaatgaagtctcgtgccactgctgaagctgttctaatagctcatgcagcgtagtagcgccctgcgaccaactcgcactacaaacgccgtgcttcgcctcatcgccattttccaggcagctggcgaaagttgcagtgtctgtcgcaaggaaccgacccagaaccgtggcccacgcggcctggagaattaccaggagcgatgtccggtgccactcgcaaaatgcgcccagtctctgcagctcgatgctggggttgaggggatagctcctccactgtgcttgtccttcgtacgaacgggtgagatgggagaggcgactgatttccatccctgctgtgtttctcttcacaaaagttccgcagatgagtctgcgggcgctgatggcaggcattatgattatggttatagtgtatcaagtatgacctgcgtatttgagtatgttagttgtccgttaagaatatcgtaccttttcttctcctctcttcttcttgtctagaagttcatagtcgcaacgacaggaagtgtagtcagttgaagccgtttggatctggagtgaagtcaagttgaatcggcctgtcgccaaataaattccgccaaagctagcccaaagctgtatgggactcagccatccaagctatgccaacaatctcgaattcaggtcttggtccctgtacgcggtgtgatattattcatgttactgcttagcaattacttttagcaatttaagcccccacagcagctgacagtgattgattgtctcaacgtttctagtacaataccggaaatttcggaaatttcaacaaagtatattagactctcgggtaggagatggattggcctgtcgggtaatcgtcgatcaggctgggacatgctagtgcctgagcgcacctcagcttacagctccctagattaatcacctatgcagctaaggcttttggccccctttgcacgtgggtcccgacggagaattatgcatctggcgctactgcaggagtggagtccaacgtgcagtcttgatgtcaaagtacacctgtatgatgtattatacgtcttttcggtattgtaacgccaccttaccgctagtaccgttcccgttgtatcgagcatacacacactctgtaaatcgtatatccaactggagacatcctcttccatcctcactgaagcctatccgcagccccagagttcagctaagtgaccatctagattctgaagccgatattagttgcaccagccccaccaacgagcttccgccacgcactgtacacagcctatctgtctcagaggcctccccaacccccgtggtccgcaggttgcctaaggggggcagcacatggcaaattgcagccagaaacgtgcagcgtaagacataaaatgggggccagccatcgaggaggtgtcaatgatagctgtaattgcagtgtacaccaatgaaaccagatccacttatggctttcctcttccatcaaatcttatgtcttacttcaatatgcgtatggcgaacagaattggcgcgggccgtaaatccgcgcttcagctctctcatctcagaaccagactcacctcatctgctgcagccgttgctactgctcccacacttgatcctgcgcctgtccctgcccctgctgctgcgccgagagaatggctggtgctctttccggatatgcccaatgtggtgagtaatggctgctggcctgaccgaccccattactcccaacataggttcagagcaggacctcgtctgatattgctgtgctgtcctagctggaccgtcgcctcgaaatccgcccccggcactctcccaactttgtgcgtcttcacaaggaacaatgggttacctgggctggcgagtcttttccacccatttagctctcttcctcatattctgtctttcttctgttccattctttctactcctttaaccatttcatttccctgatacctcagtcccttcaatcatcacttattcgaagatgttttatatgcagggcctatctttgagatgcataccttccctggaaacactcgcagcccttcaagggtctgagtggcagtcaatgatgtgagcaggagcagatctggagcgtctgagagtgatccgtatattcaggaacgtatttgggacctggataatgcacgagtgattccctttgtcaccaatatgaggcggactccaaagaagtgattgttttgttaggttaacttagtgaagtgggtgacatacttgtttaaaataaatcagctgaacgaacaaggggagaaattatcctcttatttcgatggtttgtagaagggatggtgccagagggatgatagaagtgtagtggtgatggtcatcaatgttcgctgtatcactcatagtaactaatagtcacctctgtgatcaatctccataaagataaagccgaacagtgggaacctatcctcttttatatcccacctcactcctctctcatctcccagcaaatgcagatcccctgccctttcttacttatgaatatatgtgatgttaatccttccgcctccaccggtgtactacgcaccaaacaaaaattttgttgcctgcctgtagggccatccatctatccacctgccatccgtttatcccacttgtaccacaatccagctcatctcatgtcatttatttctgtgttcgttgcgttttgattcattttttaaagaatcaaaacccaggcagaccagcatcacgtctcacgtctccttggtttttgttcttgttctggtaatttaacagacaacagaacacccgcaatccctgcacaaagacccgaagccacaaagtaaggtaggccctcgccaaccatgacccaaagagagaccgatccgatacatcagcgagatcaaaggcccgtagatcacgtcgcccaccgcgtagatgatggcgacggtgctgtagagactgccgaggttgcaagggttagacgccttccagaaagacgcgagaaggctcattatggctggttggaagcccgcgccgagggtgtagactattagacctgtgtttgggttagcgacgaatgtggtaggcgggtgggtgtgtgtgaaatcacaggtggcgtgtgtccctagtgagaggcaggggagggtcgcagggccgcaccagccacaattgctgtgcaagttctgtctgtctttctccctcttccctctttgtgttcttctaggtgcatatttgtagcttgcgcgaaaatacagaaactgggaggctcaccaaggattgccggggcgacggtgggggacagcgaaaggatcagaagccctgcgactatgagccctaaactgagccgcgcaattaatagatcacgctgtcggggattacggagccccgaactctgggtgaacaagagcagggaccccacgacgagtaggagcccaaactccaccaccgcccgtagagagagaagcatcgccgactaggtagtatttgcaaccacgtcagacttaatcaactgaaggataagaatggggtaaaagaggggcagggaagaaagttgctagaccctgcgtacctgggcgattgaccagccataccgttgtgaaacgtactgcaggaggaaatccagcgactccgcactaacggtcaatatgagaagactgaataccaggccagcgacgtttcggtccgacacgatgctgcggaaattctttgccaagcagccacgcagagtcggctcctcttccttgcagccatagatcgacgcatccgagggtcgtgaccccttagcaaagtctagcgtttcgggtagtgctatcagcaagacggtagcaagggcctgaatgcctacgcctagaaagcagggagtccacgcattgtgggccatcaagacagatgacagggggttggcaaggatatcggaaatcaataccgtagcctgcaactggaagtaaattgtggatctttttcaagcagtgtgcgtcaggatgtagaccttattgcagtattgtatgcagcagaaacagaacagaacacctaccttttatcatctggcaccacatcggcaatagtggcttccaggactgcagtagcgactgccgggccaccccctaggcattgaaataaagacgagatccacgttaattccaagggccactgcatccagcacacgagcaacgcccacgcagtcgacagcgccaggcccagaaaacatagtaatagaactggcctgcggcctttggaatcggacaatgctccgtagggaatggccagaaaaatggcttcagagggttagacagttgatctggcaagagtgtgtatgtactgtaagtgaaactgtgatcgacataccaggaatcccgtcaaatactgtctgccaacctatcaagcgcgcgaccccggactggatctccttcgtcttacattgggactcgggaatgttctgcatcggcactgggaggggattgccgtgggttcgatagtatgcctggcagagaatggactcgaacaggcggatcttcggcgcgcgaacaaccgtaagaccaatgtccagagttagagttgccgatgcacatagtagaattacttgcaagactgcttttccagacaaggaagtcgggggtgaaactgcaccaggtggatctgggattaagggagcgtcttcgccttcggcttctgcgtcgctggccagatgctccagtgagcgacatgcctcatctagctcctcgtacctcattgcagtactacttatcgtgtcgcatatgtttgaagtgaatgatcgaagagaaggtcgctggaagaggaacgaaagatgcaagatggttagggcccagagtcacgtgttggctcgataatgactaagttcagcactcctgccgctatctccaggcactctatcctcagccctacaccttgccctaacttgccgctgcgacaaggtccctagcggagtctactttaccacagttgcacggcaagagaaatattgcaaatcttgtaatcgtatgcatttactgtgatttatcgaggacgaaggtatccgctatatccccttcgatgccaaccaaaacgcagggacactttcaccgatctcagcaggaactgctgcatccttcctccagcgccatctggtaccagtttgttatccgcgtctaccggcagtaaccccctttcactactctcaaggtcctctgttacgtaccgttgcatccacttttaggggctgagcgacgatatattgccatcccatatttttccgtagtttattccttggttttgtatcatgtaaggtacggatacaacgggtaagattgctgcactcttagactatggaaagtaagacgcatactgatacgcccccagcccctaagagcttctccacaatgatctgccattcatctattctaaaccacgaaactcattttatacgaagggtccagccgctgcagtgtgacagggccagtggtagcctgaagccaacagatcctacggctgcttcctatttgctagaaaatcgattcgccaagagtatgggctgattatgcatgcttacatgctttcgattcattggctgcaccgtagaacttgccatatcgagacagaatgcatggagatggcgaactgttagtagtgccatgtacagtagggccttcttgctcctgtcgattggtccaggtcccaggttgaggttcttacggacgagctaatcaggcggaatgctaggtaactataacaggcgtatcactgtagctcccacacaacaatcaagctatcactaaacaaataacagacattacgtacaaattccaacaaatgctcagatattatccctgattccaggagtaatcttctccagctcgtctgaaatcta

SEQ ID NO: 5825 - DNA, 13072 bp, Emericella nidulans
  unsure (1)..(13072): unsure at all n locations
ggcactgagttagcaagcagtccagccatttcagagcaaggtatcttacgcagggaatatgccgacgcggtcaccgatccgcccagtccaccaatcctccttcttttcggtgcgtttgatgattgtgataatctcccccttcttgaaacccaagtcaccgtcctgatccgcgtcgaatgtgtacagcgcaatggcctggtcctcgcgtaacggagcggcctgcccagtgcgctgtccgaaaacgggcttgggtgctgtaggacgactgggtttgcggtcagagtacacataatcatcatcataggtgttgctccgctgtctattgtaggtatcaaaggtgtcgttgcggctgctaaatcgggcggtggaggaacgactcaagcctccagcaggacgatcatatatatcgtcagcccacgtcgttgcacggcgcggccggtcgtggtattcgtagtcatctgaaggtccatggtatcctgtccgatcacgtctgatcccctcgccatatgcctctcccctgcgaccctcccagaccacatcatcatgacgatcatcgtagacggggatatcgttgtacatagagtcgccgtttgtgcgcacgccgtagaaagcgcgggagttcagcacacgcattagaggttcggcggcgggtggaggcgggatagtaccactgaggagctggcgagcagatactcggctattgtagagtctctcattggcgtccctacgttcgaccagcatgcttccttctaagctgacaccggcgaaaagtcccttggttttggaatatgagaatacagcggccacacccttcgtactagcagcaccagcggcttcagcgtttcgaccaaccggcccagcggcaatcgaaacattacctcctagcgtaagggttccggcttgagagaatgtgcggacggcggcagcatcgttcaagatgaagacgaaatcggtcaactcaaatccaatctgacctccaaatccagcacctgcggttgcgatcgcggacggcgcggaccatgatccatcagctagtcgagcaacgacgatacccgaaccaaatcgaccggaacccaaaaaccctgctttcaggacggtcaaaatggcaagaccctagaagccaagcaatcagccataattcagctatcagcttcaccgagtatcctttgcgtaccttagcaccagctaatacctcaggggggatgaccttgtcaggcccgaatgcttgccgcgggtcaacaaaagatgctaggattttgccagcctttttgcattcgcctaccgagagaaattgaggattagcagtcagctcacgcccaagttgtcgcctgtgggtaactgcggggaaatctggaggcgacgaggacttactcgatagcgacgaagggagagggttgtgaattccaagaggcatcttgcgcacgctcgccgggttcttgagggaatggttgttgtaaagaggcgaggaaggctggggagagtttcgaacgttgtcgaaactgtaatattatgttcgacgttaggccttgccaaatgggagggcctagaagtggagctaagaatggatgctaggctgagccgctgatttccccgttcagtactgcgcttcacagggggaactatagacagatggcgatacagtcttcaagcagctatgcttaaggatagcaactacgaagtggtgtccataagcttctcgtaaaatcgggtagatggcccagattgtggctgagtcgttcggttcggcacttggctaactccgttacatcatctttgggcgggcgcggcatgtggtacagaatacagattaatctagtcccatattgaaatagcgtaacgatatgctctgttgcagtatgctggtcacccactgagaccaaggctcatgttggtcccgaatgtgtgtcaagcttgtccatttggaggcctgaggcttaaacgcatcgcaccgccacaagaccgcggcgatcgcccaaacttccgtcggacttgctagctgctctggttcctaacctgaactgacgcgccagcctcctggcctcatggcggtgtagggtgtactccaagttcagcaatgatctcagagggccttagaattcgcttcttcaagtgcttctttatttgttcagatggctacaggttggagctctcttttgttgaggcgtccacgaaagaacaaagatactgacaccatctagtgcgaatttgtgtttgcggggatgagggaactggaaagtccagccttattacctccctcgtaaaaggcgtgtttgtgacgaacaagatccagcccattctgccacagatcactatccctcctaccattggaacccccgagaatgttacaacgacaacggtggtcgatacctctgctgtgccgcaagaacggagcaacttggctagagaaattcggaaatcgaacgtgatattgcttgtctattctgatcactatagctatgagagggttgcgcttttctggctgccctatttccgctctctcggcgtgaatgtgcctgtcgtgctgtgtgccaacaagtccgatcttgctgccgatcataccgagacgcaagtcatcgaggacgagatgttgccgttgatgtcagagttcaaggaaatcgattcatgcattcggaccagtgcccgagaacatcgtaatgtcaacgaggcctttttcctttgccagaaagcggtcacacaccctatcgcacccctattcgatgcaaaggaatcagccttaaaaccggcggctgtcgccgcgttacaacgcatcttctacctcagtgataaagaccgggacggttatctctcagataaagagataaaggattttcagatgaggtgttttgagaaacctctgagcgaagaagacttggtccatataaaagagacaattcagaaaacacatcctgactctgtgacgccgtccgggatagattgccggggatttattcatctgaacaagatgtatgccgagaaaggacgccatgaaacagtttggatcatacttcgcgcatttcagtacaccgatagcctttcgttgcaagagagctatctccacccaaagtttgaggtgcctccgtttgcatcagcggaattgtctcctgagggctatcggttctttgtcaaccttttccttctctcagacaaagacaatgatggtggactcaacgatgccgagttagcatcattgttcgcacccacccctggattgccgccctcttgggctgacggctcatttccttcatgcactgtcagaaacgaggctggccatgtcactcttcagggctggctagcacagtggagtatgacaacctttacttctcccaagacgactctggaatatctagcgtacttgggattcgagtcttcagatcggagcaacccctccacgaccgcggctcttaaggtaacacgaccccgtaagcggagaaaacgtccaggacgcgtcggtcgcaatgtcgtccttggccacatagtcggagctccggggtctggcaaatctgcccttctcgatgcttttctgtcccgcggatttagtaccacttatcaccccacaattcaaccgcgtaccgcagtcaacacggttgagcttccaggcggaaaacaatgttacctgatcatggatgagctcggcgagttagaacctgcgattcttgaaaatcaagcgaagctactcgatcagtgtgatgtgatcgtatacacatatgactcgtcagaccccgattcattcgcatatatacccgctctcagggcgaagtatccacacctggaggagcttccgagtgtgtacatcgcactcaaggctgacctagaccgtacaacccagcgcgctgaacatcagcctcatgaatacacagctctattgaatatgcctggtccgccgcttcatgtgagcgttacctggagttccattcaagaggtgtttgtgcacatcgcagaagccgcaatggaaccgagtacagcattccctcggagcgaggaagacgtcgagggcaaatggatgtcgtggggaattgctctcggagctgtggtttgtgcgggagctgctgctgttatgatctggcgacgagtcagtggtagtggagtctgacgcctggttgagggcgtccatgctgtaatgatggaactcgatacccctgaaatcaattattgcgttgctttggatagatttattgcgaataccgagcaatgtatatgaaatcttcgcaatgtgttgagctacaggcactttgtcgaatagacagccattaaggttaagaacctgacacaggcgtccactttgtcactccagaatggaatattaagtctaaaatggcaaatgtgaagcacgagcctctatgtatagtttcctggcatgtcagtgcatgtatgtactatgtcggcgccatcggtagcttgccccacgcagaagttccaccaaccagccacaccaagttccccggaattccacactgccgctgcccgttggcttggaagtcgatagactcctctccccttcctgtgaacttgaacgccttttgtctttaacgccatctcactacttcatctacaatctgaatgtctccggcattgcacgtgtcgtctgtgaatccatttctggttagctcactcttatttccttgcgtgccgtctctcaaacagtcggcgaactcgaacaaaccgcggccgccatccgcgctccgcctcccgttcttcaatagcccagctgaacgctgtcgcattgctgtcgtcgagtacggcagatattcgctagagaatagcggacatagcggcatatgagaaagtgtgcccctaggcagttacagacagcctagcgactccactctatatactctacgcaactctcaacgcctatcacgccacgatgttgtaagtactggtagttcagattgcttatcttgcagccactttggccccatgccgaatcgcgaattctcagcgttacagagcatgtgcttgttgggatggtcgccgtttattggggtccctgcagctcttgtcttcctgtctgctgactttgtgctctgtgcttatagcgtcctacccccacctccccctcgctataccgtcccggtagcgtatgcggctggagcatcgaatggtatggcagttcccatagtggaaacaaataatataatcacccatccggagaagggctgcccgcttcaagtcggagaaggtacgtctgtttttgcgacaatcacagattcactatcgcagtggtccccgtgcggctgcgtgagtccactcgcatctctagggtttcttgctgacttctcggtacgtgtccagggacataccaactacaggacgacctgcatctagctacccctcccccgcatccctctgaagcgccgatcataaacccgaatccactcgctaccgtccctaatcctccgacgtccggcgtcaagttatcattgattagccttggacttcgaaataagaccgctttcccgtcgaaagtgcaagtcactgcacgaccattcggagatggaaatagtgctttggcggctgcccctgtcaaggacccctccaagaagcgaaaacccaagaacaacatcatcaagagcagttcatcgtttgtatctcgggttattatccatgaggcaacgacgaagcgcttaaatgaccgagatccagaaggactgttcgcgtttgcgaacatcaatcgcgcgtttcaatggctggacctcagttcaaagcataaagacgaaccattgtcgaagattcttttcaccaaggcacatatgataagccacgatgtcaatgaaataaccaaaagctcggcgcatattgatgtgatcatgggatcatcggccggagacatcttttggtatgagcccatatctcagaagtacgcgcggatcaacaagaacggaattatcaatagttctccagtaacacatattaaatggatcccgggttcagaaaacttcttcatagcggctcatgaaaatgggcagttagtggtgtacgacaaggagaaggaagatgctctttttatcccagaactgcccgaacaatcagcagaatctgtgaaaccatctcgctggtcactgcaggtattgaaatcagtcaactctaaaaaccagaaggccaatccggtcgcggtctggaggttagccaaccagaagataactcaatttgctttttccccggaccacagacatctagctgtagtcttggaagatgggacgttacggctgatggactatcttcaggaagagtaatctaccctgtgctacggtttatagcagaagctaatagaacatacagagtcttggatgttttccgaagttactatggcgggtttacttgcgtttgttggtctccagacggaaagtatattgtcactggtggccaagatgacttggtaacaatatggtctctaccggagcgcaagatcattgcacggtgtcaaggccacgactcgtgggtttctgccgtcgcgtttgacccctggcgatgtgatgagcggacatacagaattggcagcgtcggtgatgattgtaacctactgctttgggactttagcgtgggtatgctgcaccgcccaaaagtggtatgtcaccagagttgcagcctccggaacgaagttggttatctaacttcaccatttgatatagcatcatcaaaccagcgctcgccatcgaacaagcctaattgcgccaagctcacaacaaccaaaccgccatagagctgatagctcgggaaaccgaatgaggtcggattctcagcgaaccgccgcggacagcgagtctgctcccgatcaacctgttcaacatcccgtcgagtccagagcacgcacggcattattgccgccgattatggtttgttcttctcgtctgtagttgctacgtaaaggaactaacattgttctagtccaaagctgtcggtgaagacccgatctgttggctcggcttccaagaggatacaatcatgacatcttctctagaaggtatgtgaatttattttggtagttgccattactgctaatgaaggcatttgaaaggccacattcgtacttgggatcgtcctcgagaaaatatcagtgacaactatggggatcagaagtcgtccgagaccctcggaaccggtaaggaagcaggccacccggcatcgtctatgggatcactttgaaagttaccatttgaaacataccattcgaaatgtcagcgatcaaatgcgatcatgcacacatctgtttagatcatacccattctagcgcctgtaggctgtgtctggatatatgaattcgttcctttctgtcaccggacctatatagaggactaaacatggtgacagaactactgagaagattatactgtaagtcaatcgaaaagttatccaatcagcttccattccagtccccagtaagtaagaaagttgcaatagatgcgagtaatggttggtataccctcgtcccggaacattgttgtgccgattcctggacgcggcgtggcatcaactatcgaactgcagtgtacggacagctttcaatcggacccagctataaagaccctcggccacccaccacaccaaatacctctcaacaatggggtcttcccgactagcgatgaggtcggccctcgggctattcttccttctttttgtgcaaatatctttggcgctcaagttcgatatcgctgctggaaagggcgaacgatgtattcgcaacttcgtcctgaaagaccagcttgtcgttgttactgccatcgtgagcggcgagaggggggatggtcagatggtcaacatgcatgtatgtgggatttcaactttagcgatagttaccagcatcgggactcggatgcgaatctcagcttcgatgcaattacgtcggcctctgtaacggtgctaacgatcgttctgtaaaagatcaaggattcaatgggcaacgaccacggaagaccgaaggatgtgatcggtgagactcgtcaggcgttcacatctgctggagacactacctttgacgtttgcttcgagaatacgctggtttcccgccgtacgttcagtctcccaggtccatatgcccggagcgtttacagtgctaaaataggccgaactaggtggaatctcgaacccgcaccgatcgattgagctggacgtcgacatcggtgccgacgctcgtgactggtcaaacattcaggcccaggagaagctcaagccgattgagaccgaccttcgccgcattgaagagatcgtcgctgaagttgttagtgagatggaatacctccgcgctcgtgagcagaagctgcgggacaccaatgagagcacgaacgagcgtgtgaagtggttcgctttcggcacaatgggcatgctggtcggactcggtgtctggcaggttatttacctgcgggcttacttccggtgcgtcttctcaggctgcgaatgtggtagtttgttagcaactgacattattctctagatctaagcaccttatttagtcttcttttagcgtccttttctggtaggagacaggcgccaaatgtggtttctatatcttatgacaaacacgaagtctcaatgcatttgctgcgtgcagcttgtgccgcctcggatattctatggtatactgttcaacacttatgactattattatgacacaatacatgaaaattgtaggtcgtttccagttgacagccctcttggtctcaggaatagtaaaacgtagctgcatctaatcgaatgcctacgcatattgctccagtcttcataccccttcaaaccatcgacagagcatagattcaaaattattatgggctggggagatgttttggaattcgtcttttttatttggttgttaatgctgcaaacacggcaaactgtaccgcactggtgcctcggatgatgtcaatcccgcataattgtctagctcgactccgtagctcgactttccaatccaacttcatactttctattctgctaattgtcacttattctgaaatattgaactataatgtccacaattcggttggtccaccgccttgtgcggccgccaatgtcgcatctctcatccacgagatccgcggctcgttcatttagtgcggcatttcacccgcaagccaacaaggatagtgatcgagctcactcgactacaccgcagcaccgggtgaaccaaacggacaagcctcccaatccagctgtgccgagtacgacctcaacattgaccaaggatttccccaaagctggagagaagaatcctccaccagatctcctaaactcagccgatccgaactacaagcctgtggatacttaccccgggaaagttgaacactacacgggaggcagacagcagcatggagcgcagaagccagaacttgaggttggtgagatggagggcatcacgttcaaggttgagccactgaggcgggttggggaggatatatcaaccatgagggctcgcctgctgtgttagttaatctctggccctctttgtctttcttaccggacgtcgtttaagacggaagctaacttacttgccggaactcagaccagagtcggaagcgaggtattctcgagtccgacctgctgttgtctacttttgccgacgtttatttagccgacatgaacaaggagcagctgcaagaatacgatcggttccttgacgagaatgactgggacatctactactgggcgacccaggatcccccggctgagggcggcgctaaatcagacgtttccaaggacaccccaaccgaaacatggcaacgcaccggggccaaaagtggcgagtgggcgcaaacagttggtgcctttaaggctgcgtaccggccagtaccgtcgcgatgggcggactctgatatcctgagactattgagacagcatgttcgggataacagtgccaatggtttccatgcggcaaagaacaggaagacgggcggaggtggcttgaacagaatgcctaacatccagatcttcaacaactgaacggcccagttatcaagagctagcgcttgagcttgatctttgtacaatatggtttcctgttttgtttctggggggaatatatatgggcgcttcaagaatgctgcatagaacagaatttacaattaaaacaaatatataagacgtaccaaaagcaagcttacttataccgtccatctgcttcatacaaagtataatcaataagagatagtatatatagtcacgtgactcgcttagctttagggttcgtggcccacacagtcagcggctgcggtaagctagggctctcctccatcttcgaacgccgtgattttatctccagcgcagagtctacgacaattgctccgcccgcgttcattctcctccctcctctcgcggcccccttccatcgtcctcccagactccgatcatggctgagcagctggtccttcgcggcacccttgagggtcacaatggctgggttacttccctggctacctctctggagaagtaagggcaccgatttgcatggataaaatacgtatatggaactacatgcgaatccgtgtgtatatccatatacgtatcgcatagatttttttgtgctggttgaaaatggacaatggttctgacttgagatttttattgatagccccaacatgctgctctctggcagtcgcgacaagaccaaaatcatctggaacctgacccgcgacgagcaggcctacggctaccccaagcgcagacatgagggtcactctcacatcagatccgactgtgtatgcctacgatccgctattccccgaaattcgtggcccaaagaatgtgcaaagagcggggttcagacggaagggatatatgacaatcagaatcagtttgactgatgagtgtgcttggacgtataggtgatctcctccgacggagcctacgctctgtccgcctcttgggacaagtccctccgcctctgggagctttcctccggccagaccacccggacgttcgttggtcacaccaacgacgttctctccgtttccttctccgccgacaaccgccagatcgtttccggctcccgtgaccgcaccatcaagctctggaacactcttggagactgcaagtacaccatcaccgacaagggccacaccgagtgggtttcgtgcgtgcgcttcagccccaacccccagaaccctgtcatcgtctccgctggctgggacaaactcgtcaaggtacgtcctctttacatgttctctcgcttgctgcacgcacttggtcctatgatgtttgcattttacacgtatttgctacttcagagccttacggccatgagacaaaaaatcaccatatgcctgatggacacgccaaccccgtttgcttatttcttttactgctataatcctgattataagtcatgagggctgcaactaacaaaacaaaaaggtttgggaactcgcttcctgccgcctccagaccgaccacatcggtcacactggctacatcaacaccgtcaccatttcccccgatggatccctctgtgcctccggtggtaaggacggtgtcactatgctctgggatctcaacgagtccaagcacctctactctctccacgccggtgatgagattcacgcccttgtcttctcccccaaccgctactggctctgcgctgctaccagcagcagcatcaccatcttcgaccttgagaagaagagcaaggtcgacgagctcaagcccgagtacattgagaagggcaagaagagccgcgagcccgagtgtgtttctctcgcctggtccgctgatggccagactcttttcgctggttacactgacaacaagatccgcgcttggggtgtcatgtcgagggcgtagattgtgagcatagagaggaaatgacaaaataattgtgaaggacttgagagcgaatgggttgaatttggcagacgaaccaaaataaagcctcctaaagcttttgtttgatatcaaatcttcttttatcatcttcatcacctccttatccccattcttccctgggacccttccatactcaaaaatcgggcaggcatttggttgggattgtatgagccatgagcaatgaagcactcttcgcgaatattcgtgtaaaagacccgttgggggtcgttcgaaattacttctctctacgttccctgatttactccgctcagaacatagcgtctggcaattgtggaggatatcccccggtctgataatttcgtaaaggctcctgcattccgccgttaaggccctagatcgtcgtggcagtgacatccaaacaatgttggattcattgtgtacgaaatatgatatgattggcgacatgctcattgatgcctttaaacggttggcttctacacaattacatattcctctggtctggatatgggatatatattattgtacaagcctactcagtacaacagccagcgaagagccactagaaggctagccatacctttctttatctcttcgatactctttccacagctgctcttaaatcatcaaccacctcctcatgtcgtgggtcaaccattgtcgagtgactggcataaaccttagcagtatcaattgcttccctgtagtacttttccgcctcttccagctcgccctgccgctcagcaagctgacctagggtgttcttaacagatatacaccccaagagatatgactcgtctttctcattgtcgggaatcttgtccattattttattagcagtcattgcccattccctggcatggccaactagatgattgcgcgcggcatcgggatcgtccgctcgaagaggcttcagcgattgaacgttgagtgtggacgcaataatgcctagcaggtagaactgaaaagcggtcggttttgggccttcatcttcgcggagtagttctaaagcacgcaggaagaccgggagggccaagtcgtgcttgtccaattctccgtaagtttgggccaaattggtaagagccattgcagcatctcgccgggtcaaccacggtgttagttcattttcggcgttcgggttggggttgctgaggggaagaccagtgctttgtcggtatttgagctcgttcatgctcagctcaatgccggattcgtgggcagcctcggatatattangatcctggatgtggtcgctggcgtagagttgcccaagctttagtggatc

SEQ ID NO: 5826 - DNA, 8098 bp, Emericella nidulans
  unsure (1)..(8098): unsure at all n locations
acgaaggtcgattccagagttgtctagtagcgcgtatgagccgtcgctattaattccagcaaagttgcttgcatgctcaagtacgtccacctcgtagccattgcttcgtaaaatcaaccctaatataccgacactggcctgtacccgtcgactcaagtcaccattggttgacttgccatgagctgtctgaaagagagcttctaatgaaagacactgttcaaagaggagtccaacagcgctagcgttgaattctcgcatcatattgagctttttccttctccgctgtatctccaactttgatgcactcaaagaagggaatagtccaattttgtgggagaacaggactggggaaacacgctgtcgtgttagagagtgaattcgtgaccacatagtcgagtcgtctctctttttagcaacgagaacatccgtgtcacgcctggatgtaatgtcattattgtgaccatgaccacaccggatgcattgctgccatagtctcaacggcgaaaattgcactgcgtaaagtccgacactccactcaaattgtagcacattctcccagtatcgaatttcttcatttatcgaaagtacattattggagaaaactttcagtgacgcggcaagagtctgtatgaacgttttcgcgcttatcagccacgaaagatctgtcaggtgatatgtgacatcagatgtcggatgagagtcaacagcattgcggagatcatcgcgagaccttttgatggccctaacgagattacttgggtgctgaaggccggcggtacgaatgctcatggacagctgaccagtaatttgctcaaggctttccaggcgctcgaaagagaaatcggtacgcctggtgctgtcgcgaaattccaactcgatattgtcattgatccgttgatgatgctctgccagctgcgtttcaaggcggtataattttctatgtactagtcagtcggagttcaagcgcagtgaggaagctagcttgcctctgaaccgccaacattgtccttatgtaaagaagctggcctgtgtacggtgtatttccagcagggcgcagccttgtgtggtaaatgttgtaaaacttctagcgtctcagtttgtgatttaattaatgtttagggtagcctacatgttctcaacttgcccaggacgtggtactgtagctgctatgacatcacagagtacggcgtactcctagtaggtatactcaaatattctgtacatagtgcggcccggacactagcgggttacctgggagcggcttacacggtagtaaccgctcacaagtcatgactattgattttctgccgagtcttggggctgcttcaactggtctttctgctcttcaagtaggctattctcaactgatatcgtagtttacttccactattacatggtcatggtttccgtttgtattgacatgatatcatagcgtggcacaaataaagtaaatggcacacatcgatggttgctctgagaaagatgagaaagaaaccacaaggtttctgactgctagaatacagctgtggttaagcgaaacgccaatcgagtacacaaattttgttaggaggttccgccaaatgcaatcataaaatagatctatgaacctaaaaaagacgcagacacatttatccacgttacatcccattattacaatggtagagctgcgtacagacgtaatgaacatcaactcatgtggtgatgataatattaaacgtcgggttggccaagctcaatgttccagaaaagtgaccaaggaatctccaattgttcctgccacagactgctcagacggcatggtagtaaactagtggtgaacttactttttgagaagctaaaggatagtctgaagtctcctgcgaaaatgttgtactggaactggagcacaggtagatcccttcctcaacagatcctatagcagccacatactgatatctggtcactcacaggccccagcaatttctgtaaggcagcataggactagttttgttaggctgacagggtagtggattctgaaatattaatatttcgtatattttattatttcgtgccatcatgcatcaactactaaatgttgtcccagatccttcatgggggtagctgcaggccaagtggggcaataaagcatcagccattcataatttcggtcttgtagcccacggtggtgccaattagccagggggtaaatcgagttgttcaggccgggcccgggtgcctggtggtcgcgccacccggaacccagtcgcaaaaatcacgcggtcccagggaaattatttgttgagattcctgaaataccaacctcatccttcactaccttcaaacttcgattactcctcctgggaaacatacaaactaacattcactgagccatcacggcaaggttttcaccatgaactttatgtaagtggcatattgcgtagcgagtcttcgctcctttaaatatgtggcaaaagctaatcagaagttaggaattcgaccttctcgtcgactactcctgaaacctactgggatcattatgatgacatttccgcccatagctcacacctaaacgttgctgaacgtttgtgggcagcttggtatgcttggatgcaaaatgatgtcctagcgacaggtatcatgtccttcgttatgcacgagctagtatactttgggcggtctctgccgtggattctcatcgacacgcttggttttttcaagaactataagattcagagtgtaagaatatgtcctttctgcaccaattttcaacttttcgactgagtcagtcagagtaaaattccgtccttacgggagcagtgggattgcgccaaatttgtccttttgagccatttcacggttgagttaccccaaatatggtcagtcatgcatgcaatattagtcaaaaagcagcttgttctaacctcactgttctgaaggcttttccatccaatggctcaattcttcggtctctctacatctgtgccgtttccttctttctggacaatggcctaccaaatcgcaatcttcttcgtcatggaagacacatggcattatttttcccatcgagctctccactggggtccactttacaaagccattcacaagatccatcatcaatattcagctccattcggcatggccgctgaatatgcgtcacctatagaggttatgattctgggatttggtactgttggatgcccaattgtatggtgcgctgcgactggggatctgcatatctttacgatgtatgtttggattgtgcttcggttgttccaggccattgatgcacacagtgggtatgagttcccatggagtctacaccactttcttcctttttgggctggagcagatcatcacgaccttcaccacgagaagttcgttggcaactactccagcagtttcaggtggtgggattatgttttggacacagagtacagtcccgaggcgatcaggcggaggcgggatcacaaggcggtcggcggtgcgaagaaaaccgaataacgctatcgtacttgaggtctcgtgggtaatttttatttctgcactgctgtgatacttagaatggcattaatatgagcattgtcactccccttgccaggagtacttccccagacatgctcatttgggaccggggcataccccgtcatatcgatagcccgacggctcatcgtataatacttggctgatgagatagattttaatgataaacaaggtgccaaacttcaagctattcgaaacaccgttaggcagagattcaggtagtatggagaggtccacctcttaagcctttcctaacaatggggtaactccgttgttgtaagctctgcgattttggtcgacttgagacagtatgccaaaatgtgctaggcaggttgatgctaatatatgttacggattccgctaaggctcgatatcaagatccaagcgccccaggcggactttgggtgtaatcgaaatctagggtcgccctctggaaaatgcgacgctggcggaaccgtcaggatcagttgccattttttggatggactttgtcatgatgttactaccaggttacatgtgcatatctctatagacatacttaggaccgagggaggttccccggcctggggaaacctccaaggtttagtttcgattacatcgatcattcgtcctcctttcaataatcctttatgggattggaacccttacccggttaacggggccgacctatcctgacgaagtagatccttaacaccgcgtgcgggtcagacaactggacacaaaatccaacccgattgcgggtcgtgtcatgtcccgtaatgggtactgcgggtttttgcgaagtctactgtgaggtcaatccagaagtgttggcgtctgccatgcaagcccctaattaagttgaataaagtctattcacgaccatgccataaaccttgcatccaagtacatctaggcaaagcatatttgtcccttgaggtgtggtgtgccttcatatactggtatcatgaaataattagtaagagcaatatatttacatctacggtctagaatgccaagtttaaccttgtcgaacttgaaatcttgggctatgtcttgagaactttaattactgtgtataaagttagccagtcattgtaaaggattgttgggtctatgacgaagatcatgtttcataaatatgggctgcatgtagtctatatgtctataaaaggttgttctttcccactcttattagtgtttattcataacgccattatttacaaattaaaacatattcttgtgcatccccttctatagcttcataaatgcatcttttctctgttcttgctaccatatttgctatattaatctcctcagcaattgcagcaccaaatatcaacttagagaatgatcatccaggttgtcttccgtgcttgcttagacaaaaagcctgcatgttctggggaaatggtaaactcctatacactttattcaggtaaagcggagacctaatactcgtctctcggtgtataggatccaaagaaattggtaaagtctgatttttgtacagctataagacatagctaatcccttccagggtgactgttggacatgctgtttgcatgaagaagccatttctttggaaaatattcagcagctgctgtcccccactagtggtaatgaacatgaatctagcctggttgaaccgcagggtaagactcccatctgttctaacccctatcacaatagtcttcatagacgccatatcagttttactgcgtgccgcacaagccttcttctagatgtgttactaacggaaattgtgcctgggcatatatagattgtcatctccaacccggccaacaatgctgtgactggagtggctgtgcctggtgctgcaatagtgcgtgcaagagaccttgccaattcattccacatcttggtaatgtgtgtgatcattgggggacgtgtgtttaaacctgcatacataaggcggggctatgcacaacatattcgatatcagtccctgcaatgtgtttaagaatgtagtataggtatggatcaagtcttaaaaaggttggaaattgctgaatatggatataatggctaggatggattttgttttcttctgatgcaaacagactgagaaaaaattggtttttgtaaaaatgtataatttgtctatgttgtgtaatatgcatgtgtcctcaaaggaagaaggccagaatgaagctatactgactacacgtatgtagcctatatcttataggctgcggagtacccgacctgcagtgccatttttctgtgcttgattggccccatagggggccccagtgcgtgttcaccttagccaaagtgcgtgtgattgagcctggccagctaagtttgtcgctgatgaactcgaacgcgtgtttaaaacggacggtaataagcatttgtaagcttcataactaccatgcagggcgctcaaaacggataattaagcgagagttatgctagtgcggccatagtgaggttaaccgcagtgaaaccgcggtaaacctcgaatttgcggtgatagtgattgtcacgggcgtaggcagtattgttttcaactggctgtcctgtattcacaagtatcacaagcttagaagaagaaacaaaagatagaagcgcggatatcttctcccccctttttattaagcttaatcatacgtcaagatctccaacttcccggacttgcatgccgacagatctcttttcctaccaggccgcaattcccaagctgtacactgatgttgcagaaaccttatttaggaccaggttgagggcatggccgacaaccaggatccaggccatagcctgtgacggtgatggatatcaaatctcatgaccataaccgcaattgcggcgatggttatcaatctcatagctgcggttgcggttatgccgcagcctacctcttgggcaagttcttcatgttctcgagccttttgctgtccttcactgcctgtcagactgccaccagactggctgaaatatcttgttgtcttctgcttctctttttggtatatcatacctgcactaagttgctggatctcttactgtactagaacagcattctgtatagtaatctctgcacctttgacaatcttatccactgcctgctctattatactaggagatattgattagcagctttgaaggtgttcaatttgccgcttctggttttctaaccgacactagaatttgctggagtcttgcctatactgaatgattagttgcttttagaagtaacgtgggtntgngtgtttttaggctttgtgtnagaccgtgatcacnnnnnngggggttctctagctacaacgaagcgatgactatcaacgataattatccaatgaagggagcttgattggtactgaagaatattgaaaggattgcttggagatctctatgtacatggcatcaggaggcccttcatataacctccagtgtggttagttcggcatctccaagcaataccattacagtgacgcattggtgattgcgtataccaccacatcccactgcaacaatatatgggttgatcccagtacggcttgttgtaattatgcaaagagtctgattgattgattgaagtatgattcattcttgtgttgttttgaagctatcgctaatgatatcatttattattctgcccgacgcccaaccgctttcctcttctggatcaggcaggagccagtcgatgccatgcagcaacgctatacaacaaggctcatcctgggcaccgtgcccgggatgagctctgcctgggatgggccagcagatatgtcggatacggcaacaggatacatctctgtccttgacatgcctttcttgtacgcacggcagaatatatcttagaacaaaaatattatcctcctctaggatatcctaggtatatttttagattaaataaaagttcctgggaatagcaaatactggttatcaacaatttcagtcattttgcttgttctaaagattaaatataatgaagaatgagtatatataagtattatctataagtttctcttgttcattctgaaccatattggcagaatcctgaaccacgccaacctgtgaacccccatttgggcttagcagagacactttcgcgtcatgtgatgatgcattatccatatttagctctcataatggcggggttgaaccattctccaagctacctgcagagaaatgtgccagagcagatcaatccttcgtaaataatgcctccaatgccgtctgaggaataccgcagtcggtacagacttactgaggatttgaaaatcaaatttctgggtcctctcgagcccgaaaagtggccgactcattggccagaggacgccgacgcctcttccacgacattgttaagctcggcgactcgaaatttggtacctttgaatgcacttattcaagtgaaaagccatggcgagcccaaatcacaagaagggcagcgaaactggcgtacctcgccagtctggtgctgtgacgagggcaagaacgagccgagctggagggcgtcgctagaacatgaagtgctctacctggttcacggtcgaggtatcgtgtcaacttgccgagcaagactgtggcgctcagagattgaggctgccattgagtctagtgatcccaggcgtta

SEQ ID NO: 5827 - DNA, 6962 bp, Emericella nidulans
ccgtagagagagaaggcgcgattagcggcatcgcaggcttagcgttgcaacccaagaccttgctcgaattaaagcaagacggcgaaggacggtgggagatgataacaactccaatgtagtatgccaaggtaagacccagtcacaatgaaattggcttcgtgttcaaattgaggcttatcaaagagaaacactggacgcgagggggaggagtacacaaacagcagggtcacgtggtactgccaaggatccattgctctacatcaaaaggctcagagcacagaactaccattatcacagcatcatgctgctgcttagctagatacactcaaagtggatgatcaatccgaatcataaccttggcgaaatgtttcctctctttcagtcgcctatacgcatcctttgcctgggcaagctcgaaaatcacgtcatccatcgcaggcacgagcttcttctcatcgataaaccgcaccaattccttaaactggttgcaggagccggctagaatgccacggataatacagttatgtatcagggcggcaaatataggtactggctctgctgtgctgtcgccgacttgcccgaccgctaagaccaccccgtcaactcgtatagcggccaaggagtgcggaaacgtctcattaccaccgacgtcgacgacgaagtcaaagcccctctcagctggggtaaggagtcgtgcttctttgccccaagattctggattattgcgataattgaccacatgggccgcacctagcgccttgaggcgatcggctttctcgaccgtggatgtagtggcgacgactgttgccccagcggcgaccgcgagctgcaatgctgctatgctgacaccgcctgtaccttggacaagcacccatgagtccggtcccgcttgcttgccgttcagaccgaagagagcgttccaagccgttagccaagtacagggtaaggtggccgccgacaaccagtccaacgttctcggcgaatgaactaggcctgcctccggaaacacagcccaggatcgtaatgtgccatcgcttccttgccccatgctggcaactgcctctgcaactccagcgtgggcatcgtccccgtgtgcttcgacgagtttgggggcgatgtacgtcacgacccggtctcctggactgaactcgcgaactgaaggtccaacagcctctaccaggccagccccatcgcagccgggtacaatcggcggagttatcgggccgttgatgccctgcaaattgtcagtaggaacatgcgaggcatacggtttagagtcgcaaataccattggaccggctatgaccagctcgcggtagttcaagctggcagcatacatcttgaccagaacttcgttgggtttcaagtcatgtaccgagggtatgttgacaccctgttgatactcgagcgatgtctcgaacccttcttggccgttcaaaacccactgcctggccattgttccaaaattggattgatttcaaattcttgatcttaggaaagtttctcagttttgatgcaagcaaggcagctgttctggagggaatcgctgcccttaaatatttcgcatgtttcgcttttaacattctagatcccagactgattttccttaatcggtaaatcatttgcagccatcttccgaacctccgattataagtcgagcgatcgcttctctgaactgtgaaataaagtatatgcgtgaggattcaggcatgtcgaggcgggcttggctctaatctgattttcctaattgggaaaatcaattcaacttcctactgacggttcgactactgctgacagcgacgctgctggttcacattgaggttggctcttgtattattcatgctcgaagtcaatcttatatctgagttatcggcgtttgcttatggacaggtattgtggactgaggctagttctacggtctgcgagcgaatgctacacaaatcatactatcatgcaatcatggccgcctttgagttaatcagtatcgcatttctgtgctttctgtgctgtgtcattcaagtcttctgttgcttgtgcgctctaaatctatatcatatatctcccgccagagcgccttgatttgcccaacaagaccatcatctaactctgccccaatgaccgtctccgcgacgctcaaaggatcatgccagccatgccgctgcatccattttaccgccttcgatatcctatccacaaaccaggctcttactggtgaagccgtgtcagcggcgatcgcccaatcaagagctggaaggatgtcaggtccatatatatacaccctctgattggaaatctacatatcacctcctttagttcgccggcgagcagtgtcagatgggcagctgattgtgtcggccaaagcaggtaaagtactagttcaattgatcgtgccgcggcatcaatgtgggggttatcagttgctcgtaggttgcgtgcttcgtaatgtagtctagccagcggttcttcgatttccagcgcaacagatatagagttgagagagctcacttggagcgaatcgattacctttctcaatctgataacacggtcgctaatatctgccagctttaagattcttcgatcacgctgttcacctagtatctggacaatgctctgataccagactcgtggaaatccgatgatattattaatggagtccctaagctgggttagccacgctcagccataatctaagatacacccactggacaatgagatctatgaaccacgcaggcaggctgtgcggacctcgagacactctttcgctcacaatgcgggcaagaccatccatatgtatcttccacgcaatgtcgtcgtgcactaaagaagcacccagagccattgtgatcacggcaccaaggacgccatctgagggagtcgctatcgatgtgattcgctgtttaatcagccttacagctgtatacgagtgataatctgcctttgactggcaagagttatccggcgaccattgccgcacagcgacagcaagcgatgcttcgaccagcgccggctccgaagctataaggttaaaccaagccgcttcgcttgcgctgccaggcgtatgccttccttccagaaagactagctcctggatctggtgaactgtagttgttcagtctcgcatgaccgagagaagctgctcagtacgtacaggcttcgatgttggatggattgcaaggtgccaatctcagcgatggagcaccgtcctcctcctctgtttgatttagtcctcgctgccttcgctttgcgttcgactcagacgctccggcaatagcgagccgttgacgccttttggcgaagttggctctggtgatgtgcgctctcatccgcttggcagttgccgtagatagagaggctccagttgtattcaggaaggttaacccagctgattccattttcaacactttctttaaccttcctcaatgtcgagttgataatgaaagctctgacatcgtggaggctcgtgtcagcaccgttggaggtcagcatggattaataatgcgcgacccctccagttccctcatgctagtaggcagtaagatgctggctcgcgctatatcttgggagatacgtctactccaagtaagtgattgtatattgctttctgaaatttcaacatctcagatctactcttaaatgatcactcctagactgacaagtcggccagttagccaagatcctgcagcgaacgtgactgtgtggcccaggcatgcgcgctgcttttgtcgcagtgtataaagcatgccacaagctttatcttcgataaaaacgattaaaagctatgtttacgcaatttgtgcgattgggagcgcactatggttcctcgttttgcagattgcggcatagcccggtatgtgacgtcatacatcacggctacgggtgcttacattggtagcacacacatcatacccttgtgtcaactagagcggctctgatccttcactgggaaggctttgtagcgtgtgtaatagcctcagggccattgccacttccttggcgcgatcttcagaatgtttgagacacttgatctctccggtgagtaagatcattggggcggggatcttggtggactgtctacatcgacaccgcttattgtgggtccagatttagtggacaccgtctatcctggcgcctttttatatcccgtggatgttggagcacctatcaataggtcttggcatgatcggcggatcggctggcactgcctctaccaagcctgcaagcctaccagatggctcccaggtattccaagcttgcaagatgagtgacttatgaacctaccaaactcctctcgactccctgaaacccattctgacaataaaatctgatacccagcagtctgcaacttctagagccatggagtttgccgcatacacccgacggagtgtgcatacgatttcgaagtacctccgctgtctcgcactgatcgcctccttagccgctgtcatctcttttgcatactctcaagacgcccacgaccggggtgtggtcctgacggaagacttgggtcatcatctagtcactccggctaccgggacggtatgtccaagattattacccatacgaccttgatattaactcgcttagaccgagtacgcgtttatctggtccctcatcatcctttccattgagttgtcttccccagttaccatccaccctggcatttacgttgcgttcgaccttctcgcttggactgcggttaccaccggtgtctctttgtacctggcgatgcatgagccgtactatacaggcgatggatatacctgcggccgtgactaccgtgaatatcgtgactgtggcggaaaacaagttgcaaacgtcgagcacttcggcaccgcaatgggatttctggccgtgtaagtgaccggtcgtcattgggctcgtcttcgttgtatactgaccagccacatgtagcgtcattcaccttgggttcttcgtttggtattgtcgcgcaactgataagttgcgcaagagtcagcgcgtgttgaaggaagagatttcaagccatgctgcagcataagacccgtcggtcttgcccaacgtcaatagtgaacggagaaaggctggagattccgagaccagggttactcaagcctcagctgcctccttagttgagatgaaggcgacgagctacgacgataatggttgatgcagaatgcccaagaaatgccgcctcaaaaaaaaatatcctttgtggtttggcgtcttgagtggctttttgtggtcttcgagttatgtgccatgctgctcttatactggccagctggctcttgtaatgtttaatgattaatacaatggacagatgaagaatgctcaggcacccagaacttcaacttccctagacataaaacgatagataccaactcaaattaacagcagttcctgatccaagctctcaacctgctcagatattagaatatgcacatcacacttagtagagagcgaattgctccgcggctgttggcggtatactcttgaacgccagggcccacaacgaaactatatatatctgcctctacgcaatgattttttcagcgcaacaacattattcaatttttaccggctaaaagggatatcaggattaaccttatttaccaattatggagaacttcagccctacgatattgtggattccactgctttccgctctattcgtcatgagtatgtacactagtaaggagcgatagcagtaaagcgcttccagttccatactcaacatcgtgtaccacccaattatcatcggccactactatacttatctttattcttatgaggccagtacttttgatggctataatgctctcttatccaagtacaccaacgcgtaagtagtcataagagaagtggctgtaacttcccactcagccaaaaagggtccaggttgcagctcggttagacctgatttctcaaaagggtctcccacctttaagagctgaggtttgactatatactggctattactggtaaggtggtcacatgacaagctcgacatactgcccttcagtaccgcctgcccctgaggttcgacctcgattagtcattatttagtaagctagttgtttagataggcaggccattccggccacccaatgagagaccatccatctcttcccacagggtccgcgggacccggaaaccggccacaagcaggtttctacctagatatcttgcccttaagtcgcctgagatgattcgtgaatttcaaggtctgtaataatgcaatacgctattatcatcataaagacgtcaagcatcacaagcctgcagaaataaaacttagataaaagttagataaaagttaattaaattgactctctgagaccctgggccgcggcccactgcccagtttcacgtgagcgtccctgtggtcggctttcacatgcgccaggaacaactttactcttacactgtaagatcggaaacacgcgggtgatcgagggaggatatgaaacatcgtgggcccatcgagccccttgctgcaggaaaagcttaaaaccaatattattgcttgaatagactatagtcgtgacaaaccccgaaaattgggaaaataatccaatactacactgagctatcgattcaaagtgcctctagtttcgctgctccttagattcaaggtgtagggatttagtggttgagtggagatatatatatttgtgccgggctgctttctgctgaagacacggcaaactattgtatggatcggcaatcaaaaagagagtattagcataggaagtatgaattttttttttctgaatatcttcttgcaaggcagactggtgctaatcactagtccagccgtaatatagacgatcggcaggttcatattcgggttttgtctgcaatgtctcgatctcgattctgatcttgagttcagactaacttgtcagatgcctgtaaaatgaaccggtcatggaccagtggggtcgagtgggattactccgtttgctctaagtagaaggttac

SEQ ID NO: 5828 - DNA, 3737 bp, Emericella nidulans
atggaaggataggaaacggaacgcggaaggaggataaatgaggaggaggaagagagagttttcttttcggtctcgcttagaggttgactactaccgcacagaagtagcacactgacaatggctgcattggatcacaacaaacaactaaggattatcattaagtccagtaggtactttgtagctgatactcgtactagtatagtgttaaagcgcggtttttagcaccaggaaagagagcgtgttgctgcgttggcagcccaccatccaaccatcccactacaacaatccagactggcgaaaaaataaaagaaaatcttttcatgctgatagaccatgctgtccatctagagtgcaattggcgtggcaagggagaaggtcacgggcgagccggagagctgcgcccatacggtgaaggggtcgctgcccagctgctccgtcgcgaagcctagggtgtccgtaggcgcggtcgggaaggtaacggggatgttcgcgtcgcaggtgttgccgttcgcagtcacggtgacgccggtgatagcgccgttgtcgaggatgtagttgagcccgtagtcgcagtggtcgcgggtgtagcgggcgaggaattcggcggacatctactttagttagcaagctgtaactatgaggaaagcaagcgcaagaattaaagcagagggtagaaaagcaggggaagcagagggaaagcagagggaagtgtacctcttgatgcgtaatcgtaacaatgggccagtccaccagccgggtgaactcggcaacgatggtctcaacccacgcctggaagatggagaactggccggtctcagagccgacggtgatggggtcgatcccgacattgcgcaggttggcctggtggaacatgtacgggtcgcgatggaggccgaacaagtgacgcaggacctcggcgcgctctgtgtccagcaggtcattgaagtctccggcgccggcagaggtatcgatccattcctgtgtcgtgcaggcaggggtgtcgcagttgtagtagattcgagtcgcgaagcgcgggttgacctgcatacccgcgaacccgtcggcggcctcagtggtgaagtagggccacatctcgttctcgctgttgaggaggacaggacgcgtgttatcgccgacgcagttggtgatgccattgtcccaccaggcgcggagagcgtcaccgttgtgcaggccggtgatggcgggcgggatgataccgttggaggtgaacttggacgcggccgagaagccagcacgctcgagccagacctggttgaaggagatctccttgtagatgtcgctgtaggtggcgttgttctgctccaagtgggtgaaggtgtggctgatgtaggcgtagtcgtccaggtggttctggaaccatatgagcaggctgtccgcgttcatgcaggtcgttgtccaggtgaagttggtcggcgaggttggccagacgtcagtgccggtgccgataggcttgacaaattcgagggccgtgtccggaggcgagtcgtactcgatggcgccgccggagcaggtgctctcaccggccgccgtggtgccggcttcgatgttgccgttgccgttgtggccgatctcgacaaagtaggtgcttccagcgttgagtttggcgcggatgctgggcagccagttggtgatgccgtccatatcatcggtcgtgatgcggaagatggttccgctgggctggtagatatcggtctcaaggaacatgtcgtcaatctgggtgttcaggttcacgcggcggtacccggcgtgcaggccgcgcgtgatccaggtgatccaggcgtgctgcaggtagttggaggtctgggaccagacagtgtcgaagccgatgaagaaggccatctgctggcggccatcgaagttgttgatgaccgcggccacagactcgccgtcaaccccgccgccggaggcaaacgacgcaatcgccttggtggtgttggtgtcggtgacggaagccgtgtagtgccagagacccgaggtcgagacgcccgcgctggagccggtcttgaggccggccgtggggaagtcgctggtatccgtgaagtagacgagctgctcgacaccgtcggcgcagcagccgccgttgccgatggacgaggcgccgaagttgggaccggggaagacgtcgtactggaccatgcgcacgccgtaggcgagctggtacgcgtacagctggttccactggtcgtccgtcagggcggagcgccagttatcgttaccgtagtcgtagctgacttcgccggcaacgacgataccgccaaagttgccccctgaggaggagttcagggccggcagctcgacgccggcctgagggaccaggagcgtcgtgaaggggattccgtagccattcaggccggacgaggcaacgctggcctgcgtagagtcgcgggcgatgacaaggatgttgttggccagggacccggtggccgagggtgccacgctagtggaagtaacagacatgctgggggacggggtgactgtagtagacggggtagggctggcactgggcgttaaggtagaagacgtagagggggatgaggtagaggtcaaggtactagacgggctagtgctggaagtgctggaagtgctgggggggctagtactaggactcgaagtcgaagtacttgaagtcacagtacctgaaggctcgggagtcgaggtcgaagtactggacggctcagtggcactcgtgggatcaggatcactggtcgaagtccctggagtaccggtagatgaactgggctctgaagtgctaggctcagaggcgctaggctctgaggtgggaacgagagtggaagagccagccgggtcagaagcactggatgtgctggagatagtagtggaatcagcagaagtagaagcagaagtggcagtagcagagtctgtgggcgagggcagagtcgtgagcgtcgtcagagtagtagatgcagaggacgttgcagtcaccgtcactgtaggctcagtcgggccggtgactgtcgggacactgatcgtagatgcagacgaagcagccgggggcaccgaagtagttgagctcgtcgagctgggactgggaggccacggggaaagaacagtcgggcgtccttcaggccagactccccggggcgtgtcgcaggtaaatatcccaaagaaacagccgatctgcagcaccagcgtgggagcgaccatctcgattgtgattgcgaactggtcgcagcaaggaagcagggcagcagggccagcaaacgaatgactagatcaaaaactaaacgaatgaaacgcgagacgtcagatcgaaacggtggagaacaacactccggctccagtctccagtattatactccagtcctgctacaatgcgccagccctggagcctcctatttatgctagaccgtcgcggcctcatctcgctcgcggtttcctgtctcacctttgccggatccaccccgggaatcggccggctctgttgaaccagctggccgccatgaggagtgagggatcgaaattaactcgattaactcgagaacggagcgagcaagcgagatggggtcatggggtgcccagaggccagcagcaagtcccgatatacgagtcagcgaatacaagccatacaagccctcaatcagccaatgacctatccacccatcaattaatcaaacccctgccccttagctgcagctgggccagttcactcgtctctagtcgtagtctgcagtagtctaccccgttgaatcagtcgc

SEQ ID NO: 5829 - DNA, 3239 bp, Emericella nidulans
ctgtatgctcgtgggcatctttgtgagcatcgcgagactctctccacggctcgtccatctagacgagatcgacggttttattgatccatgcgtcagcccatggattggtgctagtcgacactgcactatatcgtcaaaaacctggctctgccggttctttcgctcaatccgtctttcccgtattcccttcacactagaatctcggatcgctgcactacgagagagaccaccgctcacggagcctcgagatgtatgagcaccactagaccctgaaccattggcttcccaagaagctatctgactcggagtgtcaacaagtggcgctctgtccggtttgggcgcaggctcggaaagaccttcatctacccatcctgccggtgttggtgggatgctacccaacccagttcccaaagaaggtgcttgacgtgctgtgcgggtagaggcctgcgagctgcgcgaagatgacgcatcacccagtccgctcacgctctgcgatcttggagccggcggagggcctggaggtggcggaggaagtggcatccccggctcccaggctgcggtttgtggcgagccacttctagattggcttgtagctcttgatgaccctgcacttgatacaacgggaccggccgagaccgctcgtctggaattcggagcacggctcagatcctcgcgctgggcggttgcgggaatgtagccgtatccgctcgcttgagagccttgtaaactgtcttccgaaaacattacatatgggcgagatccgctgttgaaagattgctcatggtacgcatcagcccggctgtgagacgatgacctagacgccggtgctccgtgcggtagcggaggcggcggtggaagcgaaacctggctgttatggcccgcatccggacgggcaacagataagggacgagtccgcgggattgactgttgccgactgcccatgtacggagatccggcattagaagacgtagattcatggactggtgtagtatgacttgcatggtccgcttgctgctgctgacttggaggggagtacggtggagggggggatgacagctctaatatcaaagtcagctccacgcaaagataatacctaactcactgcataacgctgatacacgaatcaaaatcatcactataactcaagaaagtaggactgaccgggttgagcggcgtatcgatgctgtgagacgacccgaagcatattgcccgactgtgaatagggcgactggccagcgttcatcggaccattactgaccggcccccagtcctgggggttataaggggcgttgtactgcctggaagccatgggagaggatccaagtaccgcaccggctgagttaatagcaggtgattgagtaaaagggctggatagggacgtggtcgacagcggggttgataagtagcccgcaccgagcccgacaccaagtccctgaccctggaattgatgggtattgaaagaggtagtcaaaggaggcggctgcatggcatattcgcgacggccaggagaaggctgactgcgaggcgtcggccagccggtgttggctgtgtacggactggacgacagatcgtcgccagtgttactcggggaccgccagctttgagttaaacagcctcaagtcagctcgacaagaacaaagaaaggagagaagagggagcaggggccggggcgcacctattcatactggcgcattcaggagccaaccaaacatggtggcatggttaatgcccgcgcgttggaagggtgaagaggcgacaggtcctttggaggaagaggaggaacgcgatacaaacggcgaaggactctagcgggatgatgcctagaccaaccattaccgaacaaggatggattcaggaaaacagggataaaaataggtcaggatcggtctgcgactctgcgtggctgcagaagcaggagagcgtagcgtatgcagcctggcccgtttcatcacagccggcgtcgagtcggcgcttacagggtccattggcggcttctcacagggccagcgacggcttctctccacgtcgctcaacgaaccagcggcttttctcgtgtccaagagttcgagattagctgagctagtctggggtggtcgtagcgtatgtctattattgtctgccggtcttctagtccattggatgatctgctcagactgaggggaagccgcacagggacggacggcctgaatctattagcctcccactcgtgactccatagagacgagggtgccaacccgaatattagggattttcatgaatataaccaaagaaagaaaagttatcagtggctaccgttgtatcggccacgccccgttcatgtccttctcgtgtcaggaatcaaacgggatcctaaatcattgaaacttgcgcaagaatgaaagattctggaatcgtgtctgttttggagtacaagaggttgagtagtactcatgagtggggagaacagaaggtacaaagttgatgaaaatgagttgtggttgcatgtgccataactggagatactccgcagatatcaggcgtccgtcggtgtactgtcgcgagtggaagggaatgaagatagaattgggacaaagcgcaacaatatacgcatcaacagcgaaatgactgagcggtcaaaacagcaaccagactagtctcagatcaattattaccatttcagcattcctgacttaattataaagaggaattttcactcttacctgaacgaggcttctgctcttcgtaagaggatgcggtgagaaccactgtactcttatctttctcttcgtaatatcgtatcaagtcgtaaattctcatatatacgttaacggacaggggcatagttgtggtgaaactgcatggacgactttggtgagatctattattgaactcgggagatactccttcgtttgatactgtcgacagcatatacgagctttacaggggtgaacatatatttttcacttttcattatttttttctcttttgtgatcacacaggtatttattttaagaacctagccagcaaagttccagaccagaccaacgggacaactccgaccggacgccagcagcttagaaaggcatcttcatgtggaacattcatctcagacgatatatagacgatgtatagcgttttatttcttgtatttgttgtatgtatcgatgaccttctgcacctcgtcccgagagccgaggaaaacaccgctcttgtcgtggatagactccggctgaacagagagaaggcgctccatgcgtgag

SEQ ID NO: 5830 - DNA, 5849 bp, Emericella nidulans
atactctacaccttgacgctttgcgcacctttggcgtaaccccgtcccaacttggtcgcggtcggcatatccaccgaaccctacctcgacaacaggactaacacggcgttagtggtcctaaacaatacacacacaaggatcgaccctacccagttatatctcgctttccggcccccacaacgaagatgctatcgtccccaacgtagtttgacgaccgatcatgccattgcagactagcttcgagcacaggggagtcgtcgaaaccatgaagaacggagatcagttgcagcaataccacggcgaagatgaaagttccgacaaaagcaaggtagagtctgaaattcgccatttttcagtcgccaacgaggacgtccgccttgtcagatactggcaataaagactaccacccagcggcaacgtagggcggactaagcttatttatcttgctcaaatgcctttgatcagcgcaaggccgaggactgagctttgactgtgcctgaacgcgggccggaggattttcaagcccctcttgagttgagtgagggcggatggcaggaatgcgtgattggcgttcagtttgttgaagatagcatcgaagcctgaacctgcttatcccccggttcagattgcattcgcgttccttctgatgcgttttgattggtgcactacgaaagctccgcgccgtaaacagaaggatttctcaaaaagcgagggtcatctgctgatctcctggccttgtgcggagaaatgcgcactgaaggcagcggcgatcttcagcatgtgctgtcgccgactggcataccaaagcggaactgcacattcgccaataccggagccaatcaagtacagcaatcacgcgtgctgagacatgaacgtactagagcggtgtctcagaagcgctgtaagattcgatagtataaagtactatcccggcagcgccgattagaaaacgatgatctcaccaaggccctgatacctgcaatctgcggggcgtccagctggatggagccttggtgttagatcgtgccttctcgatttggacgtaagtccccgcacattccaagatgggataagtttctgcattctggttttagtaatcatttacacgtgacgactcagcatccatgatcaaaagacaagcttcaaacattcaatcaactgaagtacttgccattattacctgagccattccactatccctttcacagtctcaaagcagccaagacagctattcacgatgcctttggtcgatgaatctcacgactctctcccgtgtaagagtctttgtgcgaactttgaaattgacgtcctaatacggtgtagatatcgatgcaacgccgtctgctgaggctcgagcttacgcggagaagttgatcgcgtcggagctttcatcagattaccagacctcagtccatccctcaattcccgaatttcctgagcccaaattctcgcccttgatccagcaggaaatcgagcgaaaggcagctggtctgccattgactggaggaatcgatttagcgcgttacgaggcccctgagccacctactcgctccgcggattccgctcccaacctcgatgagtggcgacagacgctgcggagagcctacactgctagctctcacttgtcatcgcggcaggagaacctttcgcttcttgaagaaagcggcaaaaatgcgtggttgattggaaactcacagttggaggacatactgagggcgcttgaaaaggaactggcagagaccaaggaggcaacagagagtgtcaacaaacaacgaaagattgcacaagaatcttgtcagggagaaatcactgggctggaagagtcatggcgacgtggtgttggtgccattcttgatgtggaacttgccgccgaggatttgcgaatgaagattttggagcaaagacggcaacatgctcagcaacaggcacggtaaaagtgtcatgccctgattacggatccgatgttgccgacttcctctacgctctggtcagctttattgtcgggtgaagtcaaacagtcactttgagatctttccaagattattgacctgaatgggccgggcgcacgtcgaagacttatcacggtcacctaaccataaatctaggccagttttcaaattgcaagatgcttcgaagcgctggaaccaccgatgacacaaaggttgtaccgaatatcgtgtctcatcgcttcgctcagtctgtcagattcaatcctcggagactagagcttcacaaaccccgccagttgttgcacagtgccgatctcaacgctggaacggctttcggctcactaagcgccctcgccggcttctgagtgtatttaattggggttggtgctctggtagggctgcacccggctattctcatagatgtttcggcggtacgaactagttctgacagtaatcaagttgattaatgatatgtcacccgcacttttccttgcatgagtatcacttgaaatcactactactaaggagcctaagtcgctggtagcataattacgggctgaagggttggctcaagattcattcaatccccatctgccccgaactatcagtacggccttaccttccccataatagcagcagctcccttttccacagcaagctggttccaatgcaccaattccttgcatgccccatctagcgaagtcaacggtgggttataccccagtcccccatcttgcggatcctttctcgcgcgtccatcatcaacaatcagatggggatttgaaatggcaaaaactgccggctgtagtctcctcaagtcgctcgtgacttcaggaagccagggaaagtaaaagagacgcagaaggacataccactcgacgaaatgggacagtataagcatgataacgggaggcacgtaggggaaacggacgggcgttgtggccagcgtcgtcatgagcaaatacaaatcgccaaatgatacagctgggtttggatctgtgacgatgaaggcgtccccgccgatattcggcagggctgatggagacgctgtatgttcgattaagcgttgctcgtagaggagatgcgcgatcgagacgttttcagcattgacgaggttttggattacgggatggagccagctatgagagttaggtctgattagggctttgctgaggagatatgagggctaggattcttacgttggaccgccgcccatcttcaggtacaatccaatgattgttgcgctggactcgctaccgacgccagagatcccattcgcgggtctgatgcagcccgtgcggaaattggccttgatattgtcggctgcacgaacgagggcttccgcttccagtttcgaaatgggatacgtgccgaaaaactcgtcatgctctttgggaagttcggtttcatcgctgaggacctggacggcgtgccgcggcgtttttgcccaaggggaaatccagaatgcgggccgccgcatacagacggagccagaagacgtcgagatgaagcagctagccccggccgctttagcgttcagcacattgacagtcccgccaacattcaccttgcgaaccaaggggaggaaggccttgtggcgatcggctggtcgaattacagcagcgttatggaaaacagtcaacggcaggtcggccacggcgctgggccatggttgcgaaaacgcactctgcactgcagcctcattgacaatgtccgttttcacaaaggtcacaccgagatcgagaaggtcacggcgcggtggctgaagatccaaggccctgatagctgccgggtcttcccgcgagctacgagatgcgagataatccagttaccaacgagccctagatactggtaagcggctgagacttcacgctgccgggaccacactcatgcagcaggtcgatgagttggccccggcccaggttgattggcaacgaaccagaacccccaacaacgatatagcgccggccctgtttcgggggcaggcttttggtaacatcaatcgggctctgcacggcctttttgtatgcagccttgatctgatcgacggtccagcggtggggcgatagcctgcgagcctcttcagggacattgtacatggccttattcacatggttgagatagatgaagccaattgcggcgatgcatagcgcgattacagccagcatgaagggcagatttcatgagctagtgcaatccgtccgcccaggccgatctcacaagcacttcacgtacgatatttaccagcctcaagatccctttggctcgaacgcttcgttgaagagcgacggaaaattacaggaatcgaggcgcccttctcaagccaggatcgagcatttaagagcgatgatcttgtcgaagcgaagcggacagagcggaccatgctcgtcggctcggttagagagccccttcgcttaggactggtccactcgaccgctctcgtatccaagattattgtttagaaagattcaagttaggaacaaagcgaagaggagacaagctagccttaaagccgtttccctcaatttggcgttggtgctggctatttgaagattaaaaaaaataaaagaaaagaaggaaaaggaataataatttaagtaaataaataaatttaaaactaaaataaaaaaaaaaataaaataatataaaaataaaaaactgatgatagcgaagagtgcatcgagttaattgagtgcctcatcaacaaaggcactctggactggaaatacagccttcctcgttgagccgcgccggctctgaggaagcccctgtcccgtgtttggaaccaagcagataagatataaaatatattatatcgccaacctggaccttgcggggtaaatgtttgttttctgctggaacgactatgcggggatactggaatcagacagacgaccgaggcaggatgggtccgacaagaaggggcaggcccaagatctataatgtcatatgatgagaaagaatcttgaggatgaggttggccaagctaacaagctaaattggcgttcccggtcccagactagatgaggccagactacatccctcgtctactgacagtactacagtcaggatactgtaagttgcaccaaagttaactagcacagtagagctggaaagcagggcacgtgactaccccggccttctggccgaatacgagtcatgcagaggctggagaccgggccttcgtaccagccagttaagcctatccagaaaaccggtcgtcagggatgggctttgttagacctcgtgttgcgaagtgtttgtcggtgctgcactctacggaagaccgcctgcgtccaaagcaaagcaggagcgtgggtacccaagcacagctgcatgagtcaacgcgtctagtctcggcatgattccgtgcagccagagctggcccaactaggcctgatctggcctggtttggcctgatttggcctgactggcctgactaaggccatacgaaggccattctggaatggaaatgcttggcttcgggaaaccggcaccggggcaagggcggccagccgcaatcgatgtctcttgactgggcgaatatccctcgtctttacgttcaggggccggatgcggtgtccttaaaatcatggaattctcgtacaggcagtgccaagcaggctccttagtctatgcacttgctagccatgcttactagatgctaaccatattgaaagacgatgttgagaactggataattaccaagatttcttctgtgaaccataccgaagtactcggtactcaatgtatgtacccaaagtaacaaacaggctcggctatcccccgtggagtcggcctcttcctgctatggggcgacggtgcgatccctatagtgagtcgtattatgcggccgcgaatctgcatgttgtcagttgaaaattcaacacccccctgagc

SEQ ID NO: 5831 - DNA, 4394 bp, Emericella nidulans
tggacaagaataatatctgcttcaaaggagagtagcaggtcatgtacagcgcccccccttcctatattagcttgtagtattttcatagttcaggggaggtcagggtttggtttaagagctcctgggtgagctgtcttgtaggctggtttgtagtgtgggtattatctgtttgttatttagagctttcttctgctttcttctgctcctgttggaaggcaagccggcctgccttgcggatagcagctagagcatcttttgagaggcgggtgacagtgttcctctggacgtggggtctggctgggcatttttggaagtccgctgcatgcgggccgcagtagttgatacactgcacacagcagttgtgttcctgttttaaggatctgcaggagatacagcattcgctggagcggcaggctcgtgtatcatggaagtagtagcatcgggtgtattgcaaaggcctttgcttggggcgggtgggccttgataggccggacaggccaaagagttgcaaggggtgttgtagcctttttggaaaggctatgactgctgtgatagagtccctctctactgggtgctttgagagtttggccatgagtggtttaataccagtaatgtgctctgcttcattgctgatatctgtaattatagtatctatctatccatccagggaccagagttgtttcaggatccaggggacaataacctggtaatactctgttggtatttcaaagtatccatccccagctaggcttacagccttctctgacagtaagaagaccttgccttgttcagttgtagtaattgcatatcctgttaatattacttgcacctgtgcgatcccgtccggaactttccctgcaagggtgacccagatgccatgtggaccaatagcccggaggctagaggaggccgggaggtggaagaagatgcggtggtcagtcttgtttgactgcttcagctttcgttgtgctggttgcttggcttgcgtacggtgttctggggcaatagtttgccagttcccctgaccagctcttggggctgtcagggatgcccaggttgtaggctgcgaggtttgcctcttcagggggccttcgcaagcctcaggagtgggaggttggtttggctgttccatctgcctggatggctgtgggggtgcaactgctgtcatcagaggaatctgctgaggggagtcctgttttgctagggaaacaaatctggctgcaagccccgggccaggtctcttgggcggccctgtagagaggagacagttagatctagagctttagcaagagaggtcattgctagtttccaatcattaagaaggactagctggtcgtctgctaccatgctgacctgctcgcagatcaatggggcttgcggcaaataggatacagggaccggagctgcagtgggagtcttctgtggggagaataaggcccttctcttcagggagttccggggtaggggggtcggggtggtaggtcctgaggggggttcagagttttcacccaggagcggagtccccggacgggctccgcctgggggggagtcatccacctccatggggtggagggaatgatcgatgagcaaagcgtaagagatcagttattagagcagtagggggccctgttctcccctcgtcgtggtttttgtgcgcagcagtcacgctgggagcgttagccagcgtgcggggtagcaaaatcacgtggctgccacggcaagtcaggagggccttgtctttatgtacagtacatgaagctgacatgtgaggatcacagatgcagtcgcagataactccttaggctgctgagtaaactcaccttactgcaagctggcccatagtgcaagaaccgaaaagtcaaatatgagaatgtaatcatcatgataacgaaggttttccagtatggacagttttgtagttctttatccagcccgaaagtcttattctattaagtttatctcctgctcttcatgtcagccagagctatggtgttgtagtgggcagacgctttcttcagcttctctgctgaaacagggttgtgaaattttttttttttttttttgagctgtgaatgttaagcttactgcctcattgtttcagactcgctgcgagaacaatgtacttggacagtctatctagttagattccaattgtgaattgtggaatattgtcaatcatattctatgagcagtcaatgtgcccggaacaggcgctggatggtctttagcaactagggttattgatggcgcgggtatactggagacactcatttactgacagcatgttgccctaccccaaagacaatacctagtgatgcccggacaatacccgtgacccaggcggtcggctagggtagaataatgaatgatattactagtgatagcttcagagaacacaagaatccataatacttcatacaatcaaatcagattctttgcagaacttacaacaactaactcctagctgtttggtagccacttgctggctggtttgcaatcacttagacagcattctccagcactaacaacttgcgtttccatctccgcgatcaacatggctgcaagttggaggaaagcaaagcgggtcgccatgccctcaagacaataaatctgggcattcgtaagggtgcctagatacttgaaaactacttgtaggtatgaagaatggtacaggggcctgttgctcgtagaaatgagcatgaagccgtttcagcagcacatcatcgtgtgagaaggatgggaaagtgatatcaatctcctgctagctacttggtaaccatttgctgacttactcaagtccaccattttaacatgcgcatgatggccaaagagcttgaccatatgctgccctgcaataaatgttcatctgccgaggattgctgcaaggatcaaaatacgtgtgagcacttccgccatttgattctgaactgaagaggaaggaggacgatgaagactaagacgcactacccagtaactatgggttcgattgggcgttatgaatcttgaaatataagtgattttctatccgttgctagctagtttaaagctatttagaaatcaaattcctgcagtcttctccgtctttccataaattccaattccttctcctcattttgaagttgaagagcccgaacttcttcctcttctcttctcagcttaatctcgatttgtcggagctccaaggcctgccgctgctcctcgaaagacaatatattcactgaagggctttgaaagctttccgaaggcgatctaaagatttgttaaatagttaacaagcagttaccagaccactgatattcttggaagtatggttaggtctgacagaccgggttatccttggtcgggtttgtgacctacgatcaaactgtgaagataaatgtgctgatgatgaccgacggcgttttcgagattctagaatagttaattgctgatataatatattgatagagaagatacctaccttcacgagctaaatggcgtagataattagcttccatatttgctgtcctatacgagtgatgaactccaaagtagtcacggttttgatactgaatgatatcttgcttgtcaagctttgcagagctatattaatgcaaatagttagtttgtgattaggaagtggttagaaagtagttagtaagccaataacttacttctgaacagcctcaattaatgaaagctgtttaccaccagcatttgctttatggtgtgactgctctgctgaattagtatgatttcgtatagaatcatacaaagatgatggaatcctagagcagtttttgttaagcccagctttaataactgcattctttttatgaagagcccaattctttatttttgggtcctcatatgctaggataaattgttaataagtacctcccaaacatttacaaaacacttacctgcaagtaagtcacataactgatcataatcctcctctgatttgcaattaaccagacttgccatgcgactccacacgcctgttcctttatcgtcattaccaacaatctcagtaatagtccggaaaaaatggacccggcagaaaataatgatgctctgtagttgccataatagagaacgatggtagggatcaatctctttaagataccgagccaggcctagctagttgttaactacttatcaagtgattcctaagtggctgattaatgattaacccaccagcatattgtttcgtgtccatgtcaacaataattccagatattccatttccatggatagaattaaattccacaggttgacctgttactttctcaacaagagtaaatactcttttgaataaaagatagtagcctgttgtagtttcttggttcgtaaacacacgcattaaggtaataactggagtagtttgtaagtggcttccaagtagttgttaa

SEQ ID NO: 5832 - DNA, 14101 bp, Emericella nidulans
gccgtatgagcctacaagctatatcatacatgatgtctcgcgagccattattgttctaatttttattagataagtctgttgttatacttcgtgtcctccaacctgctctacagatcatggaaaaacctctgcacaaactgccctctttctctctctctattggtctcgataggaaccggaaagttgatgtgaaaagtaggaccgagctcagttttcgatccgttcatcttcgtaagaagcagctcaaaccctctcctattgacagaatcaattcctcaggcttcagaattctcttaatagcatgtttccctattggttgtcccagctaggcccttttatataagcttcacagtacatggaggactaatttaacaaaaacccacaacagcaaaaacacctcgccacaatgcctcgaacgctctataattagcagtgtatacttattctgctattgcatattctttactcacagcaggcttacggtttatggataaccaagatgaatacatgcttgctgcgctattcaagatattttctccagctcgagaagagtttttagcttagaggattttataaattccacagtctttttttatcccaaatcctagtttctatgagtattcaatatattcttccttgttctgtttctgtaggatggttgctggcaaatccaaggctctattaataacaggatagtcccccaaccctcgccagcgacgcgccaccttccaaagcttctcctgaatgtcccgattgaacctattcatctcagactctaatagacgagcgcagtgaattatgatgtcaaccgcactgttactgcctagcgagacaattccaccggctgcgctggagaatacaggggtgaggatgcccatatccatacccatacccacttccgtttgcccgtttgagtacgccacaaccaatgggtactcgtccagtagcgcatccagtataccaaggacagtattagttatctgttgcttgtgttctgcgctattaagtgaatcccactaccgtaagcagcaccggcagtgctcatactaattgctcaagcaatcagcgctacccggtataaacggggccacccatcaagctggtcggctcccctcgggcgtggcgtataaccgcagaacctgcccgcaatagacgtagttttcgcgcgggctttctaagtggtatgggcgctttgacattatggtgggcttccaggatgtggttggagagggagaagcagggaagctgcttcatgcgactcgctcaacctcctggaagctgaccatagtattgagcatgatgaggtggtagagggtcatgttggcgtttgcactgtatattcagggggcccctagatggccattgctttcactagcggaagtaccagatcctgcaaaggtgtgtgttttcatcagatcatacaacctgtgtatcagctcctcgacctcctggcactgcatagagagagagacgagcggtgggttccggcctggtcgctgggaaggcttgaagctggttttctttgggcccgggtacgtactgagttatgccgtctatgcctcggcggaggttagccacgacatgctaaaggtggcaaaacagaagccgcactggggtctgagacacgtggggaatggctctgacgtcgcttgtgtcttggaagcatcgaatatatttgccgagagaagagaaataatactgctccaggaaataatcgttctctgccggcgtggtgatgatattgagtgtgattgtgtgatgccctgcatacaattcgtcgcggattgcagacgccaggtaacgtctggacttgggatgagcgcgtcgaaacccgcgatggagaggctgggggtggggggtggctctggcctgctgcaaccctgcttatgaacggttctaatcaacagttactgacagcgtaaacaattccaggaacaagaacgagtgactctcacctcgaaaaacattgcattcagataccaggcgggctaggtgctaggatgacccaactaaggctttccattcattatctcacccccaaacagtcgcagctgtacgcagcaatgcacactgtaagaactcttgctcagacgctaacttctaattttgctcaaacaggttgcccagcgaaatgcggcatagctcgagcaaaccatagccaacctggtaacgggactccccagccccagccgccatgggcccgtaggcgggatcaggagcaggaaaagaatcaggagatgtgtgtctttaaggggacctcactgcccggcgttagaggtgatcagcaacgcctgtttcttaccatcgcggtaatgggtggcgaagtccgagaggagtagagaaggatacagaaatagtgaaaatagcccctacctgcaggtaatctatgtttctagcctttacagcgagagaacttacggtggagtggccaagttgtctctgcatttacaaggctgggaatccatttacgaatgcgtgcacccaagcccgcttccaagttggcaggcgaataggctagactgtaaccactaaaaggaatagtacgagccctgaagtgcagtggcaatggccagttggcaaaactagtagccgcctgacttgcagttttgcgtgtgtacagcgaccttagccaagctgagttattatatatgctacatcctactgagaacatcaaagattgctgtattgataactgcatgaggctcctaagagactaacggcaggcagcattggtatcgccccagtaacgatcttacgccaaccttcccagcgatctagatgcgcactaccgtgtagggctgacttggaagcgtttctggatctctcaatgaggatgcttcttcttatcagtggggttatccttttctttgaccatttcctgtaggccatccatatagcattgagccggttatctggaaaatatgcaaattcgtatgagccacgaccaatttggcgtcgtttacgcgcgtgtggtcaaccaacaccccgaaaagcaaagctaaacacgcacagcatactcgatacctaaccccagcacccaaaacacactcgctatcaagcaggatgatttggcacgcgactccacccctgccggtccagcctgcagcgatgctcgcaggaacctccaaaagcccacaatgtgcccacccacagaaaaaagcacaaacggtactcgaagcccaccaagcacgcctccaaacagtagtgccagggaactgatggcaaaaagcgaataggccatcgtttctacacaatttcggtatcgcacggccatgctcttcacgccgactttgagatcctcctctgtgtcctgacgcgaataaaccaggtcgatcatgacaatcacggccgagaagaaaacgcacatgcagagcattgagaggatctggctcgaaggctccatacctaggctgtgcatggccatgggaattgcccaggcgatgttaatgaggatgagctgagggtgatcggtgaagcgcttcccgaaagggtaaagcagcgcgaagaagactttaatgccggcgtcgaataggcattctcgcggaagaaagagtaaaagcgaacaacctaggacgaagagacatgctgtgaagatggttgctgcggagagcgaaatggcgccacgggggagggggcggctttgtgtgcgcgaaatctgtcggtcaatgtcgacatcgacgagatcattccaggcgcagccagcgctgcgaaggataagagaccagagcgtgagcaggaggaggcgatccaagagtaggtcgaggggcagttttgtttcggcagttgcggcagtgtatgcgattccaactacgtagggagatgtgttgaggtaataacctagggcgcggtggatgcgcaccagctctccgtatggaacaacgccggtagggagatatctgagcagtcctgtcttgggatgatgtctcttcaattctgagatgacggccatttttttttctttcacaaaaggtttgggcggtggagagaggaggaggaaatcaagaggattgagcgcgccctggggtgttaaaggaacatcaaggccttgggcgatatagcgccgggaagcaggcggcctcttcaatatggcccagtattccgccgactcggaaataacggggatatctctcgaaagcctacccagtaaggggagataccactgacaagggttccggcaatcatgcatctaggtcttcagaatgccattagcaggagatctttctctccattggaaagcctgagggccatcatgcccggagagcctgaaagagcatccgttgtgtgacaacttctatcatcgttgatgcacatagcaagggtgaaaccaacttctcggcaagggtgggtgcttgtattatttggacccatagcttgctgctagccaatgaagcagagagcgtctcgcaagggatccttatgttatgagttgtgcaagcagcataagaaccaatgtggacggctctcatagctgctcagcgggctaggctcaattatcctagttactataattaatagaccgtagttagctgatggagaagagtagttgcaccacaccgatgagccacaatgagcgatacacctacgcgcaagactgatcttcgtgtgataatagtcggagggtctgtcgctggcctgacgttggcacactgtttagcgaacgcaaatatcgatcatatagtactcgaaaagcgcgctgagatcagcccgcaagagggagcgttcctaggcatctggcccaatggaggccgaatctttgaccagctgggcgtctatgcagacctggaaaagtgcacggtgccaatacacaaaatgagggtgcgatttccagatggggtctcctttagcagtgagctgccgaggcaagtccaagaaaggtttgttgcttctaaacactgtttgaacttgataccgacgggaattgtaggtttggatatccgattatatctctcgatcgccagaaagtcctggagattctctacaaccgctacccggccaagtccaacattcacgtcaacaagaaggtgactgagattcgacaaaccgaacgagaagcccaggtgctcacagccgatggggccgtatacaaaggggatttggtcgttggtgcggatgggatacacagtgcagtgcgtgccgagatgtggcgccaggccaaggatcttgttggtcggcgagatcgacaaggtgtgctttgcaatatctcctcattgttgcagacgttaatcatgagattgcagcattcactgtcgaatatgcatgtgtttttggaatttcgagccctatctccggcctggagagtggggagcatgttaactcttactcgaatgggctctgtgtgatcaccttccatggtaaggatggccgtgttttttggtttatcctcatcaagttacagaagaggtttatctacccatttactccgcgcttttcagccagcgatgcggccaagatttgtgccgagtatgctaatgtaccggtctggggggatatatgcgtgagagatctctgggggaacaagacgtcggtctccatgactgcgctggaagagggcctgctggagacctggagattcaagcgcgtagtcctgctcggtgatagcatccacaaggtgagtggcttgatgtatcaacagacggacagcaggatgtgattaaccagtgtagatgacgcccaatatcgggcaaggtgccaataccgcagcagaagacgcaggagtgctcgcatctctgctacaaagactatcgacttccgactcgtcggccacgagttgcacaatagacgccgtgctccaagaatacgcctcgctgaggtacgagcgcgtgaaaagcacataccaacgtgcgtactttggcgccaggctgcacacgagggacgacgcgctcaaggcctttgttggccgctacatctttcctcgcttcaggcagcaggtgcttgagagaacgtcgcaagccattgcaggtgcccctcaggtggatttcctgcccaccccgaagaggacgggccctggatggagcgactacgccgggagcccagaggttggcgcaccgaccctcccttggctggtgatttcgctaccagttttggcttcaatgttatgttatctagtctactctagcgtatttgtcacgccaatttttccttaggtcagaacaggctggaatgtgctatgtcggatggaaaccatgctggctgggatttttttattgctattccatgttagacacttgaattacacaaagcttgacgagtgcacaattgctgagactatcactggggatggcaattgcagtcattctcaatcggtaagaatgcgtatcccctgcttaggcacctgccacatgagcccgtttaatgtcgtaaaatacataaatcttactgaaatgcctcggatgccgcagctatccgcagcaagggattatttctgaggcccaaatgagaattctccctgtggttacatgcgatgatcaaacactcgcttcgaataagacgtcctccaaccgcgatgatttcttcaaagcttcaaatttgggactgacaaaggcacggataactcccgaggtctcagcgttccgtatttgcctcatctttcagccaatcgccccttgaccaaagatgcagtccagcctgcttggccgaatgacaggcgtcacaggcagcagaagcaagcgccacactaagtttcgccttcggcgtcttcagcaaccgcccaccgagtcaaccaccagacttgcgagcccggacgacgcccaacccattgaggagacgaaatcgcaggagcacctcgagcaaagtgctactcagggcctaagcgaagcatccggtgataacaatgcagggggtgcccatccaacgccagcgccgaacgagggagatgcgcccacggtggccgagctccaacatggttcaaatgaccgggtcgacgacggcacaagtggctctggtactgtatcaggctggaaactcgccgctgttctcattggattatcactggcggtgttctgcatgtccctagtacgtcctggaaccaaccacattctccgcatcaaggatgtactctaacagatcaatgtccaggacagcacagtgctatcaactgcaatccccaagatcactgctgaattcaactcgctacacgacatggcctggtacgtgagtgcatacaacctgacgataagcagcttcagcctcgtctacggcaagatctacagcttgtacagagtgaaatgggtatacctgacaacgctatttttgtttgaagccggctcactagtctgcggcgccgcacccagttcccttgccctcatcatcggccgcgccattgccggcgttggtggcgcaggggtattcctcggctccatgcttattgtccacgaaatcatgccgctccatcaagtgccactgtttatcgcccttattagcggtctgtacggtatcgctagcgtcgtgggtccccttcttggtggcgtattcaccgactacgtcagctggcgctggtgcttctatatcaatttgcccattggagggttgacagcgtttatcattgttctgttcgtcaggccgcgggtccgcgaaaaggctacagtaaagaaaaccccctgggcgcagttgcttgatcttgatcccctcggtattattctcatccttcccgccgtcatgtgcatgttgctcgtacttcaatggggtggggcaaaatacgcctggagcaactggcgcatcatcgtgcttttggtcatggcgggctctctggcgttgacctttactgctgtgcaactgtggcagggcgagagggctacgattccgccacgaatagtccggaatcgcagtgtctggggtgcaatagccttttcggtttgcatttacggctccttcacggtctttacgtattatgtgagaacacccccttgctactgaatccggatgctaacatggatatgtgcttgccagctccccatttggttccaggccatcaaatctgtctccgcaacgcgctcgggggtgatgaatcttcccatgatcctcggcgtagttgtatgttcgatgctctctggctggggcgtcagccgggttggctactacgtgccgtttatgtacatggcaccggtggtcggatctattggcgcgggactgctcacgacactgcacgtcttttccggaccggctgcctggatcacataccagctgttattgggcgtcggcatcggatccggcatggcgctcccccttgtcgctgtacagactgctctccctaccgacgacgtctcgacgcgtccgccatcatcacatttactcagtctctttcgggcgcgttatttaactttgtggcccaaagtgtcttccagagtcgccttgtgcataacctgaatgcggcgcttccaggagtggatacggcgagggtggctgatgtttctccgagggagatacgcaatgcaattgagcccgagtacctccctcaaactctggaagcatacagtctagcaattacacaggtgttttatgccggcactgcgctatgcaccctagcactgtttggggtgctgccgatcaagtgcctgtccgtcaagggatcgagaatcccgcccatggcgcatgcttgaacaagggctatatggactttgagacttgtctcgtggctttttcgttgctggtattgttttctatgctcttgcatatccatcttgtacaatatgtaatgatctccattttaggtggcacattggcattcagagtgccagaatacacgttatcaataatgatataggaatacaaggccacgttatctctggtggcttgactatacatcgcgtagttctagaaggtatagtggggggaaagaaaggacgacaggatgaagaatacagggaggaggaagagatctatcgtcaacaaggcagagaatcgatcgtcatatggcgtccgattcttagtaggctacgttcgtgtacttgatacagtttccttctggcctttcccctctgagcattcacaacaaatagaatcaagttatcaacaggaaccttgcaggtacttgttttgcgctggaaataagacatctcgtttgacatggccctgtcgtaacccaagccatgtataacttgcaagtacactaccttccagtgatccttggtttttctttgtcttgtacgccagttaatctccaaagcaggccttcgatacaacagatatagcgcaatcaccaattcttcacttttcctgatttcccacccccactggcttcttcatgccttctggtcaattggtacagcaccggatacgacgcatccaatgagagcacgatccctatataaaaccagcacattggactgtcaagccatggcgccccatcgacctggtgctggaagcggatgcagagttttacaaacccgccggcggtggatatcgcacgagccccccttttgatcattgttagtagcaacgcgaaccgtaaattcatggaacttaccaaataagcaaactggctcccctcgtatgcccacgggtaagcagctgcccaacggcggccgagctcgagagaaactggcacagcgcgccaccccaatgaaagcccagcgcgccgcccatttccaaagccaggcatagctggccggccgcaaacgcggcaatcaccgccgcatacaacagcaccagtcgtcctcggctttcacccaatggcgtgcccgcccagtcattcggggcgtagcgcagggtcgcggccaggacggccgtgtgcaggaaaaaccacacgcgcacgacgccctgccagtggccgctggcctgtggatatatcacgcggtaggtaaactcccaggcgatatcgcagcatagggggaggacggcgatggcggggagtttgtcagcttgcgtgcggtagaccatggcgagatagtttgtcgaccaaccaagcgcggcgaggatcttgagcatttcggagagggagagtgcgctgaagggttcctcaatgatcttggagattgttagttgagacatggttgtgcgtgttgtggtgtgtcctgaactgcgatgagtgctgcttcagcatgcgataacacggtatcctcagttaattatgaacaaagctataagcctaagaccacggtcgtgctacatggcagtcatttattatccgtggcattatgcagggaatgtttgcgcaactagctattgatgccctttgctaatcactgcaagtgaggagtaaataatgcataccacagcggtacacccataacatcttccgaacgattattggtcctggtgaatatgtaagattgcaggaaatttggcgctctcgtcttaccatcatccgtcgattctttgctacaactgagtgtgtgggaaagaataatgattgatttccagcatccctaggtcgcagtgccttgcctatcacctaaatagtcgaccacgcgttatcaacaggaatgactgcgcaactgaccccctcctatgctcattcagcaatagaatatgggcaatgtttatgggcaatattctgcggctggagttcaacgcccttttctttgtcacagccgtgagcctgagcaagctgcccagagccagcaggagaatcgccacatttgctcttcctgcaaacccatatactcttttagggccgccacagggtcctgattgttggcggaggttttaacggaggttttggcggcctcctattcgccgtgcacctgctccagaccggccagttcaaggcgagtaatatcgccattgcagatacagccgcagggttctaagggacgtggtactggaatcggtacccgggttgatgtgcaacacggagagttatatttatatgccgctcctagaggagacaggatacatgccacgacacaggtacgccagtggcacctagattcgcgaacatgccgagcgtattgcaagcattggggactagaggcccgggccatgttccgcaccattgtgcgaggtttggcgtgggacgaggacaagaagatctggtacgtagctgaccagctgcttgaaaatgtatcagatacaaacaaggcagagagaagcagttcaagacattgtcctcctctcctcgggctcttttgcaagtcctcgtgtccccagctacccggatatcaccaagtacaagaggaggctcttccacaccgcacgcttgggactgccagttcacaggcgagccattagagatttcaaagctcactgggttggctgacaagcgcgttggaatactcgggcaaaggcgccagcgctgtccagatcatcaaccacctggcgcggtacagccgctcgctggtcgtattccacggactcccgccgccgtcaatgaacgcagtaatcgccctcaccgacccggcatagtagaaggaggagattgcgagtcagggagcgggctggcagcagcgaccgcagaagagcttcaacgccttcacttacaatgagacaccgctccctagagctaactgtgccggcgacggctggacgcgcatgcgatcgttcataaccgtggtcaggcttcttttatggcttgtattgactggcggaatttctacaaattcggtaagatccaggggcttctaggaaatgcgagcaggatccggcaagatcatgaaggggcttatcaaacccataactgaacgtatccacctgtcaagcgacgtaaggaagaatgtcccagacacccagagctatgcaaaatgcagacgctgaaacctattattggacggagatcgtttttccttgcaaaaatactaatttggttcacattgatggctggctttactgaaaggaatggccgtgtaaccaaaaccctaccccatgcgaacgccaaaaacgacaaagacgccgaaacaaagcacaattataaaagtggaatgtttccgtacaatgaccttcccactcgtactctctcgagccgtgtccctggtggcaggagtagaccgtacccaaccggcgagttgtgtcacggcctaggcaggagtagcccttgaaacagcagaggtcgctgcagaagccgctggagtcgagattgaggttccagcagtggccaccgcagggatgggactggctgctggagtcacagaagcctcagaaaccgtagttgaagttgacgatggcagaccgccaacttcaaggaacgcagcggcgaatgcatcagcattgaactcggttcccggagcaaacatgccccaagtaggataaggtataactggaggagagccaaacacgtaatcggtgaccggtggcacgatgccttgctcattggtcccggcaacttggcgcgcctggaggttatgcatggaggctgctgggttcaatttatcactaccaatacggcttctggctagtgctggaggaggatgatgatgtgcatgtattgaagcagggggttgtaatgatcatcacctcacttaccgtcctgagggccgttggcaagctgtcctgcgggcaaagcagcggcgccgcccagcatgccgactccaaggagcgcaactgtagattgcttcatcgagatgttttggtgctttcactgggcgaaaatgtgtctaatatgtctgagctggataatataaaagccttgttgagattttagacaaggtttacggaagctctttataccactatcgaagttggcgccgtgctgaaaccagccggtctaccaagagagattggccgggcagaggcctacgatgccgttctcacaagttacaccagagtcctgaacccggtgagcctccaagacgggcaacccactctcagagtgccaggcctactgcgttcgcacgcatcgtgctcctgtctcggcggatgatcaccatccgggattgaattcgttcaccccaaagcagtcaatggttgctggtacaaatttcagcatctccagccttcacttccagtctgtgcgcccggtcattcgtcgcttgcactcgacgagatattggcatataataagttcgtctgcacagtgctggcttttgccaacagacataacagcactaattttggcaataccattgtccgtacaaggtattgacgtttctggttcaaatcgcaggcagacttgcggatagcgcctctaggcatcgaataagctaacgagacaatttcacaacatagtattctagctatagcaaaaaaaaaataaaataaaataaaataaataaaaatataaaataaaaaaataaaaagtaggagattagaaaaggatattccaaagttggactagagcgcaacatgctgcctggggatccgacacgcgaatccagtaacgggcaattggcgcgacgagagcctgggtcgaaagtcccaaaaaaaaacggtaccgttactttgcgtggtggagtgtatattcatggtgtggcttgaccgatgaagtgaagtgtcgttgggcgccatctggtctcagatgtgctcaacactggctaagaaagatctgtcctgctctgatgatcatggcgtgtttttcattttgcggcccctcgctcttgagagcttcggccccgtgagcaaccagttggcccgcttggccaaaatggactcgaccgcaactgcaatcagcagattgctcgaaactcgcaagccatatacattagacctcggtggtagatgtagacttttcttgattggcagttgaaatcgatcctttgcacagatgcgagcaactgattcgtggcaggggtatgatcagaggtatggaaccttccacgtagaaggacgctgttgactgacatactgtggctcacaagttcctgtgtcaaggacacgtagttttcagtagggactgtaactgtggcgcgtttgtcttggtcatgcacgcaatatatcctgttttatctcgtcagccgccactagacgtttgacacggtcaaaatcacaccttctaccgctgaagggcctccccaagatgtctgtacccacattgcatctctcattacacgcccataagcacaataggggaccccgtggggcatcgactggcctggtactgttatccactccgtggacaaggccagctactctcgatattttcgaccatccagcatgctggaattgcaagaaacaggccgacgcacaacgcttacacctgtctaatctaaacgttttactcttttctttgagcttt

SEQ ID NO: 5833 - DNA, 7769 bp, Emericella nidulans
aaccaccatactgtatgcattcaggcaacatagagaacattcaaccatgcgatcgaaggacataccccgcaacagcggccatactcagattcgtcctatccatcagcgaaacgcagtacgccagtccagtgatcgtgacaaggcgcagatcgatccgccgaataattctcttctgctcctccggcgagaactcctcatcgtaatcgatgttgttgagcgcagcgtgccctgcatcctcgactttctctactgttggggagtatttctcatctcggccgagtgtattgctgaccgacatagctagcttggtggttacagagtagacgagcttggtgagtggggtggaattgcgattgaaattgaacgggtggtctatcttttgcaccaggacgcgaaggggtctatatatacctcccgcagccgagaccaacatggatcatgaacagcgtccacaccgacaagcgacaacccactgtgttgatgcccctctatgttgcacacagtctaggataagcttgggggtctagctcagatccagctatgtgtcatttcccaacgatggtgtggtatagcatggcccaaacagcgccgcatcaaccgtcaaccgagccaataacccatgagcattcggactgcccatctctaatagccggctcgggtggaaaagcgcctcggcgagggctcgagtcagcaggaatgccggagcctagaccccagagccgggctataattggcgggtacccccggactggcctgggttaatgcggggggtggaatctccaccactactgggacattattaccagcccgaatattgttcttgaatacgtactactccttggggtgggtcgctgcgtacgacctcaggtagagcagagaaagatgccccggaacacccgtatcttggcgacttggcgatgcaaactcgatttcttttgtttgattctaggatgctcgattggactgggaaggaccatgcctggtttgactttgcttagcgagatacacgaggatgacagctgacttgagaaccttaaccatcaactgccgctccaatcagctttggaatcggtttcgatcatcctagggacaagacttccagagctgaaggctgggcctgttgttcgttcgtgttcgacattcgcagttgggactgggcagtgagataatagctggatgtcactggacggtcggatgatcctggtggctatattatattatccttgaactaaggaaatataataagacaataaataatatacactcccaccaccccagcaccagtctaaaccccatgtaatgccgaagggtgtactcagggccctcggttccatgttcgcgtctcatgcttgacttcaccttcatttacgtgtagctaagcgggctctcctcccgcacaggaatcagcctctgccgttcgccatcctccgcttcttcccgctgtttcctaagccggtgtcctgcagtcgccacaaaagccacgagaatagagccgacaataaatcctgcgcctgcgaggatgatatttatcgggatagggttgccatcaaatgggccattggttagggcgtcaagacctgtttgagagaagttaatcagaccagacaggcatacgattgtcccgtagacgcggccaaacgtcgcgaagccaaagaccttggtggcgtagtcgctggtaagggcagatgttagtattctctggatgtcatagaagacttggcgaacttacgacatggcggagtagtacagcgggcggagaaggacgaagaggatgacggtgaaatagcccgtccagagagtagggatggaattgagggcgccaatcagcgtggtgaggaaaactatcagggccagtgtacatgggacgctgagatggtcgagcagcagtccgataaagggggtggaaaggacaccaccaacgggtaaggcgacgtcgaagaagttgttgatctcgatgcctttctcctcgtcgagcatatattcgtactggttacgaatggtggcgataaagtagttcatccggagcatctgcaacactgtcattatggtgatgagtatgaaccagggcgtcgccatttgcttgtgagcgggcaagccatgaagaacaccccagacagcgctagtctgctggcgctcttcttcctgctgctcgcgatgcttccgctcttcttcgtctcccagaacctgatccaattcttggattttcaagcgacggcgctcagccctctcgcttcgtactcgatggagctcggtcaaactgtcgatctcgtcgtctgaatcgtgaacatccccgtcgcatcctctgccttctcaatccgaacctctaactggtgggtcgtctgataatcgcgcgctggcattaaaacgatccaagtgataaggatcaaagccggaacaatggtataggcgaggaagaatttgtccggggtgaaagtgccattgctcgcttcgaacacaagtctatagaacagatagaccgcggccgatgcgtcaaaagcgcccgtcacaagagcgacaattgttccagtgtgtttcggaaacgcattggcgatctggaaagacgggacgaacaagaacgtgccgccgagcgcaagaagaaagtttgcaacaatgaagccgtcgaactgcgacgagaacgagaaagacatcagcaagctgccagcagccagaaaaaagcagctcgcaaacccgcaaactcgcgacccgtaccggtcgagcatactaccaaccggcagcgagcacacgttagtcgttatagagccgacagtgaaaaacaggttcaacctgcaattaaacaggatcagcctagtccgatatgcgatacgtggtgccacctacctcagctcctggtcatagcaggtatcgaactccccctccagctcatctgcaggacataaatcccgatatactccttgagcgataagcacaggtttcaacgctgcgtatccaaagattattccggacccgagccagcaggctaatatcgtggcgaaaacctgggctggggacgttagcacgcgccttcacctcgagtggcaaacagattctgggtacgtacccagtcgcttcgcggtggacactttgtaaggggccgtcgtcgtgatatcctcgatggctgagacggactgggggaagaaatcatagctgatctttcgcttaatcgacctcgaggtattgtaggtgccgttggtggactcgcgctcatcttgagatcctggcacagcatccacaccctcgagtgacgacacatgctgcacgagggacatagtatggcaatgggagaattaatcctcaggtatagatgtcagcccttggatgatgaggcctaagcaattggggtaaggaagaagcccatggataaataggttgtgtcgtgggtctcgaaagttccagtgcggagactcttctagactgcccgctgggccaccttccaaggcagagtgcatgcacgataagccgcttctacgataagaatactacggtaacagtgtatatatagaccacttactagtggtagcgataggtagttgattctctaatattgaatcttgttcgaaatgcgcctaattggatttactctagcagtcgtggttagctggcttgcggggtggcatgacagcatcaatctatataaagagcaatttattcactatactataccgagttagacgaatgggtctaagcgacgagaagattgaataataatatactatagagtagactagctccagtcatgatttaaagcttcaagccctgattcccacttataacaccgccctttaatcctacagagcagctgtcagatgacatgacgtactgtataacacccatgacgtatgctataccatactttttaaaatctggtttatccaaactcccattcaggaacactattttctctctccacaagaaagaatagagaaagaataaggataattcatgaaaacaaactcctgagatggcttcactcactatcaatgccccaggggcgcggattcctctactctaactcgcgaaacgcgcgtctcatcatcactgctgaaaccccagacttcgataccgagttcgtccaggcatggtcaaaggagggattcaacacaatctacatcccttatcatgaagacgaaaaggagtatattcgtcgcctgatggcggtcaaagagggtctcagtgttggcgacaactacggtgttatcggtgagctagaaaccatcctgtagtatcacccgctctgacgatcgtagcattcggtgacgccgccgcattctgtctcgattactatctcaaaccgaataatgtcagtcgcctgtgcgcgctcatctgctactatcctaccagcatccccgacattcggtcgcgatacccgccgtcggtgcagatactaacacacctcgctggcgataccattgacgtcgtcacgacgccgacccttctgggactccagggcaagaagaagagatcgaccaggcgtatcaaccccggaatcgggacgggagaactcctcgacatcggacaccgcgcgtacacttactcggacgcccagccgggttttgcggaagtagacctggatgagtaccaccggctagatgcagacctcgcctttacgcgcacgcttgaagtactgccaaggcgtacggtcgggagggtgatctggagcagccgtgggaggagcatttgcagggtacgttataatcttccctattcgattgcaatccatggctaacctgcggacaggcaagttcttctccatgaatcttagcgatacaatgtcccactacaccaagaaccttacccccactgccacctatgtcccaaccctaagcggacgccacgggtcccgcgccctccgtcggttctacgatcagtatttcctccacaaactgcctccttcaatgcatctccgcctaatctcagcaccgtcggtgctgatcgcgtcgtcgacgagctgtatgtctcctttgaacatacgcaagagatcccctggatgctccccggcgttcctcccacgaaccgcaaagtcgagattgttctcgtcagcatcgtcagcatgcgcgcgaaacagctttactcggagcatatctactgggatcaggctagtgttctagtgcaggtgggcctgcttgacccgaagcttgtgccgaaggagacgcaggagaagggtgttgatcggttgcctgttattgggcgcgaggctgcgaggagaattttggatgaggacccggaggtagaggagccagagtttcataatcggttgatcagaaggtcgaggcagaggagggagagtggtagggttgccgagagctcggtgccgcagtcgcccattgtgcagtctgaggcggaggggtctgggccgaagaaggggaagagggccggtcctcaaaatggggagcaaaatggggagaagagtggcattcaggctggggatgatggtgaagggttgaaggatggtcaagaggatggggatgcccacaacagccatgttgaagagcgggacggagctgaaaacaagaaggaccaggagaaggacaagaacgagctcaactctgaatctaattagtgactgcataccccaaaacacttcctcaggattttatatacccttttaatgatgtctctgacacttttctgacatgagcttatgttgcctttagcctgacttactatccgcatcttagtatttgcaatgattcaattaattcattattcactgatactaccaccccttccatggcacccaagcctcccgaacaacatcttgctcatcaacaacataataagttggatacgccgctgctgtaatgcatgcatgctggcaataaagaagcaccttatcgcccaccttgaaggaatccacagccttctcatccttaacctcattcactcccaacaacgacaaagccggcgccggcgaaagtcctaggatgccgtgttcctggctcgttcgcaaaacagcccactgcgggcgctcagtgactcggccataaccggggaactcgctcgtctcttttgtgagtgcgattgtgcctgcattgatcagagcttcattgcgctcgggatagacgctgcaaacttctgctaggacacggacggattgcgcagtgtgagggacaaggccggttgagacttgttggaggtcgttgcaggggtagtttcctttgctgctctcagtactggtttcaagacgtaagaattgggcaggtgcagacataccagcatgtaactctagctccagcccctcaggcagaacctctcgaagctctctaaccacatgcgccgtcggggtggagccaaccgacacaacaactttccgcccagttcccaggagcttcgacgcactaaccaccccctcaacctcgtccttcagcacggcaaccgcgctttcctcagtccgacaagcataggaatgccctgcatggcagtagaacccataaagctctacggcagaggattcctcaacgcgcttcacgagatttgggagagcagacgaggagttgagaattccagctctgcggttcccacatcaatcttaataaagactggccatggtgctgtggaaccactaaacttctccagtacgtcgatatgctgctcattatcgatcatgaggagaattttgagagatttcgagaatttgaggaggcgcgggaggacggttgggtagatcggcatgctgtagaggcactttgcgactgttagtcttctgttcccatgattgaagagctgagacagacctcgtcaagaactccctcttttgccaggggaatggcaccctcgatctcggggagagttgaggcgacgatgcgtcggtgctggccattgccgagcatcatccttgttacttcaagagactattgatattagcttgcgaactgcgctttggttgaatggctctgtaccttgagcgtcttaacgtgcggccgaaacgcaatccccagcctctcaacatcctgaagaagctgcttgatgtttcgctcaatggtcggtttgctcagaactagagccggagtcggtagctctgtgaccggctttccaatgtatgaatcataggcgtccatgttgggtttctgtcgagataattttgagttggagaattggagactggcgatgcgaggggcagcggggttttatatgtccttatctattctgaggtctccgcaaggggtgctggagcattccaggccacagaaagatgatgatccacggtctttcgtgcaccgtagagatattgggtatagtctatagtggtaaagacagagcgtaactatgggcagtacagagttccagataggatccccacaccgtatttgtgttcggcagaaccttcaaccgcaaattggttgattaaggtcgcaagtgctgaatacttcaggtcgtcttttcagattaatttgcatatgccctttagaatccagacctcgcaattgtgttgcgagaagctcgctcaaatcatggacactaagttgctggtcagctggcccttacgacggggtctaagaaaaaaagaagaaaaattcctgcgcaaataagagccgagacactcgatcgaccatgagatagacgatacgactccaaccgcaaccctggaagatatgtattattgatcgttgacagctttcgatgaggcgaatatgtagagtggcggtgcggggaaggaggggtgccaactgaagtcatccaggaactcaaccagactctagaattcgcctccagagaaattgcttcagaaaagctttccatatccctccaacaatcataatagtactccattg

SEQ ID NO: 5834 - DNA, 8890 bp, Emericella nidulans
  unsure (1)..(8890): unsure at all n locations
ccgcattctcgctgtaatggtcccgccgccccctctctccagagatttagcagatgcaatcgccttgctctgatggatcccagtccgacaatgccggatggcgaaagtcgactgcgcgtcctgcgtgcctgtgaccgttgctctcagtccaagcagcgctgtgatggccgacgtccatggtacgtcccatcccatctcagtcccaaatgtccccgtggctaatagcgcccagccagcgatgcacgggttggtggcttttgaccccgcactggcttgaaatctggcgtctaggcgactaacttgaattcgccagagagaaacacctcgtgtcattatgagaagctcgtccgaaaacgaggtcggcgccgtcgaacgaagcccgctccgtctgctcacagagccctcgcacctggtcctcccagcttgcacgacctgatcaaccatacagagctgaacccttcaccagtctaccaggagaaagggccagacgaaatgcagcggcggaacaccaactcgttgagcagtccttcgtacaccgaagacgattcggcacaaacagtagaaacaagaggcactggggataggtccgtcctcgttgaaaaaaacgaccatcttcggctgggaggcggcctgcacacggccgaagggcagcgagagtctccattcgctcagcttcttagtccgttccctctgcaggaagttctctttggaatgccagggcgcccgaatagccaggctgccttcacgcctccgatggtcacacctccagttgaacactggctggataggacaacgtcctttgcgccgagcatcccacggagtatatgtccgtcaataccacacaatcctcatgaagcgctcggacagggactggttcaggggcagtgctacccttgcttgcaccatctgatgccctatctaaaaggaatcctctctccggaagatgcttctgagatgctggagatctattttaacgaccaacggaaccccatcttcaaagcctcttcgccatacacgctaacccacataatacacccatcctcaattctccatccaacgtctccgcgacctacgtcttccgtcttgcttctggtcatgctactttgcgtggcgcacactgcagatatcaagatctttgatcctcctggtgcacgccagcgcatcgtcctagacctctatcgtttggcactggacctcttagagccggtggattgggacaattacttcaggacatcaggtacgtcgtccgcaaaggtcaatatgggtcgctgactattctgtagacggttggcagttccaccctcgcggaggattcaccgacaaggacgggcgctcctcggtgtctcacgccgccaggactgggctgatacccgacttcctagggtcaacggatgtcatcctcgcgatcgtcatccttgcccttgttatatctggcggccatttcaaggctgactgtctgaaatggtggtccaaggctgtccggcttactcgggctagtgggttgagcatggaagaccagggaatgcagccggggagcaaccctagtcaaccacatcatccgcacaaatcacatcgcgagtgggtgattgcaaaagaagaacgccggagactgttctggctgatctattgtctcgaccgtcatctcggcctctcgttgaatgcagccgtgaacttccccgagggcacattctgcgtcgcagagccactgcctgaggcgatatggcagaacttggagacaatacctnttacctcaatttccccacctcgccttggtccttcgtcgaggatatcggggtacggcttcttgagtactttctcccctggcgactgtgctgggtcatattattgacctccaccacatccaacaacatcccctgctaggcgacactataagccaggcggccgtccataagatcgaagcgctcatatcccagcgagagcaggatctcgcggagctgagggctcaactcgagaatccgctgctcagtcaacgaccggtcgatctattcaacacacatagtccagtatcgaccgttgactcgaagaaaccattggtcattgcgtacagctcccacatgctccacgtattctatatcttgctacacgggaaatgggatccgatatccatgatcgaggacgaagacgattggatcacctcggatagttttcaagcatgcgcctctcatgccctcagtgcgacagcagccgtgcaccaaatcctcaccttagacccagagctgaccttcatgccgtacctgtttggtatatatctactgcaagggagttttatccttctgttgttcgtcgatcggatgcccgagctgggtttcaacaagtcggtcgaggaagtgtgtgagaccatcattcgcgcccatgaagtgagtgtcgtgacgctggacaccacattccaggtatggcttccttctcatccatgaaaaagaccagtctgatgaagccagaaaaacatccgcaaggtatttcggtcgatgctgcatgatgcgcaacagacggatccacagtttcgggaaacgcacaaggcccggagaagggagattctgtcgctctatcgctggacgcggacttcgcatgggctggcctattgagtcttgatccctcttttctggcatgatgttgggtattaaccatatcaggcagggcctggagtattgtcccttgctatttttgactgactcgtgtggtgcccatcttctggaagcggctggattgacctacaatgccttattgaattggtcaacatgagatttcttcacggctcctaaattattgcgaagattttaggataagccaagcgcctgtgaagcatgagcaacaggtctagaactcgcacccataactagcagagttctttgggagagcagacgcatagtccctcggccatgccgtctactgagtattctacacctagccatggaccaattctcagtcagtgtttgcagtgaacggatcattgcacattcatttcacaacctgtgctcctagacgacaagaccaccagggcacagctaccagatatatcacttactcaacgtatccaagcaagtacttcacaacgccaatacttgtgagtacccctactggtatcaagaagccactgctaagcttgcatctcagtggtgatgagactgcagccaaccctagtcgaactattattccgacgccatcgtacacaccgcgaacgcgattcattcagcataggatcacattccttgttaggaagacccaaagacacaaacccgatcattcaccattgccacagggcttgtactgagtttaattccatcatcgcagcgcgatagtgaggagcactccagcatatcacagcgcttcctcgaccttcaaaactgatgttgaggcaggctgccgggcggtttatttctttcagaaggcctagcgcaactaggcgctcggtctttctagcagtagtacgaaaagggtcgaatattccttttgtcccgagggttatcctaatatgacctagacatgctcaaattctcctggcaaaaataaagagattactcatgccacgttcaggcagaaggaaatgtcctaatcactcggactgaggcgcgccctattgtatgggaagacgtgttgtggaggatgctgatgattttcaatctcaatttagggtacatgctactagcgacatgcaatgcgctcatactcatatttagcctaccgcactcgtttaagcctcagaaatcactgtaagggaccagcaaaggcatcgagtcctcccagatggagtccgtcaacacctgcttattccctccgtctgcatccataatcataacctgcccatacggctggaatgtatcatcatacagggcgcactcgtattggaacccaaacatgcccgttgaatacatgatccgtccgtcatagctccaaacggcgtgcgcatcatttcccccgctactcgtcaggacctcgagatctgtcccatccggcttgatcgtgcaaacatcatagttgtaaacacccgtcttgcgcgtgaaaacaatccgctcctcgaaccctgcgggcgaaaagaatgggagattgtcccactcgttcgtgagagctgtgatattacgagtattcagatccatgactctcagtcctagctgacccgtatccccgttcgtcgagttggcgccccagacacggaagacgatcttgctcccgtcatggctgtaggaggggaacccggagttcatgatcgaagtgttcgcaatagacgtgttagatgcagtcaggacttcatactcagacccgttggccgtcgcccgcacaagccatcccccggtcgaagcccgcgactggaaccaggcgccctcaccgaagacgagccactctccatccggggaccatgacggctggaacgctcccgcaagaccctgggagacaagagacgacgagacaagatcactcttcgcgttgtcgtatgccatcctttcatctgatgcatcaggcttcaccgttatgatagatgaattgcccagctgcttctctgtcatggcaatacgattctggttcgagatctgcgggaagacatcggtgaagcggtaatcccagtcctcgttccaagagtagagctccttcgccataggccgtatatcccagctcgtcttctcgtacacgatgtattgcccgtttggagaccatgccggggagcggatcgttttgttgaggtagacaccgtcggtcgtgtagatgccttccttcgatgtccccttcagatggtatccgatcgtgttgttggagagatactgcgggaatgccttcacgccgtcgacgtcgacttcaacacgtcgatctttgccagtcttgaagtcgactgagactatgattgagctggtgctgtcaattgactccggtctgtgcgcgccccatgttgcttctctcgtcatctcatagtacacaatccgttttccgtccggcgaccatgacggggagcccagggagtagccaggtttcgtggcgagttgtctgaatcccgacccgtcagcacgcacggcgtagatcgagagttcctgcgtatgctcccatccactgataccgagatatgtgtcgtcgccgtgtccccgccagtccgtattacggtccgaactgtatgcgatccatcgcccgtcaggcgaccaggaaggtcgaaagtacccgttcatgagggtctcgtttaccgatcttcgagagagcggcgtatcggtgacattccacctcttcccagtctcgatgtccaaaatccagatattggcgcggtatccgttctccgtcgagacgtacgcggctaaggtcccgtctggagacagcaccacactgtcttccattgacggcgtggagaggaggagctggagatcggagccgtcggggcggacgcggtagatatcagagttcccgtcgccggagcgttcacctgtgaatgtgatccagtcgcccgagggcgagaaggaggcatggtattcgtagatcggattcgggagcaggggacgctcggagctgccgttcgcggttgagatgtacagctcagatgtgccgggagcgatgcggttcatgtagaacactcctttcttggtggagttcgtcctggatgagatagatggggattgaggggcctgcaggtgtgcaggtggatggcctcgtggcgattcggctgcaccgcgggcctcgagaccgagctgactcgcatagggacagcctccaaggacgggaccagctacgaaactgagagaaaggaggattccctgccaccgcatcttgcagatatgtggttgagggagtgtcaggatcagataagattgatttaccccctaatgtgacgcttgtacaaggttgtgcgcgcaattgcatttttataccagttgatctgcgtcttgaattacgcgagagaggaatgttctccgagatccacctgtcaagattatctcggagttaagagtaaacgactgcctgggattgattgataaagattcactgtccttggcagtgggactagaatcttcagccaatttccccacagtggtgctgtcgatggaaagccactgtcactgttggcgtctataagcaagagctaactctgttctatgaggagagaagggttgccgtgagggaagtatacctgttcctgctggtgcgtcgctgataagtggtctaccatcggaagctggtcgagacatggaaagcgtatctttgtaccatcggcctgcgaaagcgtaaccgtaaatgaacattagcatcggcatttcattcgcggagtccagtcttgatctaaaaaagcgtcgtctgggcagtgtatatcctggcagacattgccctccgcccaccttgaacccggtacgtcgtatgcattattggttagattcattgcatgagttcgtatgcattgtctcgtgctgaaaacaggcagcagcgttccgctctaccgagcaagtatacttgacagattttttggaagggtattaagaatatgcctaggcaatgctaatttgctagctctgtatgtatgaatacgcttacagtacctacttgcggatatgaatagcacgagtttgcaattgctcatcatagtttcgtaaaggctgatatatgtggtgatatatatctggtcctttgaacattaggagagtcacctttctccttcgtcagcttcattataacagattatgaacctttttgcagcttctcaatctccccaagaaagacagaaatgactgacgtttgactccgacagattaggctacagaagaatgttgcaaagaaagaccgaccaacgtacggtagtcgacgggagacgctggagagctcgagcatgctagactaaaatcgagaaagtatcgatttatggcagagtagaaggaggtagggtgagtacaaagagaaatgagaggaatccatgcttaggtatgtcctgctgcgagatagggcagacaaaacctgtgagctgtaaggatacccccaatgctctgcttatttgcatctatgtacaattattctacatgcatgatcggtgtgccacctagccgaatgacaaaacgtcttcatctaggctcatccgccactgaaagaggattagatattcagtttaaggggccctcagagaataacggagatctgcggagtctgccttgctcactcattgcatgatatcccaccgcaggtggaaaggtaagtgctgcagttgaaggagacttgcgcaggaacatcgcgctcaaccggatctgctgcaaggtatcatccgtttgggcctatcgagcgagtagctgattgaccaccaatggcatgaactgatcaacggtgactatatgcctgtttagatcttctctgccgcggtcggaacagtttagctatctacttgcatcgacaggtgcattgcccattccttctatcattcactagctcaaacaatttcccatgaattatttcttgatactcgtgatgagtcatagttcaactttgtcgaactttgtcgcctatttagtgtctctcaccccagcgccgaaaactgccctatttaactttttccttttctttttcttcagccgtgatcgacggtttgattgagaactgtgtcaagcaaaagaccctactcatgaatgcaacaaggatagtgacagttagatgagttgatcaacaatcaatctgcagcctctttgttatcctcctatggcttggcggcagatcaggccaaccatctttatactagggcaacatcagcatcattgctaggttaacctacccaactttggccgtaattgcttgctaacgccggctggcagcgcagcagctacataaaacccgtttgactgcaacttggattactccaaacaatccattcaacacaattcatgtactcttgtagtcgagtcccttagtcatcgttttgttgtagtcagctagagaaccccagcattagaggatgtcttacaaagtcttgaggtattataggtcaccagcaaacaaaaaatctgtataggtgtgacctgggcagatcagatcatggagctgatcatcgtgggtcttttagtctagttggaacatgcttgcggacacgttactaacgaaggatggccccatcaatacgacaatctgggtagcctttttttaaagcaaactagcttttttttaaaagataacaaatatgaagtgaatctagatattgctccaagcatggcaaagtctgacataattccatgccctcaaatgcttaatcctggtgaaagaaatcacctatctcctaaagcaaattcagttcaagcaactgggagcttagcttagtataaagccagcagtcttagacattgttttccgataataagaatggtggtagggctgttggtcgtgtttcgctctctatcctgtcttgcaccgccgccagcaccatcttgatctcagactgccaatatttagcagcttccgaaccccaatccaacattaatcataacatagtccaaacgagcagcggcttctacttcagagccaaccgcgcagagtcagcattctaattccccaagtgtaggtgaattgtattgatcgtccgccctaagagaagggtcttgtttgctgcaagctcagccaggaaccggcaattcaagtctccagttagcaagacattcgtgaatcggcgatcgggacagcttcaatcggcgggctacgttcactggatctacgtttggctttggctacattggaaggggttggtcaaattctacacgtgtcttctgcctatacagagaaactgggccatttgtctcgagaataccagaaaaccgaatcagaagcggacacttctgataagtctgaatgaagcagcagagcccccgctcttatggtggcttaacaagggtcatggcacacagcgcctacttggcctccctaccatggaggtttgttg

SEQ ID NO: 5835 - DNA, 1144 bp, Emericella nidulans
ccctaaccctaaccctaaccctaaccctaaccctaaccctaaccctaaccctaaccctaaccctaaccctaaccctaaccctaaccctaaccctaaccctaaccctaaccctaagcttttcttatcctatatctataatcaggatagtgtatacaactggtcccccatcaaaactgtagaccttgacttgtgaactttagctcagcaccacagcctgaactgatgctggaaagctctaagatatttcccagttagaattaagtaccttatctatatcctgtaaatttctcagccttgttagtaactaaaagtgcaaagagatgctcaaccaaaaaaccaaggcaatgcaagacctgtttgccaagacttccctaacaacgagcgaaacgctgctcttcatatcttcgcccccagtggattagatggatcgcaattaaccatatattaacttaattatctactgatatcgagaatattcttttgaagcctttggaaatgtataaattagctatacagatcatagttagaagatcaagaccttcaatgcagtcgctcattacagatatcaatcacataatcaaatcgacgctcgcaaccacctcaatagccaacatgatgtatcaaatgagcggacgagcgaggtgctgtatgttgattagtaaggagaggccatctccggtcgacagtattaagtaaaaacagtctagggcgggaactccaacagcttaaccccacccatcaatgattctcaaaggagtgattcagtgaacagagcagtttgtgtgtcacgtaagactgaaagagtctctcttcggacggctatctaggtgttagataagactagaagagtactccttagagtaggtcttaagaggtcctagattgctttaattccaattagaaacataagtagcagaaggcaaatattcttcagggtctgcaattatcagtaaaacttttaaaacgagacaggtaacttaccccagtcccgtacgtcttcgtgcatggaagaaagaagattctcatcaaattgaaagctgtggttcagtacgccatcttaggatagttgaagctaaagaatgtcttgccaaagacgagttgtggccggttcctcagtaaacgagtagtatacttatacaggtcg

SEQ ID NO: 5836 - DNA, 6627 bp, Emericella nidulans
ggaaagtagtaaaagaagggagaaaacaggtcggtagtgccctgagaaggtgaagacaagaaaagcattggaatgccaatcacccaacgacatacagttaaggatgactggatggaaacaagggcaaagataataatcataaaccaagtacttgtccgcaaatcaaccaacttcagctttccgcatgggtaagctgtgtgcgaaactgaagatatccactcgaatcacccgaccagactgacgtggacagcctcgagtcccatcgtgctagtaatgcgatccatccagtcggttgtcggtggttcccgcgtttcttccgtgatcagcgaccgcacgactaaacctggacggccaggagatttgggaggcgtaagcggaagcttgaactcaagggcgggatgcgtacttcgttggctgcgggtcatgtcattaagaagcatgaagttctcggagtcgattgttgctcgttgcttgggatccattatcacgatcaagtagttaaggatcatttaatctaagcggacgcctcgggcaaaaagagaagagtagccctcgaagaagaaattcgggacaggccccacgaaggtatcgttttcatcctggcccgagcgaagcattgatactgcgactccaaattccgtgtatatgcctcgaagtccagctcgagttgcctgcacgtcttggaggagtgccggttgaacttccgccctcttcttcgatgaaagacactggagttcgcgtgttcgtttcacgagccccgggatcttaattactgagaggaatcctctctcgaccacgtctgtatacagcgaagaagtcggtaacttggcatcactggcggcgatctcctcgttgagcgcctgccactcaggctcttcaagaaagcaagcttcgccttcaaccaaagccgccgtaatgagaaagtttcggtatacaatgtacatcgcgcgaccaaagccctccagatgcgctttcggcccacgaagcttcatcagcgtccggatcccggcggcatgtcgcagccacgcatccgggctgctgcagttatgcttttcgaaaatggctaatacgatcgccgacgctagaacctcatccgacttggcggtcttttcgctagataatagattgccgaggccgcgaagagcacggtggtataagctccgcgacgcaaccaaatatcgctgatcgtcgtgaagggagcccagatatgcagatgtacatgctcgtacggcccagtcgaaacaagagttcatcgagctgcccctttgatcaacatattccacccaattgacagggactcgtgtttctgtacaccggaagaagcatggaaacgaagcgaggacgtagttggtgaagacctgagcctgctgggaattgacagccgtgacggttaacgatgggttgatataaccgtccaaggccagaagcggtacaggtctgtactcagcccggggtgaagttcgaggaaaaggtcgtgacggtagtacaacctgctcgccgctttgtcgcttttgaaggcattgttcaggggattcggtcggcgatggggatttcgatggagagggcgacggtgttgactgataacgttggcgcagagctggagcttcatctcgaaatttaaacacccggtaactgatcgtacaagagattctcagggcttgacatcgtgaacatggaagcctgccattgcactagaagaaggtcagacgccatgataaggacataattggccacgaatgactgcggagagcgcaacgtctgaagataaagaaaccgatgaagggaaagagtgatggatggcggggaagtttatggggtaggatgtctgcgaactcgaggccgttgcacgacaagagcacgtcgcacgatctggaccctccgtacgcagctgaggaagactcaatcactgacctgaagcttagcgtcaacgcaggactgacagccgcgcgacactctgaccatgctggtcacagaccggaaggtggagcgcagccagattagagaccagcgggcgcagcaacatcgaggcgcactttcgggagagaaaggcccaaagttgtgcgtgagagggaagtggaggttgggtgacagatgcggtatatgtatatggctctctggacgggcaggcgtggtactggtcacttgtcagagggctgagggtgagagtgagggtgagagtccaagccctgaaggttgcaagcggtggagcagcagcccacggcgatcattcgggcaccatccggggccaattctgcacttcaagcagaaagaattagccaggaccaacagcaggctgactatttgagtttgatcgtcgattatccttagctagttgcagtgtgtgcgatcaccagtccaaagggcgtcgatggtgttgggtggtgttccagtcacaggggaaccaaggcacagtcttatctttttggtctacagctgaagaaccggagaaaacccccggccaccgagaccaacttcgtaggactgtcgctattcaggttcgatacttgaacagtctataggtaagatgggataataataacagcataagatgatgacccagactcgtcgggccgtacctagaaaaagaaaactgaagcctggaatgtctgcagaagtgcaggttttcaggttgcacgatcgccacaggggtgcaggcacccccatgccatcccttataccgatcacatcgctttaccaatacagagtaggataaccatcacagtgcggacactgccgccaaatttatcctattctttctcacaaagtatcgtaacggccaggccgcagagtagaactacatcagatataccggacatctgcccaggtggagtatgtaccaatcaaaatctggcgaattgtgaacaggtggggaaaacaggattcctgaagaacagaatgaacgttgaaaagataaggaaactcatatggaaaacgaaaagatcatagatatgagcgccgagttcgccaataaaaagacaagagatcgccatcctaaagcaatggaacggtccggagaaaagcaatcataccaggccggcgtatagcgataatgcgctgacgattgtttcgtcacgcttgctcccttctttgaactcttccatatcgaggctgccgttctcatccttgtccatcatgcgaaagatcttgcgcactcgtttctccggtgtgtcctcgtcctccgggagcttcaccattgagccgacctagaatcacacgtcagcaaacgccctgcgggattcaggggtgaacgcaccatcttgtaaatcgcctcgacaatggccagcatctcatcgtacgtaatctttccatcgccatcaatgtcgtagagctggaaagcccagtccaatttgtcctccattctcccacgtgaggtgaccgacagggcgcatatgaactctttgaaatcgatcatgccgctattatctgaatcgaaaacccggaagacataattcgcaaatgacgagggatcaccaaacggaaagaattttcggtagatatcctggaactcctcctttgtcaattgcccggacgggcagtccttcagaaatcctgatatgacgtatgtcagcagcagtctctcaacgagcacataaaattgatttcgagcaatatttccacgctccagagccaaaagtacctttataccattgttgcagttctttcttatcgaaatgcgtcgccttttggagctcttcgagctgggttggagatagttttgactgtctgcgcaacggaatggttagccgagctagctcaatacaagccgtccaggtagcaagaaaagattaaactatttctggatgcggatgccagtgaattccccacaggatgctggcaaacctgctgcctggaaggtatggggaacggggacacggtaaacaagcagccccgtcgaagagaacttacgacttgcccatgataaatatcgattcttaagacgcgccgatccagggatgatgtaagtagcgtggtgagactaggtccggactcactagagctcacggtttctcatgcgacaatgttttgagttggcagcagaaacgcggaagccgcggggtaagggagtctggattgataagatcgtgcaccggccgctcgggtgtcggaggggcagaaactggggcgagaggctagagcaagcggagctcacggtggaacaaagcgaaacaaagcgacatacacgatatgacaacttgagatagaaatagcaaacgtaaaggaaattgtcatgcaacgaacggatgtagtttgggatgtagtttggggtgatggaacaacagggcgaacgaaaagttccctagcaggcccagaacccccggagccttggcacagcctcccacagaacgttccatcgatcgcatcgcatcgccagtacaatagccaacgctagcagctccttggcaagtgactcaatcagtctgttctaaatcttgaggctggcgactcaaaaggttacataatcggcggctctagtccccgaagatgaaggacaagctggtagcacaaagtacgaaccagaagccattagctatcaatattgttacgtactgtacagatcctatccagtctcaactattctcgaacgccattttcacccgatttatatacagggcacggcagggaccaagtaagaatacgacgaaaaaagcagaaagacgcggaaagaaacgctcaaagaaccctgtcaaggagattcagcaaaccacgggccaagacgtacctcttgcgccacggcacgatcaaagtggagcactcagtcgaccttgatagagcgatagattcgctgtatgaagagccaactggcaaagaaaccaatagagcctgcttgcgagaattagtaagcaggccgacccaagcggatagggtagaaacttgcctgtaaggatgaagacaacaaacccgatcaaggcagagtagcccacgtaaagtacagctccaatgaggccgccgaagctaaccctggtcgcccagaagagaagcgcgttaagaaagacgtacactccagtcattcctgcacccgcaaacgccctccagtgccacctatagttctcagcgcagaggaggaagtataccaacaaaactgttgtagcagcggtggtaacaaccatcaatccatagcacaaaaacaggaagccgaacatgtagtaaatcttgttggtccagagagaagtcatgataaagtatagctccacaaaaatagcgccgaaaggaagtatgccggtaagaaatagcgaagggattgtcttcagactaccagtcatgggcgggatctgccttggaatctgattggtcttcgtaggtccttcaatagcctatgcgatggttagaaagaaagtatgacagtatttgtcgtggagagaccgtaccggctgcttgaaaccaatccagctaccggccacactcagcggtacactgatgacgaaccatatcagcacaagggcaagcatcgtgccaaacggcaccgcgccacttgagcccttggcccaaacaaacaggttgagcagaaagaagacgctgaaaataaacgccggaactagaaccggggtcatgataatgttgcgcttccaggattcaccaccaaacgctttataaaccctagctgagacgtagccgccaatgaaaccaaaaagagtgtatatgatcaagatggcagtggctagaaaacctcggttcgcaggtgacaacaagccaaacatcgcaaaaactaagccaacgttagcccaaacagagaactactgggtacggtaaacgtaccgacagtggcaccggtcatcatgaaaagctgagctccattgccaactagaacactgagaagcaaaggagacttcggacaccggaaaacgtccccatgcaccagcttccagcctgagtcctcttggatgccgtcctccatagcagctgacgttccatccagatcatctaggttaaatgagtccagacggttatatcgagcaatatccttcttgagagcgcgaacaaggatcatgctaaccatcccaacaagaaagataacaaacacggcggcgttaacaagggaaaaccagtggattttcgggtactgaaccttcaggtacttatcccagcgggttgcccatggagtagacgattcacgccagcttacactgtaagtccaagccaccgtggtatctgcatcctcatccagatagatcggtccttcctcattgcaaatggatgtcccgtcctcagagacatgcgagccacgtcgagaacttggttggaccaggacaccgatgactcgatacttctccttgtctccaaccttgaccggatgatagtcgattaaaatatcgaaatgattgtgcaaaacggccttttcgctctcgtcaagctcaccgagagcgaagccaggagtgtaagcctgaggctcggttccaagattctgttgcgcggccggcaacccatctaccagccagttgatgttgtaaccctgcgctatcatccggtcggtgaacttggcgctccgagagtcaaacacgacctccttgcaagccgctttgcaggtctcgttcttgcccatcttcagctcccccggccccgtttggattctgtccccaaagagaatgcttaaaagcgactcacggacatccttcgggccatcttcggggg

SEQ ID NO: 5837 - DNA, 3610 bp, Emericella nidulans
agtccatgctcgagatccgcactgaggcgtacgtttcgccgcccatcctggcctggggattcgaggcggaaacggtctaccgcatcaccggcgacggcgccttgactgtcaaggcacacgtcaagcccagcggcgcaaagccagtcgacgttccccgagtcgggttcgacctcgtccttgcagacgagctggacaacgcctcctggttcggcctgggcccgggagaatcttacgccgacaagaagctgtctcagaagataagcatctattctgcaacaacgtcggagctgcagacaccctatgaagtgccgcaagagggcggaaacagaatggagacgcggtggctgcgattgctcaacaaccgcggccgaggtgtttgcgtcacccgtgatgcagatggagacgaggagcaggcattccaatgggtcgcgacgcggtacagcgccgagtctgtcgaacgtgcaaaacacccaaacgagctctccccggagaagagagtccgcgttaggctcgatgtcgagagcgcaggagtcgggactggagcttgcgggccgaggactctggagcagtaccgggtgccctgtgcagaaaggcgcttcgggttcagaattgcaccgtggactaagtgagtattaggcggttagagggtatggaaatggcagtagatggactaagaattgggctctggcctggtaatctgccacttgtgagcatctccgtagccaaggctccgtcatagcatgttgactgctattggtgccctaattaatgctgcttcatatcacctcaactattatcaaatgctacttcctctagcagtggtgatctagcagtagtgaataaattatgaaatatgttgaaatggcatgttctaaggtatcctggacgttcatacttgccacaactcagagaagttactgtttatacctgatatctacaaacctgatatctacaagccagtagatggactcatagtatcagagcgtctggaccgttcagcggcgagtcaataccgcacggtcttcttacacccgttacaggcgcttgtcttgtaggattgatcaggcgccattctcctggcacggtaaataagaccgcatcctcggacaggatacgaatgctacctatcgagcagaatttatgagcatcaaaactatttccctttacgttctagtaggtgagcaggtcggagatgagtgtcgcgcgatccctagaatgcgagagcgtaacttctgcggttcaagcggtataataatggctacgctaaacaagctcaggtgaaaagccatagagttcgaataatacgagacacagaagcctttggataaacaggtatggtttctgtgtagaatcccttcgtccaccggcaggaactgcacgatgtttaaaactgatgctgagctttgtgtgcatcttgctctcctggaatcctgagtaaggtaggaaaccatccacctatagggaggtacatctaggataactcctctgattcctcccctgtcatatacgacgagatataggacgaggtctcttcgcgcccatagaagtcgaattgcgcggagatagcatagtagcatagttcgggtccatattcctaataagaataagaggcatctgcccatgtgccgttgaggactgaatagcttgcctgtcagtgtaagatacctaggttagcgtatagctgaggaaaaaggtatataacactccgcatcagctcttataccacaaatccctactaccagacaactaatagcgtggttccactctagaccggcccactgtgaaatcggagcctgtaactctacttatcatatttatggccaaaagcccacaataacccaggtttgtctgaagttaaggtcctacggcgttagaagcaggtcaggggcattactaggggagtgaaaccaactcaagcaccctccggatttctttccaccatcacgggttcaagggtactgtaacgggcataggcagtattattttcaactggctgtcctgtataaacgagtatcacaagcttagagaaagaaacaaaagatagaagcgcagatatcttcctcctccctttatcaacctttctgactttccggacctgtatgccgacggatcccttttccaaagttatgaggacggatctcctttcctaagcttcgaggcctcaatcccgaagctgtacgctgatattgcagaaaccttgtttagaaccaggttgagggcatggccgacaaccaagatccaggccatagcctgtgacacctggtacgatggccttgtcttgctatcctaacaacagcaggtcatctaggagacaccatcttggaaagcttggagtaatatcatgtgatcggtttaaattaacgtacagtctctagcgccaaggattcaactttaagttcccataacctccttaccacagggctattggcgatcagaaacgtctgctggcattcagagcaccttcgtgtcatggcggacacttgactatccagacatcaacagcctgacaagacggctacccatactcgattcgtcacgggtctaccctagatccgtaacgggtaagccgtgggttgtgtcaaagtcggcgtggattagggctgccctaggcgttctgatagctgtccgcataaacgttgtcccgagcccctacaaaattaagctaaaaggagtactctgagtgaagaagtaggaaggtcaaggtgctttaagttcatgagatttaaaaggggcagccgttctcaggacgttgcaaccccgcgttgcaaccctgcatatcggcatatgggcgctaggtagtggttgcagctcgcgtagagcttagcctgtaaacgtatttacgtaagatgtttcaggtttccatgtcctcagatatatatgctcccagtacgcagagtgtgtaggctgggttctctgttcaggggtctgcctcagcggtcagtattcttttctgttgtggactacgaaccaaccgacatcttccgcctacctcatttacctcagccctataaactcagtcaaaccctatcatgttttcgaggctcctttccaccacggtcctagtggccctggccctcacaagccaagcagcccagaccttcagcaataccggcaccatcgctggctgggacagcaccaaccaagaacaccgcggcaccgtgcaagaagtcagcaacgtcgccttcgaaggttcccaagccctaaaagtaacacaagtctacgattccagctacagcgggcgctaccactcggagctcgtacataacgccggctaccgccgcggcgaaacggttttttatggctttgcgttccgcctgcaacaggattgggactttacgagccagtcgtacaatctcgcgcagtttatcgctgatttcaacgattccgggtgcgacgactggatgccctcgacaatgatctggctgcaaggaaaccagctctactcgcgcgtgaagacaggtaccgtctgtgcgcagcagacacagacgtttgcgaatctagcgtccgtctcggcgggtgaatggcataaaattgttttgcaggtgaaatgggagtctgactcgacgggatttttcaaggtctggtttatggggagaaggtcaaacagtct

SEQ ID NO: 5838 - DNA, 5344 bp, Emericella nidulans
tccatcaatattgtataatcgtgtttgcaccacttacgtaccaggctagcagttagctccaggaaaacggcaccgacacaagtcactgaaccacgatgtccgaccaagatatgtccacgcatattctcaggggaaaacaagtcccccaacaagataatgacctccgcgaagaatggcctcccgaatccgtcagcaactaccagatgatccctaaagagcatgcgtcaacctcgctggagcaacagacatggcagcctcaagcggcggagaaacagcagacagagtctcagcccctccttcatcatcaagctttcacagtttctaatacagatgtcaatgccaatgtgcaaggcagagtcccgaacagacactctctgttattcgaggagtggaaagctagatctttacggagcccagagcaattgaatgcgctagctgcagtgcatgaagaaataacactgagaccaagagaagcatattatcgggagatgttagggtgttattaggggagcgctttgataaacctggaagtggtcgaaagaagattaagccggttcaggatagcccccctcaggctgaattgaacgatgcaagaaaaaaagagacatcaggcgatgacaaatccaaatcggtggaacaaactgcaggatcagcctatgttcacacaacccctaagccggcaaataaagactctattcactatcccaagaccgagaagttgcggaatagggctacgtctaaagatgatagagcgctactaggagaacactctgatagagcaacagacgcccaggcaacgaccagtttggacaacggttgtcatgtccagcagaccaaggcagccaaggccgacagtactattacgtcgaaggacaccagatggtatggcaggaagaactccaagcgagcaagtattgttcaaacgagcaattcaattgcgaataatggccacaagcagcagtctaaagtcaagaatgacaataccaacgaaggtaggttcacttgcatattcgctactgatacccagctccatataaggaccgctaactactgtttacttagaaggccatacacccgctccattctccgaaaacagcaatacgcccgttgtccagccagaaacaagctccaggaaaacagggaatagaggaatcaaatccatggagcgacagcatgatcacgagcgccagagatcccgtaggcgccaggcttcacacgaacggcaattttcccaaagacgcctggcccaggaactgcgaccctctaaagagccgcagcccccacgggcgcttcagcctgctcacgcacagcaatcctctgagaagtgccaggattcccaagcacaacaaccttcccacgcacgtcagccttctagagaacaccagggctccagtgaacgtcacacctacccctcagaaaagggctctatagaacgcaagcagcgctcccgggagcgcacccacgagcaggtagtgtatacagctcaaaatggtactcggtatggggtggacgagctgagaagactggctcacggagtcaagatcagcgccaatgttaaggtgtatttcattccttgcttcattggagacccgtggaaagatgtcgagccggtcccttgtgtccgtccgccggacctcatgagccgattctgaacgtatgtttaacctaaccatacgtctttcgcattaaaccataagagactcggcaatggatgtgtccgtttgacttgatggatgttctaagttagttgattttccctgttatctcgcatcacttagtgacagggggggtttgactattaatatgagcccccaaaaggttgaagtcaattgcacaattaacttctagtacatgacgaatttgagaatctgcacaatcgtcacatggcttaaaacatgccaaggctttatgctttcctcttccggtaaaatcacgtgatgtttagatgaccccttgaaggatctattcttccacttttgatgcctaacgtcagcaaattgggtgcttggtgcctgatgggacgcactacttactaaacagcataataaacaaaatgaagcgggcggggcggaggtatagtggtgaaacttgcaacagctcgtgcgttgaatgacaattatttggttagggatctggctgcggcttgtcattcaatgccctgcgatcagctgcagcagaggactgcacagtttactcctggttaggtctggtctcttttcgaattgggacaggacatggaagacacagacggtcgactgaggcgcgatgaaagggtgactgttgtcttcaaattgggcaggggtactcccagtcctcctgctcaccatgtgcctacaacacgtgcggcgggaattatacattaggggcacgtatagtcaatggtcgggagcaattctaggggtgcagaagcatatgcagtgaccccgttttctaccgtagtgccactgcggccggcgaggtaagctactctgtacagggggttgtcaatttgactttggctgcgctgggctggtcacccttcattttcaggaaacgcatcttaacacggcgcaacagttatatttggccaatcaaactcgctatcaaagtgactgaaagccctgcgttggtacagaagatacaatgatcgagaagtatcccaatccaaaccaagaccggtcccagattcaagcgcgaaaacagaaaacgctagaagtacccaatatcccacgtaatcagacctatgtgaaaaagaagaaatgatgtcatcgtcagtgtcgttacaaagttcatatgttggtcttttagagagccaaaacagataagcggaaagaaagcaaggaacccagtcttgacggagactaattgtcgtccaacgtatacttcttcgaagctcgccggtattcgtctgggcgaaggctttcagccttcgatttcaatacgctaaatttcatagactcgtcagcttgcgtgaatcacactgagaggacgctaattcttcctctgcggggtccgatcacattgctagcagccaatccgccaagagttgctatgatggcggagcggacatccgctccctatgagcggagcggaacctgacgacttgccgctggcgcaaaaaggacatgggatccaatggcaagaaatgggccaaagcctcaccttacacgcttttgagtccattccaaatctcgcttggtctcccgggcgactttgattccgtcggcgaaacttgagcgcacgcctttcaagcgtctttgggcgagagcatgcaattcgaggagctcatgctgcttggcattgagctggccagagctgttatttcagcgattagtccaattcttcgagttcttctgtctccaacatttctgagctcacgtatatcgagtgcgaaaaggtcattctccgcccaggggatgccaggagtacttacgcttgcgcttgcatagctaatcctttgtccaatggtgtggggtcgaacgcattttgcaaacgatcattgagaacgtccacaacgtccacactcgagaaggaacccgagctagactcatagtcgctgctcgcgctaccggcgctgtagctgaacccgccagaagtgcggctgcccgtcgtggtgcttgcgtccgacagatccggtggggagcctgacactcggctgatagggtagaggctggcaggaccaggggtcttcgagggaacattcattggaagagcaggggattggtagttgtgggttgccattgtggaaagatgaaggcttgaataggttgacaaaagaagcaatctgcggagttaagtatgcgaagggagtccttgaagaaaagcagtgatgctttatgaagtctcaggtggaaggaaagcttgggagatggaaaaggaagagggagggatgaggacgacagcacgaaagttgacggcttttatagccctccgcggagagtcttccatccggcggaacccgtcacgaagacggcaacgaggacaagagagggagtagaggagggggtgaatgtgatggccaggtcaatcattgggtggacgactatcacagcggcttttttcccgtaccccctaatccccctcctccaggtccggccagttcccttcaagcccaaccccccaattccgcccctccccaatttctggtcgccaattcgctcctcatcccgaaacgaccccgctttaggtggaaagacgaggagctagaggagccaaatcgacgtccaaggactggtccagccctcacaatcactccggcattgagacacaagcccacatgcgagtggctaatcggggatctcgggcattgaatttgtctcagtttttcccttctcattccgtcgggctgtaaaggaattggacttggggacgcatgaaaatgtataaagcaggcgggagtgacgcgggaaggtatgtctgtccgtccaagagtcttatagaaggaggctcggccgccggtgatgacttactttcccacaacttcccatccgctttctctactccacgagatcctcccagcctaaccggtattcgaatcttgtctctttagaaggcttcttttttacatgagcatcagagggtcactccaagccaatatcggggggctgggtggctggaaaagtatggaagtctgagagaatcacagagcaatgaaagacggcgcatatgacagctacagagccgcttaacgccgaagccccgaattacctttttaaagaatatgttcgaacagacaccggctggtattcccgttcgtgaagatgaaaatatatgtctgacgcttcttgttctcttcagaataaaagtatcgtccctgcaggcgacgttagggtagtggtcgaggcagggtcatgtcatcatgggtactttcttccgcacttgtgagtctgtgattttcgtgcccaataccttccgctgccgtcttctcttcgcaactctttgacagtctggaagatgcagtctgagatgcggggctgacgcaaccacagagttcgaacctgataaaagtagggaattatcagctgtcaaggtaactagttggacagcagtgcataaactgtggccggagcgaggcccaagagtgcgccgaacgcctcgaacttcggcgccaggtcttgtctattaccatcgcaataccgagagcctgaaactgagcgggtggcacgacatctggaaagaaactaagaccgtgtaacgagagagaatcctcattctccctgagtgaagaaaggttggatgagttggcgattcagtgttctcgatgtgcgcaattggacggttgttcatccgcttggacctcgacttccaggaaacagcctcatccggagggtggcttttagagcagatttgcgggaaaacagacggc

SEQ ID NO: 5839 - DNA, 7389 bp, Emericella nidulans
aaattggcaggcctagaaaaaaaaccatcccaggggaggggtttttttttttaaaaaaaaccctcccaaggggattgggttccccgaattgtgaaacagaaaatatttcccccatttggcgttattttcccttcccattggaaccagatccaaatctttcggcaacccaggggtgccggaataaggggattgcggccacaagctttgctccagggggcacaactcagcccgcacggagagttgttggaaaccgctcacgagccaaatcctgacctgtggtctatcaagatggcttaaacaccaaaaaaaaaacagccgaagcttatggagtgctacctcatgaatctcggtgtctccatcactgcaaataaccagtaggcgccacgaaagataaagatcccgaggatgtggtaccgactaccccaagaaaaaagcaaaaggtagcaaacgcttcgccacaatctcgacggcagaaggcgatgaccactccatctcataagaggtatatgaacattcccctgcaattgaccataatgctaacagccttgactagaatcatcgtcaagaagccactcgaattcactccacttgggactcgcgtgctatcccctgcccattttgcatcaccctaccgacaagctcgcaacctcctccatgtttctgccgttccggactcgcttccctgccggaagaaggaattcgacacagtatatagccacctcagtgctgccattatggaggggacaggcacctgcatctatatttctggcacaccaggtactggaaaaacagccactgtccgcgaagtcgtcgcgcagttgaatgccgccgtacttgcagaagagatggacgacttcatattcgtggagataaacggcatgaaagtcaccgaccctcatcagtcctactccctgctttgggaggcgttgaagggtgatcgagtgtcaccttcccatgccctcgatctgctagatcgggagttctccaacccttcgcctcgaagagtatcatgtgttgttcttatggacgagttggaccaactagtcaccaagaaccaatcagtcatgtacaacttcttcaactggccagccctcagacattcgcgtctcatcgtgctcgccgtcgcaaacaccatggaccttccagagcgaaccctaagtaacaaaatttctagccgtctgggtctaacccgcattacttttccaggctataagcatacggatctaatggagatcatcactactcgattagccagcgtgcctggcaagatcgttgattccgacgcgatccaattcgctagccgcaaagtggcggcagtgagtggtgacgctcgacgcgccctagacatctgccgacgcgcggtcgagattgcggaacaaagcaacgaagccgccggagtagaagccctggatgcggacgacaccgagtccctccctccgacacccagcaagactgctgcgcggaaagaaagagcaaacgcaaaacaaaccctttctatatcgccgcaaaaatccaccgcgactccaaggaaacaaacacccggtcgcgtcaccatcgcaacaataaagcaagccatccaggaagctacctccacccccctgcagcaatccctccgctgtctcccgctctccgcgaaactcttcctagccgccctccttgcacgcgtccgccgaacaggaataacagaatccaccttcggtgacgtcaccgatgaagcgaaacgcattgccgacgctgcggtagcagttgctggagctgctggtgcaggaattaaagaattcttgcttgctggtggcaccgggacccgtgttcaggcgttgggatttgcggcaatggagctcatgaattcaggggttcttgctttagaggccacttccggttctagaggcttagggggcgcggcaattccgacgaggggcgatcgtagtggaaaggtgaggctcagggttgcggcggaagatgttcgcgctgcgtttcgagatgatgttgaggcaaaaggattggggttggggatggaggcgtgaagatagcatgaaaaggcgttttgcatgggactacggagcgtgttatatacgaatgtcttctatatgatgataccctagtgttggcaagtgacgaactctattgagtgtagtcatatagtccatcggcgtaagtccattttgtattccatagatttcatataagagaagaaccataccacaaacgctgaactccatatgtgcattgcaagccgtcacgaaaaacctcaagcagggtattcttttatcaaaagcataggagcagaaccaaagtaccaaggccccctaatatctctgcctccccagtgttggagcccacgtcacaggatgagtctctggcgtagcctgatcatcctgcttccagaccttgatagtcttatccgcctcaccggtaatcaagcgcaggcccgtcctatcgaacgtagacgtcatgataccagcttcagcttcaagcgaacccggctgggcggttgtatcgatagtctggtagcggtatcccgtcttccagtcccagaaggacatggagccgttgtcaccaccggagaagaggacattgtcttcattgacggagagggtattgatgatcgcgttatgaccttcaaagttctgcatgaactcgccaccaggacacttccattgcttgatgctccctgtgctagcagatgcgaaggtgaattcgcgagggtgcgtggctagactgcgaatgccctttttgtggtgagtgaggacgcccatggtctttccagctgcgagatcccagaggcggacggtcgcgtcgagagatccggtaatgacttgagggtcggcttcttggcattgtacatctgcgacagtgccggtgtggccggacagaacgtgaatgttgctgcgagtgcgcatatcccacacacgtgcgacgccatctcgaccaccagttactagcaggtcaagacgggggtggagcgcaagtgtgtatacaccactgagatggccgtggtaatgacgaatgaccttgttcgtttccagatcccagcatttgaccatcttatcctcaccgcaggagaagaggtatgggtgtcgcggggatacggctaaaccgcgaacagtcgagatatgacccgtaagggttaaccgcagtgcaccggtcgcaagattccagatcttaattgtccggtctccagcaccactggcaaaccactcgttattcggttccacagccaaactccgcacccatcccagatggcccgatataaccctcatcagcttccatggtgcgtgccactcgggaggttgttgccgtgtggctgatggtctctgaattaagctcgttggcttgtcatctcccgcagcgccgctcgcgcgacctcctctccttacaagggccgtagacgcgccactcttgtccccagagcccgatccttctgaccgtgaactgatcttaggccgcttcgaccttgctgcggctgcttgcgcttgttttgcggcaagagctggaggaagctccttcacatgttcatattctgtttttcgtcggtaggaaacaccaatcgatccgttcgaggcggagggtgtgaccatgagatattcgggaccgaaaagctcggctgttctcttcgccgagatgcgcacggcctcacctggcgtagtcgatggaatcacgtccattatgaggggtagatggtaaagaaatgggcctcgataggtccgagtagcttgggattgaaaccaagctcctggaggttcgatgtctcgcccaaacgcgtatgaggtcaagtgggttgggtttgtaagttctagttttgaggagtttcgagcgagtggaatcgtaatgagaggggttcagcaggaggaaggaggtctttgaagagcaagttgtagagaccgcaggcgtcggacacggaagtttcttagcttcggaattagtgcctgaggctgcaaggcaacatcaaggtatcttgtcacctgctcttgccagcttccatgcttcttaacccttcaacattggacataaacatccaccttaataactgaatacgctcttgattggatagtaatatggctacgacggactcaaagtttccacttcatgaagctgctcgagagggcaaacgtttgtctcctcaataaacacaaaatatatatggagtatactcttgctaacaccctaccagtttctttggctgagtcacttctgaatgtcagtttctcgtaccaactgcactagcaggcatatctgttgagtcctcatctgatttccttcaggcaaatccaaaactagctactacgaaagatgatgatgaccgtcttccaattcactgggcggtggcctacaaccaccttcccatggtcgagctcctcgtttcaacaaaggacttcgatccggatgtcgaggtacgtactcgttggaacgtatcttttgcattgtaagaccttaccagactaattggaaggccaggacggatcatgctggactcctctaatgatcgccgctagtcttagaaatgccgaaggtgaccccatcatcgagctactcctgcgcaaaggagcggatgtcaatgccaagagcatcactgggcaggtaagtccctgaagatacatagtcattcttttttgaggcatcaaattgatcaatccagaatgcactggactttgcaacatctaaagcaaacatcaccacagtccggaccttactggaaaacaaatgcagtgcccgagtcaaggacaaaaggggccagttagcgcttcatcgtgcggctgcgataggctctacgccaatcatccagctactgctgaaagaaggtcgaagcccggttaatgctactgataatgatggccttacggcattgcaccatgctatttcagaaggtcatggtgatgcggcgcttacgttgttgaaagctggtgctgaggcggataagaaggatgcgagtgggacgttagcgattgatatggcgccggataagaaggtagataagcagccagcatcattggaaaaagtgttaacttatgcttttaggttcggaattatatcctgcaggcggcggaaagggagggtattgagctttgacatgtagaaggaaacggataaactgaaaacatggattgtatttgatataccctactcaattcctgcttgggatgagatgatccatagaatgggtttaaaatgttaagatttttggtcagtcgaaaggattgagttcccagattgctatttatatacacgatcatacaaacgtagggtttcacttcattgtgctgtctaccaactcgcgatatatcttcttgagatccgcaatgtcggcttgaagctcctcaacctgctcgctcttctcaccaagtaactcaagcgtggtctcgtatcgtctgtcgagatcttcgagtttctgctgtagctcttgcacctgtgaatcagatgctctcttctcctccacctctcgcatcagttcaacgacttgttcgcgggcttcgtcacgttgggcggttatgcgggccatttcgtccttcgaagcggcgcgttcgctctccagccggcgtacggtggcgctcatgcgctcaacgagctgaactgacggccccgcgccgacagtggattcagaaataatatcgttgatgccccgcgagtgtgttgcagtgccaccgaatgctgacggcgtccgcgagccgatgaagaactcatctggttcaagcagctttggcgacccgggcactgttgggagtgaacccttctctgaaagtatcggcgacaaaaccgattgagaggctgaaaccggaagggaattctggcgtggaggagtgtttatgtcagggatgacacctggtatagcggacgagcgtcggcttgttggccggtagtctgagagcgaggtgggagcttccagtatactgggtcgatgagaggaaacaggagactcgttgcgccggaggggattcatggggcgcatggcttgttcacgccactttgcccgctcatcttctagcttttgtgtccatgttgcatcactaatggccttctgctcagccatttcattttgtgcggcagttagctcgtcaatggcttttctcagcttctgctcagccttctgtagttcctgagagcgttcctctattctatctgagaggtcgcgctcgttttcctgtgcgctttcgaggtcctcttcaagtcgcttcaccttgaggttctacctcctgtcagccttttgtggttgattgcgaaagaacacactcaccatctcgcgaatctttcttcgtgcctcagcctcccgccgcgcgacctcgtcgcgttccttttctacattcgctagacgcgaaagtagagagccttctaaagcctgccaattctcgctggcagcggcgtactgtgtctgcaacgtctcaatttgacgtacgagtttaacctgcgcatccccagccaccccagaagatgcttcctccgcccttgaccgtagagactccatcttgctctccaatacggactgctcccctttcagctccacttccagaactcgagccctttctttctcctgttcaatagcctccttgagatcagctatttctctcttgagcttttcctcgctgatttcgcgttcaatcctagcgcttgagagttcctcttccagctgattggcacgctgcttttcccgctccaaggcatcggagttggcctttgcctctgctgcatccgccctcgagactgctcgagcaagctgtcccttcatttcctgaaccgtttggcttaaagcattccgttcagcagttacggtctccaagtctcgagcagtctttgtctgcgcggaaagagacccagtggctctcttctccgctgcctctgcccgcttaaccctagcttccgcattggctaagtccctctctagccggtcatttttcttcttcgcctcggcctggagcttggaattttctgctagctgttgtcggagcttcttgatcagcgttcgatggtccatctccgtcttggagagcttctgtccctcctccaacagaagcgcgatcctctcatccttctcccgaagctgtctctcaacacttccaggttccgctgtagccgccgcctttcgtgccgactctgcggcttcctgggctaggtatttcagtttcgactgtaaggcatcgattcgctcaatatatccgtgtatctcctcttgtaattcggattcgacagctttcttatccgattgctgaagtccatccggattctcttcctcatttgccggagtgatacccctctccgcagaagagccactaccaatcggtgcgggctcttttggtgcagatgaaggatcagtctctccgcctgcgtcagaagccggagcagatgccaaagtatctttctcgctaggtgttggtgccgcagcttccgacgacacgcctg

SEQ ID NO: 5840 - DNA, 7002 bp, Emericella nidulans
agcgcatccctcctcttgttccgaactcccccttcctgggacttctttgcgaccggcgatctccctccgagctcatgtcgcaccgattacagtcttgtctctaactcctttcgagatcccatcgaatatcagaagacatttgagcccctcttaatacttgaagcttggcagggcttccaggcttcaaaagaagaagggggttttaaaactttcgaaatcaaagtggcaacccggttgtctgttgacgcattcgtggaagtgaatacgaatatgataggaatggacgtcaaagatactggtgtcttcgaagcagatttggttttgctttctaaagcgagcaaccctgcaacgaacccatcggtgcctcactgcttagctagggttgctaatatcagtaagaaaaagggcgtggttgaagtttcttacagggttaatcccggtaatcctttcatcaattccctgggccctggtgcaacaatctatggagcaaagataacgtcgctcacgccgcttgagcgtgagttcggtgctcttatggcccttcaatattacgacctctgcgaggagattgtccgggccaggccttcgcctattcttaactactcggatgcgagcctcaagcctttggtggataactacaatgtgaaccctgcgcaggcaaaggctatcaaatctgctatggacaatgatgcttttaccctgattcagggcccgccgggctcaggaaagacaaaaaccattgtggctcttgtaggagcccttttgaccaatgccctaaaggatcaggggattgtgataacacgcccaacagcggcaatcaatgcacggcctggagcacgaacaacaacctcgaagaagctccttgtgtgcgcgcccagcaatgcagcggtggatgaattggttatgcgattcaaagagggcgtcaagacgattcatggtcgtcacgaaaagctatcagtcattcgcctgggacgaagcgacgcaatcaatactaatgtcctggactgttactctcgacgaactggtgaatgctaggttaaagcagacgtccggggaaaaatctggtgaaacggatctgcagaaaatctacgtagagcacaaggctgcagatactgcgtttaagaaggtgcgctcgaaaattgaccagtgcagggcccaagggcttcctgtccctgaagagttacagcgagaatttgatctgctcaagaagaaaaagacgcaattgagtcaccagattgacaacgctagagacaaaaaccattctgcagcccgcgatgccgaccttaatcgccgacggatccaacaggaaattattgatggagctcatgtcatttgcgccacgctcagtggtagtgggcacgagatgttccaaaacttgagcattgaattcgagactgttgtgattgatgaggcggcccagtcgattgaacttagcgctctcattcctctgaagtacggatgctctaaatgtattctcgttggagaccccaaacaattgccacctacggtcctatccaaagttgcatcgaagtaccagtatgagcagagtttgttcgtccgcatgcaatcgaatcaccccaacgatgtccatttgctggatattcaataccgtatgcatccagcgatcagtatgttcccgcgtacagcattctatgacggcaggctacaagatggtcctgatatggctcggctgcgtactcgcccatggcatcaaagcgagctcctcagtccgtatcgattctttgacgtgcagggtcttcaccagagcgcgccgaaaggtcactcattggtgaactttgcagaattgaaagttgcgatgcagctatacgagcgcctactaaaggatttcaaagaatatgactttagcggcaaagttggtatcatcacgccatataaaggacagctgagggagctgaaaacccaatttgccaacaagtacgggaatgctatcttcaacatgatcgatttcaatactacggatgcccttccagggtagagaagccgaagtcatcatcttctcttgcgttcgggcctcgaacaaaggaattggtttcttgtccgatattcgtcgtatgaacgtcggtctaacccgcgcaaaatcatccctctgggttcttggtaactcgcagtcgctggtccagggcgaattttggcgcagtttagtcacggatgctcgtcagaggaatgtctacaccgatggtgacatcctgaaactccttgagaagcctcagttcaccggttacaagaacgttgagatggctgaagccgatgcgtcagattctccagcaccatcaaggcctctttctgcttcgtctgtttctcgaccgccttcggtgtctcttgagaatcttccgccggagtcgcctgtctctgcaggtgcgtcaggaaaggacacgccgccacttaccaaacctgaaggaccgtcaggtggcggtaatggcttggacgagacacgcaattgtggcatttgtggtagctttgcccatatgactcctaactgcgacaacgaggagtcgaaagaaatagctcgtggtaactgcttcagatgtggggaagttggtcatacgaaattcaactgtacggcagaacgttgtacagaatgtggacagtttggccatacctcacagacttgtcgctctactaaattgttgtcgaagcaagagagaatgaaaatttcgcgggaggagctccaacactccaggaatcagaagcagcgcgcggaaaagcaaaggctcagacaactcggtggtcatgacccgaaggtgcctgttatttctgtgtccatggacaagccaaaaacccagggctccgacgcccctagcaagcgcaaacgtaccgactcgccctcttctaatgcttccaaggccccacgaacgagcaagggtaatcaaggtgcgccgccgaatgcaccaagcggtccgaagacccagcggcggagagtcgatgcggatgttcctcctccaagcagagaggtgagtccatattccatcacctcgaactccatcagatctgactgacgcctactcagaatctgatgaagccctcacgtgacgggccagcgtatgctccgctaactgacagtaaaccaactggcggtccacagacaggcccaagtcctacgagcgtatgtttagtaactaatacaccaggttacaaatcgggctatgctaatgtatcgcttttccatagcttactcctcgtccaccgcaacaacggccaggaaacggagttcgaccgctccagcccatgcggaagaagaaagacgctgaccccttcattcggccaaagcgtcgataaacattgtgagtggatatcgcccgcttgatgttactaccccttacatgcatatatcctgagatgcagctgctggaacggaacccccagagctgcatcattctcccacccgcatcttgcgtccagattttctcctcaatcctcaatgcgtacttggctcgtcacgcattctgcttggaatttttctccggcctcctgcatcgcccgtaactagcaggctccacaaattcgtttcttgcatggatctgtgctgaatgtaaactcagcgcagacggtcacttaaacatgacatcattaaatacacgcagcaaaagcatattgtggcgtttgggttatcgctttctgatccctttactttctgatcctctctttattgcatgtctctgggacagtggtcttgggtggcagatcctggaagagggaagggaggcgggttccatgtgcatatacccggttcttaaacaagacgaggttatctttctcgtagatagagtatggcccaagtcctgtggctcggcagctgccacagcactgaggccgacaacagacttcaaagtagccgaacgctcgctcacaggccattggtctaaggagcgtacgacttgcaagtttagaaccggctctactgctctgtcaccacttgtgaattcccctcttggagaagctcgagactcagaagaggtacaggaaactagcggcgctagacgatccttcgacgcgtacagcttataccgtctcgtatcccaagaaccatacggcacacccggtctagctgcagaagaatgcagtgaacgactcgtataccaacgtcagcttagccgatgaaacaacaatttaatgccatagttacaactgcaccgactgcaaagtaagagccggagccaaaagagaccagtaaatgatcgagtcgtacgatgtttcgacggggacagatgaatattaactctggggaccaatctcatggttagagagacagatcaatgggcttcaaatgatcgctgcagggaagggggcctgttctcaccggcgcatcgagtcgagtcttcattgtcttgcccctttgagcaatcggtactgtacaccatttcaatattgcaggaatccaggccaatccctgtttattggttcctattcgttgtcttgattacatgaactccaatggcggcaatcctaaggttcgctcgaggctttaggcaaccagcccagacagcaaactgaaggctgactgtatttgctatagtttgtaccgtcagcctcactcaccggtcctctgtctttaaggtcagtattagctgtcgatatcttgagtgtgaattgtttcctatagtactcgaactactgattctttattcttttagactcgagccaaaaatctctaattattgccgtaataggatgagtctgaaaattgaggcgtctttaagtggtcccagtggggagcagtcagcaactgccaactgcaatgtgatctgtcacgccgcatctcgatccctccaacactctccaacttacgctcccgctatcactccactacacttcaatattgattcgattatccttttcatctctttctttaaggattcggggatccactctacagagtttgctcctccagtttatgcaagtgtcgcaaaatactccgtaccatgacgaggattccatctgtctgccactaccgttagcgtcagcgccgtgtctctccatttctccttttgagggctctgtctggtccatcgggagctccaagtcaccagctggctgagcaatgactccaatgagagcagctgtcctcaccctctccacttgttactctgatcattatcccccggtaatcgatcctcgtccctccgagctgttatgtccgtgaaaacttacatctgttctgcgtcagccataggattaattgagccttaatggtcaattgtagcaatcgaccattaagctcttaaaagggaacccgtatcccattgcggcctgcgttcgggaattattccaggtgtcccttacgtcgagcccagggacatccatgccttctcaaagcccgatcaggaacgatctctcgagtcctacgttgcacaacggggagacccatgcggttcccatcgcgtgcgcgggcgaatcgtttctatggagcgacttcaagctcctagctcttctctttgtgtctttgggatttgcactacctgaataatgaggcaggcggcaggcagcatctgcaaaggaaggctctttgaaagacaataggttcgaagtcaataactgagtccacgctctccagcctgcggtctctctccggggcccatcactcccgagcaacactttgagcttggacatgatataatctatcaataccttccatgggatcatctccttaagaaaccctgtttgaagtttcctcgccaggcatgaataaaaccgggatccaggatcgcccctcaaccgtcgtttagcaatctttgcttttcccgccatggtcccctccaagactaacttcctctgcggtcgatcaatagatccacccgccgtgcagtagacactgcatggttcattgccaatgcctcccctctgtttgccctggtggcatcgattcctagcgcacagattaatggtccttcttttgtccaacattataactcaattatcgagagtcaactagtattgattccaattggtcctgcattgtctctacatttttgcatcgagcgcccattcgacgaaagatatctccgaagtcaggaagaatatgatagctcaatttcttgaagagttccttcttaaacctgggcgaatctgctgtacctcttcacccagagagcttttcgttttccctcgatgactagtagttcgcaaagtccggaccgcaatcgcgttgctagctgtttgtagataccaacgtcctcaattccaatttaccaacttccttcgactgtcttcacgcatggtattcgtttgacctctttagtcgcttacagggcattgttggttcgctggactttgtggcaaacgacccttcctcttccgagactttcagaataacaacgtgcatgttggacaccttgacttgacaacaggggccccaccgacaacgtcaaacactgagcctccataccatttgacacggattcattctacctcgctatcggctcaggctcaggcttaggcgtgaagttcaatgcaaaagcgcagcgacgccggaacggtcctcgaggcaccgagtccaaccatcccgacataccggcccagttctcaatcatccaaacgcacgtacaccatgtcggcactcgcaccaaagtaccagcagtacctgtcaatggcagatgatatacagtctacggataccaaagcgcgatcagacaatgagaatgtcacggaaatagttcgattccttcaataccacgtacccacgcccgcgcaatcgactggacccagggacatgatcaaggctggacagaggcccctcaagctggcccttcggaacaaagaggaccgggtaaagctcaagccgagaagcatccgtaactggagcactcacaacgggcttttccgagatctaatccgaagatgggcacagcagagtgccgttacggcgtcagctcagccgcctggctagtataatcagctaacagatgtagcatgggcgctgctgacaccgtgaaaagatagctgctgaggaagacaggcgcctgactcggctcagtgtgacgcgga

SEQ ID NO: 5841 - DNA, 7927 bp, Emericella nidulans
  unsure (1)..(7927): unsure at all n locations
gagcagtgtagcacggcgctgactagcctacgaatacatagcgtggcgggccgaacggtcatctattgaccaacgcggcagggtttcccggaggcgcgccagagacaaggccatccaagacagggactcccttctttggaaaattctttgcctgttctgcgggcttctggaaaccgttagtctgtcctttgcacttttttgcatttttttttttgcatttttccattttcttttccccatttctcttttttctttttcctttgtttttctctttagtttcgccgcacgccagccacaagtggtaaggcaaggctccacttgggcgcctgcagccgtatctctgactcgaattcatgagttgtagctaggtgtatggggacctcacgagaacatcgagcaagatcgagatgtttcgtagaacgagacagataacccaccctctcgtaggccgagtttgtcactcaaaatgttgtacaactgatcctgcatccacctgcaggcccttgcagccttgccgctgttgaaagagcatcgggaataatgagtggtgagtcaggttgagtctcagcgccaacagacgcctttagcatactactgctggcatcagccagggttggtcctgcgaactaggagcctagagccttctgcgtagacgccagaggcctcgactaccggagtagacctaagacccttgtggtatagcgtgggtcagattaggcaggagagcagtaggtcggatccgaccgggggcagagccaggtaagcgggaaaaacgaggtgtgacaggcaactgtccgatgtttctcgtttctggagcagctcatgaacttaaatgtgacagaaggaaataataataaaaataatgataataatgataatgactgaagatcaagtcggcacagtaaacacagcagccagcccttgcctcaaaggctcaagcaccgtcttcttggcgatccgcagatcctgcagccatcagccaactagggtctgccccaccccggtcaggccgtcgtgcccttttgtctcacgcctctcaaacttcagtgtcagccgtcagggactgatttctaggctgatatcctcgctttgcccttctgctgcagttcggcctcgggaatcttccttcagcattaacgggccgcacagtaaaaaaactatgatttggcatctacgaacatcattcaatgtttcgctctgcagtgggaaccgaaggccgataaagcgataaaagccttgtaggagcagactatagcaattgattcactctaggttgtaatcaaatgttctttgatctcggccagttgtaggtgtcacccgatttttcccatgttttgcaaggaaattttctagtttgttgccaccctcaaacgatgttttggctgtgaccctacataaggctgcacgagtccctgttcctggatgatagtcttctaggatacacaaactctgtaaacaatgcttgtcgccgaccactactactacctacatacctaatccaccccgtgcccaacctgagcgatttactgcttttctgagcgacttccttgcagcattctgccgcactgcattgcatcacagtgagtagtccccgtgtttcctgttcttggttcttcgagcacaacctgggaggacgatcttcagatccatcccctccactgtcccgccaagttgactatggccataataatgaattggaaagagaaatggcatcattcttcaaatcgctgccaatcgacttatctgagtggggcaccgacctcggcctgataggcgggcgtttggcaaggctctggctctgagtggattgctgtgattggcttgtacgcccccgctgagtccagactagcccccaagtggaccccagcaaagttggctgatcagcggcagccatcacatcacttcatctcccagntccagttccacactctgactttcagtcctcctcagtccgttatatgcccgcccgctctcccttttcttactcttgactctctgcttgtcatcagtaatagccccatctatcgttatctttcctttcctctctttccttggctctgtatcactcttgggatgcgcttatcccaccaatgattcatctctctcgcggcctcgctctcttttccctcactaaccgccctccttttcctccagtcctcgtcacttcgatcagaatcatctgaaagtatcaagtcacaccatccgtttcctctcggcttctcgcatctgaaccctgatcaccggcacgtcgacgtgtcttctactccttacaacccccccagcgagacgggcttaccctcccttgtctcgggtaaggggacagagtgcaataatttcactcttaagatacgttcagtcaaggggacgaccgctaagcgcgatgctgaagaagaagtcttcacaccctcctctactcttctggcacagttcccccacttctactccagaactctccccgacctcgtcatcttcggataccgagtcggacgaggacatggacgcctctggttcacgcccgcttagtctggctgttcctcagggcaccttctgtccgatgcgtccgactcttgatgaggtgctcgcgaatacggcacctgctccttacacgctcggtgctttcatggcctatctctcgcagaatcattgcctcgagactttagaattcacattggatgcaaagcggtatcgggaaacatataatgagctcagccgtcaactgggacagtttccgatcgaggctgattgttcggagagccgacatctgcgtatgctctggcaacgacttttatcagcgtacattctccctggatccccgcgcgaaatcaacgtttcgagtgaggtccgtgatgatattcttcgacatgccaactcttctatcccccctcctccttcgatgcttgacgcggcggttaaacttgttcacgacttgatggaggagtcgatcttcatgccgtttctgaacgcccactcatcctcggcccatgtttacccactctcggaacctctgttttctcaggacgatggtggtgtcacaattgtctccaacccgagtctcgacgagcacgcagtcaagcgagtccgatcgaaaggggggcgcctatcgccccggcaatcgcgggagttgggatcccccatttcttcgagcccgccttctagcctttctcgttccaatttctcccttaatgcggtcacttcgcttggcaaatcgtctcatcgatcgtcaaaccagccgtcaagtgcaagtggggaatctgggtcagctggtttgtctgacgactctggcagtatgcagtcgagcgctggggagccaatgacccccccgacgaccccgccctctagcgagcccagcatgcagacaggcagtccgaagaaccgcatggataacccctgaaagaaaatgggtatgaagctcgggttcaaaagacggggcggcggtagtcatagtatgcgactcccccatgaggaatgactaaaacgtcgtggcacaatcttccggtggtatcaccaccacaccttcgcttcaaaaaacatttccgactcaaaactcttcaccttatagaacgttacaagccgatttcgtacaatgattacctaccacgattttcttccggccccgggaacgggccatgtctaaaccgacacgaatggacggcataatgcaccggcatttttccacgaaagcatttttatcaggcgttattctcagcgagtgagcgagcattcggtttgcaaaagaatagatagaacggtccatatggaaagggaggcattctgcctggcgttggttttttcccgtttgttcttttaaagacggtctgtctggtctttatcatgcatcatgcatggcgagcaataacccataccactcgccttcagtcttcatattactgatggcgagctctgattgcattgtttctatatctgacatacgcattttctgtgtgttatttacaccgcattggcattggcatggcatttactatacgagtctagatacccaatgtgtgattattccagcgtaacatctaccattcacagcgtattctaactcaagtagtacgctcattagtgtcaatcgcgtagccaagagtacctcgttaggaattaaaagacacaacaactcttcttccaatccttgtctccaacgcggatccagaaccctcgccatcaccgtcaacttcccacccggctttcctgagggattcaatatacgtttcgaaccggtcaccctcgttaagatagttcaatgtgcgggagaggattctgaggatatcctccacatgcagtgtattggagctacggaggtcgtatgacctagtgtgggagctccaggccgacgacgaagccagaatctttgcggcgaaaagggcgtgcatccatgctttgaggtgaggatttgatttggattttaggcttggtaaacccgtgctggcgctggtatcccgtcgtttgatgaggaccgctgcagataaaccggtagtggtatgccccaggaaagtgattttgctgctcggtgtgagaaaaaggatatactcctcttcatgaaagagggtcgttatctcttctagtggaaggtccgtcttcagcgtgttggatgtcgagctggtagtataaggcgcctgacacaagaactgccgtagcgagacgccaacctggcacgatcctagaagttgtacttcaggtaatagccttgatgaagaggaaaattgggaggggggagagtgccactttagtgcagcgccggcagcaaatatccgttcttctttggcgacttgttctggggttatgggtctgatatggtttggattctggtgagtatgttcctgctgcttgagcgaagctcgtcgctcgtcttttcggctagggctcgaaacgaaatccgcaaggtccgggtctgaggagagaagagtcgaaaaaacaatattggctcgttgtctgttcagtgtcgtcatctggacagagcggacggcggcgtaattgagtgacaggtgcatggatagaaggaagaccagggtaagccatgttgccgtgaagctggtgatatgagagacgacgaaggagccgacgagcatgccgatgagggagataaccgtttcctgggatgagtctttctatccgcccacaactcgacgagaatgattagccttcctgcagtgcctgataccgggagcatagcgcagtgagagctggagaccaacgtaccgcattcacctcggccagatttccccatcgcgcaaaatgtgcgcttaaactcgctttggaactgccccctgcaacaccgcaaagcgctcttagcacaccagcagcactaaggacagtgactcgattgaacccggccgggaccatcggggagaaacagtccagcaacatagcgagatcgttgaagatatccgccgcaaagcggtacatcttgcactcgggctcaagggctgtacccacacggtgggcgaagaggattgtcgcgatccggccggatgtatcctgcaagatgtgcaggaggagagcggaggttggggaggcgttggcattaccgactccgacgcctgcatgaatggttggctaagctagagctctatgcaaatgcgtggatatggatatgggatgttgtgctgaccttgtagtacggctcgggatgctaggaggcccgcgatggagctgctgaatgcttggagagagtccttataggtaagtaatgccagtgtatgcatggcacggagcagcttccgaagatttgatatctagtcagtaagtagtgctactgcaatctgaccaaccccaaatcacttacgcggtatagtcatcgctgacgctatgtggatatccagcagggtgaaatacttcgattaatacgtcgcgcagcgagctcagagaccatgatttcgagggtgtagatgcatgctggtgtctgtcagttgcggtaggtcaggcggtgggattggctattgaagactcactactatatctatgcggcctgtaactgtgtccttctctccacccttgtgggacagggtgcctgatgatggcacagagtaaatataggtcgacgttgggtggtcaagctcgtcgacctcgctgaaagtgaagattttcttgtctttagtgtccatatttatgaacaattgaaatgcaagcaataaaatccgttgataacccgcatgtccatgtcatggaggactaatgaagatgaaacgaaatctaggttgccgccagatagttgattggaggtgtttatgcgaagcggcgcttaagctttaccataggcgatcaggcggatgcacgtggccgagagtaggaaacgcttgcaaagtatcccaggatgtggaaacataatactgtttactgattactatcgatgctgtgaatctacgggctacaacagaacatttccgtgtgtcagtcacaattactgtagacttgaatatggacatgaatgtgagacttgctccattccatacttttccaaactagccatctatgacctcaataacctgataacaacatatcccgcatgatgcgcgccagaagaataaaatgaaccgctaagcacgaagactagcaaaaccgcctgcgccataaacaaaaaaagtcgaaaagaaagtccaaaggccgcggacaaaccgggtcttagtatagcactaaggctcgcattcactaggaagcgtatcagcctcgtataattgcgaacgacagtgggttgtgtagcgcctctctcgcgtatcagcatgccactcgtccatcgtccgtgtcttggatatcgtcgtcgaatcatccggtcaaacgcagtcagcgaaatcaagcgtagaggctggcgccaccagtctcgatggcacgctatgtattcctccatgttacgatggcgcgggcctctcatgcgctgttcagcgcgcgcgaagaactacgcctgctggggcttttcatgtccaaggccaaccgcactgttccggcccccggtgccctaacctatggtggcaccggcaatgctaccggactgatgacccttagtgcgccaggccctactggctccccgagggccaccgattgcttactccccacgtggtcccatagcgtgggcgacattaccatattgcatgattacacgataatgatctccctgcatcatattatggtgcggccgtgcagcatgatcagttctgttttttttaaacacttgtatacctgcatgaaccgcggatttaacctttctctaggggtaaaaaagaattggcaggagtggcagaagtggaacagttgcaagggcctgttgtttactaaccctgtcatgctaccctaacggatggggagaaagatgaacacctgtcaaatgatgggaccctgtgacgcctgtacctcttttgaagctgttacttcatcacacaagcacggatgtatatagaagcatacttaatcctataatggacctgaatcatctttatactacccgtaaacttgcaaatccgaccagggtctgaagtgctgaagcgaatagataagtagacccttgcaggagacttttgggatagatcccaatacagtgtgtctacttcaaactgcacttacctgcggtcaaatcacgacgagtaggaacgaagtccagagtctgacagctggtcactcctcgtcctatggggaggtcagcgctagtagcatgttccgtcgctgcactgcagagcagagccagaaggaggccatagctcgaaagcttttctacctttagctccacattcagttatagcttacgtacctaggtcgaacgatggaggcggaaggaggtgcggaacccgggctgagcaacgttgtacagaggatcatttggctgcgtggcgtttgcataaactggttactagtctgcctatatgtacccaggcgagtgaggaggggaattcaccctcaagaaaatgaagagtgctcttttatggccagaatatgc

SEQ ID NO: 5842 - DNA, 4278 bp, Emericella nidulans
tgatttgatttaacccacggaggccgaggaaagcctcaaggaagagatcattattgatgaccttgaggacatgggcgacattcacgaactatatgatatgggtgacttggtgatggtacatcctttcgacggtgatatgtacgaacatatactcgaagaagtccgtcctagatatatcatcatgtacgagcccgaccctgcattcatccggcgggtcgaagtataccgcagctcccatgtagggagggacgtgcgggtttacttcatgtattatggtggctccgtcgaggaacagcgttacctgagcgcagtgcgacgggagaaagacgcattcacaaagcttatcaaagagaaaagcgtcagaacccagctaagctgtataaacaaaccaaagctaaccatcaatagaatatggccgtaaccctcacgcacgacaaaagcgccgaagatccccaagagcaattcctccgcacagtaaatactcgcatcgccggcgggggccgcttgacagcaacagcctcacccccgcgtgtcgtcgttgacgtgcgcgaattccgcagcgctctgccctccctcctccacggcaacaatatggtcattgtaccctgccagatcaccgtcggcgactacatcctcaccccggacatctgtgtcgagcgcaagtccgtccgtgatctcatttcctccctccgcaacggccgcctctacaaccaagccgagaccatgacgcaacattacaaatcgccattgctgctcatcgaattcgacgagaacaaatcgtttacttttgacgctttcacgtctgccacgacgccggggacaacattcctcacggatttcggattctcctcatctggaaccgtaactacgtctctatcatccagcagcgcgctgattaaccccttcgcgccaaagtcagcacaacaccttctcgtcctcctgacacttgcattcccgcgcctgaaaaatcatttggtcgtcatcaccctaccaaaccgccgagatcttcgccgagctgaagaagaatgcgcctgagccggaccccgtccgtgccgtgcaaattgggcttgatgtgaatatttcagacgatttgggctccggggatctcatgactgcttcggggattgagcacaggacgtttaatcttctgccgcaggagatgctaaggcctgttccgggcgtatcgccgcaggtgttagaacggttgatcctcgagacgggaaatatctccgagattgctaatatgagtgttgaagagttggatccgttcatggggagggaggctgcgaggcaggtggttggattttttcggaagagtgtatttgacggggattgatctctaagaatctacgaatgaaaatgcggacattgaagatgtaataatatcataaccctttcataaatctatcatccaagctttttcaacaaaaaagaaaggagcaagtagcagtaagtagaaagagaacagacaaatgaatcggtgacaggacgtatgccagcacagctgacaccgtacatgtagcgtccgtttatctgcagaacctggagaacggctccatgatgagatgtgcttggaaataggacatccaatatcaccatggaatggtgctccggtaacccaatatcaatgatccatactctggagcttgaaaagcactggtcttctgacggtgggcagtggaggatcccacaagcccgattcctcgtcacagtatctatcaccgacggagggtgaacactgcaccgggatagaaacgaagtgccgaaagtttgtcgaagctggcgggaagaacacagtggctcttgtgggagtatagaatacaaagatatcgaggggtgggtagggttttatagttcgtcgatatcgacctccttctcgtcttcgctgtcgcggtcttcgtcgaactcgacgttgtcctcgaaaccctcatgaccgtaggtgtcagtttcgttgatcttggcatgctcaggcagctcgccgtaggccttcaagctcctggcctcgtcggcggtatatttcatgatgacatcgcctttttcgtcctggtagtcacgcagcgaaagaagaatgatatcgccctggttgatccagaccttcttcctcagcttgccacggatgtgtgcgagtcgcttttcgccgtcaaagcagagggcctcgagacggccgttgccaagcatcttcacgacctgcgcatactcctgaccttcctccttgaacacaagttcgcgcttctcgttgtcgttttcgttctttccacgacgacggtttttaccgccctgtattatgaggttgtgttagcatattgtctagtggcaaacaaattcgacgcctatattatatcggtcctgctgcgctccaccgtagttgatttggccccgattatgttgggatttcgcgggcataacattgtggtagagccagaggcgaagttgtgcggcacaccgcaaaaatctgagagcggggttgaacggagaagagaaatgaaaagtcatacctttcccttgttcttgggcatgctgaaacgtccctagcagttggttcttgccgggcgtaatatgtctgatcagcagtacgagatagaccggggtcctgaatgaaaggaaatggcagccgaagcgacttgaaagtggggggattgtgcctttaaataaaatcgcccgctcttctgaatcacgttaggggacgattatgtcagcgatgcgtggcggcctgaagtttgccttgtctgaacaacggattatatttaccgccttggatgtggcggcagaactctggatccgactattgctggggctggtttgttggactgcggagtacactgagttcaatcttaacgagatgcttttgtccgccgaatgatacaataataggtgcattcctgtcgcgttcgactccctccggggcatatatgatcctgctgcgcagattctttttttccttcctggcgcgctccttcagaaaatgaagaccatcggaccaaaaaacttgtatactgcgaggttctctccaaaccagatcatctcaccaattgctcatcggtatttaacggcaagagtcaatcccatcactccgaagatccagtatctatgcgacaaccgtgatcgcaatactctctggtggagggtttcagttagcgcattggtttcctacaagcgagtggttcgatcatgggttgcgcgaagagcgcgagcagcgttcaaacaggaactgaaagaacgcggatttgatgcagagggcaggaggctggattcaagtactccacgctctgctgctgcgcatggcttttccggcaacatgacagggactctcaatattgatcttgaaccggctatgatttcggcgacatttcccatgattcgggaggagatgaagttcacgatgaatgcattgattcaagagcaacaacggaagcaagcgtctcagcagcagccgcggaaacaagcgcggaaggcgattagatcccctacagatgcttcggttccagagcaaccacgggagcaaactccatttcagcgtccacgcaaacaaatgtcgcggaaggagtcagctcaaagtgcaggtggcaaagtttaccgcaattctattgaacgtggaggcggaacgaggcattaaggcctaatatttacgaagctcgttagatgatacccatgtataattaattcaatagagttatagatgttggtccccgcaacagacaaggaacaggcggaagttcaaaatgtcagaaggttgtataaattcatttgtaaggaagctagaaagggtgtgcctgatgacgactgcttccgctcctgctcctgctcttagcacgcggctccccagtctggctccgtctggctcagcttggcattatccccagaccggtgccgttcttctccaagtgtataacgaatttcaacttctatcacgtaccatccctttccattcagcgttctcccttcttttgttggggcacttttcttgctgatctgccgactcgtgctttcgttagattgttggtctttttgaccgtagaataggttgctcttgtgttagtcgcccttattcttgagatcattcgctattaggccctttttccttgataagtggctcttaaatgtatgtgtttttttgtttcttgtctttttcttttcctgattattgcttcctcgttttttatttccatactcttcccttcgtcttttgttaatatccttctcccatttttttttttaaggtaattttttcatcgtattatatttatgttttttttaatgagtttattcatttgcatcttt

SEQ ID NO: 5843 - DNA, 4253 bp, Emericella nidulans
  unsure (1)..(4253): unsure at all n locations
ttcgcttcttggctacgaacttcatccacatccatcatatctgcgtctccttcgtcatcagactccactctttcctttcgcttcagacccttcatcttcctcgtctgcaatccacccagatcctgcttggctagatgcacccgaccaaccttgtcaccgattaaatcaataccgatgttcttcttgttcttgatctcctcgttcggtttcttgccctgcttcatggcctctttcatgacgtcgcgaggtgcctcttggatacgtccgactttgaagtcgagcttgggtccaatctcttccagctccacgcgaggaagcttgtgtccgctccgcttagtgacgatcttgtaccaccgtagatgaataataggtgccagacccgccgtaggctcctccgcaccaaccataagcgcatactgtagtccttcaacgtcaatcttatcactggtctcgcccttgaatagatccaccagcatgctcttcagcatcgtatgcgtcgtcgatgtcgtatcgtcccatgcgctgccggaaaagagcatcagcggccgcagaccgatggcgacatgcatagaaagcctgttcatctcgggaatcccctcgccattggcatcggggaggagtaacagctcagccatgtcgagaactttggagtcaaagatgcgcgcaattgtcaggcagttgggcctcttcttattgctgcttccgaaaattaccatgccgcagtcattcttgttggccaggaattcgagactctcggtactctcgaacgggtgaatgttctcatttttcttgtggaagaggacggaatgcggtgtcgtaagagaatggaaaactttgaggacagtatgtaggggcgtaggacattttgacccatggagcagcaatacgcgctttgcaccttcaatgagttgaggttctttagccttgaggatgcgtgcagtgcgcgggttctttggctttctgtgcagagatttaccgttaacaaatgcctgttgcggagtatagactagacaacataaatgacgaaaatggagcagtaagacgccaaagtagcagtcaatcacttacacttctcgaagcatttttatcagacagaacgtgctacggataaagttggtgatctttaagttttgctacgtccggtaaaatcgttggaaaaagtttgggcggagagcgcttggcatctcttatcgataagcgatatttgattgtttatccacgtatacattctatcaattgaaaaaacaatgcgaccgtagctggaaatagatatccatgaaaattaaataattcatgtctttacattcgaaaatacaaaaggtctcaagttataactactccagccgcagcttttcgaattcccgaatctgctcctctaaccgagcaacctcgctttcggcatcccggagtttcttctcttcctgctcacgcacttcaggctttgccttctctttccacccggcgctgttgatcaaagtagtctggcgacggacggtttcctgcgccttcttcaagctggccttgcccttctcttcttgttcaagggcaacttccttagacacacgaaggtagacagccgcttgtgaaccaacaggagcaacgacacagcctgacggaggcgtggtgttctcgggtccgagcacactgagttcaccaagagtcttaccgccaagagacttgacaatatgaagctcatcggaaacagtcttgtgactggttgcatcgtaggtttgaacgataacatcgcctttagtcttgacgtcgtattgagcgaggatcgaacgaatggccttggacgtgttcaggataagctcataagcagtttcggctgtagagtcgtcaaattcagccttgtactcgggaaacttggccttcatgatcgagatagtgttgtcgccaggacggcgcggcagacgctgccatagctcttcggtgataaatggcataataggatggatcatagtgagagcgccttccagagcggtgtaaagagtctgcttggcagattcctgcacttcttgtggtagctcaggggctaggagagatttggagttctcaatgaacacgtcacagagctggctgtaccagtactggtaaacagtggaagcagcatgggagaattcgcgatcctccagggctatgttcacctccttagcggcggcgttgaatttgtgcagaatccagcgttcagaaagagattccttgccagtctttgtcggggtcggcagcggcttgaaatcatcaccaagctttccaagaacgtacttggtagcctggtaaatcttgttacagaacttacggtacccgtgaatgacctggatgtcaaatgcgatatcgccgccttcaacagacaattagaatcatacgcagtgccaaaacagtgtcactgaacttaccaccggtagtgtaggacacaagggagaaccgaagagcatcagcaccgcactcaggaatgccctttggaaacgccttcttttgatacttcgtagcggtagcaacctccttctcagcaaggttacccacgagaagcttggcatggaggtcctcaagcttgataccctccataacatccaaaggatcgatgacattgcccaaagactttgacattttgcgaccttcagaatcacgaataagggaatgacagtagacctccttgaaaggaaccttgccagtcatcttgatacccaacatgatcattctggcaacccagaagaacagaatattccagcctgtctcgtgattgatgtagggtacagattttcgaaatcgtgagtctgtcgaggccaaccgtgagttgataacggtcagaggcctgaagagaaccaggtgtccagcacgtcctcatctctcttgagagtaaatttcttaccagggaacttcgcttcagccttcttctgagcctcctcttcattgcggccagtgacccagagattgccatcgctgtcatcgccttcctcgccctcgatttgtacaaagtaagccggagcttgatgaccccaccaaagttggcgagacagacaccagtcgttgataccacgaagccagcggaaatagctcttctcggcagactcgggtctgataatgatttcgccgttctcaacagccttgatcgcaggctcagcaaggctctccatcttcatccaccactggggcttgagaatgggctcgataacatcgtttgacttggcacagcggggaatcttcatggggttgtgctcccatttcacgtagaggcccttctccttcagcatctcgataactttgtatcgagcgtcaaaccgcttcataccggcaaatggaccaccattcttgttgaaggtaccatcgtcgttcagaacagagatgaattcaaggttatgggcctttccgcggttgaaatcgttgaagtcatgggccggggtaattttcacagcaccggtaccgaattcagggtcaacttcaggatcagcaacgatgggaagtaggcgatcaatgaaagggtgacgcgcagctttcccgatcaagtgcttgtagcgtttgtcatcaggttggacagcgataccggtatcaccaatttttgtctcatgtcgtgtagtagcaatttcaatcctctccttagtaccatcaatctcgtagcagaagtgagtcaggacaccgaactcgaccttcttctcatagccgggaacatcaagcagcgtacgtccttcaacctccttgttctcgacctcgagattggagagagaagtgttgagagctacacaccagttgacaaagcggttcgaacggtagattatgccccttcttatggagccggccaaaagttttaataaacggttgggaaggattgtcatccctcggaaaaagccttgggaggtcaaataaaaaaaccctcctatttttgaaaagattacccaatttgccagggccctggggttcaaaaacacaattttttaaaaaaaccttttggaccccagaaaggggggttttttttttttttttcaaaattttttttaaccccccttggggggaaacccggggggatatatttggggaaaaaaaaggggttttcttttttcccgcccgcaaaatattttttttaggggtttttttaaagagccccctcttttcaaattctcctctttttgaaagagggggggaaaaaaaaacacaaaccccctccgggggcggaaaattaaaaaaagggccccccccctgtgggggcccaaaaaaatatacccccctgttgtttctttagggagaaataaatnaagggg

SEQ ID NO: 5844 - DNA, 4759 bp, Emericella nidulans
attgtctgccatctggttgggattgcatagtagggcagcttggccttgcgactctgatgcaaagcctggttagcgcaattccggggcgtcaaaaagccagtgagttctccattaacgaggagggccgttgcttggtggacattagggctggaagctaggcatgcactgaccccgtccagctcaaccctgaacccctgcttgctgagtgagccatgtccatgtttgtcatctataggtagagagagcataccttggccttgacttggtcatcgttccgtccaagggtttcaagactaccattgggaaaccaccgcgcaaggtcgcccgtattgtacatcacagacctcctggcagagtcagccgctgtaacgtattcacgaagaatgcgccactgcacacccatcatcaacaaacacgtcgtaatgataccgctccgtcgtcttctccggcttgcctatatagccccgtgagacacccaagccgccagcccagattgtgccaacttccccaatccggccgggctcttgttgccgttaatatgtagacattattgcttgtgttggttttcctatggtgagctgcatgcccgtcgtatgttcgtgcattgtgttgatgattgtggtttcggtaggcccgcagcaattgtagaatgttgcagacgcagcccatctgtctgccagtcttcttttatttagatgcctggcttaatagtgtgcagttagcttaccgttgaggacatggctcacctgcagtggccacgcgtttgatattaggaaagtcatccggagtatatcgtgccaggatgctcggggtgcagatcaggatgtcgatctgccagccgcataaacagttagacagcgagctgcacaacgggaatcaattgttgtacctctcttaacgccttattccaatctgagcttctcaagaccaaagtccccccgttagccatagtgcccagcacttcccaggcgcctggatctgtcagcacgcattgtcacaatcaggaaaaaaattctgtactgacccattatcgaagctaactgagaggagatgaccaactttctcgccgcgcgatatccccagattccccggttcttggcagaggatgttggtgacgttcttgtgcgtaacgtccacgcctttggggtctcctgttgtacctgcaataggttagtacagctcaatacccaagtgacctacttgccagacgtgtatataacatagcatccagactctacgtccccttcgcgggggacttggtcttagtctacaacagactgtgtgtacatatcaccacgaagaggagcttcctatagaaggattggtgagaggccgcccaagaaagcaagtctctctttgtactgctgaaggcaaactgcaactgtagcagcagactgctcaaccgcgcgttgaactgtaagatctgggaccacgccgccgtccattggatatactgtgcacccgccataaggatccccagtatcccagctaccatttctgtgcttcttctcccgagaagaaggactcgattccctggcatcacgccctcgtgcttcagctgtgcagcaatgaactgggactggcggagcagttctccataggtcacttctctggacgagtggccggagaggtccagcagggcaacatccatgggcgcacggagggcatggtatatgaatgcctcatggacagtagcaaatgggacttgggtacgaggaccgaacccgaactgctggaagagatctgcgtttctttcgcttgagaacctggagtgggcggtggacatgacgatgacagtgttcttcgtaggtaagacgtatatgcgcggccagcgagatcagactaggcatattctggtttaagcagagcgtcgcgttgcagggatctccttatataggaggaccaccgtggtgccgtgttctcatattggttttggttggctgtccccctgcaagccatctccagcgggtccggtggatgtggatgtaacatttcttcttctgtgagaggtgtctgaaagcaaagacgaggttggtatccgtggttggtcggcctgttggttcggttttggtgtaatggtccgtatccagtggaaatgcagccagtaaggaaggtgggaggacagatttttggtgacagcaagctcatcacaaagctatattgcactctccttcattcaggagtgagttgttccggtgatcgaggtttggacggcgaatgacattcttttaaccgtggtcaacgacaagccttgccctcatccgtctcaacctcaactggtgcaagccaaccgttgctcaaaaagcccaatgcatatcagttactgatcttcatgtacgtaattacaccgctagaagcgagctgagctcttagagattggctagtgatatatgatcctgcacatctccggatggcctcgcagattttccccatctggacgggtcccaatcatgggaacatttatcaacctcggccacagattcacactcgtcttacagctgcgttcagacagtcgacagtgttagcttcagcctatgaagttccgtttccggcgtgctgtgagaatctgtcactgtcatccttggtgctatcacccctgtgatgtcgcgcttgactccctcaacaactgcggttcgcagttcataatcatccatgtttcatgaacagcattcgacaaaatgcaaccaagctgagatgacaagagaggccaaggtcatgagatcgccattattgatggcctacaggttctgtgggtactgggtgatgtgacgctggcaccggcagcgatcccccttgcgtccgcatcttccggggcaaaatatgccattcccgtctgcaaagtgggaggtacataaatagatatagcttccttgcgtgcctttaatttctcggatgctctctttgggacggtttctatagcaaaagaccatgactcaggcgcaaacccaatcacatctccaagggaacgatctcatcctcgcctggtcaccctgcccaggagtgcgcgtgctcacgttgaaccgcccggcaaagaaaaacgctctatcacagggtctcatagacgagcttctattgcagctgaaaatatccacaggcgacgacgatatccatgcaattatcgtaacgggctccgacacagttttctcagccggtgcagatatcaacgagatctcgaaactcgatgcagaaggtgccaaggaaatacgctatcttgaggaactatgcgatgtaatacggggagtaagaaagccagttattgtagctgttgaggggatggctgtatgtttccatccgtacataccacacagatgttagggctaaagtttgcaccgcagctgggcggaggatttgaactggcgctgatggtacactgccagtattacttcgcataatgcatgacagggctaatcaatagcagtcggatttcatcgtcgcaacaactgcctccgagttccgtctgccagaactgacaattggacttatccccggggctggaggaacacagaggctgaccagtgcgcttggcaaataccgagtcagttaagattctactgactggcataacaaatccacattcttattctcaagcgctgatgttgtcaaaggctatgaaactgatcgtcctgggtgagcctctgtccggaactgaagcccacagcttgggcttagtttgctcgctcacggaaccggggcaagcattgcagagtgcgctgggtctagctatgaagctaggctcacggagtcagtcagctatcatgctggccaaagaagctatttgcagaggtagttactcttactggattctgggccaaatagccttgtttgtgctggtatatccgaagctaacagtgggcttctcatcctagcggacgagctagggcaggatgaacgcttcgagcgagccctttattatacggcgtttggcacccacgataaaagagaaggggtgtcggcatttctggaaaagagggctccaatctggggtgtgcagtcgaatgagaaataagatcatatctatctaacagtaccaccagaatgaacttcccctagtttcagtcaatcaaatatcttttcgcgcatatctttaggtccctcagtacgtagtgtgaaatacctctaggtatcttgctataactgttgtcctgataaaagtatatagctgttgtgacactgcaggagtgcaagaccatcatcatcaaatgatctctcaaacggttcgctttatgagaagacttaagaataaattatatttgagaatatagaaaagttagaaaataataaaaaaagcaaataagataaaaaaaaataagttagagtcactaaacgtgcatgtctcttcggttgcaccgggtatgacctaagagagataccaagctagatagcgatggagcattggccagaagtcaggaaggcttcttggtaggtctacagtgaaactatatgattgagataagtaggtccaaagcagactgaggccaactctggcaggatggtaccgagttaggtatctatttttgcgtcagcggcccttaactggtagactatagacgaataccggtgccatatacatttgaggatccagcccatactattgcgaagcttgacattacaaagcgctctgtgatttgcgttttggccttctcaatagatgtagcagaaatacaggcagggccttggtgtattgtacatttaggtcgcgaattatgctgaatgggtagtcttccccactatagccttttcattgctttacacatcccac

SEQ ID NO: 5845 - DNA, 11430 bp, Emericella nidulans
agggggggggggagggggtattaattgtgtgaaaacgaagggtaaaatatgggagggagcgtcaggagggatgttggggggcaagcaactgagaggcactaataatggaaataaagagaggtgtacagaataggaggaagtaacctcgaccgatgtaacgacgcagaaatgttgccgaccaataaaagatacaggtgggagttaaagagagtgggttgggaaaagatcacaatcgcagacgttaagtagtgagactagggagactcatatagagtatagagacagaggaatataaagcgagcagagaatagagaataagagcaaaatacacagttcctcccccccgtgcgggagatctttccaaaacgggcgggcctcccagggaggggcgtggatctcaccccaattcctccgaacggagggcctcagcgaaaaagagccaagaagccctagcgtgtgggcatgtgaacggcctatagggccctgggttggcgattacgccccgatgtccttgcagtttggaagagccccaggaacagttaaagcgttgctttctctcccggctataggaggctctggcgtgccccctagtgatagtaccagcaggtcttttgacgataaaagtcagagaagcaggtaaggcaaagcaaagtaaatcacttgagagctaggtagtcaataatgtcggtctgtctgcccaatcagcccgttgatgtctgggtaaaggcgccattctggttcgcgagtttatgcttaacaggtgaggtattcaccacggcaccctagtagcaggttcctgttatggttattgtttggtggtgcctcttaaaaaatctatgttatcctctatgtgcggcttttctgttttcgcgccgcgacagtcagcagtggaactcgtgtttgctacgtgtcagcatggtctgctcatcctggtcacgttatatgcatgagatatggatcttgaaataaccccaaaagaggcatgccttgattatgatcgttgaccttgccgcgcttcctgatgccaatagtgccaaggacctctcatcaggagatggtaaagatagtcatatcgcagcgtccgggccctcgaaaatttacttcggattcattcaagattgacgggtggcgttatggcattcgtgaagctgtcgtcagccgacagagcaatgttgcttcattcggttgtccaaagagattttgagaagttttggctcgttgataagatgactggtatatttgtataagggtcgtacagagaatatgactgggatcggcaaataagatatcctctgattcataaactacaccaacctattgccgtttcctggcaaacatgctatttcattttccccttcgctatgatcttccgcgtgctcttagtgtaggcctgctctcccaggagcgtcgggccgggaatgcacttggtcttccacaagattctcacacaagaacctgttgtcgtcaaggctcagtattacaatattctttgcggcgacgtattcactatctgtgcccccctggatgcatcaattggcacgatgatacaaatattactactacgtgagttgtgccgttaaatagatccattatcactagtataaaacagcacataaattcattgtgtatatataaaagttggtgtcatgcgaatgaccatgtggatgaaacccgcaagtccctttccgcgcaagataacgagagttgacgcaataatagatcttgctcctagcgctaatcagccgctaatcaatctttatcctcccccccttgttggctacagatacacgtcccttccactcctccaccaaccccgcataatccctcggctgatgcggtacgaacaaatttttccaccacgaccctttccttgccgtcctcaagcctaaatctagaagcaacatatccaaatacggcaggacttcgaagacaaagtcagcattccgcgccccatggtccgctggcgaacgcagggcacagaattccgtgtggagtgctgtctcgcggagtagcgactccttgtcatgacaatcatagtgcagctcattgccatggtttagatagactagtacccacagggcttgtacttcggtaacgagaggtgtgttaaacgtggtaacggttcctaagacggtgatgctgtggtcatcccatagggaagggggcacgatgaagcgggcgagacggaaagggtgcagaacggtttcattgacatcttttttgtcgtgatagctcctggcctctgggacggtaccgagcataggcaggcgcgtgtggatgtttttacgagtttgctcgatgagctctggatctagcgagtctgctgtccacggtaagccgagctcttgttcaattccatctggcaagaaccggatgcctggagatgctttccatcctgtgcacaggattactgccctggtatagagcttgtcctcgttggaaaggactactgtatgccgctccagccgctcaatatcggcgatgtgcactttgaccaatccttgccgaataaggctaaagaagttatgcgagaaattcaggattcccacagcagtcccggcccagataggtttgatccagggtcgtaacttggctgtctcgacatggtcactgtaccgattgacccgaagaatatcccactccaaggaagcccaaaaaagacgcacaatgatgcgtcctagccactgtcccatgcaggaacctgcgtattggactgctcacccatatgcacggactgaaccaagacagggcacgcacgagtgggagactctcaaggagaaggttcaagggcgagaaaacggcggcaggactcatccacgatggaccagttccagaggatctaataacccagttgacgcggtgaccccttgaggcacatgcgtagacggtgtcccaggcagatttgcttccaccgagcacagttaatggtggttggtcatcacgggtgccttcataatcctcttcttcctcttccgtgcccatattctgatcttcagttttatcattggtcttagaaaaaaggatgttttggtaaagggcaagctcctttacatggaatagcggcgcaccatatgagtcctggccggcgaaaataggaatacgtggttgagaggtaagccccgttgcgagtatgagtttccgcgttcgtatacagccgtctttggcgtgtccagttcctgctgcatttatgtacctaacaacccattcttttctctctgcatatcccttgatatattccacactctctaccttgcaattcagccagattttgtcccggatcccgaagcggtctgcatatgctttcagatattcatgcaccgctcgacctggtatatgctgtccagcttccaccagtcccggcatgacattatcactcataggaaagtcgctatactcatatgaccccagaaggttgttagtccttagtcctgcatataaacgctcttccgcccagacaccgccgattgacgtggcggaatccagaacgagcaaactcaggtcgggattcagggcgagtgcggttttggcggcggcgaggccatgccagcctgttgctcagtgtgagttgtgattagttcacagaccccgtaatgacatctaatttgaagagagtggaatatgttgagagggtaatgtaccagcgccgattatgaccagatcaattgttctcggttccatcgttattagatacaccgcttaggtcgatttagatggcggtgcagtttggctggacccaatttgttgtcagttaagccatgatttagttgggcgcagaaggtattcgctaggtattaaggaagaaaggcagaaagccttgaccctgcgcgccgtcttcatataagtaccctctgctaagcgccgtcttctgcaatcacttttgcatcccatccctgtcagtctctagtaaagccatcggtgcatacaacatgagggcgctaccaaccagcgtgccagacgtgttcggacggctcagatccctgtccaccaactgtccaatcagcggagtgcacactttgaaccaagacaatcagtgaggtacttttgactagtctttaacgcctcatgaactttccctggccacccttaatgcatttcgcactggctgtgtatggcgggaaacttgagtgatatgcaaaattgttagcaggtttagggcatagtggcaaaacttttggaaattaatgtaccaaggtcgaaaatagagaagcacgcaccatttaaccggctaatttacgttaatcttcatcgattttattggtaaactgattttcacctcgtccattgtaggaagtagcgtacaaaggtcaacggagcatagcagagcctttgaatgcctataattggagacgcctgggtgagcagaaaggccgatatatgcattcatgttacgcagtgttatatggatatcctcgatacgcaatcctcaaagggtaacatgctcgcgggaaatctaggtaaggtgtctgcagagagggcggtgcgggtggatgctcttgtggggatattggattacttgtttcagcgctgtggtgagtttaaaagataaatcggttgcaacctgatacgtatatatcatgcgatagctcatctcgagcaccagtgtctgggatgagcttaccagtcatgtaatataagcagctattctctgacccctgagtatctggcccctcatcaaatatactgtatggtgagataccagagaagagatctatcgtcagtgagatagacaatcaatcgtcatatggtatccgattcttagtaggctacgttcgtgtggtaatgcagtttccttctgccctttctcctttgaggcaacacaacctatgcgcaacaatatcggtgtctgctgccggcatttccctgtgcatggatggggagtgtgtcgggtgcgaatgggcaggaggatgggataccatccatgaacgaacaaggaacgatctgggttgagagcgccatatatctttccttggactggggtggacgaacaaggcattgggtgttggatcagatgccaaggacgcaaaagttaaggttcgagaacctgttcgctgcatgttccaacatgagaaacgcattttgaagggctaaggccataccactcagctgcacagacaaattgaacgacttagaacccatccctcctggacccttgctgttaaatgagcaataattcgccacgcaggtaacgtgtcgcggttaatggagctcggggccacccattagcccttgcgcgcgtaatgcgtgccctattgtctggacataataggcagccttagcgcatgggttggaaacaccacaaccgacctaaattattcgattgcccgtcgggagcttcggataccgcggcgcttttccagtaccacgccaaaactactgactcgtgttacgtaggtcactgaagttggtgcaacgggcccgggcaggaaaggctgaccaataggtggacgatgccttttggcctggggaggtcttgtgagataagcttcaatactggataactgctgctgctgagtaggtatgatcatggtaccaagttgtcagtagccgctccaaaggatgtcagatactgaaagctacgagctgtaccatgttgaaaacagcccgtataattgccgaacaatgaaggagacccgatgggcggcttgtaaaacagggttttatactgctaccagctacgcttagcataaatgaggagggtaggtagcaccttaatgtctgctgtgtaacgggcgcaggcagtattatttcaactgactgtcctgtataagcgagtatcataagcttagagaaggaaatataagaaagaagcgcaaatatcctcctcctccctttatcaactatttctagttatatatcaagacttttagtcctgtatgctgacagatctctttaccaacgctacacgctgtaattccatggttgtacactaatattgcagaaactttgtttagatctatagaattattccttgttaagggcatggctaataaccacgatccaggctatagcctgtgataattacctccctcctcctcaaaggtagaaagcctgtggtcacaaggctagtaatagtaccatcaatagtatttatagttctgaggtctggaaatattataataagccacgtggttcttaagcttctatcttatgttgtgaatgctcacaggggaaggagcagaaggaaactgtatcaactacaagaacgtagcctacttaggattggatgccatatgacgattgattgtctagtagactggcttgatgcctacaagctagaacttcaccccaagccaggcaaccccacccgtggaccaataccctagaccttgtctttagaccttgtcttctctaacctactactaagggccctagtggaagaccatttaaagactccaagtagccatgcaataattagaataatactggagtgagaagagccctcccctgtatataagcttagctctaccaactaggagaaagccagaaccctggcaagcctgcctgaccaaaatctactaattaacctactagctgaacaactggttcagatatccgagctagtaattcaaggtatatcaagatattatacttgtagactccccatgtcacaggctatggcctggatcttgatagtcggccatgccctcaacatggttctaaataaggtttctgcaacatcagtgtacagcctcggaattgcggcctcgtaggaaaagagatccgtcctcgtagcttcgggaaggagatccgccggcatgcaagtccaggaagtcggaaatcttgacgtatgattgagaaaggttgataaagggaggaggaagatatctgcgcctctatcttttgttactttctctaagcttgtgatactcgtgaatacaggccagccagttgaaaacaatactgcctacgcccgttacaccctaggaccctatagtagactccagaatagacttgttaaacccaacccacgaaacccgccccaacccgccccgacccgccaagaaatgggtttggttagacctactaattatccattgggttttggatatttttggctgccccaaagcccggcggagcaatccgctgggttgccaagatatctgaataggtatattactgtatttagattatattttcttacttagatggtttataatacagtacggaggtgtgcaccaaaagtcatcgccgcgctagtaatttatgatgccaaatcctgtaattccattaccagtcgcaagctgataggttgatgatatatcgatcttctaagcaaacatcaacataacctcttctcatttttgaagctatccagatcgcaaattgacagatcaaatcagtttttatggtgttttgaagcgctttttctgctatttttgcctccctgcctccaattctgcctccgaactgtacacgccttccttcctgcgatccttacaatgccagcgcctcatccaaatgagcttcgagttcaagtcctctcttactgggccttagggattcagccacccgatatagccaagatgcttcagatcaacgtccgtacgatatgggatatgatccagaagggccaagatcgtggctacaatcctgctcagtccatgagggttaagcttgaatatgtggaagatggcaagcgctctggccgtccgaaggagatttctgaagctacagatatggcagttcttgcatctgtcaagcaggataggaatggacgtgagaaatcttctgaaatccttgcctttgaagcaggtatatctcattcttctgttttacaaatcctccacaagcatggctttacaattgttaaaccttcttggaaacctggtctaactgaagctgcaaaggctactcgtcttaggttctgcttggatcaccaacactggactctggaggactggaaggctgttatatttaccgatgagacttctgttatccttggccaccgtcgaggctccgtacgagtttggaggactgctagagatgctcatgatccaacatgtatctgaaggcgctggaagggatcatctgacttcttggtttggggatgctttacatatgataaaaagggacctctgcatatctttgaaccagagactgcttaccaacacaagaagtcagaggtagagatagcagctctaaatgcagagctggagcctattctcagggaggaatgggagatagagacgaggctaaagcgtctgcatcttcgtggggtccctgggcgtgttcctacatggagatttactgagaaaactgggaagcttgtacgaaagagcaaaggaggagttgactggtggagataccagcaggtattctctaatagctttattctcctatattgggctaaccagcttttctcaataggaaatccttcttccacatcttattccttttgccaaggcctgcaaaatcgaacgtccagatacaaaggtattagaggatggggcccctgctcataaacaccatgctcagcgccgcatttacagcatccatgaaattgagaagatctttgactggcctggcaattcgcctgatcttaatgcaattgagccatgctggatgtggatgaagaagcgtacaacttcacgtggagcacctagggacaaaaagactggaaagacagcttggataaaggcatggaatgagctccctcaggagaagatacagggctggattgagaggcttataaggcatatccaggaggttatacaacatgatgggggtaatgagtacaaggagggccgtacagatcatgatgctcgaagctggaagggcaggcggatcaaaggtcagctttctgcgcgtcaagatctatctccagatccttgagaggacctctgaatagcttcatatctgctagctttgacattttattgtattctccttctctaatatcaccacagctgtatgccgaacattggttgctatggtattttcttacaagaagccggtacagtggcagtactagcgtcaatactagcgcggcgaagacttttggtgcacacctccgtatataaatacagtattttattagcaatgtatatcactgcttattaaagtaatgatatgcgtaactaggttattttgggttatttgggttgggttagaattatttgctaaacccatgggcggttttctgttcaggcaacccaccccaaaaaccgcgtgggcagatcagctaggcctgaaaacccgccccaacccgtggtttaacaagtctaggccttcctttcttaataaagaaaatagagatacagcacttctctaggaagtggtagtaatatctccctatacttactctacctatgtaatgagacgtatttggatggatcttcctatctagacgtgccgtacgtacaagaaggaatcgctggaaagaagaaagaaaaaaagggattgctgtcatgaggaagtcttaagaggtggctcaccgcctttaagacaacgttggccgccttggccgagtcactaaggtctaaggtccccttgtatgggcaagaacccatatgtagtgcgggtgcggataatcgacacataacccgcatgaagaatctaaccttagttggcttagtggattatataatacggccaaactaagtatagtgttaaggaatgcggattaagtggtgcggattcttctaaatcttgtggattttggtgtggtccgaattgtatgacaaagaacccgcaaacccgcgcggattgctttttgaccctgcggattgtaaccaacccgccccgaggagaccacatgtgacgtggtaaatgtcgcgagctaactctaagtcggctattcctcttttgagcgcactaacccaaaggagtaaggtcgacttagagttagctaaaatataatactacttgtcagtaatggacttttcctcctttatttacctcaacttcaatctgccaataagaaatagtctcagactagtcactgactagtttgcaacttgctgctactatgtctacaactctgcaaattccaggtactattgacattccagaacaggtacaagacttcatttttcttacctagtttgtgactagttgctaactggcagcagattgacagagttattcttagcaatcatccaacacatcctctaatcacatctaaacttgaatactgctatatgttaccttactatcctgaatctcatcagaatggctatacctatattgtcctacttgatccgaaccgggtaaggagcagggaagataagggaagacttattaaaaatgtttgttctataactaataagggactagttgctgactagtcacagacttaataccatgctcgccagttggagtgttatgatgctcaatcaccctatattcaaggcagggttactcaaatatagtaccagtattcaggcgtttgaatatactcttatctccatcttaaccttagaaatatataccattacaaggttacagaagatgactggaactatatctgacaggagcaacaacttattgaagagacagaaatagatcctaaaaaacagaaagcaatctcgtgagtaactagtctttatttgattagagactaatcaaggactaatcatatttatatagacatttctttggtatgctttgtgtatttaagagatatcaagcttgtcggccgcaacaagtagggtgtgctcctaagatggtacttggcgaagctgtaagtaccttagggtagactagtctgggtctagttactaactagtcagcttcaaataggccatgctttatcctatatatgttgctctaatttaacaccagaaacctataaacaatatttttttgattctcttgcatttcatacagatacagatatcctatatctagctcaattattcgagcagagaggaattattgaaccaaaatactgtgcaatgattgatacaagctggttaaagagaatgtactgtaactgcagtgagttatacagctagtcttgggctagtcttggactaattgctaactaattcttgctaaggctttctgcatggtgatgatatattactaatagagtcacaaccttgtactgtgatctttaatgttatgattctattagacctggaggcctttccctattatctttttatatcaacaggaatatatactcatcctctacctcctccagccaagatccctggcgaaattgcagatgaaatctcttatattattcgtgacatgcagaatcctgatcttcgaattagttagtactgctattaaactaatccctttctaatctataattagttgctaactagactaggccaacttatccacagtcctcaaatacaggacttactcgcgcgatataataaggacttaattataggcctttatcctgctctagcaaatatagattaaatataggctcttatttaccaggagaagcttgtattttatcctgatagccaa

SEQ ID NO: 5846 - DNA, 4619 bp, Emericella nidulans
gcctgaacctggttgaagatccatgtccggacgatcgtacccttctgtttcccattcgcttgttagaccatcgaagacgacaacctggtctgcttttgaggcgacttcgacagctttggaaatgagctcttcctgcgtctggcgccgggcagcgccgaagcggaagcctgcaggcccgaagatgaccaccccgcgggtgtcgatgtccgaggtgggtgctgtcccgaactggaaggtaattttgtatttctggccagccatgagttccttggagcccttttcttcaacggtgccgtttccaaagaaggcagagccgagacgctggttcttggtgttatcaacgacgacttcatcatccacgaggagtttccccgttccgacgacaacaacgccgaagtcgtagacaccggactcttcgggagtgaaatagccctccatgttcacctagtaaaggtaagacttgatcttagggtggcgatagtccatgaggaagccctgggatgagacaaggtgtagctcgtggaggagttcgcggttgctactggatgcgggctcgtcgtaaacgcggaacttgaagcccgttttgccgtcgtcggtcttcaggaggtggccgatcaacggaaggtccttgtatgagtatgaaccttgggcgaagtgaacctcacccttgctctgtgctgatacgccttcgaagggtgtgattgtgtagtacgcatccaaggatgcagagccacctccacagtaagcggcgatcttggcgtttggtccgatcacggcgatggacttctccttgttgaaaggtaggatgttatcctcgttcttcaagagcacgatagactcggccgcagcccgtcggagtagggcttggtcttcggggcggttaagaaccttttcctctgcgttttcggggatacccagtggctcaacgtaatttacaaggttcagaacgttgcgtacacgttcatccaggacaaactcgtggactttgttggatgatacggcgtgtgccagggcgtctccccgccagcgtgtcttacctggcatctctatgtcgagaccggcaattattgattctgacgtactgtatgtcccaaacctgcaacagcttagacatgattccggtaggactgattcaagaacctaccagtcactcataactagtccgtcccatccccactccttgcgcaaaatgtctgtgatgtacttcttattctcactcacatgggtaccgttaatcttgttataagccgtcataactgtggccgttttgcaaatcctcatcgcaatctggaacggcaagaggtatatctcgcgtgtagcccggtcggtaacaatcgaatcgaccgccaaacgctcatgctcctggtcattgcacacaaagtgcttcaggcacgcggcaacgcccttttcctggattcccttggaacagtagccagccaagtggccggcaagaacaccatcttcggcgaaagactcgaaccctcggccgcccagcggcgatcgttgcgtattgattgtgggacccaatatgacgtgcgcgcccttggcaatggcctcttcccccatcaaatgccctaccttgtgcagtaattcagtgtcccaggttgctcccagggcagtagcgcaggggaaacatgctgctggcacaccgttaaaaaaccgcgttccgcggactccattggggccatcggacatgcgcaggctgggaatgttaagcctggggacagatgcagtatgccagaagtcgatccctatagaagctgtgagcccttatttgcaacacccagcctaggcttgtcgaaagattacctgacacaagatcgatcttctctccgagacgaagttcttcaatcgtcttgtccacatccaattgaggcattgtgagagatgtatatgagccgagataaattcttccgttttacaggagggcgaaaggaaactatctgcgctggtaatcacagcactagcaaaccaggtcagaaattgacaagcataaaatgacaagaaaagagcaaggaatgccaggaagccacggggagaaagactagagatatacgtactaatcccaaccccagttctccattgcaccgtctttccggactaacgcatcgatagctgatcagtttcgcataagttgatgctccacacaagaatagcgatcagtgaccactgaggacgtcccatgatcagtgctggctgaattgcctgaatgagagtagatgcaattggcggagctggaacacaattggcatcaaaccggtggggaggagagcaagcattgacaagaaaggtgctgaaaagagaacgggacttctgccgaagattgaccggttgcttggccacagcctaggtaatcggcgactcggcccgacctccgtgattcttatgatgttgattgtacaaagatgggaaagacaggccgtcagccagtcagccttactaggtggactaagtgggtcacaatccaagggcaatggcggtggagcatcgaacaatgactcgtgttcaatgcatcaagcagatcaagcagttctagtagtactacctggaccaacgtctaatatcacacgcgctgaccacaggcatagaaaaagtgctcaagagagggatgggtttcaaagacaagagaatacatgttgcttggccattgcaatgagaaagacaaaacagcaatagagcggaatgcttaacaccgtcagaaatgctcatatgatatcatatcaccaagtgaaccagacataagaaaatcaagtaggaaagtacaagagaaagtgtatctctgaagacagcaatcaagcccctcgtcgagcacgcttgttctcgctgccagcgccccgtccacctcggctgcttccatcactgtgtccgccttcatcccccggccgtccgcgcttgcggtgaggtccgctcccactgccgctctcgcgcgtatagttgcgctcgcggttccggtcgcggttccggtcgcgatcgcggtctcgaggctcccgtccgctgctgctccaacgtcgttcttcatccggcccaccgggaggagggggtggtggaggagggggagggggttgtccgccgtgggacgagggaggccggagacgtccttcatgctcttgtgaggattctggaccggcgtcgcgatcgcggcgccttcgattgtcttcacgcggtccaacaccccgacgggacgcttcacgaggttcgtaacgttcgtctcgaggtgctcctgaaggcacatcactcctgcggctccgctctcggttgcgatctcgtccatcctcccgccggctgctactccgtgatccgtcttcatcaccagcacgacgatcccgttcccgctcagcttctcggtctcggtcgtgagaaaagctgccgccagtcaaatagcgctgtgatcggcggccatcggagttggtgtcatcagtgggttcgtgacggccgctgccacccggccgacttctggagtgtgcatctccctcaggatacccggacggcctcccagcaaatagatcggttttgctctctgttgaaaccccggggcggggtccttcttctgggcccgagtgctgcggtctagttgcttgcggtgattgcactcgaggggtggctggctgtcgattagtaccgcgaccccgactggttggaccgggaccgcggtctgaaggcgacccagactgctgaagcatgttgttgagattggcaaaccgtttgtcgccgcgtccgcggttcaccaccgaaacctggcccacctggaggtccacgagtcacaggcgaagatcctgagcctgcaccaagtccaccacgaggccctaaaagaggaattatggaaggaggccccgaaaggccggagcgggggctagacccgtgcgcgttgtccgaagtttgtccttgtagggccttgagccgatcagggtggattccacttgcctctagcctctccgccgtaggggataaagtgtctgcaggaggatcatcattccgcattccctggcgtccagggcctgtgggcggaggacggtcatttaccgccggtccactaccaggaggccctgccgaaggatgtggcgcgggagggtttcgcccacctcggccaggcgcagtcctgcttcttggtccagagggtatatcagacattagatcagcctgtcgagatcgtccgacaggaagatcagatccaggaactgaatcccgggggtcaggaccttccataggggttcgtggtggccggtcgctgcgaggtcctcgtggcatttcttcaccgcggggaggcggctgcgtattacttgcgggtttgcgaatatcagatggaaagcgttcggggcgattcgggaggtccaattttggaggggtcagaggtcgggtcggcagagacctccgatcttctctttcctggcgtaatggttcgccacgacgatagccatcgcctggtctatctgaaacatcgtgtatgaggtctgcacggtcggggtgtgtttgcggaccagatcgttggccagagaggttctcacgagaatctgcaggacgggggcggccaggccggtcacggtattgtgtcccacggaatggctcctctacaggcggtctgaaagagagatccctttagtagggttaattgcggcccgaat

SEQ ID NO: 5847 - DNA, 10010 bp, Emericella nidulans
gtttgtaagatattgggccgacggtaacaacagggtgaggcccaaagacgtggaattgtatggggaggatctcataggtcattcatacaaccaagcatcgttaatgatactaaagggaaaaggtcataagacatcaatatcagactcaaagcgcagcaaaagcaagctcatatgcaaatccgagcgtgacttagcatgttccagcatgtgatcgaagctcaaatagctgatcttgtcgtcagtggtgtggatatgcttgttactgttttccatcgtggattccgtcgccatggcagacgggtatccgtacttgcttgctgaggtgtggtcagagcaggcgtatccacacttggtctcaacaaaggggatggcgcaatactggtaaccgggattagtcaaatattcaacagtcgaaaagaagtgtacttacggtgacgatggtattcttaaggaaagatgtgagtgcggggtcaacaaagtcagtcatgactccaatagactctttctgaccagcatgtttggttccttgaacataaccagtcatatcctgctggagcatggctttgacatccgcctggttcttcttgtacttggagaaaatggcctgcgagccgagcattccaccctcttccgcagagtaccaatggaactcgattgtgtttggcgattggccgtgtgcaacgatatcagatttcagcaagccacgcagagcctccagaatggtgacggtcccactaccatcgtcgtcggcgcctggagcgcctagaaaagacggaaggaataggttgatgctgtcttggtgagcacccaggacaacagtctttttcgacagaccagggatacgtgcgatgatactgaactgaccccaagaatgatcgaatttctgaaccgtcgcgccgaatttgtcggctcccgagtcgcggaccaccttggacacctgatcatatagccactgagcagattccacgccggacgacgatttgtagtatctcgtgtggaaggacgtaaagttctccaggtccttacgcatattgtccatcgataaccccgcgatgagccccttaacggtgtcaacatatcccatcttttgcggataattgacgtagctgccagcgtctaatgttggaaatagtccgtagttacgatcctccgtaatatcgatgaaattcaccccgtcctagccagcggttagcagccgaaagagcggggaactccagtgcgccatacgagtttcagagcccatttctcctcctccgttacccatctcgtctggtatggtgacaactcaatgagatacttctcttgctgctcgtagtgagtttctgggagctccagcacctcttgctctagctgtggaatcgcgtacgaccaggcaccagtggcggtcgcgccgagaacgagcgccgtcgagagcttcatagtgaacaagacttagccgatcgctcgttaggaatagcaataataataatgaatcctaagaatatgacaattgaggacggaatttctagaatctatgcggagggagaagggcggacgttgatctgatagctgcgaataactgagggtggggtgtgcggcagagaagtcgcaggtcgaggaaggaggtcacaggtaggtcaccgtaaccgatggacccaagacaggcgactgcactagatggtaagctatcgtaaaaatgatatttatccaattctgaggtcgaccaagttcgtaatttcgacagaagcgcttcgcggtcgtcgtaacgtcagacctgcccaggtgctttatataagctgcccaatggcgtcaggtacggtagttctccaccaggcacaagctgtgcctcaaagacccctgctccaacatagcctcacctccacttacggttagcattttctcaggatatcctccataccccttattgtcgcttctggggacaaaagggaaaagtcagactcagtgtgatgctatttttaggtggtgacgaagttactcttgatctttaagaaaacagcaaaactcagctctgaacccccgcaggcccgcacattgccgcggatccgcagattcgaaatccagatccaactcttgtcatttggagacgccccactgagtcgcgattcaaataataggttaattactacgaggagcacaagcggccgtcaattcttctgtcgtctgtgatagctccgacaagaggcaatctcactagcatcagaatgggctctggcgcaaaactccggtcatcagggagacagcccattttagcggtcccaagcgcatacctaggcttagttaccactggtctcaactctgggcttcattcatgcaattagtagcctatagcgcccaagattgatacatctcgtcgaagcagatggcacacgaaacaaagcccggttacaggcaaagcctatgtaacctaatcagttcattctacttaggcatgacggccacttcatctcttgacacacagcagactgccgagtccttctgtataatatgtgattttattaggattttattagtgtaagttaaggaagcttacggatgcgtgtgtcgtaaacagacatagttcattgagacagtcgtagcgtcttggttggctcactggctagctcagagtcgaaccagtcgcaaattggatcggccgatgcgatcttaaaagatgacaccatacataaagcattagcaggtcatgaatcaacagttcataatatatgcttctattgggatatactttgattctgaacccagatctagcgcgctgatacctggcatatatcttgtacccaacaatcagcggggctgactcaacctccgcatagccagcagcttccagcaccgtcttctgattctcatttgtaatcgcattaccatcgtcctccttaccttctttagtatcctggaggttggataatcatccacctccctttcctttctctgatatttccttctcttaccctcgttttgcgcaaatatgtcgcctatatccgtcggccgaggcagcggcgcttccgagtctttcactcaactagctgatgcagatctcgaatccataggccgccactgcgaatactcgtactgcaaccagctcgacttccttccctttagatgtatgtcctgtcgagggacgttctgtctggatcacaggactgagactgcacatcgctgcccaaacgaaggcgaatgggcgcgccgtcgagacggttccgcatccgcaaccagcacgccgacgcagaaacctactatttacaactctgatcagtgcgcgcatgtctcgtgcaagactttaataaatacgctcaaggatcccggtgttaaatgtccggaatgcaagcgcgaatactgcttaagacacaggttgaaagaagagcatgactgcgccaagattgccccgcgatcaggcaccggcggtgccgccactccaaacgaaacggtccgctcaatgtttgcaaaggtccgattgtgggggaaggataagagtcaggcagcagcagctgccgccgctgcggcgagaccaaaaccaaaggcgaatagtcctgctgcacgaatggtcgcggtaaatgctatgaagaaagcggccaagggcgacgcgagcgtccctgctgataagcggatatatctgcatgttgttgggacctcagaaacgcaagggacagatccgccgaatggcgatttttggtttgattctcggtggaaagtgggtagaatcttggacgatgccgcgagacgattaggcgttgaaaatctgaataaccgagttggagaggaggcgcggttacggatctttcatgtggagagcggggatttcctagagttctccgatactcttggaggtgggaaagtcaagacgggcgatacgatcgtgatgctgaggggagccggggtgattcttgggaagtgatattgatctttggcccattttatgataacgacgatatgttccgatattgcatagcatgatacacattatgttggcgttcgggaatctgacactgatatttgaagcacgaaatcttcatgatcgtaccaccaaagtcgtctagccctagaaagtacgagaccagcggcgacctagttcctgcgaaataggaaagagatctgaaggacttaccgtcaattacacacctgagttgcttttcccaacttgaatctgctgtcctggttctttgtatatcgcatccagctctgttgcgccatttatgtcggaagctgtaggggatgcaagatcgcttagatctctaggcaaggcgaggatgccgattccgcagacctctcgcgaagaccataaggataataatcattgatatgcgcattaattgatgaatatctgcatattaagcagacctcgatggctgcgtaccatgcgggagctgttggccctgctactgaggcatcgtggtcataacgtaggattcggcctttttgtacatgcccacgtcaggtcagtgggaaggttgaaaagcagccaacgctatactgattcgaaaccagtattgtaccatgttttcgactcctaacgcagttctgggagtgctgcgtctctattcgggcttatttcgacgcatattcccgacaagagcaaacaccagacaaagaaatgcttatagcatgcatgatatactgcagcttgcgatgtaaacaagaccatgctatatgcaggagcaaggctggggggccctcattttgactctttgtggtttcctgtacctggcttggtatgcctgtagattcccaggcccctttacggagtgatttatcctgacttcatccccacattccccgtgttgcacagccaaggcagagattccccttacatcaatgatcggagcttatgttgaaaaagaaggcgtttagcataatacggcccttttctggacaaaaacggcgttgaaacacccagacgctgcttggttttctctttccgttgcgtctgcttcgcgacttagggcaatgcatttcagtataacacggtctcagcggcttggagcagccattggaatctcggctgccttctttctcacagagatctcaggtaggcagacgcgatatcgcgacttgtgtggtttcctgacatgggatttcgctaagcctgcaacagttgggttttacacacactctttggccttggtggcggatgccttccactacgtacgtgagcgtcagacaatgtatggcattgctaattagactagctaaatgatcttgttgggttcattgttgcatttgtcgctctcaaggtccgttacctcgttgacgcggtcaattatgcgccagcgatgctaaccatgatactcaggtttcgaactccgagcattcacctaaggagctctcgtttggatggcaacgagctcaaatcctgggcgcattcttcaatggaagtctgttatttgcgctgggtattagtatcttcctgcaatcaattgagcgctttatcacgttgcaccgtatgttagccgaatccggcgtgtcccttggcttacatgcattagatgtcgagaaccccaaacttatgtttattattgggtccattggactggggctgaatatcatttgtgccacattcctacatggtaacttaccttgcctgccaatccggagacacaaacttgaccggctctagaacaccatcatcatcacgacgaccaccgtcacccagattcggaggccgagcctcaagggcaaggtgattttgaacagcaacgtgagcttgaaaataaagccaaggttcgagctcatctatatgttcttgccccggtccattgacatcccgtacagcaccatgatcacaggcacacggagcacgaagaacttcccatctttggcggtcatgatttgggcatgatgggcgttttgcttcacgttgccggcgatgcggccaataacctgggtgtgatggttgctgcactagtcatttggctgacgcgttatgaggcgaggtattatgctgatcctgccacaagcatgggtattgctgcaatgatcttcctttctgcacttcccctcagtaagtcacagccttgtctatcagctgattctaaaactgacagtcctagtccggcaatccggtctcatattactcgagagtgctccaaacaaactcgatcctgcagatgtgaagcatgaccttgaaaaggtaggattcctcaattcatgctgcatggctgtgaccttatgctttgatagattcctggcgtcctatccgtccatgagctgcatatctggcgtctgaaccaacataagactcttgcatcagttcatgtcgctatgctggatcactcgatttccgaattctctgaagtatcacgtacattgcaggagtgtttccatgcctggggggtgcattcagttgccattatgccggaaatcgcaactcccttgtctgctagggccctgacccaaaatcaaagtgacataagtgggatggaggtgtcagagaagtacctaaatctttgccagtcccaatgtagttcgttctgcagagaattggcttgttgcgggtaggtgcgcagagggattctagagcagcaaagatgggcttgtcgtttgccgtcaatcaatccagcccttttcttcccctctttacccttctcttatatctccaattaatttgaccttggctcaacccaccgtcaaatcctcgaaccagggcactacccctgcggaatgattccgaggatcggctgttcctgttcatgtacaatatcgactccgtgcaacaataatcgatcacaaattccgcgatggaaattctcccaactccaactaagctgatctattatctgcagagaagccgctgggcttgaaaaattacacaaatatgccatataaggaaggtagacgcgcatttctagtactgcggatttactccaagtctccaaactgataagcaaccccactgcactgctggcctcgtagtatctataagcagctgggctgttgtgcatcaaccgccaaatgcggggtatatatacggttgcctcactagacaccgggtcttgcttgctacatcgcaccttcccacaaggctagaagtggtgtgacaccgtgcagcagagagggaagaagatataaaaagccttaccaccactctttggttgatctatctctttcttcgagtgtctctcgcaaatcttccatattctacactcgatcttgaattatgtcttccacctgggaagcccaagctcgcaaagctcagtatatccttgagcagtccatcccaaagcaatggctggtacctgcagaccgactccctcctgcagaccagctgaatgtgatggacttcccgcgcaaaagtgggatgcttactgataaggaactcgccataacggagttgtctgccacggctcttgtatccgccatgggtgagggccgtttcagcgctgaagaagtggctgtggcttttctgaagagatccgttattgggcatcagctggtacgagaagaaattggcaataactgaacccggctaactgctattagctcaacttcgctactgaatttatggccgagaaagccatcttgagggccagggaactagataagtactataaagagacaggtcagctagtgggaccattggtatgctagataccctattgagcttacagtcttggactgagtgtcgcagcatggtgttcccatcagcgtcaaagaacatataggattcagaggcctgacgctgaacgcaggctacactacatggtacgtcaattccctcgcttttctgttagctaatagctaaggtacacgaagggtcgacaacatcgcgacagacgacgcgcttatcctggaatgcttggaggaggcaggtgcagttttccatgtccggacgaatcagcctcaatctctcatggtaatgctctttacggcctaaattgcagcaattactgactggacaagcacctctgctgcagtaacaatctcaccggtaccactttgaatccttacaaccgcactcttagtccgggtggttcctcgggcggcgagggagcgtctatgggattcaagtgcgctccgttaggcatcggaacagacattggtggctcaataagatgcccagcggcgttttgtaacgcgtatggctttcgtccgacaatccatcgaaacccacttaaagggtcgaaagtgcctgtgccgggccaagaatctatcctaggcgtaatcggcccacttgcctgtcagtgcgtcgaagactagagctgtttcaaagggcactccttgatcaagagccttgggatgaggagacctcattggtgccgttgccttggaagcatgtttcttcaacggaaaatattacagtgggcatcatgtgggatgatgggtacgttcatcccatgttttgatcataatttgcaatctgatggagctagatgtgttcgtcctcatcccccagtgactcgggccctgtcgcacgctcgagagcggctccgagccttgggtatcaacgtggttgactgggagccctacaaccatgaccatggttggaaaatcattgtatgtgaaccacctccatatacgaggcggccgtgaaatacaacgaaacaacgctaactgaagaaagtcctctctctattttgccgatgcagcagcccgcaatcgtgaactcattgcagagtccggcgagccaacgcttcctctcaccgagtgggccttccagtatagccggtcaacgccactaacagtggccgaaaattgggagctcaactgccagcgcgacatttaccgggacgactatcatgcacttatgaaatctcacggtgtagacttcattctctgccctgcatatgttggtgtcgcaagcgtcctaggcgaatcccaatactggaactatacggctatctggaatatcctggaccagcctgctgcagtttttcccagcgggttatacgtggatccgcaactcgacccggtagacaactcctatcaaccacgaagcgcagaagatgagcgtgaatggaagaaatattctcctgaaagatatgttggggctccgattgggctgcaactagttgggaggcatttcaaggatgaagagactttggcagctgcaagcttagtctcaaaagcactaaagaacactacaaacgtatagctcctaactatattaatgggcgttttgaaatagacacttgagcagttgagcgttaattttaatcgatacatcatgagactattcccaaacaagcaaccgaaggctctccaacattatgtcagccaaggagtctccgatgatgtttctgattctcccgacaaaggcaccaaactctcccctcgtctaatccttgttgcaatgcgcagaaatgctggtcgagctcctagatgttttcaaggctctggaattaaccaccgcgctccgtcctttgctgttacccgatgagactttactctttgtccaggatgcggtgaggttatacgatgggtgagtattgaacaaatacaaactgtgctcatctggatttctcaaggctcatccaaagtacacttgctaactttaaccctctttaattaacagcaaatacaagatcgccaactaccaggacggccatgcgtatctcacgtcacaccgggtctgttacgtagccgttgacgagccgcggaagtactcagtcggcatcgacctaaaagacgtcgacagagccgaatatcaagtaatatgattcctgcactgccttgcagctcattgctcatgtataccaggcaggcttctggaaatcatcgccgaaaatcatcatatacccaaagcctgtgaagaacgcaggcggacctcggagctcgagcgcgagtccatcgcggctaccgttgagagcacaattatcgggagcgcaatcacctctttcgcagacttcagcccataattatacaccaccgccgccaaatcttctgaatgcgacttgggtgtgtcccatatgttcgttctccaacccggtgccgtcgaactttgatccgtttacggtaaccaattctacgccaatacctccgagcctcgcttggcgaataaagccttcggttaccaccgtttt

SEQ ID NO: 5848 - DNA, 3847 bp, Emericella nidulans
gtaggaccaacacaatacgattctgatatccgacaagtactacagtccgcaattcaatgtccttctacttcacaaaaatgtccttcaataactttgacatcacagccaacgaattcgagcacgcctgcgaaaccggtgatgccgcctttatagctgacatccttgactcccgcaccagtccacgaatcgaccagcgcaagccgctcatggctgctatactcaacaaccacgtcgagatcgtcaggctcctgctgagccgcggtgaaccagacgagtgtcttgctgtcacagcggatgaacgagcattatcgctggaagcgtctgatatcactggcagcctgcagtttgcggcgatgcatggaaagatagacgttgttgaagcgttgctaaggatgggaatcgccgtcaattgtgttgacagggctggacggaccgcgctagggttcgcggcgagggccggcaaaatcgacgttgtcagattgcttgttgaggctggggctagtttgaccaaagtcgataaggaggggatgacggcattagaccatgctgcggctgcagtggagatcgaaactatcgactttataaggggggagatgagaaagggcaaggcaaaggtctaaggctgccgtatgggttcttttttgttggagggtttggctttgctcagttccgggctcacacattgaatctctttatagtgtatattaacaccagcatgtagctcagtaagtaaagagatataactatttcattttgcttgtgactgtcgtggcagataataaaaggtctattcatacgcattctatcgtggaatctacgcttgtatagctgaagttcgaaattgacgcagtcacaggcgagtagcccgtcacgcatttgcttatctcttatactaacaagcttggcctttgcaatatctaactgtgagtccccagctttgccgtgctcggaaacgtctgcacttcgtgcaaccattgagacgaccgtgtctcccggcacaagaacaggccaatagaaatggctaacgcatatcgccggatttctcgtaagaaaccatattgggagtctcgattctgctggatctgcgctacattgggacatatacttgtcagagaataggtaggcttgagttggaagccggcggagccgcaggtgtttggacaaagtggcaggaattctgacagttatctaagtgatcaagtatggcatcattcaatacatctaatcgagactactaatcatgctaccttagtctaaggcgtgcagctgcattctgattagtgatcctgcgggattggtcatatatcgggatttgcattctgtagggaaaggtatataagcttcctgatatcatgtcatgctcaaaaattacattcagttttttttccatcgaatcaagcctaacaagaagattcggcagctaatggccacgcatagctacagtaacatcatcctcattggcgtgcgttgatttgccccagtcgtttaacatgcctgggcgaaaccctaacctgactgatcaccaggccaccggctccctgggagacatcctcctgaaatctctcctctcagaaccagccttcaaagtggccatcctcactcgcgagtcctcaaggggccgcaccagcatcccgccagcagcgagagtaatcacaaccgtagattcctacccgcagaagatatggtcagagccttccaaggccaggatgcggtcgtgaacgcgatcactagcttctctgtcgcagagcagctgaagttcattgacacagctgtagcagctggggtcaagcggtatatcccgtccgagtacgggctcgacaacaataactttgctgcgcgagagctctcgcctgtcttccgagataaggggcgggtgcaggattatgtgcggctgaaggaggacactggtttaacctggacggcgattgcgtgtgggatgtggattggatggtactattacccatttacctacttattcgattcatttcatctcttcaatctctctagtcaacctcaatctgtccgttttagttccaacatttggactgaccttcagctgacaaggccattcgcaacaactcctcggtcttgactacggcagtcggacgataactttgaccgacgacggacgaggcctcttctcgacaaccacgctcgccagcaccgcgcttgctctgaaccgtatgctactcagtctagctccacggcaaaccagattgttattctgagcgactttgccacgacgcaggtcgagctcgttgagacgatcgaaaggcttaccagtgaaacgtggcgacgcgagtctgtcgacccttcgctggctgagggctggagcaagggcgataccgcagctgggcatggattaaccaatatcggattcaccaaggggacgtatggtgggcactttgagccgctttaccaactgagaaattgggaactggcactaccaacaagagatcttgagggagtggtcagagaggcgttgcgggaggttgggcatcgggatttgacaggtatggtcgttgatatatttccgttggtccaaatatcggtcgtggtagtgtagaggagctgtaaggactgttccatggcagcaagttcccgtcacatcaacatttagggttggctgccttgctggaaatggggctagattatggaactagacttcgacgggcctttggctaaactggggatcttgatcgcgtgaactcctgacacgcgatcaagatcaagcaagatcataaactgaacctactcacctaaccgtgcgagtctggcctacacttatcaagaaaagtggaaaaaggaatgaaatacataattgtgcaaatcgtaattaactgagcgccggtaatgctctggaacaattcaaactatcaactttaggcacaacagaaaaaggggcaaggcagatcaagaatggtgcattgattctcgctcagagaagtactgtccctgaactacgggagtagattaactccagcgacttgattcaaggtagattataatcagactattcttttataagatagaagtcaaaattatctaggcatttacggcgccccaaaatcgactaggtagtaagagatggacgcaatggtataagataagcttctggctttgctgttgtcgggtcatatatgccgcttaaagccgtttcccagagcgagctggctagagaaaaatgaaataaaaagtcatctgtcagtggtttttgtcaattcatgaccgtgctgtgagaataaagatgtgcgcctgtcatgcaaagctccgtggtttatgggtttccaggtagggcagggaactaggactcaggactaagtgtacaaaccaccaactatttataccagggctatgcgcagaatactaaaattcttacagtttaccaacagtacttattagaacttggtggttttatgtacatgatgtagcatcccttcagccatcgacgcacgaaactgacactgatgctgatgccaatataaacaccattatgaagcacaaatacaagcgattaagaggttgatttgtggcacatttctgaaagccgactaagagcagaagtgggatgaatgaacagaataaggctggaacggcggagatagacatctgattggaaacggtcagtcctctatttcaacctcgcctgagtgcgacgtccagcttcattacatgtactctggcaagacactaagtatgaagataggagtattctggaccagaataaacaggttcaggatgttggtcaagaacggttggcgcgctggatagatatatgtgactttcagacccttgcactagagtgcctttcccccagggtatctcaggactgtgggatgatggaaaa

SEQ ID NO: 5849 - DNA, 7372 bp, Emericella nidulans
  unsure (1)..(7372): unsure at all n locations
acccagtcacaaccctgatgatcacctctagcagccagtctgaccgtctggccgcattcctggccagatgtcggcttcgacattgcccaatcatcgactctgtcgtggtttctctgcatattgctgggcgcttactttcaatctcacggccgatgggatgttggtccagatgaaggcccctccccacccgctgctgggagcatggctgccgtccatcatagataattgctgcaatcacgccgctcccagactcctgttgcttctccgtctctcctcttgcattcaacgcaacattccttctgggtttgaccactggtctgcatcttggtacaggcagcgcagggttcgccgctcttccttccaaggtctacaatcccaggccagttatagtaatacatatagctagaggtctacttcgagcaaggtcggtgaccaagatgtctcctctcgagtctaagctgacgacgccgtagcgcccctcgctcagatcgctagctcaattgtctgtggtgcgaagaaaaggtgcgtcaaggctaggcacctagagaaccgtctcttccaatgtatctcgtcgtgacctttttttaccctcactgaccgtctactgctagtgtccaaggctgttgtgaaataatcccagtgcggattttatccgacgacgctgtaacgcagctccatgctcctgctcgcctaaagcggacttgctcgctcggcttcagttctcagcataagtttcggctgtgcaacaattatcagaacagaaggagcgctaaaccaaggctgcgagctggctctcgtcgtgtcttgctcatctatttgcaaccattttcgaatcgtgccgtcgaaccctagatccgatgtccgtctcaagtgacagccagaacgactctcctcaaacttacgaaccaacctttccaagggaatttgtcagtagcgagaaccgaagtcacatggcatcatcaccgcagccggcgacagtcggcgctcaggacagttcttctgaatcaatggccgcgcccttgaagagccctcgatcggcccgattcgcggaagcaactgcaatcaattcaccaagtgctgcggaaagtagcaggtctccatttgcagacccccccaatcagtctcagaacgcgcctgatgtctctgatgttggttttggatatgtgaacgcacaggatcctacacagcatgtaccgcaccatcgtgcgccggcttctccactgaagagcgcattaagagtgccagggacgcccgcacgcaccctgaatcctcttagtccaactttccgggaagagttcaatctagaaaagcaagagaagcaagcagagaaagcaaatgcaaaggacttggtaagtcagatcgcgaacgcttcctggtcacgttcatcattcattaatacccttcgaatatgttaggctatcaaggtgcgcgtcagagtcgccaagattttccttcgcttcgtcagcttcggttgtagtctcatcgtcctcaccatcatagcgaccactctgaccatttttcacgcgaccaaaaatctgcctccaaggagcggtaccactccttgggccgttgcacaaacccatggcctcagtatctgcttctcgcaaccgcaagtttatcgttgctctcctgtctggtagttttctggacttggaaaaagcgcggatataaacgtgcggagaaggttgcagtctactactctatattttctgttggcttcttcggattcaccctcattttatgggttgtggtctcagccatttaccagaattccaagtccaacggaaataataaggatctgtggggttggtcgtgcgtgacaggaaaccttaggtcgacagcatatgcatcagatatcgactacccactgttatgccgtcttcaggtgagtcctaaccacagagtccatttctcgaaccatgacctgatagttcgcaggactggggtctagtgtgcgcagttatcgaaatcgttattgaggtcttggtcattctcatctacgccgttgtcttctaccgattctggtccaagcgaaagctcgcaaaatccatggatcgccgggacaaggcgcggtcggacttgtaccttgcccagctgcgacttcaatctgcccccaatactcctggcttcccgttgagtcccaaatctccctgggtctcgacaaccatgcaggatccctactcctccgctgagaagggagaggcaacacctacccagtttgctacccccgcctcgccaactaggccccaaccaactttccagctccaaccgccacccattcgtgtgcaacacgcaaccccaaagtcagagcaagaggagtttcctgcatctgctcctacgccatctccaccccaagaacacatgggtgctgcacccggggagcggacgtacgaagctgtgccgatcccagtcgcctatgccagcccaatgtcaccgagctttcctcaaggagcccgctagtagctagtatgttgagtggcttctttagcgctctacagaaacatgacctgcagctccttatgccctaggaaggactaaaaaaccaaccgaagaaaaagcctggtgagaactgccaggcatggccgggtaacccactctagaagtactctgtatttctggacgggacggttctgctcaacgtacatattgcttgtgaccaaagcgtggcggtggatgctgactggactggtcctgcccatatactaaggatataaactaatttnctatcactataagtatattgggtttcttaaacctgcaagccaaaatttgtgatgaggacttggctgcttcaaaccactccatcactgttttcttttctttgtgaaagggctgtgttatgctgatgctgatgccacgcttttgttaaacgtataccactgagcggattgagattcagagacaatgagatttatctactattctgcatttgtacttctcacactcgtttatttatccgttacgaagatgctgtgtcaggtacataggattcgaatggatcaggatgattaccatagttcatttagttctgcgtctcttcagttacacttgctccgaggtcgattggttaatcaacatcatacaattttacgtcttgacataactagtaggtaacagaagaacaacagcgttggatattgaagttgaagacatgataacccaataaagaagatcagttaagtccaccagccacaaactcccgcaaataatctaaatccgagcgtggtccgaaacatcacaaggccagggctaaaacctaaaaccaataagacaaaaaacaaaagttatgtagtagaaatattggaaagtcactgtacatctgtagcttcggcgtggtgtacctgcctcacgcggccatttcatcaagaatagcgcttgtatcctttctcacaaagatctcctccaatttacctaaaccaaggccgctgctatcatcgtcgttttggaggatgagcccttgttcattcgccagatggagtaggcaaatgaagccgtatgatgtactgatatcacggagcatctctggagggtagactgattttagcgagttcattatttcagtgaagcgcaagtgcccttctttagcaggttccaggtccgaagagagccttgggcgcttatgaattggggtgggtgttgacgggccatcatcatcagtttcgtgctgttctttggacgggctggtcgcagcgctgagttgggggccggaatccatagcggatataagccgctcacccattcctttccacatatctgttttgagccgaccgacgtcaactttcttggccactctggcgtatgcaacatagtcaggtcgtgctctccgaccaccttgcgttaccaactgtgacccaaagcctccagaggcactttggacttgtgagccacccggtgttgcacccaccatattcagtaatgctgcgagccctgtggccccaccagcatctcccgcagctgtacctggaacgccgccgggtggaggagacaacatttccctagcgtcagcgaatggaagattgtcgtcgtcgtcaagatcaatgccattggggaaagcaaggccatcatcgtccgcaaagaagttagcatcatacgccccaggagctgcctcatcatcgccagtctgatcctcagtcttgtgattggcccagaatgcctcatccatctccccattccctgacgtctgttcctggcgtcgctgggtgaagctccgcggcccgtttagtttcctagagcccatgcgtgccttgggcttgaggaaaagtcgaagcagctgcctcgagttgaagtgtttatcatccggaagcaagtttcggccttttgttttccactgcgatttgggaagggatattgcggagttagagcttgctggtaaatagatcaattcggccacagtgggatcgagcggcgcagaaaaatcaatttcgaatggctccttttcctttcgctgctttggcgccgtgctggcggcagttgtagcagcattttcctttattcgtcgaatcttccaatgctcagggccagcccagtttttctgcaatgcgttatcaaaataactaagaatgttctcatggtcccggctgcttggttggtggttgagcgatatagcataggcatcgtcattgtcgaggcttccgccatcctgaacttcttcaccttccaagtccacacggtgcaccttaagcataggctccaaggcggcctcccgagcccaagcctcccctccaccgccgaacccagcatcatcactgagatcaaagccagccaagctgccatcgtcatcaaacccgacagcattatcatcatcaagcatgattcctgatgcgtcattggatggatgcccgtcgtcatcgcctttatcctgccgccagtcttcaggagccttcagaagagggatatccaatgagccactaggatcaccaaggtcgaaattctttaaagaagggcaaatatcttgggcgtcaagtctgtcaagatctgggaagaacttgctagccaatggagcgatgtctatctctacacctccttcgaatgaatcgtcgcgaggtggttcggtaggtggaggttgcgatgtcgattccgggtcttcgagggactctgactgtgctcttgtgtcatccctatcttgagcagtttccacggcgtcatcgctactgtcgaatacaatacggccatgtccatcgatcgataaatggtttaagagtagtcctttggcaccaccctcgtcaaagtctgcggaagcttttttgaacagcggatcaactgagaattcgagctcgaatttcttcaactggagcgaagaaaatgaaggagcgagtgtagcctcgtgcgtgcgctgaacatggcgaattccgttagtgatacgggctcaagcaatgctgagcttctagtgggaccgtacctttctgcgtgacctcttgctagtaccctcttcgccgtcctcctcatcgtcttcagcgccctcgccttcagcctccgcctcgcgtgctttcttgtccctgctatctgccaaaccgctcaggagtttccctgtttccgtggccacgctatcaactctgcttgtgtagatcttcacacatccatccaatgtgcagctagctttttggaagttcacactgtctccttccttcaaaagcgacatgtcgtggaaataatcgatcaaggcgaaattccatgagtttgtagcgttaattttgttatcggtagccattttcatccactcttcgaagttcgctaggattggtacgcgcttcattggggtaaccccccgccgcccatgagcatcactatcccgatgccgatgaccagaaccttggggcgtggaagggctcatgctcgatcgatcatgtatggtatacctgcgcggcggcataggcgttttgactgcggctttgatttgatccatctgacggtcatgtagagcctgccgagcccccatacgggctgctttctcctcgacatcgtcgttcagcgggattctaacagaaatgattagcgtcgcttccaaccttgacttcatttagctaaagcaagactatactttaggggtgaattcttctgaggagtcgcggcgccgttggagcggcggtgctttgagacgcggggcatcttgataattccgtcgttccttggtagcggcacgaataacggagataccagggtcgacaaaggcagtccttgcgacgcgacaaagtctgggattcactgaaaatgagacagagtaatatgtagtgcgcgatatatcagcggcaatcttgccttgagagcatggttttggggtgttgcagtgcgtgcgttaagatgaaatgcaatcgaaaaggcggagatcgtcaacaaacaagaaagtgtggttcccctatgccagagcaacttggctcacgtgattgttcccgaccatactgattgacttagggggtcgacacagccacggttgcaggtgactactgcgagtactgccacagcgcccagtgacatcagcattctcagacaagcaagcaacggcttccaatcattaacctcgaggctgtttttgcattcccagccgactatgtacactgtgctccgtacagtgtaggtatccactccgtgctgtgggtttctgcgttgcctattagactgaagtctagagtggactattattgcattatttctacttatctagcgatagtcttggtattcttttctagctattcttccctccacaccggactcggcgcccacgatgaccccgtcacatcgtccaccatgtttgaagaactgacgtctattttacccagagcgtcggcccttcggaggcgtcgatattccgtcaggtcattttactggtctcttgcgatattcaccgtccttgcggccttcagttggggcttgggacgatggagcagtcccttggtcgctcatggcttcgcaaacccctcgcttatgaaacgggagaatgaactagaggtacctccaccttgtcctaaggtccgaccccagtatgaatactaaataattattcaaaatctcttcagtgccgcttggtccgcaacgcgaaagatcaatgcgcctttgtccgcttgaactgtctcgatgaggaagacggtttcttctcgtaccttcaattatactactgcgccctcgcacatgcgaagccgctagcttttatcattatcgtactctggctgtcactgctcttcagtacgattggtattgcggcaagcgacttcctgtgtatcgacctaagcaccttggccagtctactgggcctgagcgagagtctgacaggtgttacgttccttgcctttggaaacggcagtcaagatgttttttctacatttgctgccatgcggtccaatagtggcagcttggctattgaaagcaatagctgagagca

SEQ ID NO: 5850 - DNA, 4516 bp, Emericella nidulans
  unsure (1)..(4516): unsure at all n locations
ggcatcgcttttgattagctactgcaccatggcacgcgatttctacaaagacggcgtggatttcgcattacttgcccttcagtcggccgatttcgctgagttgtcggtgcaacatatacaattattcagcagcatcctgactaacatagaccagtctgaagccgaaccaccaattggattttacagaccccgacgctgtcaggtaaatcacgataatgagcgatatcctattgcgccgattgacgtccagctctcagacaattgactgtcagtctgctcaaacgggattttgatctggatgtcaacatcccagagactcgattatgccctccagtatgtgaagtttgacctgctgctaggatccgactgattgacctataaataggttccgaacaggttaaattatgtcctatggttgcaagatctgcttgacacgacgggcgctggatgccgagatgcctatgagcctgaaagaagtgtgacaggtcttgacatgtgcgttcctacaccctttgtcagaaagtttctaagtcccaccagtggcacaggatgctgcagtatataccctatattaggcgtacgaacgagaccgaattggacttttatcgcaactggtaaggggcacatcgagcccggttcatacgtggctaattcaagaagatatcgacgacgagaacatcaaaagttctacagagactgtcaaggcgaacaaccttgagtcacgcatccggattgtgaagaccaacgcagataatgatctcatttctctgaacactctaggagtggaaaggtactgcaagctagtttcttgacattatcccaagctaacagccgcgagactcgacttcacaatgtgtaatccaccattctactcttcccaagacgaaatggtagcctcggcaaaggacaaggatagacctccattttcggtatgatcctggattcgttagaacgcatgctccactacaactaattccggaaaaggcatgcaccggcgcagagatagaaatggtcacacgcggcggcgaagtatccttcgtatcccgcatagtcacagagagtatcgctctccaagataaagtcctctggtacacatccatgctcgggaaactaagcagcgtctctacacttatcgaaaggcttatcgaactcggtaacacaaactacgccgtaacagagtttgtccaaggaaataagaccaggagatgggcaattgcttggtcatgggcggatcgtcgtccagctgtggtatgcaccccatatttcaataaagaaaggatttgaagcccaactcatactgctgtgcagagcgtcgcccgcggcatcaaaagcccaaattacccgaaacacctcctccccttcccatcggaatacaccttcgccctcccgggacgctctatcgacgaaatcagcagtgcagtcaacacagagctctcgtcactgcatatcagctggacgtggcatagtgatcttactacgggaatcggcttcgcgtccacaaacgtctggtctcgccaatacaggagggcgatgaagatatcctccggtgtcttagaccggaatctggacgttgaccctcatacggcggcgctggggtttagggttcagttggctatggagtcagacacggttagaactggagatgaaacgagtactgagaagaaggaagttagggttctcgttaggtggcttaaagggactgactcggtgctgtttgagagtttctgtggcatgttgaagaggaaactggaggggcggtagactactaggtagcttttttgtccgtatcaccacaggacatgagatggaatgagaaaatagcttgaggtattcgacgcgttaaatattacagcttttctctactctggacaagacgaagcacaagaaatcgccaagtaacgcaaacgagaaatataatttggatagtcatatttataggagttttacctacttagctacttacctaccccccgaaacctcgccctgcaactccttcagccttccccatccctccgtatcctcccaatactcctttcccttccccatgattcctctaacggcactcttcgccttgaacctccaatctttcgcaacaagctccttttcttcaccaacctctttcgtttcttcaccgtcttcatcctccttatcaagtggtccatacttcgcatacccactcctcactagccgttcagtcgcgctcacaatctccatccaccgcttctcatcgcccatttggaacgcaccctggctagcagaagcgacggtcgcgcgccaggctttctcgtgcgcttcgagggctttcgagggtctgttgcggaagcgctcgaccgtggcgatgaggagccagaggggcgcagagtgcgtgattagagggacgactgaagattcgattaaagaaagaatggagccggggattgtgccgctgcggacgactttcttcgttctgcatttcctcccgcttacatctccgtcaccgtttgacgtgtttccggggtccgggttaacgtcgataaggagatcctcatagttgtaatccgtaactaggtggtcaactagcattcccaggatagggatatcgactgccttttcacctttcttaggacccaacagctcgatgactttgcgttgggcggtaatgacgtcgcggtagggtgttagagggggtggaatggatgcggcgactgtgagcagattgtcccagatacgagagtctgtattttttagctgtgcggcgcggtggagcgcgacgatggcttcgcgtttgcgcttgtacgggtctcgtgcgggtttggccggttgagtttcggagtcttcttcgtcgtcggcgggttcgctcgcttccgccagttggtctgtagaatcgtccaactcagacggtttggaagtgcgcagcattgcggctgcgaggttactccatgcctcggcgtcattatcttcgagttggactgtgcgggtaaaagattcaactgcttcatcccaccgctggagctcgagttgcacgcagccgagggcaaaccaggcgccgtggttgagtcggttaatgtttaagctcttcgtataggcttcggcagctttttcgagggccggcggtttgagggtcaggaaatgacgggcgagagaccgctgggcgcgcgcataccgctggttcgagacatcccaggcgcggtcatacaaagttggatcgctttgaatgtcacctaagatgcagaagaggcggggggcgtcgggtggaagaggggaaagttccggcccttcgaattgctcgttctcgtcgtcggggtttccggtgggtgcgtaaagctgtctgcggacagtgactcgggctttgtcttccttatcggtggcggcgtaacagagcgcaacttcagcccacatttgcaggcgctcgtatatgtctagggcggttcgaagccctcccaggttgacccagcggttggccagctcagactcaagatcccaacgggtggcaaagctcaggagccagatgtacttgagacggtctgcagctgacgccgactcttctttctggggccttgggagaaaagttgttggctcttgttgggcttctgttgtctgggtatctgaggtagcggtatccgcaagcacctggtcgacaagagcttgcaactgaaggacagatctttcaacagtcctggatctgtacccttcaattcggctccgtagtagcaaagcttgagtgtagatttgccagttcgagctgccaccgtcaagaacacgagtagcataaggagcggtttcttctcgggtcagtccgtcctcaggccgggtgttagtgatcgctgctgcgaaacaaagaaggatagcagagtccacggggtcaagcattggttgctctcccgggtcaagagaggctaatgcgggcggaagagaagattcctcctgtacagtcacagcctttccttgtgacttttgctcatctggtttagtgaaggaaattgcctccagaagggtatcatcgttgagatccagatttgtcggtgcagctgcattgtctttggtcctttccgaggtttcaaccccatcggtattgcttggatcttcagcactcttcgctaagatgacaagctgactgatgtctctttgttgaaacttggttcgctttcccaatctaccagtcaaagcaaactcgaacttccgctccgcagcagcccgttcaaggtccgctctagccttagcgtcgaagccgtggtggacatgaacggtagcacgttccagcaggaatttgcccttttccgcgccagaggtcatatgattaagcagtgtctcactgatcacatccagatccttatagataacatcctgcagcgtgctggtgatttctgatagcattttctggtggaggaaattgacgcgcatccgtgtagtccgagccactaacgggccaccctcgacatgtacatcagcatcaaccaaaatagccttggccgcagcaaagagctccacacnaggngtaagcttatatgctgcctctccatccacagagagatccccg

SEQ ID NO: 5851 - DNA, 5735 bp, Emericella nidulans
gtccgcccagggctaggtttacacgctgtgttgttagagagccttcattttggatgactgtaggtttatctagtgccctgtaactgctcatactgaccgatagcagggactgcgctcattggagttgtaagaggattttccttccatgctatatgagtttctactcacaatctcttagcttggcacttgcgcctatttcgggttctgcgtttacggtaatcacgcctctcatcaagcaggatacctggctaactactacagcggcatggaatggctacggtacccatatgtataacttcgcggttgcgcgttttttgggtgatggttctatcattgacagtgctcggtgcctatttgattctcaggatcgcttgaccagaatatgccggtttttctgacaaactggaccacaacggtgatttgggccttcatcaaaacgaccttcctcctgatgtatctgcacatcttccgacctctagcacttcagcgcttcgcaatctaccttgggcttgttgtcaactggacattctacactatcatcctcattgtgacgctgtattttacctccccggcgcccggtcaaagctgggccgagtcgttcctatctccgcgctacgccagaatagacgagtggatgatgcctatcgccgcgggcagtttggtcctggatgtgtacattctgctcctccccatcgcctctgtgtggcggctgcagatgtcaaccaggaagaagctgtgtgtgttggccgtcttcgctaccggttttgcgtgcgttgtctgccccgagtctattttaccctgattgggcttgacaactaaccaatccatgggacttgtgtagtgcctgcatcgcatcctcgttatttatttactacaaacacaagctctaccaccacagcgacgacttcagctactacaccctgccggtgctgattatgtgcataatggaaatgtgcgtgggaatcacagctagttgcatgccctccatggcgctcctcttccgcagcgaaaaccacccgttaagtcggctgtttgtgtcggcgcgaagtttactgggaagtggatcagagacaagccgagaccaccatacaactagatttagtcgcgctctcaagccgtgggacttggattcgccgaaaaaacggtcgtatctgaatatgagtttggattcgtaccaagtagaccccgacttggcggctatcaagacgcaaatttacagtagcgggggagacagaacggtgcttggagaatggaatccaacagagacatgaattggtgcaggaagtggaaatgcagtcggtacactcgaagacgggattggtacctgctaatagtaggcgtcctggtgagccttaggttgtctaatgccctagcctgtatgcagatattatgtgatcgaatctacatattgctcaaaaagcctaaacaggttgcctccgccgataaggctatgggtctcaaatattaacctgcaggcaataaccaaaaagcaggaatgtgctagaattcctaagtgtgcaggctatgagccccggagggtatgtgacaagtagactgctgatacacagcatactctggcccaacgtaaccaagcacgctaatcttcacctaaagccgctgtctcccaacagatgcagctgcctgaatagagaagccctaactttagacccctcacgggataccccatcaggcgattacagcggagaccactccgacagtttcggccccagaattcctgtttcgtgctgatcgccaagatatttgtcgacagattaagccaacgagccgttagactgcagccgtaagcatgaccacattaactacccattcaacagtggtttcgccacaagcactctgcatacggtctgcagctgtaatactccgctgtgcgggcaagtttttgctttttccaactcagcactcgcatactcagcgcttacatcttggctacacgggtgagaggtgtgctggaacgctctgggcagagatagcgctatgctcagctggatcttccaaatcctatttactcacaatgttcaatgctcagtgcgtttctccattgtaaacattagcagatctgtcacgatgattgaaatgctttctacctggctcttcggaacggcctgtgtgctgttgatactgaacgaggtatacttctcgctgtttcaggtacgagctgccggccacttcccttttagctgctaataacgacaaaaaacagcacctctcaacttcgagcatccagaagatagcccgcgattttgtatgtaagagctagagctcgtcggctatctgaaaaacaacggatgtctgactatttcagttaaaccaccgatactaccggccatgggcagcaaaaccgattctcatcccagcaacaagggagatgatgaccgagctcagtgaggccacagtgctatcccaaagggctgtctatgccgacgtatgaatcccaaaatgctgatcacacctcaggtaaattctaacatggaccagatgtttggattcaaacatacactaaacaatctcgaccacaatgagattaatacgaggaaatcccgcctgttcagccgtgttttgcaggtgcgagtcccggctcagtttcgggaactatacccgtgtctctatcgcaatctgagggctttcctggacatggaactccaagctgaaggtctgcttgcattaactttgtcgaatgcctctaatctcggttgagcaagaaggtaccgcatctgccagactcgcttcgttgagtgaacggcttctctcacgcctcatgggcgtgtggttctttggcgaaaacatcagtgagtgtctcgggctcccagtttgaggaacagaaataactccatcgcagcatcagacccacaattctgcgacgccctcttgaattatccccggcagatcaaggcatgtgcggctgcgtttcagctgacgccaaagtggctcgcatcgtatgtcagaatccagaatagttaggcacagtatcctaagtgtgtatatttagtcccgtccacactataatcactcgccgtgggaaagcaatgcatcagattcaaaacaccctcattgatctcttggctacacgacttgagacctgggacgaggtaccagagactaaaaaggttcacacttcccccgcaaaaccaatatataatctaacaagatccgtagctaaccctcctctaccatttattcgaactgtcggaaccaaatcgcgattactggacaccagaaacactttctcagtcaattctgggtctctggcttgcagcctcccatcagccgtgggtgaatttgcacgctatattgctagagctgtgtgtgcggccggagtggcaggatgcactgcggaaggaggcccttgagcatcaagacgaccttgcaagcaagattgatcagctgccactgctggatagcttcatgagagaaacggcgcggttcaattcattagataaaggtaggcctgccctaatctaaacctgccgctggtgttgctaacgggatttctcaacttactttcgagctccagcggcaatccgtcgcaaggccttgactgactataccttttctacgggatcgcccgttgtccgggctggatcaatactgtgtgtatcctcgtatgatcagacgcgcaatggcaaaatctacccagacccggatcaatttgacggcatgcggttcctcaacgggcgctgtgaggataagtcatctcggtttgcggatgtgtctgagaatcacttgatctggggttatggttcccttgcatggtttgttacccatcccctgtactggatgtatcttaaccgttttcagtccggggaggcatgcctccagttttgttctcaagatgatcattgtccatcttgtgactagctatacgatgcgactgactgacccgaatgcgccaaggtggtggtcatgggaggattttacgataccctacgcatcaactcgagtactgttcagtaaacgcgagacgagtggtcttccttgctgacatggggacgtgggaggcctgactattgagcatcgagagcggggatataatagtttagcggcacatgtacatcagccctagagttgcagttacacggcagtagtatacataagcggttacacaagatccactaatatctcggcacgagccactttatcaccaacaaagtgttcagtttgaagtcctattggctacacccataattgatgtatgtgcgatgatctccatcacccgcagccctgtctagagcttgaataagcgtgatgacgtgtcagcatctaagtggctgtcaataattgagtcctctggatgctgcttaaccgcagggaaagacgctggtactcgttttctgagtcactggtgctgcggagtaatcaacccttggccaacataccaataccggagtacggcccgacaggggggtaagaggcttctgcggctgatgcgagtgacaagtaagcaaacattctggtagtgatatggtgtgaccagctgggcaactctgggcactgttaggcgatgtactggggctatcttctagactggtcccaaaccttgcaacgctcctgctttccaaccttgatgcctcacactttctacaatcttcgtagacatggacatcctcgacgtggcttcatcagagttgtatactctcgtccggtctctggtgacatcgccagtctgccaaggtgtccttttcagccttttgacctggcggctatggcgcttcaccatcagtcctaccctccagcctgaagatcccaaggaggctccgtattggatcccatgtatgtttataccgagccccttgatacaatgtctgacggaccactgatgcattgtgtccaaaatatgcagttcttggtacggcgctccgactgggaattcaatgagccgccactaacttggatatgccaactgctcaggacacattggcgctgtagccaacttcgatcgcgcagttgatcgcgcaatgtaagttgaacttagctctcagaccaaaggctcgatttagcgacaatggaatgaaaaggcttacctacaacttgctctatgcagaaatcagctaggcaacacaagggaaccattcgcactcacccttgcggggaaaactatgtacatcattgcagacccgaaagatgcggcagagctcattcgaaactcgcacagtctgtctacgctcacgacagaactgtatacgaggatggggattccacaggctgttattgaacggctgttcaccgtttatccagacgcaccgtttaacgcgcggagcaatgctcgtcccgtgcacgcgacagacgcaatgattgagatgtaccgcgcgcatctgtctccgggtgcccagctggatgagttcttggagcgggatgtcacaaagcgtattttgaatgcgttcgcgaagattcctggcctgtttaacaaggtaagtcgagactccggcgggcccgccgtagtttcgttacataaattgtgctgtgaagcattcgtaaagggcatcgtaggcgcatactacggagacctcatcttcagcctcaacccaggattcattgcgcagtttatggtttgggagaaggtgaattggaaactactctttgggctgccaagttttctgagtggcgacatgctcgctgctaggaaagggctggtcgatggcttcgttgcatactttgctcttccacgtgcggagcgcgggcaccgagaattattgggtaaaaggcgtggaggactccct

SEQ ID NO: 5852 - DNA, 7384 bp, Emericella nidulans
ttgatcctccaaagttatcgaaatattcgacactgttcgaacacccttcctgtgatcatctgtcttcttcacaattcatccgaagaatgcaagtcactcggtccgtgaaaccactcagcggtccagaaagcaacgaaacaatgactgtgagtcggcaaatcatgttcctgctggtgttgggcagatctaacaatgtcccgtaccatcagatgcctggtgtccggtgcccaaagtgtcaaggtgctggaaaagagacttgggtcattccaggaaaatattgtcacgtatgcggtactgcctgctgaaaggcaaaccgaggtatggtatcggcccttcaaagtgtgatctacttagcgtccttgactaacaagtatatcccagacttgttcagaatcagagcccctacctggaaggatgaaggcccattgtcctcgacggggagcaacacctcatcgctccaacacagcccgcttcgaggcacaggttgcagcgtccctcactctctatgagtagttcctgcgcggggtagcgctatgaacgtggcaaaaacttccggcactcatcacctcggtcgcatcaaagagccatccccagcggagctgcttggggagaactgcatgagaggcagttggtattgtaccaaccatgataatgaaaacgggaaataatcgggccagtggtcatcaggttgacgagtgcttgtaatatagatatttaaacccatgggatatcagataatgaggagacgctctggtttgcatactgaaaggttatttaatgatgccctcgcctgaaagaagttggagagccctgggagtcctggagggctccagcttttgcctttttcagtagcattaaacacttaactatcgtcactgcggccttatcttgcaggcactatttgcgcctgaggcagaaatagccgtgtacctgaatgacgtcatcgccccgcgttggcatcctcaccctcatttgtatctcatctacttcacctcaacaacaaaagtaataatcatggtagaaacatacaacattgggtctcgcagcgaatgcgaacgtctcgtgaagagctggggcttcaaacatgtttttacctgggctgatgggaggtgagctaagtactccactcatatactggaagagactgtcactgacaggaacagcaacgcatactacccgcctcatacacatgggggcctcacaacgcaccttatccgccgggggacaatgacaatagcttatcccgacgataatgccaaatcgaccagtagggatatcaaggagacgttcggggttggggcaagggtggatgtgcccgctggcaagcgccatgaggtttggatcggagatgaaggttgtgaatatgtaattggggaataggtcgtcgcttcagtggtcctagttgcagggctattggtacttgtttattgcgctgcatgtcagttatggcagttgaagtacttggataatatataccatttatatttctgtggacgtgttcctttggccgactcctgtcggctgggaatgcctaacgttatggcaagattgtacggagctggctaaattgggattatatgacagtactatgtctggactataaaacctccataaaactcgcctatgccttcgattgcgctatacacaggatcagcagtctgttttgtaatatacagcccagtgaccgttcgcggaattgtaagagctcatcagggcggaagtcttctccgaggtccatacttttattgttcgcaagttactatatatatgtctatcttggtctagacgtggcaagtaggtctataaacagactctaacccaagcatgctctagaagcatttggctttccgcgctggaacaagatggtccgacatccagtatcgtcttttcagtaagtaaatctaaagtcaagtctaatgaacagttagcttgtctgaaggggcgcatttgtgttaagttgatatcctaccgcttgtttcccttatcaccattggctgccaagtattgttcacgctcggtactcgacattctgtcccagatttctgccctcttcctggaataggggttagcataagttattaaaggggttccgaagtgcatacttattgcgccactcataatagtatcttgcaccaacaaatagaaccaagctccaagccgccagggctatgagaacacgatttccgacacgataatgcggtttatcattctcccggtatatctgaagtttcaggttagaatatgactttatctggagacataggagcggctagtgaatatagagcacttacgttgttgccgatgatattagaaacctgcaccatcatgttatagatggcgctggcgactgttctggttgataccgacccagcgtttctggaagtcatggccacgattatggcatgtacataaggggcaccaatcaagatcacgttgagaatccacaacgcccatggactggtattgtctgggaggacggcaagtgcaataagcggcactaagcaccagacttcactcacaattcccaagagaaatcgtacgtcaaagcgttccgaaacccatgtccagaaaagaaggttgacaataaagagagcataagccggtatagtcatcaaattggtttggaacgtgttgtagcccagtgacttcagctggatggagatataacttgtcgccggagtgtttggaatcatccaggttagtcctagcaggtatataggccacatatcatagtcccaaagagctttccatagcatcttcggtgtgactgcttggcggttgtgcattgtccccttgctaggatcatctcgaatgattcggttgaccaggatcttttcttcacgttcactgaaccatccgtccttcccacgtaggataccttttgtctgcgttggcgatggaggcatccagaaggcggcaatgatggctatgacaccggtgataagaccttcgtaagcaaagagatacctccaacctccggtaccatcttctcttctgatgtgaaggaacccgaatgctaggaaggcaccaataatagcggtcccttggtaggagacccagaaaaagctcaagcggattggcaactctctagacttgtaccaaaacgaaaggaagaggattgtgtcaggaatgctagtggttgtcagcaatgggagggtaatatcgcaacgtggcttaactcacaaaccaccctcgaacaaccctaatagcgctcggcaagcgtaatatccaccccggttcggtaggaaagcctggcaagcagctatcaaactccaagagaacatttgtatggaatccatcggtccggacccaacttcttggagatcagctgtgacggtacgtccgcaaaaaggaaggcgcaatagaaaattgtctggccagtattgtaatcattggtgttcattccgagatccgcaagcattgtatcagacgtggcttggactacattgccacgatccagttggagcgcgaagaacgtgatacaggcaaaagtgcatatcctccaatcaacctaaatatgctttagcatccatcatgactcgcaatcggaaatcgggtatagaatggtgttacctttctgacaagccttttctcctcttcttcagaccagtcaaagtcgggatcccaacgatgtataccttcatactcgggaattggcttatagaacctggggtcttcggattgatcaaaggcagcctcattgtattctctgaatcgcctgcgattattatttccagaatccgaagaagcctccgacttaacgacagcatctggacccttcttcgtctcgtcatcgacaggccccgtaatctgattgctgacggtggcatcatctatagccattctgtcgatagagctcgccatagcggcagacaaatcaagagcctagggtggtcgaccaagaaaagttggcgatgaactcttccgcggagtagtacgggataactgagaatttaaagcttgatttatccgcctgtcatgctggggattttgcttgcttctgctctctgccatgctagcacgtcatctaaacatccaatttgctaacatctcaaaggacttaatagctacgcacgcggtggtggaaacgaccgactatcaaaccaatggtgagcaacgagcgtgaggcggcataacgtgtatcaggcacaacttcggcttgtgctaaatctggacgacggatagtctccgcagaagttgtggcgagatagggcttgaaggaccgaggcatgagtttatggagaaagctgctccccgtcctccattgtaatgcagcactgggccagtcagaaatgttcctccaacccgcgtcagtggagggctgcttggaagtcgatatcacgcgagttgtgccgcagttgcgttattgcagacgagtaaggagagaccaatgataccggctcctatctagttgcgtcttagctcttcgtggattgaactccaacaggcacgagactggcaacagagtactcggtgagatgggagtatatgtcgccatcgtcgccaacgtcacaacatcaggcttgacggctattgggcccggtcgcatctgatcgattaggatcccagacgaactcaaggacatagcgtttattgaaaatctggagtactttagtagcgcatggctccaggttgccttgacagccgtcagaccttgtttccatggacgaggaaaaccagcagaaaacacttgcgtccagtcacagaaggttcaatatagcagtgattgcagtgggactaaagtgggaatggtggataatcttgtcagcgtgttaagagtcagaaagtttggagtggagagagactcacggttgcgttcgcgcaaataaaagcaacaatcgcgccatcaccaccctccctgctctcatcagaactttcctcgcttcttgcaaccgtttcagagccaaccagctacacaaatcatgtttacatcagcttctccaagggtgataggcagcattggtgtttgatggccgaatcaaatccacagccggtatcaaaatgctcatcgtacgcttccatcacgccatgtcgaagccaccacgaggctcaatcatatctggtctgcgcattgttctcgtccgagagcctctatgctaagcgagagtacgatgtattattgcattatacctttcccgtactctgtacgatcctcgcctccatacagtcgtgaaccccgccttgctaacccagacgtccatccagattgtgaaggagatgaatcatatcccgcagacattgcgccagaatgccagttaaccgggtaatcggatcaaaatgaacggtctatataacacgtcgatggtccgcaggcctcgtcggtagctgttgagaatagtctgttgagctttgacgacttctgttgtacacaatggcgccttctattgcaacctctgagcacgttgaccttcgggcaccaataaagaccctgctcaagacaaacgcagggcacaacaaggagaacgtgatcggatatggggaaacctacaagcatgcggatgagctaaaaggcaccgtcaaacagcctcctgcatcgtttcctcattatcttcccgtctgggacaacgagactgagaggtcaggataccatagctctctagtgggattgattctaacttggctatcaacagatacccacccctgcagcccttcgagcattatgaccacggcaaagacgccgacccggcctttccagacctctttcccaaggatgcgtccttccaccgagacgacctcacgcctaccataggctccgaagtcagcggcatccaattaagtcaactaagcaaggagggcaaagaccagctcgcccttttcgtcgcccagaggaaggtggtcgcctttcgcgaccaagatttcgcccaccttcctattgacaaggccctcgagttcggcggatacttcggccgccaccacattcatcaagcttccggagcccccaggggctacccggagattcatcttgtgcaccgtggagcggatgataccagcggagcggacttccttgcccaacatacaaactctatcacctggcactccgatgtgacctttaaggtgcagccccccggaactaccttcctctaccttctcgacggccctacgactggcggagacactctcttcgcggacatggcacaggcatacaagcgtctctcgcctgaatttcgcaagcgtctgcacggtctaaagaccgtgcactccggcgttgagcaagttaacaacagtctgaacaagggcggcattgcccgccgtgaccctattatgacggaacaccctattgtgcggactcacccggtgactggggagaaggctctcttcgtgaacgctcaatgtatgaccattctgcccattaataaaatttcccgtttacagctcaatttgttttcaaggactaacaatgcacccgactagtcacgcgttacatcgtcggctacaagaaggaagaatccgatttcctcctcaagttcctctacgaccatatcgccctatcgcaggatattcaaacccgcgtgagatggcgccctggcacagtggtcgtctgggatgtatgtttcaaatctatgccaactccacccccgacactttgtacgctaacctaactactctagaatcgtgttgcctgccacagtgcgcttttcgactgggctgacggccagagacgccacttggcaaggatcacgcctcaagcagagcggccttacgagacgccgttcgaaggttaatggttccgttcactagttcggtgcaaaaatcatgacgatgagaagaataggaatgcgaatgacatatgcttgagtgacagcttgcacatatctggagattgtaaatagtcaaacaagtgggcgttttagtttattcaataccactgtcgttttacaaacatttctgggcggggataccgccagaatactggcttctccggtcaagccctaagatttcctctacggtcattgactcgctatattcaagcagtgagcacaaataccaatacaaaacgccttgtactggcgcgtgagcgtcttgtctgtcctattatgaacaccccaatgttgggcgacgccataatcggagggcccgaggagtctgggttttgatgcggaaggcgaatcccttcatgtcagtagccatgatatgctccagatccatctatcctctgcatcattcgtggtcatctggcgtggtcatctggcgatttattgttcagctgcactggagcaagtatcatgcacaagggatatgttacaaagataaagcacatactctgacccaaggagaagggacatggcattaatggtatccatatttgtggctgaagaaaaagcagacataaaaacaatgcatgagtcacgcgacctggagcccaacttcagcgagaagacggtgc

SEQ ID NO: 5853 - DNA, 2510 bp, Emericella nidulans
caacggcatcgagaagtagaagtgttgggtttatattcctaattagtttattgtttctcattcacactcatggagtaaggaaagtttttagatacaagagagaagaaaagatatatacaatatatgcaatgtacaggacaagagacaagagcaaccattatgctcactcatgctgtcgaggacatggtcaggtccaccgagtcgtaaaacatgcaggtgacgattccaaggacaagaaaaagccaaccaaacagtcagatatcgaagacagaaagcatccaacatcaacatctaaagctgaaacccatatcccctcgcgctcgcgcttccacttccatcccacggcacctcaacccctaattctctcgcaaccctcattgcagaaaccacacacccctccaacagcaccatcccatcccaacaccacccgccaacaaggtagacgttcccatcgccattcttccacccctttctcgagacggcacccttccactcttctttctcctcacactgcgtagtgacgggtgatttgctgcgggaaaagagggagttgacgatgtcgcggctggcgggagttcgaaggacgcgggtaaagcgcacgctgtgcagaacctgttcttcagaaatgctgttctcgagcgcataggtcgtgactaggacgttggcggggtgttcgtggactgactcggtgcgggatgtccctgaggcgtcggtctcagtaaccatgtgcatggccgtcaggacgggggtgcttgagccagaagcggagacagagccatttgaggaggcaatcggcttcgccggttcaaaagaccttatgccccgtttctgcagccgcccacaatcccgcaggtgggcgctgactttgctaataccactgtaatcccgatgcacaacagtccgtacctccgttgtgggaatggccttcatcgccaacgaaagcgggctgaagatcctgcctacgacatccggcgtcgtggcaataatgacccggtcgtactcattcatgccaacccgctggttattagtccctgcattcgcgacaaaatgcacgcggactctcccgctgcctagtgtctcgacctttgtggcccggtggttgtatttcacgtttagtcctgatgagaggcgcatctccgcttgcttgacaccgcgggtgagcgtgtagtgcggtttgcggtaggtttggcgcgcatagccgattatgtcagaggcagggaagttgaggagttcttcgtgcgtgcatgtcgttatactggacatgaggggtaagaagaaccaggttgtgtagtaggatgggatcccaatgcgggagagatatgcgcggagggtttcgctgcttccagcgctggtgggatcatgagcatgaggggtgaggtggttgtctttggcacctctggcactagactctatcccccccttgcccttgcccttcttcgtcaggggcatcgtcgtctttgggggtatccaaaagcaggcaaacgtgaaccagagataccagaagagtaggtacagaagctcgaatacgtactttgttgctccgacgcccgcgggacgaattggcgggaggatgtggttgttggaggagtggatgaagtacgcacctcgtttctcgtctttcctctcagttttggaagggcaattcttgttgtttctagagaaagatatgctgtagacaaattttggagaggcaaagacaaccccgagaaacttgtacatcttcaagagattgtcgtagtatccggctgcaaaggcgcgcatggggaggtcaactcttctcccttctacttcgtcttctccttccttttggtccttcactatctcatctttcacagcgccagacactgaagtagagttaaatccagaatcatttggccctggagcctgtgccgcagcagaaacagagccctcagcaaatctcggaagctcaaagctcgccgagtccagtgacaaaacatcttgctgtacatccatcagcacacgccacaatccccacggaaacgattcacataagtgccaaggaacgaagaaagaaaaaagaaacataccacctctaaaacctccacatcgtacctcttctggctatcattagcaagcaaaaaagccacaacaagccccgccatccttgagcccacgatccccaccgtctcgcagccactcagggtaaatgagctatgagaactcgagctggaatttgacttgccctgctcatggaagtctgaacggcgcatgtaggtttgtgcagatctcgttctggatctgagttctccttgtttaatgttggcggtggagatagggttatcttgcaggtgaggctggctattgatgttgtccatggcaatggacactggtgattgcgcgtctgacgccgccatcttaatttctatgtttttatgatcatgcgacccaaggtgtgggtgcagaatgtaagggaaagaagagttgtgatttttatcagcgcaagtcgaagatcctagtattctatagtgtcacctaaatcgtaggtgtat

SEQ ID NO: 5854 - DNA, 6540 bp, Emericella nidulans
gtgggcctcgacctggagggtaggatcctcgtatattgacattttagagctactgatggtatatcagctggtatatcgacattcatgacatcgtgagttacataaaattgtattcccaacttatataaacccaccgggcggtggtgacgcttcccttgtctcggtttcaaccattgagatagttggccggtaccgcttcctctcccaacccggaataccgttgctaaaggtgatgggagtcatcgcctgcaaaccagtctcggagcccgcatttgcagtcctattgtcatttcctgtcttctccggctccgccgtgtttggcagcggtttcaaaccagcaactgtatgattagacccaggactagctgactgcactcaatgcactcgagtattggacaatgactcgggcgttggatccgcgcctgtcgtggaatctgtcggcacgatctcgtcgaacattggatttcgcgttgcgcggaggattgtggtgggggagtcgaggaaggcgattccattatcccacatcgtgagcagacctgcgattatgcagaggagagaggtgaagacggagaggccgtaggcgaggagtagattgcgctgggagtaaacatattcggtttggcttgggtgggtagttacgttgacgagggggccaatggacgtgtttctgtggttatttgttagcttttgccggtttagtcttggagtaggtggaggcataggttggaagtaaaatgccaggttgtaacatacaggaaatagggactgccaaagaagcttagggtgatattccgccctaactccgaggcaacgtctaggattgagcctagggagtcgtaagtcgtattgccgactttctttttatcgttataaaccagctgccagatttgtttggaattgactagcgcggaggaataaatttttgtgtcggtgcagattgagccgctttgaacgcatcttcctatcaacacatctcgaaacaccctcatcatggccgtgtaagcgaaaagctggtcttcgttcgcgggggggggtatctcgtgttgtctgtgatcccgcacacgacccagaatctggagatcagtgatcctagttgattgaacgccgttggtgaagttgaagtccactgaatacgaggcgttgtatataccacattctaccacccatcgcttatccagaggcatatatggcgagacggtcattatcaatttgccagccacatcagcgtccctatctccgttatcaggaccttggtagggctcgtagactagctggttcatggcatgagatatgttatctgtctcggacatgaagcccatgaaagacgtggagtgggcgtagttggcatgtgcccagtcgtatacttgctggctcacattggcactggagttactgcattggattagcgggccagggaaggtcagtgaatatgacgagtttggcgctggtgctggaatgctgggaatcgttccttggatgacggctccggttatgaagcgggtgacgctcggtgttggacccgtcgggcccccatcgtccatggtgtagaatttgtcgaagttaaaatcaatggctggcatttgttgttcttgtaacatagaccctattgtagaacgaactgatagcgttgaaggggtcacaacagtgaccaggggaatacacctgaggcactttagcaggcttgagaccacatagacaaggaccacgcaccacgagattagccccagtatagccacattaggacctcgaagccatatatggaggtcgaagaagttgaagatgttgccccggatatcccacattgaatctagagttgacagcctcaccggtttcattcgtaagatccaccagatattctggacgcaggcgataccgacgcttgtagtcaaaaacgtcttcgttaaaaaggcgagtccggtgcctactctcaaggaccattcctgctgagtttgtccgggaacgatggtgccatccaaggagaagtagtaaaaatggtgaccaagcgccagccctagtcctataatccaacatacggccatagccgctggcattctccaatggatgccatttcttctttcaagtgtgcccttgtctatgaatggcctagttagtacaagttatataaaaagctgagggcaaggtcttaccactttttgaaaacatattctgaaatgcaaaagcaattccttgggggcatgctacagggtagtcatcgccctataagtagtggcagccactttaccccaaaccccggccaggcgcttaatagtatttttacctggcggcaactgtgtccttacctgcaacatgcaatcatagttgcaggagcgggtgctgttgttccccgctctaaggatagctatgcgacttaattggtcctagccattgtgattgaggctgtaggcctgtaactaggacgtagtgcgaggtcgtcccctacccgatagaggaagattttcgagagctgcacaccctgaacgaagaccatcgtcccttgactttgactcataacgatgcggagctatctctgatcgagagatgctattcgagctgaaacaatgccgctgcaaggacggagtaggatgggtcatttgtctctgagccagccgacaatgcattgtcccaggcctgtgttcccgcccccaagtcctcaaccatcgtggttaagatgacgaagtcagcccttatttctcagtgggtgatcagtgatctagacatccaatacaattatttaatacttactccgacttgaacaagcaatgactttatgcgttctagatttgagcgagggcaagggctggatatctcgccaaagcacgaggcgtgggattaaacgcaaagtcgaaaaaaaaattcgattaccctatctccactaccgtagagtaaaaatcttggacgatttggcgccatgacggatgatgttgtggatgcgaaaaagcgctttcatgcccaaggtcttaatgtactcctaatgtgtatctaatggtcacgtcgcctggctaccacctggatgacctgatttactttcgtgtgaatcacttcgttgtgccttcaagagacaattcctgacgctaccgttcaacacgagtttataggtataacagcccgcgaaatgttctgagatcgtaagtccgttgaattagcatgtacagagtaagaacaaagtaaaccggcggatgcaacccaaaatgaaccaatcgatatagaagacaagaaggtgatatatttactacaggagcacaaagtatacgaagaaaaggagaatatggtcccaccgtgctaagtgcaacgacggacataacagggaaacacgaaagtctgcattcaagatgccgcgcaactagacgcccggattaccgacttaaaattggtcgatgcattcacagtgctgctcaacattgtatttgtcgctggtagcgaacttagacttccagccgtcatcggcgtaggagaagaaaacggaaacatcgccaaccttctcgacgagggacttgatggcagtggtttgctgggactgaccgggaatagccttgccgttagcactaccggcgttgggccagccgggctggaggctaatgacgtccttgccagtgcagacctgcttcagatccttgatctggttgctgacgagagtaccggcctcagcggcggtgaactcggggttgaagaaggggtgaaggttcgcacccaggatatcaacgacagggcagagagtagcaccgttactgagccagacgtcgataggctcagcggtggtaacctggccagtgtagccggcggcagagaaagcgctggcgccctcggagacgaagctggcgagctgggcagcggacgcgatgttgctagtgacgacttcgttaccgacaacaatgagagagacaagatcccactggccccagttggtaatgtccttgaactgggaacgagcaccatcaaaaccggtggagccctcgacattgacaccgaggatcatcttgaggccgtgggtgctgcaagcagctccaacgtactcgagggtgtggcagtcggttccgtaaacacgaacgtgggagaatcccttccccttgataagaccaacctgctcaagaacatcgttcttggccatgcagcttccgtcgttgttgtagggggtgaaagtcatacccatcttgtttccgctagcaccggtggggacgctggtggcagacgaggtggtggtgctgctgctgggaacagcagtagtggtcgaggcagcagaggtggtgggcagggcagggacgctggtggggacattgccgttggtgtaagggcagacatagacgtcctcagtgcgagtcacggtgatggtggtaccagggttggtgtaggtgccaggggtgacggtttccggggtggggtagacaacgacggtggaggtagggacgaaggtggtggtcggggcaatggtgtaggtaccagccgaggggcagacgtaggtcgtggtctcgatgacgctggtgacggtgctgccagtgggcttgacggtggcataggggcaggtgatggtcgtggcggtctcgacaatggtggtgacaccaccgtaggtgtgggtaccgctggggagctcagtggtagtagcgccgcagacagtggtggtatcggtgacggtgatggtggtagcagggatggtgtaggtaccagtctccgagtagctggtcacgccggcggtggggagagtgacctcgggggttggacagggagtctcggaaggagtctcgaccggagcggcataggaagtcgcagtgaccgtgacggtgctgtagctggtagagtgaacagtctcggtggtctcagaggtcacggtgctggtaggaaccgagagggggatagctggaggttgttagctcgtccatcacgaccgttctgatggaaaccaggattctcacttgtaggctcgccccagtaggtgatgacctcggtggtgcagccgcactcctcctcgggaacagcggaagaggcgtggagggcacggtggtgaagaccctcgtgggcatggcggcgcatgtgcatgtccgcaacggcggtgccggcgaaggcggccgcggtggccaggatagctcccctcatggtgaatagaaagtaaacaaacggttatatattcgagttggtttttggggagtgtatatgtagaattgcaatgaatgcccgctgaaagagtgaagcggtggtcaacagcacgattgcaaaagagtgacggggaggagaggaagcctctggaccgatgaaaatcagagagagcgatcaccgagagaagagaaaaggcgagaagaagaagggcgaggcaggagaaaagagggggcaacagggaaattagagccaattcatgacggggcttggggagccggcgaggctggtgattggcgcgacgacggtctggccaggatcagagaagactgaggagactaattggggcaaaaggggcatcctgggcgaagagggcagactgcagagcccagcagccactgccagccagccagccagccagcagcggaggggccgatctcatgaacggagtggggcgagcggaaattatacctcgtatcttgaccactgacagcgtggtccagctcgcgtggcttcctctttaggtaaggtctaaacaccactccacttccttctcagttccctcagttcccttgcagagagtccagtctcgatttacagaaatccagcaagctccagcctgactgctgttcccttgtatacttggacatcgcgaattggttcagcctcctcgtggacgcccaacggcaaggaagtgtgcagactccagaccaacgtgttactcagactgactgttgaggtgacacgtcttcagaattagagtttcaaacttaccatgtgagctgaaatgccgtttcagaccgaatctgtcagctggagtaaggctgagctttcgaactgctcctgtcagtccgccacccggcagtttctaactgtttgctcaagacattttccagatgtctctgatttcttcagttaccctgcccacttccagagaggtgactgggagtctgacacatggttcccacgttgtctccagccaccaaaaatgaacagaaatccaaatcttgggacacccaaccatgctgaaattgtcccggcccacttttaaccgacaagtgaagtctgccactggtcagttcctgctgagggtctgagcggtcgaccaatgataatacttttgtgcctgactactgttacgcaatacacaccgctgtacgggaatctcccgtatcttagtcagggggttctatctcttgatgatggttgcgatggctcagcctcatacagaagtccgagttgaccgttaagtaagactgaacgtgcgcttggtagcgccagacaaagccacaaagattgaaggtctggtcgaggttcaggggaataatgaacgagtagccgtgatccgatggagattggaacggacaggttattattgtcaataatctggtcgatcgtcaccagagatggacagagaagagactacataaggactgagcggagatccggtttttccat

SEQ ID NO: 5855 - DNA, 6570 bp, Emericella nidulans
ttagatgagctatgctacgtcctggacagtcactaatgcgctttatctataacctaccgtagattaaaccataaaaatgaaagaacacatgggtgagaattcaagagagaaacattaatatattaaagaatagaagttatatataaacgcgtagacacattagaggtagcacaggatatatcccgaagaatattgtcgcaaattagtctgtcacaaagtgtatcaagagaacacaaaatgtggttagatttaaccatcttgatcaattaatcaatgaaaaaaagacatattgagttaatatgagcaagattagagcttgacaaccctcgactccttcgccacaattgccgccagttgcgagatgctccctgtcccgcgaataaccataagctggacattcgcatgcaagtacgccccgatccagtttcgcaattcaacagcaacaagcgagtcgacgccgtaactgtcaagactctgcgcaggtgaaagcatctccacaggcgtgactataagcttgcttagctggttgagaatcgcgtttgtgacgatatggacagcttcgtcgagttgtgttgccgctgataggagagtgattgcgtcgagagcctcaccggcgctcttctgcttactgccgttgtgcttgacgagttgagaaaagcgacggtccgtcatgaggaaatcgcgtccgttctcggattcgtcgtcggaggcgatgagcccgattgatgcaacgcaggtgcttgggttggcaccgcgagcgttcaagatggcgtggttcagaacgatgaggacgtcagacacaccgattgacccgagcccgttgcggcggagggcctctgcgacttccgggttctccgagacatatccgacgtcgcggatggggccgatattgatggagaatgcgggctcgccttgctgtaccatgtggcggacaaacgtgtcctggaagctgcacgccgcgctgtaatttgactggccgtagttgccgcgcacagcgacgatagaagacatcatgacgaagaagtcaagcgatttaaatgttgtgtgcagattctgcgatccgcgaaccttggaggcgagagcagtgcgccagtcgtcttctgtcatgttgtcgaagagagtgtcgcggaggaccatggccgaattgataactccgcgcacaggcggtaattctgagcgcttcagctcttgagccaacgcaaccacggcgtcagcgcagacgacgtcacaaggtggtgcaatcagatttactccgcggccacggatgttactgatgaatgtgcggctgtctgcatcctttgcacccgagcgtgagagggcgacaatgtgctttgcgccatgatcagctaaccaggtggtaagccagcgtcctagaccacccaagccaccgacaactatgtacgatgcatcttcgtgaagcctggcctgctttggcatagacgggacagcctagacagatgagcaagttatattcacgtgtaggaagtatttgggacttaccggtacttcttggttctcttccaccgtgaggacaatcttcccagtatgcttgccagcctggatttgacggaaggcgatctcaatatcagaaatcggcattgtggtcagagtcactggtcgaatagaaccagatgctgcaagatccgcaatgtcatggagcaaccttctcgccaagggtttcctttgctcaataatagccgtcaagtcaacataagaaaaagtgatgttgcgtaggaggaactccattggcatcaaagcatcatccattagatccttacgcccaatctcaacgaaacgaccgaaggaggccatcaaattgcatgattcgcggaacatttcgccgctcagagagttcagaacaacatccacaccataaccgcctgtggatttcatgatctccccgtagaaagctgtcgtacggctcgagaagatatggtcgtagggaacaccgtatttagcgtgaagaagatcgcgctttgcctcgcttccaactgtggcgaagacctcggctccgagatgctgggcaagcatgatcgcggcttgtccaacagcacctgcggcggaatggataagaatcttctcacccttggacagggagcccttatcaacaagtccatagtagaccgtagcccaaacaatcggaagcgatgcgccctctgcgaaggacagagagtcgggtatgacctgacagcagtctccgtgaacaagaggatagttggtgtaggagcgggaataaagtgcgcagacccgatctccgggcttgaagcggtgcttcatgttttcgcccacttcgacgacgacaccgctgcagtcgtttctcatctccgtgatgccctcaagctggccagcagcgataagaacatctttgaagttgatactcgctccacgtagttcgaagcgaacatcatttgttctgagaggtgggcattcaatatcgtccttccagcgaatggtctcaagtagacccggaactcctagctcagcagtcaaaattctgcccgtactgacgaatggaaccggttctgaagctgcttgtcgactagtcaaatccacatctctactgatatcaggtctgtatgcgtagcgtgatacaaacagctgcccatccttttccgtgaactcattctcaacttcactactgagacagtcaaggtcaaagctcgaactgttaaggattatcgggagaacttctttaagtttgctcatgactggcacgttgggagtctggatgtccaatacaacctggcgcagatttggatattccagacgcattgttcgggcgaagccagcccacaagccggtttctgcatgagaagaatccgccatggtgcagttgctgaccaagagcacggcccgcgatttcaagatccagtttttgaaagaattccagacattcacatctggttcagcgcataacagcttggcaatttctggaagcaagatggcaactcccccatgctgacatggatgagtaatgggcaatagagctaccgacgtctgacaggcctgctgaatctcttgcgcctgctcttctgtggcgttggatgcatttgaatctgtgaggagatggatcggaagcgattcattcctcctcgggaaaggcgcagtagatatgaagacgctgagactgccgccattttcatgggggtaatcaacaaaggccttttcaatatgagcaaagccagccttttccaatcgctgacaccactcagagtccgtaagaaggggggagcgcgtgcgaccttcatcatagccaagccaccaaccttcaaataggccaaaaactatgttaaaataaagggtataacgagagatctccattagcataaacttgcctccgggcttcaacaagggtctgatgttgcggagggtctcatcaatccgcggcgtcgcgtggatgacgttgcatgcgacgatgaggtcgtatgcgccttcctcaaatccctgctcttgggcattgcgccccgcatccaagacgcgaaactcgaccacgttggcaagatcacctagccgctccttagcaggctcgaagaagccgggtgagatatctgtgaaatcataacgctggataaatcggccgctgcaatcgttcagggccttcagaatcggcagtgtggctgaaccagtaccggcgccaatctcaagaaccttcagttgcgggttgaaacgacctagctcgtgacaatacgcgctcatctgcgggtatagtcttgatgagcaccattcagtatagacacgggacaacaagttgtttttcgtcaataatgacaacgcagacgtcttgcccttgaggatatccactagatgcggtcccagaatagctattgcctcaccgataactccaaggtcttcgggtttgttctcgagtagtatattgtcgtaagtttcgtctgcaagagtacccatccactggaaatagcgctggagatgggtttcctgaatgtcattcagcgagatttcacgtatagcgttttgcgcaaagtggatggttattgcatccagggcacggttggtctccattagagagcctaactcaattgtagccctgcagacctgatctcgatgttctgttgtccaagcatcaacatatggaacaagcgtctgagtgtggcacgcctcccttttcgagactcctgctgcaacgtcacctcccaagctagtgacacggataccctgcgcgacaacagccatttggttaatctcatccttggtgtgaaggtcaaagactaatggctcattccggcgaatcgtggagcaagtcaaatagctccctggagccacatgacgattcgcaacccaaagctgttttatgaaggtgggcacgtatgcggatgagcggccatcttccaagtagatcacagtagacagaccgtggaagagggcagagtcaagcacggccgggtggagcaaatcctccattccgcctgatggcatctcgtactcgggaacgcgagcagtggcaacgcacgaatgcttgctgctacgaatttggtgcaagttgttgaaagggtgctgccaatcaaggccgtttcgtttgccaacggcatagaacttttgtggtatggtgccatgagtgcactctgagtcgatacgagaaatatcagcaggcgtgaatatactcctgaaaccttcaacagagtcaacctctgcctggacgagaccgcgacagtgctccgtccatttctggtcgggtgtcacggtgaagatacggaactcgttccagatacctgatgactcgcgagcggttctcgcttgtggacgcagagatagcgagatctcgacttcggcgttctcatcaggtagcacgaggcctttcccaaagctaacatcacggagacgaataaattgaattgtagaagctggattggctgtgtgcatatgctggcgaatggcctggattgccattgtgatataacctgccgcagggaatgtgatgagcccttgtataatgtggttacggagccaaggggtttccttgaggctgacgaaccgccgccagcggggctctagtttgttaacatctgcagaaagggttccaaggagttcatgcgggagatgttctcggtgtctatagtccctagacaggcgggtttcgtgccaaaagctacggtcatggtcgaaggagtaaggcggcaaatcagccagtggctggatgtcgctatccttggaatccttgttgagatcacagagacgaaccgagccgttcttgatggccaaaaatcccaggcatcggagaagagcggtttctgcgtcatcgccacgcttcaacgtgttggtgtaggaggcttggccatggggccctggaattgtcttgaggatctggttcactggaccactgagttgagaatgtgggccaacctcgatgagcgtgtcaatgggcaaaccattgtagtcctgctcacacatggttcgtagtgcctgcgagaagaggactggactgaccaggttctgcgcccagtatccaccgtcaagaacagtcgattcgtccagctccttgcttgtgacggaactaaacatgcggatagatgaactaacgggcttggctttcagacccttgagcgctgcaatgtacttgtcctctattaatttcatttggtgagagtgataggcagcaccgtgggtaatcagcttgcgattgaaaagcccttccgtatccaaaacctcctttatacggtcaatagccgctacgtcacctgatacagtgacactggatgggctattgaagcaagcaatgcgcatgcgtccaacatcagtacctagcttgttgatatgctgctcggcaatatcgggcggtgcaccaacggctatcatagctcctggggattggttctcagcaaggagttcactggccagcttcccacggtagtatgatacacttatggcatctctgaaggaaagagcgcctgcagcatatgctgccccgatttcgccgctagaatggcctagtacagccgaaggcgataccccaaattcgttcagaaggtcgaccagggccagttggatagccgtgcacattggctgagagaaagctggctcgttcacccgagagtccgctttgggccggcagagttcgctgagaagatcccacgtacagcccagccttgacagctgttgacgtgcacgctcaagagagcgaacgaaagagggatagcttttgagtagatcgcggcccatctcggcatattgcgcgccctgaccgctaaatataagggcaatgcgatgttgcccgaatttctctcgtctagtaatagtagaatgtgaggcagtgattagctgtttgattaattcgtcaagttctgatgcgacaaaaatgacgcgataagcatgaatagactgtttagctagggtatgggctagacgagcgagcagggcatcagggttaatggagtttcggtgattgacgacaagatacctagccagcctggcacacaccctctggcaagctttttcgcttgcgccgctcaccatgaagactcgcggtttctcggagtgatacgataactgcaggtgtctgcttaaagacaaccgcccaaatgcagagatggccacatgagcagaatctatattcga

SEQ ID NO: 5856 - DNA, 2788 bp, Emericella nidulans
catatcagcttctctacgacagggtggtatttgagctttacgcctcgcatgcctaatattcgttaaacaggctattgaccccctaatctcaccccgggctccggagttacagaaggttgtgggatgctttctcactgaactcgaaacccttccccacgattccccatccaatggtctgctggcttggccgctggtcatcacggggttttgtgcggtagctcatgctcaccaacgtattatcttagctcgactgcgcatcattcacaaaacctggaggacggacatctttccccagaccgtggatttcctgcgtcgactttggggccttgatacagatgagggtgctacgccaaacgaagatacccaaattccgaacctgaatagccatagctcaagccttttctcaggctttatgttacagaatctcggtcttccaaccgttctcgtttagcttgtgaaagatatacttgactcatgaactcaacgactcgaggagatagctatggtcttttaactattgccacactcgatccatccgtctccaccaggtacagccagtcccagcttcgttcgaccccagcgtcatagctgtcccaagtcttctgaatgagtcgactacaggcgtccacattccctcgacagaacacctccaccttcattaagaactcctcaatcacatttctatcttcctgtcttatacacgccatgccaacaacgaagactgggaataggaggaactgttgtatgcctgtcgttctaatagacgacaaatgttccaagcaatgccgtaccaccgcctgcaccctttcgtcggcgacattatccggatacagggttgaaaaaagccagatgaagcaagcggcggtatacgagttagcaagggcatggtaatcagatggaagctcggttccaaccactcttggttccagtcatcaaggtcttttcatatggcaacggcctgagcgataattgatgctgacgacgccacatcagctttcgagcgtagagcggcagaacctcgttactgacacctgagtgtctgaatatagctctccaatttgaaaatgatatatagctgtataattgtgcatggtccgtcaagtttccaagaatatgatggtagcggaagaactccatgaaaggctgctgaattggcagaacgtctgcatctgactctgcatggcaagcgcgccgggcctccataagggaggttgaaacgtacctcgaccctttcaaccaacattgccatgacctattgctagccccttctgaaatttcatagaggtatagcacacagcatccagcaatcaaggcttctgcttcttgtaataccccatcaggcgtcataaactgcttcagacgattacaaagagcatcaacgcctcgcgaaagcgcgtgctctatactttctactagagcattcttctcggacacaagtttctctttcactgacatcggaggcaagggatagactagtacttgctggtgggagtcgcgacgacaggcaacggacaacatgcgacgtacccagacaaagcacagcccacaggaccacattctgcatggccaacgggattaacatcgatatgaaaaactcagactccggtcccgccttctggcgaggaaagtcacgattctgttccgtaggtcgcaccggtagtggggtatctgtggaggcgccaagacaaaagcgcggggtatgacggtgacaaagtggcaggcgaagcgtatctcgttgggagttatacctgtcctttggagggtgtgatgatatgacccgcaagagccgtaaggaattgcatgtactcgtttgaagcacctataaatcataatggtggccagtagtgcttcgattgtttgaggaggtggaggtaaacagggccaggcgtctaaagagaaacgaagaatgagtatggatggaagtggcactctgccgttctctgccagcaaaaacaacagcaagtacatgcattcgaagttgccattctgtatattgtctaaacactgtgaatcctgatcccagagagccttgtcgaagttgaatatggaatgatacggctttaactacagggtccttccatttataccctctccctccagggggcataccttgcacgatgatcatgcgagttgtatttaattctatatgaccagttttaatgtaagttgttagtaatgaaccgtacgctatcagtgcgccgccgcaaaccaggtaaatttctctagcccaatcgtcgagcacagtgaggtaggaagttagaatgtggggtgatcacaatggagtcactgctgcctgccagttccaaattagttgctctgttttgaataacacctagccgggccaagcgcggtatcattacatatgagttaatataatatctagggctttggctcaagctctagcaggccacgtcaaaaactgctagacccatagggctatattaagcttcacgctaaccattcccggcgagataatagccgcgcctccacattgctccactccgatccatggcacgggccacatggtgctgacaacggggtgtattcggaatttctagcttgccaggaagttagtattaaagcactagctgcgaattcttaaaggttcaaaacctcctcaggatccttttctgacagcatacctcgaattctaacgtatttcaaagcagagccagcaacatgataactaatatcaatgaagaggataatattgcgtgcatggagcgcggtgagctctactacgcttttacgccgcgcctcgttgagcggcgaagggtgtgcacgagta

SEQ ID NO: 5857 - DNA, 4285 bp, Emericella nidulans
tctctaggctctctcgtaataggaagtatggccacttctcttgggattagacctataggcgaagccgcaaaacccgcatcttgttagccagaatatcagtcctttgtacttcaatctgttgcagctcaaccaagtggacgagtttggcaaccagaaatgcaacaaggagcttctgcttagagcgttctactagttaaaattgcggcttgacctaacagatactgaaagcttcaacctgaaaggttgaactccggtgcagaccaaatgacaccttgaccatcggcgtgatgtaaattttccacaatacctggctattatcaagcaaacggcctcgtaactgagatatagatccattttttgccttttctgccaggggtgtggaatgaatctctaaacctgagtttctgactacattcatgacgagtaatatccactatttgagagtgtaccagcggacaaagtcgtaggtgttttcttgcgtatggtcccaatcatcggcagcaccgagtctcgattatcacagatatatgtatagtttacactggccatgaacccgtttccaaattggttagtaccatagctcttgcattgataactatcctgatgtgcctcccacataattacaccagtaacgacgcaatccctgccattcttcccctcttccagatgccgacggggcatcacaaccaagtagcgttcgaataacatttgaccttaatgaatgtactttggatcagcccaagatattatctcccctcaatcaactagttaactgcctaaccacaccacttggtcatattgcacatcgtctcccctaaatctacccacagtaggccccattgctcttagtatcttcatcccactcgcttggacacggatgaaacacattcgtcaatggcgcatacccctctgactgtacaacgaagtagctcgagtccgtcatatctgtgctcacgggaagtgtccaggtccacgtatatccattgcgcgtggccggcgccgcaccaatagcagtccacgcccaagggtaattcacttcaccttctgcgggctcaggaccgctgtatctgtataggacttggttctcaaccatgtagtgcgcgcagacgaagtcgtctatgttaaagttgatgggccacgcgggcataatgcaattcgtgtctgggtcagttaggtagacgtgcattaaagcgtgaggaacaagaaaatctgcggagatcgttgtcgagccggctagggtagtggctctaatgtttgtcaccgcttggtcacccggtagactgtctgtttgggctgagacagagggcgaatttcctgtcatgatgccgttttctccaattacgcgcacggtgaacgaggagcgagatccgggactaatgttgccaattgtgacgtggtccattgtaccagggagacgggccacttcccttccatcacagaagaccgcgtatgcatagggtcgacgtcgactagatatattccaccttagtttcacagatgaatagtcagaatccgtaactgtaagtgcattaagcgggaatgcagcgcgggcgttgttgtcaaacggggacggactagcaattgccagcgtaccaccctggacagcgttcatgagagctgacatgtaggcttcgttgggcagggtgtcgtaggggtttggaagggtgtcgtcggttatatgaataaaacctgccccacgctcgtgagctaagttggcgaccctggctgcttctgcttgcgggacgccgtagataatatgccacagcttccgtgggtctgtgggcgtccagcccgggtttgggacatagctgtttatgtatacgtcgaagctttgttcaaaggtcatgagcgtatcagcactgcaagatgtcagttattgtccaagaagacccgtaagaaacgcacctattctcaaaacactgcggtattgtcgcccccggattcagcaccgtgaaagcatttgaatatttccgcttcgtattatcactgagaaaccgatacagatccgcatattcgttattagacccgcaaatgttcaatgcctcgtcaaagaagataccaccgatcttcccagggtacaatgcgtaccacagatcaacatctgcttcgatctgcgcgacccaatcggcaatttcggtcgaaccaaggcgggtctcgaatctttgctgactttgacctagatatcctgttctgacatatccaataattcgttttccggaagcagaggctctgttgatgacatctgcccaggcttcattcaccgttgtgtcggggccattaaggacgttagcgataagaacactgacaatgtttgagggatagccaattatgcggttccaggcggcggggtctgctagggggtgtatgtatgacgctagggcaatctgctctgaatatgaggttttatattagttttccctgtccttcggggctctagcgaatgatacttacggccgtttgctgcagttgagcttcctccaggcacataagccttagagttaacattccccaactggtattccgttccaattccagccgagcagaagtcactggcggcagggttgcgtttgatataagaattatcgaccgtctcaaaaagttctgtgccctgttctagtagacacttggtgttcgggctggcattttcttggacattccaatgtccaattggctttgcacggcgtagctggttaatacagcaatagctgttaggcgaaccacagtttgtcggacatggctactgacgaaggctgaagctgagaatgtagcaagacagcgtagcatagcaaccgagcggcaagtagcccgtttgtaaccgattcgtggtatgccatgatcgtatcgtagcacgtccatcaactctatatccaaacggccatccacgaccatgagacttctggttcctgattgctactctcgcattttgcagggctcaccagatgagaagtccaagcggtagggacccacccataatcgtggtcatatgcggccattttgtacagcattttgcacatactagtgataggccgtggttgcgcaaaggccgcttgttggctcctttcaagcgtggctttcaaccatcctatagttagcgacaatcttaattaaagagtctgctgagatgcccacaattgccagtgaggatcaggtagttctcgtcaagggatagctaacgacctgagagtggccgtttagggttttagcagtcaagtggttcccagccgaaatcgtaatataaacatcaccagcgtacttgctccacataaaacaatagttagtatcaatgtaatcaaaaaggatggaggtctgattcttgtcatcaagctgcaaacatgagcggccacgccctaccagtatataccacgtgaccacagactgtacgaatcagttgcgattcctagacgaataacttgcactgacacattcaatgccgtgacaatgaacccgcgaaaccagagtcaatgacgggaacaaagtgggtgtcagtcactgcagaccgtgggtggagcaggaagtaggtatgaccaaactgctctgcaaccggttaatgaccgtgtacagtcgctttaaaatggtgcaatcctcttctcgttgatgtcgaactagaaggacaggctaagtatccctggaatggcacgtcatctcttccaagcacatggttggtggcgctctgttgcaacgcgatcatctagtcgtctcagatccagtgcaacgtctctgtccgcccgcggtagcaccatggctgccacgcccctaccactaacaacgggtcagtacgttccttttaaagttgtcaaaatcaggaaaatatacttcgtgcaccattcctcgtatctgtcgaagtctatttccccgcgtttaatccattgcacgcatccctggtcagctgttctattcaatctcattaacccgcttctatctctatttctcaccagtccttgcatttctagtctatgtgactgcactatgcatgtagactagtttctcctgcacgtctgtagccaatggcttgagaatgcctgctcccgtccagcaaagtaggcatgcgatgcacaaaatgagaaagcggagatgtcatagagcatatcacgccgcacctagagagtcaatgctgcagccaacccttaagtcccctgagggcaatgacattgacagcaaaagccgctctccacaaataacctctgttctcagtacccctagcccttcgccacgagagcaaacaaactccccagtcacgctcaggcgccagcgcgtctcagaaggacggcatatccatataaggcat

SEQ ID NO: 5858 - DNA, 9705 bp, Emericella nidulans
  unsure (1)..(9705): unsure at all n locations
aacatgagcaagtcgcggccgcataatacgactcactatagggatcgtgcgaagtattggtcgctggagcaacggcatcccgacagaaaacagtctttataatgcttatctcgatattatcgctaaaagcgaacactttgtctacctggagcaacaattcttcatcagctccacgggcgacgaggtcgaggcagtctggaaccgggtggcagaagcattcgttgagcgcattttgcgcgccgcgcgcgaaaggaagcggtacaaggttattgttgtcttgcctgcattgcctgcattcccaggagacatccacgcccagttcgcaggggagctgccacgggcgctcatgaagctgcagtttgattccatcaaccgaagcggcctcagtctcttggaaagagtcaaaaaggcaggggtgaatcctgatgattatatccgggtcttcaatttgaggagctatgatcgcctgcggcccgtaactagtaattgggttgatgacctgatccatccgctcgggcttcatgcaaacattgagactggagctccgaaagcgccagatgccatcactgacgtgcaaacgcccggcaaggatgcgcagctgtctcccggtctctgggatacagtcagctcctgttatatgctcgacgggccagatatccgaaacgtcctctggccagatggcgcgtgtttcgcagaaatggagggctttgtgcaggagcaggtatatgtccacagcaagctcttgatcgcggatgacagggtagtcctttgtggctctgccaatttgaatgaccgttcactcaagggaagccgggattcagagatcgcagtcgtgatcgaggatagaactccgctgccatcaactatgcatgatcagccctttgaagccagtaaatttgctgcaacatttcgccggtacctctttcgaaagcatctgggtcttctgttcccgcaaaacatgcgccggccagatggccattttatgcctgcgccggtacctcttgactatgactacgggtctccggaagaccttctcgtggcggatccactaagcgatagtttcctcgccttttggaatcaggttgcacgccggaacactctggcctttcgaaaagtgtttgaccccattccggatgataaggagaagacctgggaggactatgaccgtgtagccgaaagagcccgccgcgggcatgtcgcattggaccacttttccagcagtaaacaggctattcttggggtgaaggatgagctctcgaccatcagggggacgttagttgagatgccgatggactttttgatgaatagtaacattcaacccgacgacgcagtctttaatatgtacaccaggtcgggatacacttagagcatagccagactcttgatagggagcaacgatgggcgatattattgattatcgttgtgtaagattcatatagctcggtgactagctatactgtaccaccaatgagtgactataaacgatgtgccagaattgcagctggcatagtcaaaagaaatattttcgaagcggagatggaatgcgcatgccagtacttacagctagccacccagcttctataggcgctcctcagctgagcttagattggcatgaggtcgggatgtaagacattatcttatgactgggttctccagctacaacgaagcgatgaccattggagatcgaccacgaaagttcaaaaaggatcgcttggacattctagttgcatgatcaagaaggtcttacgcaccaatcatcgccgctagatcgcatctttcaagcattgccgttagcttcggctcgatggtctaagttccaataggaatggctgccgattaataataggaatggctatgggccgacgggatagcgccggtttcctgccatatcgtacgtacatcttggctatgaccggaataatgtaacgggatggcgcagatttcctgtcatatcgtatgtcttgaattcatagtggtgaagtttactgatgatccagtgtgatatcgtcacttagcgctggcattcgttcaagacacaggagaggagacgtccatatacggggatgccgccatggccacatgtatatagtcgtctggacctagtcgattcaaaccccagcccgatattcctacaaagaccagcgcgcaattcctctcagatggtatcaaccatgtgcggctgctgccgtgagtccgattttagtcctttatcgacgcagaaacctaaccactatcacatcgcaacgcaccactgccgtcgcagcgccatcggccaagccgagggcggcatagcaggtatcactcgctattccgatggacgacctacccggttctcgttctggtgacctttcagtcgtgcccttcaagtccagatcccccagacatgggcggaaatccgcgtacgggcgtcaaaaagttttggatctactttctctccaacgacgggccagcggtggaaagggaaggttcagctgggattttcacggatgatggacactcggtgaccttcaggtggacggcaattgagataacgggaggcgatgatccacagtagtgcagtaggaggtccaactagtctcagacatgatcgcgtaggctaatattgcttcccatgatatttacacattcaaattcaagctgcctttttgctctttttgctctattttattttgtcttatctgtctttcttggttggttttttcttttggccttttatttgtccttctttttttcccttttttttttcttttattttctcttgattccacgtgatagaaatgtagtctatggagcttcagcgagagagcagaaccctttcagtatacctgccataatccatcattagtgaatatcgtcagttgctgcctcggtatgccaatgcgggataacccggggctgtccagggtgtgcagcgaatcgggtagacgttgcgctcaaagctcaagcggctaatcagcaacgacccagaattagtgcagagaggaagtcatggggagggtatatggattcgcctgtactcgcggcctatcacacaacaatccagtacatgacagccggggaggcgctccctctttcgctgaaacgagcaagtcagcacctgcgccatcgccatatcttgccgcctaaagatgacgtcgagcgatggtacagagtccctgagagcatcggaaaccagaatccgtagaaacggcctgtttgggcgcgatctgcccgatcctaccccatggggtctcctgctccactcgactccatccggcggagtccgtccgctggatcgcgggggttggtctggagcagttcaatggcatcgttattagcacgttgatggatgcttgaggttggatatcatcggacagcaagagcagctcctgtgcatcggaagcgcagactgcatggcagtcgatcgcgcccaccgcagtcgaaaggactcgaaacagggcagagtgtactattccgtatctggttagtgtaactgaagcatacggcttcgaaccaatcagaatattcgcatcattggagacgcgcaagatccgctcccattggactgccccagagtcttctgccagcttctatgcgacggtcccatcccctggccagcattcagactgccgtcgacgggctttgaccggcacggccggtctgcctgagaggcagcccttgccgtgggaccgtcggcctggcccggcctaaattcgggctctcgtcccttccctgctgggtttctgggttttgagaccagtccaataggcctgtactgctcctcaaatctcagtttctcccatcaccatggccgacaaggtccaagccgacgagccccagatacagcccgagtcctcaatcccagatagccggtcctctctcaagggagacgcccaccatgccgaagtatcccgacaaccatacggccccccgggtcttcggggtgtagtcgccaatccttttgtactgctctgcgcggcatgctcaacccgtgggtgacctccttccttgttcccacttgtaactccaagcggctaacagcaagatgggggggaaagtcggagggttgtcgttcgggtacgatcagggtgtgatctcagtcaccctggtcatggaacagtttctgggccggttcgtggaggttgccgagggccatccgggatcagggttctggaagggcttgatgacggcaatgttggaattgggtgcttttgttggcgcgctcaatcagggctggctcgctgataagatctctcgacggtactcgatcgttgtggctgtggctatctttaatgtcggttccgtgctgcagactgccgccgtggactatgcgatgcttaccgtcggacgcacaattggcggtattggcatcggtatgctgtccatggttgcgccgctctatatctcagaggtctcgccgcccgagtgtcgaggcgcgctgctcgtcttggaggagttctgtatcgtgctcgggatcgtcattgcgtactggatcacgtacgggacacggttcatggccggcgagtgggcgtggagacttcctttcctgctgcagatcgtgccgagtttcgtcttgctgggaggtgtcattgtcctcccgttctcgcctcgttggctcgcgtccaagggccggaatgacgaggcgcttcagagcctgagccagctgcgccggctgccgaccaccgaccaccgtatccaacaagagctgctggacatcaagatcgatgtccgctttcatcaagagctgaacgccgagaagcacccgacccttcagggctcggggacgacaaagagcctgcttcgcgagctggccggttgggccgactgcttcaagagcggttgctggcgacgcacccaggtggcagtccttgtgatgtttttccagcagtttgttggtatcaacgccctcatctactactcgcccacgctcttcaagaccatgggtctcgattacgatatgcaattgctcatgtcgggtatcatcaacgtcacgcagctggttggcgtctgcaccagtctctggaccatggacgccctcggccgtcggccgctcctgctctggggtgctgccatcatgggaatttcccatgtcattattgcagccctcgtcggtatctactcagacaactggcctgcgcaccgaacacggggctggaccagtgtcgcttttctgtttgtgtatatgctcgcctttggcgccacctggggatcagtaggctgggcgctgccggctggtaaggaccctttctctgatgctttcaatagatagtcctgacatgtcgcagaggtgttctcttcatttctccgcgccaagggtgtcgctcttgcaacatgcggcacctggctgttcaactttatcatcgtgagtccctcgccattttttttttttttttgaccgggacgatggactaatggaaatagggccttatcacacctcccttgattcaagatacagggtatggtgcgtacgtcttcttcgcagtgttctgtatcctcgccttcatctggaccttcttctgcgtccctgagacaagcggccgcaccctggagcagatggacgcagtattcaaggacaactcaatcagcgcggagcgggcaaggaggcaggcgatcgaaaatgagcttatgggagagcatcatggcgttacagcatagacagtagtctaaccattttatgtatagcgaaacgtatgatatctagcattccaccctgatcggctctagtctacgaagatgccgagatatatttcggaaagccccaagaactgacgcttggcactcgggtcagttgcgtgtcctgctttttttgggcaatgccgatcgtcaccgccgtacgaatccacctcgacggcgtcaaggttgatagccgggagcggcacaaagaccatcatacatggcggtctggggggataattcgagtctacaccatacaatgacgtcaaagcctgagaggtgagaagttaaagagagaaaaataaaaggaaaaatataatataatataattccacccattgtacacttagacgcgataaaacaccttgaccatgcgtttgtcttgtgctttggcagactagcagcctagcgttgctagtgctcaggctccaaggctcccaggctcaaacgcggttggcaatgtgtcatgtgacttctttaccgaagctaatccgatgtcggttattatccgtccctcatttgagaacctgtctcattctgttgcttgggataacgaccatattgccatattgaatttgggtgttactttggattgcccacgttagtttaatggtaaacgtcatccatctctacaagaggaagactgctgtagccagaccggacatatagcaggaaaggaacgaaatatatattagatagccgacagctataacagatctcatggacggttttccatggaacgctgcagaagaacagagagcctaaactgtggcaatagaataactccagtttgagtatcacgaagattattgcactagatgtggtttgtaccgatgcgaaccccaggatgaccatggaggcgcaatagaaatggtctatttgcgcggcagttggcctgttctctagaagtgctgaatctaatactgctctcctgtacagttcgtcagtggggagcgtgccaattgtcggtaacttggaccgctttgtttcggaaagaagtagagcgtagaaataaaatggtggtagagaacaactggggcaagtcgggagtgatgaaggcgagtataccgtgacgaactagggaggtgtgacaaaaacggagtcagaatcactacatggaactgatagctgacgacgtttttaaagtcgactaagcagccccttggctgctcttggtgacgggattgtcctggcagcacaccatggccctgcccatgggctggaaccttgatcaatctagctagccctcatgagtatcagcagccctagaacatgtcagcgagtagggggaaatttcgtaaagtactcggagtacggctatagattgcactcttggagccgacaaccttggtgcgagtattaagccagtgcttcataatcgatttctaaaggccattccagatcttcaaaaccagccagacgaactctggagcactactcaacaatctcgaaccgggaccaagcggtctcgggatggatggaaaactgcccagtacaaatggattcagccggtatcaaccgtgacgagtcagctcggcaagatgttataacaaatgatggcactcgtgagacggcgggaaatgtccgaacgcccagacctgaggattcaagctagaaaacgaaaccgggccgctcatccactctgtctcagagttgaggtaaactccggttgacgccgatacccttgccgggttcggtaatctccatggggtagtggccgagcacggcgacacgagtaggagacctggggtaaggacgattggcctttgctcaagtactgagaggtttgtgtttggacaaaccgatgcaattgagagcgcccgagaaacatatttactataactactgagtcggcaagccgtgcgaaatacgaacatggccgactccaagagccgttgtatccggccggcttagctcagcagctgaggcaagccgtaagggctaaatgcaggtgagattagtgcctgcgcgtagtcatatctcggtcgagagccaccgctcgacgcctgccgagagtgcctgactcactaagccgtatgtactccatatggtatacaccacccggaacttgccacttacgacattatccgggggagcctgggaataatctatggggagccgaaccaatctccagcttctccagaatccaactttgtctctccgcacgattgacatttgacgagaaaaacccgggatgaacatgtccggatgatgtatgagatatgaaatagagttgcgccgggtctggagatgcataggttggcgctagattcgagagctgcgctggcagcgttgcaatgaccgggccacatggttcaatgtggttagctcgatggagagctgggccgctgctcgtgcaatcaggtacattacaattttaccgaggattccacaggaaaaaggaactcgggcgagagccaatcagtgagaggaattggtaatgacatcctgagtctcatggtcacaaggaattcttggacgcttaactcggcctgctgctggccgccggccgacaggactcgggatcccacagtttatgcttaaatgcttccacactccagcgcagatggactggtactggcgtcggtatccgtgcagttcgagttttgctcaagatcctcactcagccctgtgccgggatgtcttgctgatcgtgttggcagacatctgccaaggctcccaagctttaagcgtttagccagcagagggtgccagatggcagtcaagccttgactcgggatctgggcacgcggtgcaggtgccgatccgagggctcgtacctcggattctggccgagcgcaagccacgggacccacatggcgcacataagatttcacatccacgcggttgagtgttggcatttgttgaggactgccagtcggagatttctcaatcgcccgaggatcggccgctcgtggaatattcatttctcaagtttctgtgcacggtcttggttcgctgcatctagcgcagagcgtatgatgtagacattacggtgtgttgcgcgtggaaatgggtagaacgtaacgacgtgtccagccggaccgtgactccggccctacgtcctcccgatcaatttcggaggcatgattcaggcttcagctcagggttacggttgtcaaccggacatataatgtgcggtggatctacgttgcgacggtaccagctggggtggtgccccggctccattccgtcacccgtccgctgtttctcacagagtgtctgagactcaggacccaaaaaaaaaactgctcgcgtgatgagaaattccttctcgacgaccctccccatcattcccctcagtctcaccggctacgtggggacgcagaaatggggtgaggggatgccctttagcccttcttctccacggggtcgcgtataagatgccacagtccttcccctccgatattgtgccgttcagaatttctccagctccctccctcttcctcgcccgcctcagtcatagccaccatgtctgaccgggttactaccatcttcggcgccagggggaagctgctgcattccctccaggtcttgctaattggagcgccggccttcgtcatcttcggttataaccaggccggcttgggccctctcgcgactctcaacagctgggtggcaacattccctgatatcgataccgtccacaccacgggcgtggagaagagcgaaaactcgaccaagaagggtgctgtcattgccgccttccagctcggagctcttatcggagccctttccaccacattcttctctgaccgatttggtcgccgaatgtccatcttcattggtgcgattctcactatcatcggacaggtcctgcaggtggcatcatacagcctgcctcagtttgttgtcggccgtattatccttggtattggcactggtcaagtcaacgttgctgttccagtctggcagagtgaatcgtccgcggccaagaaccgcggccagcatgttatcattgatggaaatgtcatgtgtctccgttatgcccttngcaactggatcgattntggtctgagcccgatcgaagagagcacgacgcattggcgcgtg

SEQ ID NO: 5859 - DNA, 4385 bp, Emericella nidulans
aaagcactccccagaaaactgaaacttcgcctcactgcccacaaatgtggctgtgcattggcagtgtaggctcctacaatacagtacattaccgaggcgcagtaccaccatcgctgccgccattgataccgccatccctcgccgtcgccgagtccgatgtctctcctcctgtcagcggcaatggcacagtgcagggacgtcgctagatcctcagaagtcgaacgactgagcaatgcattgtattaacggtcaagcccaatcaagattgggagaagagactggaaaatatcgctcgctcgtcccgtcgtcccgtctgtggtccgccgactgcaagtgctttgcatatcctcctcgtgactcagaggctccccacaggcccacaaactgcattgtactgtatcgatccaagcgactgcggcttgggcgcgtgctgatacaacttcggcatcactttggaaatcgctccatctgacctcatgctgcggcactcagcccttctgcctacccgtgctgtgctcgttgagctgcgggcagcgccgggaaagcaagtcttctcatgacctattattgtcctatccggttgactgaccttggccacgttcaacttcaggcagtcgcggtgttcgccatcagtcctctgtagcctctacctatgactagggctcccgcgttggctttcacagatcacgaggccgattatctggagaagaggggaatcctttccaatgataccatgaagcccctccgcggacctctgattgcacgcgcatcctggagaaggcgagctgcgacgtgcgtaaaaagcgatccatggcaacgccgaaaacgtacggatgttgatcagagatggcaaaggcctctcagaggccttcaccctttttatgtttacagttttgagactctaccctgcagctcgctggtgcttactcgacgtaacgccccagcatcggtagtgacaaaattacgaagtgcgtccagccttcaacggagattcctgttccagaaaagctggagatgaccatgaacatggcttagaccaatggttgaccatagcagggatgtcggatgtagcgtgcaagccggctccttttgacggcagcgaataagatgctagaagcggcttcttgtcgcctttcaaacccgtttagctcaagagaataatggagaccgtgggtcctttacccttttctccggtttccctggaatcgtcttacttctcccctaggactcatcatctctgccctgaccagtttcgcttaccagggtcgaccttactcagacgtttcaggagaaaggagtatccccatctagacacgcgtgcatcttatctcgaccagtcagtctaggagagagctacacgagggtttcgttggcagacaatccagatatatggcggtatcttacaatactctggagcgccgaagctcgcacaagccggacgcatacacaaatccggattctttgtgctgcgggagacatctgattagtgccctgggactcgtccagcagcgctccaatttctgaatatggagccttgagtttatcgagtccgagttcttcgtgcagtcagttacatctccgctctcctcccatttctttggttctggccgatgcgcacattcctattgtgttcaagttttgttgtgcgaggggtcagaaggtgaaccatggaacgggctcggatgggattttggacacaatctatacagcaagtgtagccggatcaaccgcccgctgcgttcgcgacgatccgatgagcgaataccggaccagcaagtcatggatcttgcttgatgcagtacaataatggctgcaatagataaccgggagtacctcggaatgagagcctgctgtttaaaactcagccacaagcgcactgttgtcaagaacactaccagctgaataccgctccacagtggtggcaaatcgggaaaggccatcaataagatcgagcggttgatggtctattccaaaaggcgttagcgagctcaagaacttttttaacatcggatgatcttccacgatgtagtggggtgagagaagcacatattcgactccatcaattctgcgcctttggctcatcaattttccatacccagtagtggtgaaacatacggagtactccttgtatgagccacccaggtatagatcatgcagcactatgtggtctatactaaaaaggaaaaaaaaatgcccagatggatggatgtatctgccgtcctccacaaccacgagtctgaccaagtggaccaaacggggcttagccgtcacgactcagttgaagatttgcccgtcgacatcatcattcctgtttcacaactgaaggttgtcaggttactctgcattcacaatggactttttactggaggtcaaagcaggccattcaagtcctaggctgtgacagtgacagtgacactctcactttgtaaacagagtacggttccaaggttccaagttctatccggatcccccgaatcagtcccgcacaagcccagcgatctagacgctctggtcgaaccttcttgacctgtggccatggtgttttatagatagacaccgccatgtatgtaagtaaggatgtaaaagacgtaatctcaatacgatgtctccaccgcgatgacctttctggacacctgcatctgcatctgctaagttccaacgctcgactcagcagaaaaagcgcagctgagatggtacggcgagtccggtttgcggccgacccttgacctgtcccatacgatcggattcccactgcttgcacgaaagtcgccggatcctcacttaaaagcatggatctatatgcaccaggttgggttgaagataaaaagacatcataaataataaaatatagttgaagaccggttttttattttctgacctaatcaatcctcgttttcgagtccgattattacctattactactgtcagcgcaggtttgtttggctcaactgctgagtgcagagtgtgtgaattggcattgcccctcccgtctgccttactcttcttcgtctgctcgtctcgcttcgctacttcttctcttctcccatcatcggctttttctcttcttccctcctttttcggccgtctggcctttttctttccttcatacgcttcgttcttttctactccaactattctttgttttatacgattccgtctcgcgcacgctcgcccacatcctaatccagacacccttccactgttccggtttgatcgactctgagcctctggaagagagatatctaggaaaccaccgaaaccactgtggttgtggagatcaccccggaagacaagatcgctgtgggcgactgccgcttgatgaacgttctatgctattgaccaactgctactttttcattccttcttggccatcatatcaacaggaataatgccgaccgtcttactgccatcatcggccgctgcttttgcgccgcggtcgtcgcctaacgtggtgctgaattctcggatcgagccctggctcacggccgccttgaaacgagtaaaccgggtgaagcgacctttgaataacgtcgcgcagcatacgaggtgtctgaccgagactctttcgtcggcgaacgccatctggaatctctgctcgatgatgctgcccaaagctccggagtccgatctgcgcaaggacgagaaccctctcgtagaggccatattcaactaccagatgattcatattgaagcatacgtggtacatgttgatatggtatctcagaacgaggtcgcgttcaaactcacgccagagacgatcgaggcgcttgtcgaacatcacaaggaggtctactcgattgacgccgccgctaatacatgggactgggctgagaaggacaatcagctgaagaagctgcaggaggaatttatccaggcagccaacaagtttgtttaccgcaccagcgctcaagctttttgaggggctaaaggaagatggcccgtgaaaactgcttggtggtaggagtgaggattcaaaaaagccaatacttggctctgttggcccccttggatccggcggccttttggggaattggatgaccttcgtttttccccggggcttcccactttgcagggaccgagacctgggggtaaactcgaagcaaccaccggttttaatggacttttggaaagtctggcttccagcccaggatctagtaccacttgggattccaacctcagaaatggactctggcctaagagttagcctgaccgcccaggggttccacggttactacaataacggccttaatttggccttatcttatagtcttgaaacccctgggagcatcaaccgtgaatatcaattggcccttttgtacttttcattgccaaaagcgtgggacccctgttctaggggtcccgctcttttttagtggcccccctcc

SEQ ID NO: 5860 - DNA, 9287 bp, Emericella nidulans
  unsure (1)..(9287): unsure at all n locations
ctaggcttcttctccgatttctctagctcgattgtgcgacgcatcatcgcgactgcgtcagcaggattctcattcgcactcgcccgtccaaggcgcctaacagacttctctgcctcggccagacggccctttcggacgagccaccatggagattccggcgcaataaagagtaggatcgcgagaggagtaggaaacatccactggagtgcaatgggcattctggaatgattgttaacatagtgttcctcattggtgtttacaggagctgacgaacctgtacgcgctggagtcctgcttggattggtagtgataagtgatcccgccgacaatgatcgacccaatggcccaaaacatttgcaacatttgcgtcgctggagctctcaatctcattggcacaatctcagaacagtaggctggtgcattggcgataaaaatgccccacgggataccttccaggatctgggacgcgaaaaacatcccattgctgttcccgaaatagaagatgaagatgaatgcattcaagaacatgagagcgccaatggttgcccatcgataaccaatccaactggtaatgggacctgcaagaaagacgccaatgaaggcaccgatcggtccgctacactggaatgctgactgccatgaagcttctataatataagcttggtccctttcgctatagacaccaaagtcatcggcgaatttttgtgtggctatgaactgtcccatcaagaaaacacagtacgactccatgatctatcgcagcgttagggaaatgatctgccgattgtgggtagtataagagcttacaatggtgcatgacatgacgaaggcccaccagctggctgcaggataggccttgacggcctcgagcacagtcatgtcaaattcgaccctctctgcattgatggcgcccgtcctgtcgtagtcgaccttctcgtcgctatcgtagacaggttcgcccttggaggtgggctgcgcctcgacctccaacgctgaggtctgcttctctgtgttgtcgctactcatgttgacgatctctgagacgatctcttagagatacgggtggagaaatgggtgatcgaaagagatgcaggcacagctgggggtttcagatctttatacgtgcgacagcacgcttgtaatggtaacccggggctagcttaattaagtgaagcttactgcgggttttccggcctcgacctgtttaaccaaccatcattttcccggattattatggtggcactgtcacattcggcttgccatcgctcaatcaagctttcttaaatacacgtaggtgcatgtttttcccgagctgccctagagtcaacgtgtaacggtataatgtaaatcaactcatgctgggcttctgtcaaacgaagtaatccgatacgtgtattcgggaggagatgtgccggtcccttcgggcatagtcccccggagtgcttgcggggacgctttcctgtagttttgctctctcggctaattccagatgcatcaggcaacccaagcacgatcagattggatgacatggtgattacattaatactgatcgtaataacgagactatttcgctattatatttcctgacgactgttgacggctatcttttgcgcttcctctggtgtcttgtgttggtaatataacttaacaattagttcttttttttttcttttcgtataggactgtgtttataacaataatctgaaacaatcctaaggttgaatatgtatacgtagaggatgctctcacgtgaaagatggctgggttattacgacttcatttgtaaggcaccaactaacttgtttttccaggctggaatgatccttcgatatctgcagccaattacttggacatattgtgcaaggggtcggctcgttgtggagcgactatgccagtcagtttgagtctgagtccatttaatccacgaatagaagaaagttccttcggttatttccgagatttagcccttatttccccgcagtgtcagttgtggggtgattttctgttggttttcctcactcggttaattccccattgtgcggggccggggtaagggggaatcgccaccagcaccgtattgcgcgttctccgcttcgttttcatccagaatcctgagacccggctagtgaaccggctgagaaccatagtataacttcatgaaatatcaggttagctcctaccaaatctgtttagaagggaaccactgggaacctgattgagatatatagatctgtccaatttccaaatgaaccactgatgtggcttttgcagttgcagccttggctgaattcaaaagcttttcgaaataaacccgcagctataaaatccatttatggtgcttgagctcgattggtattctgcttctgtcatataacccacgcttgcgagcgataatatgcggagagtccgcgaaggcctctcacgtatctgcgttgaccatcgtgatcagcacagtagcgtgggaaagaccctcgaagggctgtgtcagattgattggcctgggcaaagtgaaccgggctattattctggcaaaatagatcctgactgtatatcccatctccgaacggcttctggagctgaaagataatgcttctaattcccgattccccaatacccttttctttctctttctcgctcctgagaacctggagccatggagttaattcagtattcgaccatctgaaaacctgaccagagtggttcagaaatgagccgtagccgggaagggaaaatctcgaggcctctcagaaaagagcaagtcaagaaacgtcggttgaatatagttgaatgaacctaaacaatatggacaagccacatggctatccagcgctaatgatggctggctcaaatcatcgtaggctactggctaattaagctagttaataatcgccgactcttagactcgcgcctgtcagggtcaaagccatcagccacttttcaagaaactttctcagaaactttcttatccaaagaagcttggaggcggatctctccaatggactaatgtcattcccaccccaggttgggtgggaagccggggtgtaacccaagaaaagccacgcgcagaacagcgacagaagcaagtgtggatccggttaattgcagcttgcccaggttaacacgacaggttaatatttgtcgagagacagctgctggaggttggagacaagacatgtatagctctatactgacgtccacgagttgatgccgcctcgttgccggattctagttcatcttcgaagctatattgtctaccttccgtccattctgataactatgtaaatgtgtactcgctggccgtcttacgccacgtgatatcgcagcttgggcgcgatctccaacccttgggggatctgaccctcgtgtgtcgtacaatcgagaaatagcaagcaagaagggatctatcgtcaacgagataaataatcaatcgtcatatggcgtccgattattagtaggctacgttcgtgtagttgatacagcttctttcagccctttttccattgagcaaccacaacaacaatttctagccctgcaggctgtacccaccttacactgagtgcacccttacaggttctgatcttcaatctaaccagctggtaaaggctctgactttggactcgccaccgttctgttacagtctaatcatggcagcgagtttacctgcaacggaaactaggcactctgaaagcagaaaataaagctcacagctagaattagtagacaaatacataggaatggctcatgtagtttttcagagatacctcaccagtcgtgcttttgatacgatttgatcgatccaatccctgaactcaatgtcggacggtttttcctcatataatactccagcgtcgccctgatcccggaaccaaatctctctgccttgacaagacattacctagagacgtagacaccgcaacgagaagcaatcttgcaaataagggcagaccagtcgaagcagcccgcatcgcttcctcagccacccgaaagtggtctctctcacgctactttgggtggtcatagacacgaccactggtccacaaacgtgttgaatgctcattttttcagcattagccaggtggtgccaatgaacgtccggaataagatttatgaatagaataatatcaggatcactgttcagccgcggtaagataagacgctagatacctagtttaggtatcctcaagtagcggctcccgctgcagatctttattccattctcgaagccatatttgtctgcttatctaccatccgttttgtttaatgaattcaaattagagtgccagtagaaacccacgtctctgatggattataagaattctggttgaactgcctcagcgtaagctgattgattgctgctggcatatcctggtcggatatctagggtaaaatggacaataccttttggtccaacgttcagctcaacctatgcgctagtataggcctgactgctcgaccaaagggtataatacaactaatcagaataatcactgcattagcggcctgtatagcagcgaaggctatgcctggccccttatcctggagttctagcccatgacattctgctatgtacttgcgggaacgttctggtcgtcaaaccagccattaaatgtgtcgcaggatacagttactgatacggaaatgttatctatatgcgatgtgcttgttggccgttacgccgcgtgatttaacggcctcttttccaaccctgaggatctgatccttcaatgtattgtagtaatcgagatagggcaagcaagaagcgatttatcgtcaacaagttagtgatcattcgtcatatggcgtccgatcctttgtaggctacgttcatgtaattgatacagtttcctgccctttcccctttgtgcatccacaacagggtctattatagacaagccgcgcatggtgttggctcattttcccgtacaaagtgccggaatggggaacaccagcgactatgcacccgatgctcatcaatctcgtggcgctggaatgacaatctattcaataggtcgcttcgcaccagttcagctcttcctcagacgaacggcatcaaagtggcgcgcgacacagccgcaggatattccaagagttttcttggcattggactagctgctagtcacttgatcatgggtacgaggtggtgtcagagttttttatgcccttgacgtagtttgctagccttcctctctgttctctacttcctcctctttataatatagatagtctgcttctcagtgccattaggatgttcctaatacgtgccttccgcatcctcaaagacgccatcttatctactctcccgctccacactcgcctccgcctgttactactccaacccatcagcttaatcacatataccatcgaatggtatgtttcccgccagttcccgtatacaagtgagattcagatccctctcaaacgccgagccggctctgtccgagccgttgtctacacccctaaatcctcaccatcgctgccccccagaaagaaacgtcccatacatcttaacattcacggaggagcgttccttgggggccttccagaaggtaatgcgcgcttctgttcggaactagcagagaagaccggagcagtcgtgatttccagctcgtaccggtacgccccgcgacatgtcttccccgctgcgcacgaggacgtgcaagatgttgcaagctttctcttggagaatgcggagaaaatctggaatgccgattctgaactattcactgttagcgggttttccgttggaggaaatctggcgcttgctgttgcacagagtgtagcaaggacaccgcatgctgttaagggcagtgttgggttttgtccagttgtatgacccctactatactggagagatatatgcgagccagcgacggactgatatcggagctaggggacttccgactcccacccgggctaaagcccaagccctcggaattcccagcggtagatcctttgtttttcctacagccacttttcgacgcttatgctgggccaaacaggcggcagaatatgaagaatccgatgctgcaccctatcctggctgatatccaatctttaccgcagaacatgttctttattattgcaggtgcggacatcctcctgcaggagtcgcaaggcatggtacagaaactagaggaggaggcaagggcaattaatctggcaatgggtctccctgaggagcctaaggtcccgaatgggcggtctatttgtgttcggaatattaaatttgagggacaattgcacgggtggttagaatgtgagttcccgttatcgttatatcccctcttgggacgctaaatattggtagtgccatcttctattattgatgtcagcacacgcactcgggcatttggtgaaacaattatattccttcgcgacatccaccgggcatatgggtataactggcctctctagtcctggcagcttgggacctcactaatcacccctcttgtacgatacccaatatctcagctccagaatgcattaacaatcctgtgtaaggtatctttgtgtaaggttatgcaaatatcatcaagaccctccttgctctatccatgatcacaaaggccggcatgccaaaacacttcctggtaagatagagccactggcagacggtgaccttgccagtcatgacagacaaaaggtctgatcaaggcgctgtccagagcgctgatcagatctgcagaagtacttgctcttcgccctgatctgcggcccccagcggtagcagacaaacggcagagggacacacgccaccgcgatgcggccgagcagcgtgctggcccagggaattcccagagcgccaaacatcgatttagcgaatagcgggaacctaaagccacaaaagaccggagcactgagctggccgcattgacaggggctgcgctgcaagtcgcaagacctgttagcaaagggcactcctttccgcagtatgagacgggaagaatcgcacttactagggaagatacatataaaagaggtaattcatgagctgctggaaggtgcaaaacagcccgaatccggtgggcagtcctgacaggacgggcacaatccagtggatgtcgcgacggccgcctgaccagccgagccagaagatacgcaccgcaaaagctgcacttccgaccatagcgggggcagacgtcattcgggcacgattaccccgttgctcgccttgagcttgcggtaatacgccggctaggtcaacatcgcgcagaccctcccccgccgagcattcccagcgcgatgccgagataggcgagccccgccactcctgggtgaagccatgaaccgtctcaaagaccattgggtaggctgtgagaacagatgtatgagcccgtagatgaaggccaaatatacagaaatgagtcccacgagaggctcggtgaagaggaggcgaagcggttgtgcgaggtaagtgacgatgagtgtgcgtccgtccacgaccgttgcattatgctgggaaggccagcttcagttgccggtcatcaggcgctgtgagcaggccttgtaggtgagcagcatgggtgcgtatgtctccttcaaaagcaccgcacagaggaggaatcctgcgaagcccattatgctgccgagccaggccgtacagcgccaaccgaggctatactgacagatgaagccgcccaccgagggcgccaacatgggtccttcaggatgttcatgctgaagatacaagttgcgggcccgcgggtcggtccgtcaaaaaggtcggcaaactcggcgccggcaatagtcatgggtgactcgggcaaaatacctgcccagaaatggcacagcatgacggtctggacattcgtagccgctgtaacgcctagagagaagatggcaaagcctaggatccccgaaaagatgacccctcgacggcctttctgctcggagacctgggcccagaaaacagcgtcgctaccttgtgggatactcggcactcctgtgtcagtgcatcgattgccgatgagaagagcgaggagttgaagcccatagtgaaggtcgcaaaccccaggctgaccgaaacgcgcagcctaagtggacgaccattgattagcacacacgcaccacgaagggcatttgttgaaggaaggctgcatacttgaggggcaatggccagttaaaccgatgtgctggatcatctcggccttcaaactcgaccgtaccactgggtacgccagcgactgacggccgattcacttttagagccgtgttagccggcctcggcgtcgacatcagggagacaatttaatactgctgccatgatccttctgtgtgcttcggccggagctgtgatgacgctgttgatatacatatgagcatcactgtcccactatactaaacataaacttcacgttttggtcggtaaatgagagcttcggctaatcgcagcacttgctctccactggtcggctaatccaaaggcttatgagctgtgacagttctttcgtctcttagcttgtgctgactgaatgctgctgtgtgaatcctctcaataactctatgaattatacttagggcggttcctcgttagatcaccagatgattaccaggctcaggcgtgcccgtaagatgctcactactagggagagtgcaatatcaaggaatttagtttttaaaattattttgctagtcttgcagctctctatatttcttttgttgctagcacagtccataccaacatggcaatggcctttgccgcaagaatggcttcggcatgggcttcgtctgtcgcggcggcttccgcaaacgccggatggtggctggaatattcggcaatgttggaatctcaaagacgccgtggaagctgaggactttgtgggtgacattgcctgcatggtgaatcagcttacaggaatccaatgccaacggccatcaacctacccataactgtagacgtgatggctatcgtaggctgtcgcatcaggacatggcgtccaagtgcttccatcccggccgtgtatatctcacagaaagtatcgttaatgacaggtgctcgaggccctggtggaccccagggcgtggttctcggtcttgatcatgttgtgcgccaacatccccaacggggggatcagcaacgtatgtggccctttctcttggtacctgacaattctaggcgcccgtggctgactttcctctagtttgccgccattgtcgtcaagcgatttgccattaccaccaacgagactttgttacatgatngtcaccggtttcaggggttctttgtggtgaccgcacattgaagctctatttaacaatacgccacactctgatggaacctacacgtc

SEQ ID NO: 5861 - DNA, 5460 bp, Emericella nidulans
catctttcatcacgggtccctcttatagacatatgattccttatatatcgattgacatttaggaccctgttctactgatgttagattaccattcaagcatcctgccttcattgtcttatgtagtgaaggcagaaaaatcatgattaccgtgaactccgtaactaaataactgcatgagcaagatgacgaactaagacggtacaagcagctgtacgagcacattaatacccttgaactgtgtcgacgaaatatccaggcccctctccttcgccgaatagcgcatgatacaattcaagatagcgatccctgaggcgctcccatattggccggttcagccacttgctgtattcccggtactggtacatctcatcccagcagtcgcgaccaaaatcacagccagccatgttaacaacaaaatctcgcgcatctggtgtatagtgaaccatcgggtcaagggagtctccgcaagccccaggaggaaacgaattgaagtaccgctgtggagcgaaggcgacactgctgcgtatccacggctggtttatatacaggtactcgagggcgtcttgctccttgtgttcccactgcatatgccgctgctcgtacatcacagggtcccaccatgtgtctagtagccgctctgagaatagagatcggtgaacaaagaaggagccaagattgaagccgccacagtcttgagagagcagaagatggattgagcctgggtcattgtcaccaatggccgagcgagatacttcatcaaggtatggctgggttggcggatgtgtgatgtttaggggattgtactcgttaatgtcgcgataaacaacctcatcaaggcgatcaaataggtgatcctcaagtgagtacgagttttccatgatataagtgttgaggtcgagccaccagaacctatatactgttagatgtcaccaccctgtaggcttcctgggtcgcgtaccattctgcggttgggtatttcttcatggtctcacgtaggatatcgactttctcccacccctcacgccattcatgagagtagcgcttctttgctagcatgttaacaacctccagtttatacccccatcgtttagcatattctttcttattcgagatactgtttcgctcaatagcccattctcttgcacctttccactccatgactccaccctcggtattcgattgaagtattatcacaaacttctgtccgctcccgaagatagaccgcctgaagagttcgacaaaggctagatatagcttagttagtgacctaaagccgaggcaggtcgagcagggcaacttacacgtccagagaaatagatacccaaacaacaagagaaacaaagcaaggaagagccgtgatcttctacgccgcaatgctgtccgcccaaaccataatgaacgccagccgcgtccacgcctatatatggagtcatctttctcagtgtactccttcggaggccgagaccacatattgaactttggaagtgtttcaatgatttgacgcttgaagcgcaagaagaacccgcttttcctggtagaaaaggatggataaccacggacatcttcgctctttgctttggcgactagccatgggtctaacggattgggtgggtagaggctgatgtagggtgttgacctgccactgcctgaggttaatctggggctagaccaccctttccctggactgggggaaggcgatcgaggcagagacatgggaaggagtcaagagcgacagtaatgtgggaaagaacggcagaatccaagccaaccttcgctgaaatggcgccgtcagatatcaaaggaccctgacggctagaggcagacgagaggacaacaaggttggcgaggagagagagagttaacaggatagtcaaggggtatatacagcgatgttgagcagtggtgagcttgagggagcgattagtatgaacctaggaagacttcatccagaaagacccgcaaaatactcgaggcagttgataagccaggaagcaactacacatcgcaagcttccctcaaaccactcaacggagaaggaagggattcattaattgagccaagaaaagtcgccggccatgtcgtagtcattttgtgaacttggagagggcttgccgcgaacggttgcatcccgcttccggcactgagggaagggatttgagaaccacacaggatcagggtccaagggtccagacaccagcccaggaacgagctcaagggtccacagcaatggctaggtcagggtgttagctattcgggtcatttacaagaatggtgccgcattcttgacggcagactggatttgtgattctgccttctcggcagtaacgttgcaggtacacccacgaggtcaagaagaatcataccagacaagtccttggtgactgcaccccgcccacaaataactttatcataagataagacatcgcgcggagtaggtaggtagatcttgctggtggttgacctacagattgctgtgaggtgagagcagtatataatgcacggtgccctttcctttctgagtcacatgaacaaacgcttaagtatggctagtgggaccagtaagaagctagcctatcaatatacatttcattaaagacatcgacaatattctagatagactgatgagtatagatacaataaatccccgagtcagatcccaagtgttcccagttcctattaatcagctttgtatgttgcgttgtatctagtttcgaggtggacatctccaaaagcggcagcagtctaaagcaccaatacctacattctcatcctaaagctcaaaaaaagtgcactttaaatcaaagtagcccaagtctcatcattgagattttgtcgaacaaaactattctttcgaaatggcgttgcgccgcaccggttgctgattgactgctgtgctcttagatgtcaggactttgcgtaccacaaatcctttctcattctcaggtcgttcgcgtgcgctgtctccatgataaaactcgcacttgaatttcagaaacttgttgcggtgccgatataccgtaatgatatcaccagtatacagcttgccaaaatgaaagcctccttctggacctttctggagttcaacatcgttcacccagatacacttgcgcgttttcgttgaaagatgggccattgtccctgggatagtcatccagtcctgtccagaagcaatacgttcttccagtcttggagcccaaaaagtgatttcaagagcgtaggccggaatgcgcgcatccatggggtcaggataacagatacttgcctgaggaccacggccccaagatgtcattcggtcctccagacggagggtaagatcaaagatagacccaggaagagtggttagttttcctagtaggggtcgagactcgcctggtgtcggcaagggtctcaggaccccaacaggcccaccagctctggaagggtctgcgggtggttgaaagccccttgattcagcataatcgggaatcagctgtccggttttggcgtcgatggtgttagcaagttcgatgtcaaaaatctctggttcgcgcgtcaagttcctatattggccatctgcatctcgcatattactatcatccgagccagaacgttcgctcgcagtgtccggtaagggcaactcaattcgtcgcttgaatttggcagcttttggggtcatgagagaaccagcttgcggaaattctttttgaactttatcgtcagcaagcccatcatcctcactgggttgagggcttgctgcctcggtggagaggagagggtttctggaagtgccagggtgccacgagttcatgttgagctgccggacgagtttctcagcgcccagtaagctaagtgccgatccagcaacggggttttccgggagggataggacggagttgaggctaccgccataactgatcatcgactcaccggtagaagaaatgaaatcctggacactgtgatggtcatcctcgaatgcatccatgttgtcacccaaggcatgggagctgcgtaaagctgatgaagttatttcaccgaagaggcgcctcggagtggcatgggatatttgctgatggtcctgggaaacctcaagtttgggcagcgacggataacggacatctggagggggtgaattaatcctggggcgttttgattgggcaaggtcgctgtcgttctcagctaaatcgtctccgaaatccggattttcttccagggatagttgagaggcatctaactcatcctcggcgacttcaccgatagcagaaagcccgtctgagtaattggacagtaagtcgtcatcttcgtattcgtcaatgtcggggatatcaactagccaagggtgtttgaggcactccagctccttgggacgaagctgagggtcacggttcaacagcttagataccaagtcaatgccctcctcggagacgccagcttcgcggagtatctgatagtctggttctgttgtcataattgttcgtaacatctgtgctcctctgtcatcgcctcggccggtgtatggaggaatgccagctaggaggtggtaaagaacagcacccaaggagtacatatccacggattgatcatatggggaggttttcgggagcctaatacttagtacagtatccaataacacaccatggagtaacttacggatcaccgaccctgcgtcgcttcctcacctccccacgtcgatacatatcgtactcagggtagacctctggagcgcagtagaggagagtcccgcaaaaagttttgagaaacgtctcctcttggacaactttggacaggccaaaatccgagagcttcactttcagtggctcatgggatgcgatcaggatattgtccggtttgatgtcacgatgtgtgatttttcgcttatgaagatatttcagcgcgtggagtatttgacgtgcaattgttttcaccatatcctcaggaatgttgaccatgttctgtaaatacgttgataattcgccgcaagggacgtactccatgatgatatagatccagcggtcatgctcatggtgatcaatgtactggacaatgtttggctgtcgggtaatattagtcaagtccttttgcactgtattatctcaatcacttacatgctttagatctttcatgatcttcaactcattatcaactttttgattcaaaacaccattcttcatgaagtggcgtttgtcgagttccttggccgcaaacacggctccatgttgttttgtagccagcttataaaccacagcaaatgcaccctttccaatctggccggtgacattgtaagttgggccacccgaccaatgcatcccgtgactattccatggcggaatgctgagggctgacgggtgacgtctcccaggttgcacagtgccaggggcgccaccatagactcggccaaggtaattctgaaggttcttggcatatagatcggtaaaccttctctattaggcaaacgcaccacgaacttgacttcgttcgtcgcgt

SEQ ID NO: 5862 - DNA, 3033 bp, Emericella nidulans
  unsure (1)..(3033): unsure at all n locations
cccagccttctcgagaactctcttactcccttcattcccatcaaaaaacttctgcatcaagtctcaccacatgcgcaaactcatcccggctaaagatccaccgcacaaactcctccactgcttcagtggcaatcccccttccccagtactcttcgcccacccagtacccgagctccatagagcagtgctggatgtccgtacgtggcttgagacctatagcgccgataacggtgttggttgattcaaggcaaatgcagaagtcgtgcgtggggctctgggacatagtgaatgttatccaactgcttgcgtccgagtgtttgtatggagatgggaacgcgttgcgcatgtattgtgcaattttagggttgttagcatggcgcgcgagggattggatatcggaagtggtaggggtgaaagggcctgatatgacatgacgctcagcactaatcagctgactggtcacctattgctccntatcactgaactcggaggcacgtagcagtctcttccacacccgcatgaagccgcttatagaagcaaggattaagacgcagcgcgaggccgtcgacaaggctgcgctgcaggaaaacctcaaggctcaggtaagatttccagccggtctcattcgaatcgaacagtctaacgtctttgcagggcagtctccttgacatgctcatcaatgccgggcttcgcagcaaatggccggtggaggtcgagacgatgtggctggcgtataggatcttcatgatcaactttcctggagttcacaccagcggcatttccgccaccagcgctctgctcgatatcttgagtttccctagcgaagaaggtctcattgacatgctccaagccgaaatccaaaacattgccgccagcagttgtggtaaatggactgctgccgagctggtacaagcatcattgcttgatagcgcgatcaaagagagtctccggtttaacggcatcaacgctctttctcccacccgaatggtatgctcttcccaatcttaccatgtacatcagctaacactgctccaggtcgttgcaccagagggtaccacgctcctaacggtctcttcctcccatacggaaccaagatcggcatcccgcaatacgccgtccaccgcgacagcgacctatatcccaatcccgaccaatacaatccttaccgtttctatacaccgggtgccagccccgctcagctgcgcgaaagttcaatgacgaatacgagcgagtcctatgtcgtctttggtcacggccgccggcaatgtcccggccggtggatcttcgcccacattttcaagctcctaatcgccgagatgcttctcaaatacgaaataaagccctttcctacacggcccaaaattcaccgtaagtgtctcaaacctcgttgttggttcgtggactaaccctgacaggatggggacgcttccaactaccgcccctaacaacgaagctgactgtccgacgcagaaaagacactgcctaacctttcctataccataatctttgcctggacttaattcatcaggcgatcttccgttctctgtaattatttctgtttgtattatatagcgatcgtttggatagaggatatattaatggcccccggctgccggagccgcgcgatgataccttgggtggcaaaatgatcaagttgacttgaatagtccattgataagtggcatcaattggaaagcttttgtgtctgattatactctttgtgcggcagttgtaacctgttggctgatatatatatttccgccctattgcagtaaaccagtctgaatggacagcttggctcttgagacaagtaatctattttcttttaccatggcggtctgtttctctaagtccatcgccatcttagcaagtactactatgctgcagatggtcactcactgcattacttagccataaattgtgcatctttgatggctcaacttggcttcgccaggtctcaacccggttccgaggcctccgtaatgttctatatcaattgtataaacgcgctgcgatgcatgatttgcatctagggttggcggtatggctcgcttcagtcaccagaatggcgctggatcacgttcggcatgatgtgatccggacggaatacgaggtcgccgaaaacggcgtcacagtaccatcctaaaacggaaagacgtagactaccaatgttgcggttcgtgctgattgacaacacgaaagtgtcatggagcacaattgcagcactacttcatgcccttcgtatgccgggaacctcgaggtggaggacgtccgtcctcactagtgaggtgagatggcggagacaaagggggatttccaggatatctggtattcaaataatctcatagtatgattgtctcctgatcaatatatgcattggagaactggagagcaaagagtataccgaattcacaacagagtcaaatctaaaatggactttcgacatacggcggtatccctgcctggttgcctgcctggttcagtgatcacgatgtcaagggcattttcaataaggcatgagatagaagagaaacagtaccgaatgtgcaggagcgtcgagattgtaggttaaatcaatatatgaaacccagtctgccctaatgagcggatgggacgtagctatttgtgcaaaccctcattcaggtgcaaccagtcaacatcaatcgagtgtgctttgacccgttcttgttcagctctatactcaatgatgtttctgcaataagagctattgtgtctgaagtttctgcaagctatctacctgaacagctgcggccatctttatccttgtcatgttggatgaagaacggccgagttctgaacatgacggactcgtctaccaatatagaagttgatatattgcgtgagctgcagagagttcaataataattttgcaaccagaaatagatgagttttcgtcactggggtgactactagtctatgtctcgatttatcaattgctgaaccaaaaaactgtactagggcacggagtccgactgggttgtcgggctctataagacaagacaagcacgcagg

SEQ ID NO: 5863 - DNA, 2200 bp, Emericella nidulans
  unsure (1)..(2200): unsure at all n locations
agaccgagttttcgcatgaactgtacggatactgagtctatgagatacgcgtttccttttcagcatttatacttaacacaatatctttatatgtattcttagacatctataacaaagaagctcaactatttaatctgatcattgagcatactccttgttaaaagcacgcccaatcaccatgcgtctaatctcgctcgtcccggctccaatctcatacaactttgcatcccggagtagcctccctgcagggatctcgttgatatatccgttcccgcccatgagctggatcgcatccagagcacattcggtagccctctcggctgcgtagagaatcgcaccggcgcagtcctgagtgcgaatggctgctgatcccagggaggcatggctgtcgatgtggcgggccgtcgcgtaggtataggcgcgggacgcagcaagcttggtatgcatatccgcgagcttcccctggatgagctggttatgagcaattggggctccgaattgtttgcgaacgtgggtgtacgggagaacgagatcaagggcggcttgcatgatcctaaattgcttgttagcacggcctttgccgaggttcatcctcgcagattgagatgcagtggacccacccaagcggaccagcactgagaacaagccgctccaaatcaagaccctccatcaggaccttgacgccgcggtttacttcgcctagcaagttctctcttggcacgaagacgtcctcgaagatgagctctccggtatttgagccccgcatccccagtttatccaatttgcgggcgcatgaaaagcccttgaatgtcttctctacaacgaacgctgttatccccttggaacctttctcgggctcggttttggcttgtccgccattgttatctgcgtcagggccctgtgactcttggctttgttccttttcggcgtggcatggtatcttccttttggaatcccatcttgttcccgtaagacccagccgcatcacttttttggcgttgttttatactgacgacgtcngaaccggccgagtgcttcgacatagccaacgcaccgatcttctcgcctgatagaaggccaggaagaaaacgcgctttctgctctggcgtgccgtttaaggagagttggttcacgcatagctgtgagtgtgctgcgtacgaaagggcaatgctacctatagaatgatggggtcgttaaagagggccaaatccaacatagaacaaatcaagtcgcatacctgaagcacggctaatctcctccataacaacgcaatgggcttggtagcccattccaagccctccgtactcttcatccgcggtgacaccaaggaagctagatagacattagacacgcttcgacaagcgatacccaggattccaagtaatatctacccagcattgcccagtttcttccacatctcagcagggaattcattttgagcatctgttcgcgccgcgacttcctcaggaatctcacgttctagcttagtggttagaacgtcccgcacgttaaaacaccaacagtggaaatcctacttgtaaattcctgaacgctctctcgtagctccagcaaatcatcttcggtcggaggcacgaatccccttgggtgctttgttgttgccaacgttcgtacgcacgggattaagggtctagtgaatctcgcaggtgccctggttggaagggagcggcggattaggagtggtaggcgtatggttgccattgtcgaaagggggtgtttgaagagctagaaattcgctgatgagtcggctgaacactcaatgcctgcagaatgaaatatgtagaatagctggagacaaactgacccgagtaagagcgaagggtggggagccttggggaaagtctgcggggagaccgcggctaaccgctggacacggacacatcggcaaccgtcgcatcttcgcatctgcccgtccatccttgttcatctagtgcctggtaaccgtgatcaccaccattttccttccctattcctcatcactggttgcagtctactcgagttctttttgacaccaacttatatcctatataccttgagaggccatgctctagccgaacaactccatcgatcccgccctttccccgcaatgcgtgtttcggttccactccactccattccgaggagttgcatttccttaatagcccacgcttgttcaagattaacacctaacggactttccttt

SEQ ID NO: 5864 - DNA, 5775 bp, Emericella nidulans
tctacatggaagactggatggatccctgggggcgtattcagctgtacagcatgactgcccaccaggcctataacctcatacttggtgttcttccagtcaagtttcttactgggttggtccgtacggatgttcttcagacttagccagaccttatctcctacttggtagtttgtggccggggctcctgtgtttattagcctgattctctgtattctgttgggaataggccatggaggcttgagcccagtctagggcttccttaactttctgtacaatggcttcccctttctggataggactcttggttggttcttcagctagatgctctacctcctcggtaggggtaaataggctgaggttgtacccatagcttagatagaaggggctgacccctgttgctgttgatgtacagctattaattgccagctctgcaagtagaagtagcctgttctagtccttctggtcatagcaggtatacatgcagaggtaggtttccactatgctgttcattctctctgttgatctattagtctgaggatgataggctgtagatagccggcggttgatccctgtcagggtatatatgcaggcccatgtattacttgtaaactggcttcccctgtccgaggtgatagcctttaggatcctgtatttgcttataagtacttgtacaagtgcccaggccacactctcagagtcagtttctgatattccttctagtatcacacctttggttaatcagtctgtgataactatgatatttgtacaacctttgctctctggtaggtctataataaaatccattaaaacctcctgccagggacgatcaggcacagggaggggctttaatagcccccttctctggtctctccaagacttggtcctcccacatatatcacagttccagatgaatcttctgatatcctgggacatattaggccagaagtatttacagctaaccagcaaatatatttgctcttagccaggatgtcctgttaatatagagtcatgtacagcctgaattatacttatatagagctgtttactatcaggcacccacctcctcctatagaagaggatatggtcttgggcgtccagctggcattctgagattctgactttcaattataggtatagaagaaatctccttgctccatctttcaggcacagtactgctttactatatctttcatcctgtttaagtgcctccttctatatatcacttttttcatacagctcccatggttgctcttcagctggtcagagggtggcaactaccatcttccccaagtatttttctgtaaaaagttgcattatacaagacttgaccctgtcatcttcattatcaggcatgtcttggtctctctatgaaagtacatcagctctctgattagctgaccctttcctatatactagcttgaagttgaaccagctgagaaataaggactattgtatatgttgttctgttagcttccttggggagaagaagtactccaggtttttatagtctgtaataacttggaattctctatataagcacagttcagcatcccaggcttcaagacattgtacaattgcaagtagctccttgtcatagatctcatagttgcattcagctggagaattccttttagagaagtaggcacatgggtgcaattccccttttttattatattaagagagaactcctcctgtattataacctgaggagtcagtctctactactatatagtaggaagggttgaaggttgctaggacaggtccagtaataaacttttccttaagcagatcaaagctatcctggtactccttagtctacaagaagggtgtcctttctttgtcaagttgttcagtgggcgtatgatccctgagaagttagggatgaacctttggtagaagttggcaaagcccaggaatcctcagacaccctttataatagtaggggtttcctattcctttattgctttcaccttctccaggtctattttaattcccttccctgcctgtattataaagcccaagtactttgtctccttgcactcaaatttgcacttcttaatatccaaatataggcctgcttcttccagtttcttcaagactattcatacatacttccggtgctggcggaggtccctattggtatagacaagcacatcatcaatataggctgagcagaattcatctagatattcccggagggtccagttaatatatttttggaaggtgctcggtacattagccaacccaaaaggggtaactagccattcaaagagcccatatcttgtacagaaggcagtcatccattcctggcctttggctatgtagatcttatagaaggcagcagacacatccagcttagtaaaccatctggcttgtctaatttagtttagtgtcttatggatcaggggcaatggatagcagtccttcttggtaatagtatttagagcacagtagttgatacagaactgcagtcctcctcctggtttttatacaaagagtactggggctgcagctggggaatggctcacgcagataaagcctttctgtaatagttcagagagtattttctagaggactattagttcttcctaggttatgttgtaaagggggccccaggggacttcaggatccttcccactctcctcctgtacaagcttgattttgtgatcaatcctatctccccagtgcagtagtagttcttctgctttgtcttgttcaaagagccttaggtatttccagtattatcttggtagctttgtacgggggtcaatatgtctctttggggccagtgccttctgtatatctgccaataagactgcaaatatcttaatatcttggccatggtaccttttcctttgtataaatcctcccatggttgcagcggatatctgtgctatgttcagctttagtaagggcctctttgtagtactccatagacagactccagtagtacagaggtacagcctgcccctcttagcctctaaccttctattatgttgctccagccaggggagtcccaagattaagtcatagcccaggttatcaggtattacatagaagtaggctcctttttctgtatgcgccctgatatctagctgaacctgtataatcttattaatctcctctatattcccagtcactcccttgaaaggtttcgggtggataggtatggtaggtatttaatgtatcttgacaaacttgtcactgattaccccataggtcaggcagcctgtatctatcattgtacgagcattatagatatggttgactagtgcctccaccaagaataggggggtattcatgcgcgagctgttgaaatcttgccaatcaagtagtatttctctagctgtataacccctctgtacacgactttgcacagaggttatttgttttccgactcgctctcactgtagtcatccatttggtcttgttcttcctgaactgtggccacctgcctagggcgcctggtaggttttgtagggcactcttgtataaagtggtcaggatcaccgcagcataggcatttgccctcagacaacctcttttgcttctcctctgcaggtgcctgactagcttttcttggggtcctggtccctttcgtacggagggccgcgacttccttttgtagggctgcaatttgagcatgggtggcttcccagtctatttgatcaggggtcccggtccggtcagagcctcctgctggtcttgtacaagcaatatgtgtggggacagcagcgcgagatccttttcatgtaagcctggccactctctggaggttgtggttgatttcgcgcagttgattacagtagttgtcgtatgaatcctcctgcctaataccaaccatggcttttagcaactcaacattaattgccgtgtccaacaaggccttcttctggttatcatcccaattaatccctccagcattaagaagttcttcgtcaaatttattcaagaactcttcaaagtcacatttcccttgcttcattgtattcactcgtacaagagcctttctctgttggtcagggtcaccaaaggccttgtctagtaccgcggagaattctgcccatagcacgggagtctcagatttctggcgagccaagagccatggtagtacacgctggctggcttttcctctcaggcagctgtaggcatagtaaacttgttcctcctctgtagggtagcaggcggcgttgattgcaaacttcgtacgaaggttcatctggaaaggagggtagtccttagggtcttctccagtaaagggttcgacatccgggtgacgaggacggggatagcttcgttcgtagggggtgggcgttgcggatgtaactgtagtggtaactggtggatggtttctcagttgcgagttctgtacggcctgtagttccgcccgtaagctgttattctcttcttggagctgttgtttctgagtccgcatctctgtacagagctcctggagctgctgtagcaacaatgcgacgctttcttcttccattgtcatagtaaaaggtctcctcatactattattgagattggtgagcgattcctaatgttaagggacgtatttagatggatcttcctatctagacgtgccgtacgtacaagaaggaatcgctaaagaagaaatgagaaagaaggattgttgttgcaaggaagtcttgtaggtggctcaccgccttcaggacagcgcaggccttggccgagtcactaaggtctaaggtccttgtataggcaaaggacccataacagtcaactactggtatagcttgtgagggacgcctcggggcagtgatagctgaaccatgtaatatgcaacattgcgctgacttatctgcgtgcaatggatgccaaccttgctgtatttatgcttaatagacttgttaaaccacgggttggggcgggttttcaggcctagctgatccgcccacgcgggttttggggtgggttaccttcacagtaaaccgcccatgggtttagcaaataattctaacccaacctaaataacccaaaataacccagttatgcatatcattactctaataagtagtgatttacatagttaataaaatactgtatttaaatattgtattataaaccatctaagtaagaaaatataatctaaatacagtaatatacctattcagatatcttggcaacccagcgggttgctccgccgggctttggggcagccaaaaatatccaaaacccaatagataattagaaggtctaacccaacctatttcttggcgggtcggggcgggttggggcgggtttcgtgggttgggtttaacaagtctaatatagaagcattatattactggcaaaatacctcaagctgaggggtttgaagaaattgtgctttaactgattagcaagtggttcatagttggttgtgtagtacttacctgtagtcagactcgggtcttgtatctgtaaaattagatccttgatttcttgaagaatatgctctggagctttagttggcggtggtagtagatacttatgaactctatgagatgtgaatataatatataggcattgcttaatatcaactagaaccatagtattaaaaataacattacagggtagatatatcaatcaaccgggtccctgtggatgatcgcgatctatatagggtggttaggaactgcttggtaagtacttggcgagtacttgtcaagtactgaccataatacttccttcaacttgataatgttacgggctaatgccattaattatcctacaggtaggatcatcacagaagaacacgctgaagaa

SEQ ID NO: 5865 - DNA, 8109 bp, Emericella nidulans
cgcaattaaccctactaaagggatctcccagctactccgtcggatatcgcgcaagcgagtgggcgagatcgagatcgcacctccaagacgtctatattccactttggggaccgggtcgctccagaagtccagttgggtgattttgaatggccggacagagcagaagcagaagccctcgctcgccgttactttgacttcgcttgtccgacgtacagaacactacaccagccaacgattgaaagggaaattcgtgagctatacagagaggatacacaatttgatggcggccgttctgtgcgcgaacagtcctccgcctctcatgcggtgctcttgatggttttcagcactgcgaccatgtttcgttcagacgctaacggccgtataacggacgcggacgatgcttgttggaaaactagcgagctctactttgccaaagccgagcagcttttatcccaggaaataggtgaacctaggcttgagtcggcacaggcccgatttctcatagtgctgtatctgttgagctcttcgcgtgcgaacaaagcttggtttacactgggtaccacaattcaactaatgatggcacttgggctacacagcaggcgctcgagaaaggatgatgagaaggatctagtacaaagagaatgccggcgtcggatcctttggtgttcatacaccctcgacaaatacatcagtgtcattttaggaagaccacgtttgtggcatgacgaggatctggatgaggagctccccgcaagagttaatgacaccgatctcttgcctacaccaatcccttctcctaagcgggactgtgtgatggatgctccagtgttccatgctctgctagctcgaacgctatctcaagccgccaaggaaccttatgtggtagcgggcatatcccacagagatcaattgaatacaattggagccttgtgcaagagcgtcgccgagtggcatgctagactgccacctcttttgagcgggagtatccatcccagcagtctcgttccgatattccagcgccagcttacagttttgcagctggcacgttaccacctcctcatgtttattacccgacccctactactgcgaaactacgggagaacatggccggactgcgaagccagctacgtacaccatctgggagtgtgtctaacggcagcccgagacgcagtcgaaatggtgctcacctttgttcggaaaatcaactattccatgcattctggtactcacagtatatcgcattcaacgctctctccatcatctatatctatcttatccaggtgcggcgaggaaaatacctcaaatcagcggcagcttcatctacgaggcgtactcgttttctctagacgagccaactctctacgatttatctgggacgggtcagcaccatctggcagatgcaacttcgccaaattcacccctcggggaaatacagcgctatccctgcagggcctccgccgagagttagagcgcctaggcttaaggccaccttttgctgaagcttcccgtgaacatacggaaccgaccagtgtttcaaatatggctgcagttccgaatgatgacgagttgccaatgactgaaaactcaagatatggccatatacgggatccagagcacatggcgccagattcttctctggcagagccggacggaaattacatgcaaatcccaggaatacatcgctcgaacgaacaatactttgtggacccacgcactgagtacttgtttgatagttttgcgacggacaaggacttgatgcttgacttttggccgcagttggacagcttgcccataggtagaccccttctcgcttgttaagcagctattacttacatggtttatagcctacatgggatgacctacgtaagaacttatgcctgtcagctgcgcgctccaatgatctctgatacattgggcggtgagggttgattcctgggtactgtgagttctgggtatcctcattctatcctaatccgccgttaaagtttggtatgaatctgtgctgctacatatatgatggcttaagaggcagttcagcgtctggtcgtggtctgtttctccatcactgttccacaaagtgtccacattgcgcattatcgagcggacgtcaatgtctacccacccagatcttgtcgacgcttttccgacatacttctccgaccatgatccgacacaagttttaagcagcaggaacccacgtattctctacttttagtttttctcataccagtgttcactgacttagctattccgcaatgtctcttccttcccatttcagcctcaatactggagcaaaaatcccggctgtcggattcggaacatggcaggccaagccattggaagtggaaaactccgtggaggtcgcgttgaagcagggttaccgtcatattgactgcgctgccatctatcgcaacgagactgaagttggcaatggtattcgcaaatcaggcgtgccccgtgaggaaatcttcctcactggaaaactatggaacacgaaacatgcgccagaagatgtcgagcctgcactagataagacattgaaggatttgggtgttgaataccttgatctttatcttatgcactggccttggtaatacctctaatcctggccgaaacaaccgtgctaatagcaaacagcgccttcaaagcgagtgacaaatggtttccccttgacgacaacggtgtattccagctagccgatatcgactatgtcacaacttacagagccatggagaaactgctgaacaccggcaaagttcgcgccattggtgtttcaaacttcaacgtccgccgactcgaagatctcttaagcaaggtctccgtcgtccctgccgccaaccagattgaagcccatccgtacctccaacaacccgaccttcttcgctactgtcaaagcaaaggtattataatcgaagcatactcgccgctagggaacaaccagaccggcgagccgcgcacggtcgacgatcccgtcgttcatactgtggcaggccagctgagcatggaccctggcccactactggccagctgggccgtgcagcgtggaacggttgtcttgtccaagagtgtcacgccgtcccggattgcggcaaaccttcaagtcaagcgcttacctgacgacgcgtttgcgactcttgcagccctcgagcgccataagcggttcaactttccggctttctggggctatgatatctttgatgaggctggggaagaggccgtgaagaaggctgcaatggatgctgctcctataaacaagacaaagtttaccgtttagatactagtcagcagtcaagattaacatccgtttgatatcgtccttgtaaccctgataattagtctattttatagcgagaacaataagcaatattctgatcacatctcttcagagtaatttctttaacggcaagagcttgagtaagcaaaggcattcaggttgaataagtggtaccctgaatttcgcaaccacggaatagccaacaagctcactggcctgcctgactttcctgcgttattaggggattttctgaaatgtctggtttccaactcaaccgagcatagcctggcttcatagtaaggtacacactctgaacaacagtgtaggattgtaccgacagggacttccgccataaatccgccagacccaccttctggcggaaaagcagggatctccgcattctctccacaacttattttcgcaccattaatggaatcagctaaccggacttttctccatgattcgcttttctggaattggtggccctccgagccgttacggcagtgggattccgagatggagtctgatacctctgattttataagtcgtgctggaccatctcttgatttggtcctttctgcacattactcgtttgagaaactaccatgatggcgtcaccagctgtcctaagaccagcatcaccggcatcgaattctagtgatgtcttgaccccgccagtcagccagggctcaccagcgacttcggtgacggaggttgaagagcagaccatatacactatcgatgatcttgtacgggttcgagcctggggagataaggctgatgagcctattgtggcgtaccccgttgaggggacagtgtataaatattatacaccgcgtgaggtgcgctcttgagatcagtaacaacaatgccaggagctaatggataagaatagctgcacaatctagttgaagccgcttcagtccattatgcgcgtgtgatttcacaacgccgaacgtctgatgatccagtgcaagtggttggtttgctcggtccttctgactttgagtacctgattactttacttgcgatctcgcgactgggacatacggttctgctgttgtcaactcgcattgcggaagacgcatacgtcagtctgctcaagaacaccaaggcttctctcctcattgcatatcctgcctttaatggcgtggcgaagaaggcgacccagaggaccggaactgtattgcaaccggtgcttaggcgtgattattatgtcaacagcacgttgtagctgcgaaaagctgaactggacgggctagttaagatcaaacacataacctgaatcatgcattctagcggcatcgaccggcacacccgaagccaatttaccagacacactccgtcgcattgaagaactatgcctataactttggcctcaggggttatattacactgtctgtttatcatgcgcatggcatcagctgtcttttccgcgcagtccattccgagaaattgatttacatgtacaatgcggaacttcctctgacgggtttctacttgcacacgacgcttcaggagcatccggatatcgaagtcctctacgccgttccgtatggcctgaaactgctctcggaatcggaggaaagcatgaagttgctcgctagattggagctagtgatgtttggtggctcgtcctgccccaagccaatcggcgacaaacttgctcagaacggagttcgtctcgtttctcattacggaactactgagacaggccagcttatgacctcgtttcgggatcgctccgacacggattgggattacgtgcgcccaggcccgtcgttgctaccttttatccgatgggaggaacagatgcctggtatttacgagctgtgtatcctcgagggatggccatcaaaggtggcaagtaaccgaccagatggggcgtacgcgacgaaagatctgtttgaaaagcatcctacgaaggagaacgcgtggcgatattacgctcgtctagatgatacacttgtgctggagaatggcgagaaggcaaacccgctggtcattgaaggcgtcgctcgcaatcatccaaatgttggtgaagcaatagcgtttggctccaacagatctcggctagggctgttcctaatccgcgctgaaggacgtactgatgagacagatgagcaaattatcgactctgtcttcccagcaatcgagcagtgcaacgcggagagtcctgcttatgcgtatatttcccgagacatgatccgtgttctgcccgccgatactgtttataggaaaacggacaagggcaccgttattcgctctgcgttttaccgcgatttcgcagagcagattagccatgtctacgaccaggaggattccagtgggagccaagtgtttgaaggtgatgaattgatcaccttcctccgcaacagcctccttgaaatttcgtcgtccattgagccatctgcgttgcaggattctactgatgtgttcagtctgggcgttgatagcatacagtctctccgactacgaagtgccatcttaaagacgctgaatcttggtggccggaagctttcccagaactttgtctttgaaaacccgtccatacaagccatggctgacgaacttactcggttaagacttgggagaggtcctcagcagcaaatcccaattgaagatcggatggaatatcttattgagaaatacagccgtggcttcaaggagcatgtcccagttccgagggacgataacggcgagcatatcgttgtaactggtgccaccggatctctgggtgcgcatattgttgcccagctgatccgcgccgagcgcgtacgcaaagtatactgtctcgttcgcgcttcatcgcttctgtcagctctacaacgagtgcggcagagcttgcatgctcgctttttgttgtctagcctcacaccagacgaagaacgcaaaatcgttgcgttgcccgctgacctatcgaacagtgtgaggttaggcttgcctgaagacgtctacgaagagatcatcagctcggtcacggccgtcatgcactgcgcctggtctgtcaacttcaactggacactagagagctttgaacagccttgcatcgcagccacgcgcaatctggtagacctctgccttgacacccaaggtcctactccagcaaatttctccttttgctcgtcggtcagtacggttgctcgcacgccagggaactgggtgccagaagcacttccagagtcactcagttatgcgcaatcaatggggtacgcgcagtcgaagctggtaaccgagcatgtagtcaaccgtgcatgccgtcaaactggcctagcagcccgggtccttcgagttggacaaatcgtggctgatacggagcacggtatctggaacgccaccgaagctatccccatgatcttccagacagccgagacagtcaaggcccttcctctgctcgacgacattctgtcctggactccggttgataccatggcatcgagcattattgaggcgacgctatcctcaactgcagcagaagtcatgaacattactaatccaactctaaaccactggactcgtgacctccttcccctcctgaaacaggcagggcttactttcgaagctttggcgaagcacgagtggcttgcccgtcttcgctcaaacctcgacccaaaacgcaacccacctatcaagctccttgacttcttcgccaagaaatacggcaacgattcaccagcccgcgtcctactatacgacaccaagaaaagccagtctgccgccccgtctcttcgaaacgcaccaggactaactcaagactttgtgacccggttcgtacatcaattccgtcggcaagtctggtcgtcaaccgcagcccaatcatcacctaagaatgtgatcttcctgacaggagcctgtggctcagggaaatccaccgccggacttcacctctcgacaaaattcaggatcacaacaatcgaaggcgacgacatgcactctcgtgtctcccgcgcgaagatggcgtctggtatcccactttcggattcagacagatgggaatggctctctcacatacgtggagccgttatggaccgcctactccaaccatccacctcggcgggaattgtcgtcacctgttccgcactcaagaggtcctaccgcgacgaattacggaaattgatgtatctattggaggaccccgtaaatgttacatttatccacttgtttgttggcaaagaaaacaagacggagctccaggagcggttgattctgagatcgaaagtggaggcgcattacatggcgtctactatggtcgattcgcagttggaggctttggagagcccagaggaagagcgggatgtcgtagttgtcgatgcagctgggatgaaggatgtggtcctcagggaggtagaggagattgtgagagggattctggcgtaggttctaatgttttagtgatttagaatgccaatatatgtggttactactgaaatgaatctgtctttgtacttggatcctgtgcttccggtattctgaaacttgcctgcacctttacgtctgtgagctgctagttatgtacttcagacacttaccgcggtatagagtaacattgaacacacttgggataaggaaattgccggttgctgggagttccgaggttgtccatttatggtatgtcggattcctctccgacactgtcggtttcgtaacttctgccaattcttctagcggatttataccggagaaccgcccaaatatgggcggagaagtaaggccactagctcggataacccgtaaatgactctcccccatagcaaaaaaagaatccaactccctttaccccgccaactgtccacccaacccgggggatccctatagtgagtcgtattatcggccgt

SEQ ID NO: 5866 - DNA, 9481 bp, Emericella nidulans
aattccattttcctactggtcagccgactctgcagagctatacatttatataagcttgaatcttgagcagtcctctgttgtggtcgtgtactgcaggcgtgtccagtgattcagtgtcaaacgctccccgcgatccgttattgcaactacatttcagcgatcgaataggtttatctgagagcagtcaagtcgatacaaattatacacgagcagctttgatctgactacatgggaggttattcaacgtctttcacttccacgagctggtcctcttgtctataaagaggcatgtcttctgttcgcggctcaggttggtagttcactaaaccttgaaactgcgagatgcttatgatttcttaatatactctaggcaagactgcccctcgtcttgtacgagatctactcgactatgatccggcccattcgccaggcactggtcgtaacctcctcgccgaagtacccccagtctatcccgatcattaccagggaccgcctcacttcatttccccgttagcttgcgcccataattatgtcacaaaaccataccaaacaataaggccaccgctgagggaaaacggagaaaccccggacactctcgcgaagatatctacaatatgcttgaagtgtcgctatcacctacagctcgagcagattattgaccctggtggtcgagcaagccaaaacatttccgatcacatacaccacctcatttgctatgaaggaaagtataatgggggccagactggaccggacatcacagagaaaggccaggtggtggagacctttcgttaacaatgctcatatcccgcctgtgcctatagagttatcatacgggtcgcctcacctctgctttctgaccactgggtccggctcttaaccgactccaagatgctacaaaagcgcacggatgatgccttcgcagcagatcccgagcggttggaaggagtgcctcgcccagagcctataacggtcttgatgaatcttcgtacctatatcaacaatgttctccgcaacagccaactaagcaagacaattcaagctaacaataagagattcatgacaagctttggtgtcaatggagagccgtgccgggatttatttgaatatctagggttcactttcagggtaagtacttctgcctgtgccctgcgagagtagtcctataactaactgagtatctagagggagggcgcttgggatcctcctcgtttggcagcatgggtgcaaaaccaagtattatacaaagaccaacagaaggtttttctcgatgatatcttccacgagctatctgcgctcatagcggcacggcctgctacggagaagaagggcaatcacgatgattataccttccaaccagctgttgatgacttatactttgcggtagacgcttttgactgtgagtgtcctgcaatttttctaaacaacggtatgctgattgcatgttcttagacctcagagcgccgagggtcaatgagtttcagatggcgcccgctccgttagtccttcccattcgtttcaatagtggcctttgctctgactagctagtagatactacgaagatttgggtgtcgttgaggatatgttgacgtctacgataatcgaggcatttaatcgccaagtcgcagttgatccggggcgggctccgggctacttgcagtgccttaaggagataggctcccttcgaggcggagaagatgcggaggcaataaaccgtgctgtcgagacggcatactcggaaggaaatttatacaccgatgcagacattactgaagcatacaagtacttcggtcttagccgtgatgacccgcgacttactgaggacagcattattggaacattctatgcctacttgagctctactcctcaggagactgaaacccgcagacaactctggaggataggtgacagtaggaggagcgagcgcatcaagtctgcagccgaagacagtaagcacatgttcctctttccatttctattctcgttagctcacactcttgaaaggagtcgctacaccagaacaagctcaagtctttcttggggtcagtgatgacaccgcagatgatttcgtcatggcgatgtttactgcaaaggtaccatatgcgctattttgacgtccaatgcaggaatagctaatttatcgcaggtaaacgataacccatcttgcagggacatcgcgcggcgggccgttgaattaatagccgaggcgcggaagtccgatgtgttaaggcactttgtcaagacgggcgagatgacggctggtgaaatggatgtgggtgatgcatacctgctgctgcagatacctgatcgcaacgcagacgagggcgccatcatggctgcatatacaatctgtgtcgacgatgccccagcacaagcggaaaaatataataaggccttggctattattgcaaaggaaaagaacagcccgctcctgagcagtatggttcctggtctcgcagggaaatctgatcgtgacttatccaagtggcccgtcggcttgcagaatattggcaatacctgctatcttaacagcttactacagttttatttctctgttcgtccctatcgcaacatggttctagattttgagaatgtcaaaatggagttggacgaagagagctgccagaaaaagcgggtgggttcccgtggagtctcgaagaaagagattgaacgttcgcagaaatgtaagtaatccagcgaactcgttgtttgactttaactcaccagttgtgaaccatatagttatcagggagttgcgggcgttattttctgacatgatttcttctccaaactcgtttgtgactcctggccaggagttagcacgcttaacattgattagcccttccaacgaggccgctatccgccgtcggtcaacaatatcagcaggtcgattcggggggctcggtgagctcaacggaatgccagttttgggtcccttgggaccgccgccgaagagttcggaaactgaagctcatgttccggctccagagctggagaagactaaaccagccagtgacgaagatagtgaagccacacttgtctctgatccagtgaagactgaggtaccgctggctcaaagtgacgacaaggagaacgagccaccccaagatgatgctgtcatggttgatgcgccgaatgaaactatcagagcagcagagagcgttgagacccaaacagcgcaggctcaagctgacgctactactaagcctccgcccgtacccccccgacctactccgcaagttgatcctcagagacaaattatcgaagaggttgaaataggagcgcaacaagatgttactgaagtcatcaacaacgtcctattccagagccaatgtgccatccgagggcacgctgtcgcaccagatggagaacagcttgaccaggtgaaagagtgggtttcctgcgctgtatatcattactgtcttcgacgctgactacttgcagtttattttatgggcaagccaggtcttatattctgtccaacaagggcaagcgatcgaaggaggagtggtggtgcgacattaagatcgatgtagcaactgggccccgtgacatctacgcagctatcgacggcgcatttgatatccagaaagtcagcgttgaggattcagtggcagaacagtatgctgccatcagcaagcttcctcccatacttcagattcaagttcagagagtccagtttgaccctgtcaagaagcggtctttcaagtcgacccatcatttagatctgaaggagattatttaccttgaccgatatatggatactcagcagcccgaaattgtgaaccgccggaaacaggcttgggagtggaaggataccctgagaaaactcgaagcccgccgagcagaactcctacgccaaagtgtatgcgtcaacaaatccgcagtgttgtcgttctcacgagctaacttggtttataggaatccgatggtctcgacactgcaacattattgaaaagcgccaaggacatcttaactgaactcagcgccatgaagcaggaccccgacgcctctcaggatgcaattgatgttgaccctcaactcatcccagagctcagtcgactcgagcagaaggcacaagatgaaatgaagcgtaggtcaaccgccaagtattattacgaacagtatggctaacccacaaaaaggcctggaacaagaaatcaaaaatatccaggcaatgatctccaaccagttcgtcgactacaaacatctgccctatcgtctttatgctgtctttgtccaccatgggtcggtcgaattcggacactactacatctatatctgtgactttgagcgaaatatttggcgcaaatacaacgacacctacgtaactgaagtcagcgacctggatgagatattcaaaagccaggatcgccacaaccctcctacgccatatttcctggtctacgttcatgacggattgaaagaacgccttgtcagtccggtagccagagagatcgtggagacgacaccaagaagcgcgccagaaccgaccaccagcggcgcgacgcccatggaaggagtgatttcgtcgaaagagccggaggatgtagagatgaatccaccaacatatgatgaggtatacgctgagggcggtgcatcaggtgagggcgcagatcccgaaatgaaggaaaaagggaaatcattgctggcggagcgcggcaagactcgatcatgggcacctgatgggactgacaaacctgatgtgatatggtagacccggggaggaacccgccgaatatcgcaacccgcgaatccgcttaagcgtaaggggttggatgagatgcagcttggcccggaaggaggtagataggcacctgcaggtgcgttgagtgcactggctcatcctttcggcgttattgacctcgtgataggaagggtcctccaggagaacgaccactctggccaagcgccttttagagaagtacgaccgaaagcctgcgtccggttggtcgctcctgctacaattgaatgcagcaggcattctcgcccagtgatgcatgaacaagaggtatcctgactacgctgtgtacatattggggggcttgacgatgatgataatgatcatgaccggaatatgatagctaatatcatgatgtataagaaggatactcttaatgtttgtgtgcagtatctccaatagttctaagacccccatgtatcctttatgtatccgaaggtggcccgcgggtcgggaggctagatccgcccgcattgtcggcactgcaatcggcaatggagacgtctcttgagctggacctaacgtaaatgatagttctggccgcgagaccttgctcacaatggaaataaacagtcgtcgcataatttatttgggtgcaatgattctggagtgcatttttgaagcaaatatacctattctgcagtatatgctcactgtcagttagcccactgtcactgctctccaatgttctccagtgcggggaagttccaggtcgggcccagagcggatcccattccgcagctccgcttccagccgctcgtaagccgtaaataacacttgcctcccaccagagttgctgttaccgtttggcttctcatatcttcattttcgcttattgcgctcctttggcttctagctttccttcgtctgcagtatgccttcacccacagcgatatgcctgcgcttcgtcaggcgcgcttcgctcaatcccagcaaggtatgacgaaccttattctagtatagtgagaatacagtgggaagtcgattgacagtccctgtctctgcagcaccaagtcttgttggcacgagccttttccaacagcgttcgtcgctctgagattaacaaagtggtctcttctgcagacctcgcaatcaaggacatgaagtcaaactcaacgcttctcgctggtgggttcgggctttccggtgtaccagacacattgatcaatgccgtgaggaacaaccctgcaatcactggcttaactgcggtgagcaataacgccggcgttgatggagctggtctgggcctcctgctgcagtcgaagcagatcaaaaagatgatcgccagttacgtgggcgagaataagacctttgagcgcatgtacttgggcggcgagatcgagcttgagttgacgccgcagggtaccttggccgagcgctgtcgagcaggtggtgcaggtattccggccttctatacgccagctgcatttggaaccgttgtccagaccggcgaactgccgctcaagcacaatcccgatggtactgttgcattgtacggccagccccgcgatgtcaaggtctttgatgggaagagttacgtaatggaggaggccattaagggtgactatgcctttgtcaaggcctggaaggccgataagctcggcaactgccaatttcgctacgcggctgcaaacttcaacggcgccatgggtcgaaacgcgaagatgacgatcgtagaggcagaacatatcgtcgaggtgggcgagatcgagcccgccgctatccatctgccgggtatctacgtcaagcgcgtcattcagagcacggcaccgaagaacatcgagaaatacaccttcgccaaggaggaaggtgaggataccgccgcggccctaggcaagggcgatacggctgctaagcgtgagcggatcgtccgccgtgcggctaaagagttcaagaacgggatgtacgccaacttgggcattggcatgcccatgctcgcgcctaacttcgtcgacccctcagtggaagtgcagctgcagtctgaaaacggtattctgggcttaggcccttacccaaagaagggccaagaggacgcagacctcatcaatgccggaaaggagaccgtcactcttgcaccaggagccgccgtctttggcagcgatgagtccttcggcatgatccggtctggccggatcgacctgactatcctcggtgcgatgcaagtaagcgccaagggagacctcgctaactgtaagccttacatccctttcacctccctcaccattcctaccatctatccttcgcgccttcctaacgcgactctagggatgctcccgggcaaaattaaaggttttggcggcgcaatggacctcgtctccaacccttccgcaacaaaggttgtcgtgactatggagcataccgataagaagggcaaccccaagatcgtcaaacagtgcgaattccctctgacgggcaggacttgcgttagccgcatcatcactgaactctgcgtgttcgatgtcgactttgtcaacggattgactcttattgagttagcggatggtgtcacagttgatgaggtccgggctaagactgaggcgccgttcaaggttgctgatgatctgaagcctatgctgtgataggggtatcggcatgacatctttgttgttattttttttattctgcatccaatcagcggcgtacctttgtgatttcaagcgttgacagtgcttttggaccttgtttgtacatagtggttgacgacaggaataccttatcatgggatatctagtaaacatataaccatacatataaccagctcttggcttttgagacaactccaagcaacttcattaagtgaattataccctaacctattagatgacaacggaatgttttccaaccacgtattcatacaccaacgccatataatacatacgtatcttctctctatttaaatctcaacaacccgcccaacctcttccgaatcctccctaaaacatcccgattgggcgcctcctcaaattcctgaagcagattatcgtagtggtctggattacttgcgggatgccgtaacttttccgataacgggtacctctttgcgtatcggttctctaaaagcgaatccaaggcattgagggaagattgggggattgcgctcgtctttgcatttgcgtctgtggttgtgctggaggaagagtcttgtgtttgtggctgtgatgggaggcgcgactgaaggtatgtttgaacggagacagaggctggtcgaattgggtcggttggccaatgctttataaggtaagttaagcgggatgtggtggtctgaacgagagtagttgttagattgaggaagattagagcttattgtagggtagcctaaagggagcgaagcatacggaagtcccggccatgatgattggggtaagttgattatcaagaacttgtgtttagtgtcgcaagcaacaaaatatggtccacgtcgaactctgagctgcagagcctgcttgtgaagatgggatcgaactggttctacactttcaatcaccgtacgtccccagactcattgatgcggcaaaaaagtataatcacgtgactcaaatgcaagagcggatgccgcccgcccagcacagccacagccaatcgatcagtgggccgacgcctcaggagccaggcatcctcgaattggatcgtcagctgggagccctggagtcctctggaatgtcagttgggttggtcagccatccatccatctaactatccatcgtcatcttgtcccttctgtccctctcatcttttcatcagcctatacagtcatttctcgctcttttctctttcgaaatacctgctcgacgcttaatccgtccactaaacattagcagcccttctcccggcgcttccgctcgctcagctcgttatgagctcgcagcgttatgaacgggtacgtcttgcctctccagcagaatgggtgaccgagtacacgacctcgttcatagatatcagcgtcaacccctaagaaccctactgaacggctattcccaggtaaacgcccacgacgacgatgacacccctccgtcgatcgccctgcagcctacttcttcatctccgcctccctcgttccgctcacgttccgcttcgccctcctcacgacgtctccttcacgacgaccctctacaccgaaacagcacagaacagactctcgccgatgcgtttgatgacagcgactctgaggcagatgatgagccagatgaccggcaacggctaatgcgagctcagccggatgcctggacgacagcagatactggcaacaacacatcgacatcagcagacggggtcggggcagcgtcctcatccggtacgggcggtgacgcacaggtgggaggtcgctcaaatacggatgccacgccttcgagagggtttcagcgaacctccacgttgttgcctttctttggcggcacgtcaagttccggatcgaatcgccatatcacttcatcaaatgatggggtttttgcgaatttggcagccaagccagagaggggggaaaagagtgaggatttgcctccggtatgtgttttataatcgaggtcactatacggtttaactaacctttactgtagtcatatgaagaggctgctgccgatgcgactccaccatactgggagaccactattgtggcacctggtatttcgtcggatgaggtctacgttgatgggctgccggtcggctcgatcttctctttcatttggaatgccatgatttctatgtcgttccaactagttggcttcctcctcacatatttgctccaca

SEQ ID NO: 5867 - DNA, 7473 bp, Emericella nidulans
cttctgaggatgggaaagtgcggccattatgtctagtttctggcctctcatgtctccatcatcattagaattataagcatcggtcgatcaggtattcgtcatttgacagtcctagtccttgacatatccgttgacgctttaccggattcgtcgatcgcgccatttctccgatccggaaccagcaagacaaaggcttcgcgacctgctggatgagggacgtgtacagacatccgcaacgactcgagagcccaagggtatcaagcaaatttcgctgccttgaatgagcgtcattccaattccggggcgatgagctaccctccatcccataacggccactatcataaccgccatccctctcagcaagccgcccagccgccactcctgtataacaacgtgaacttcaacgctaatgccattgcgtcggcgtaccaatatggcaaacccgctgtctacccccaggctatgataccgccctaccaaccgtatggtcaggtacccaaccagcagccacagcaaccacagcagccgcagcagccacaactccatgtgaatcccgcggatatattccaacagccgatacttccttcgccgtctccagcctcctttagtaaccaccctttttctcaatatggcgcgcaatctgcggtccctgttgctggcaacaaccgctcgccgtcattcactactcccgctgcagctccgccggcgccagtcccagcagtaacaccaacaccgaccccacaatatgagcctagtcctatcaatgcgagtaatcaagctttcaacaaaattcctaaaccggccgcggcctcgcaaaccccgtcagataccaattccgctgtagtggtcccaccggtagtgactactccgccagttcaagttctattaccggccccgtcgccagagaagatgcagcgcccgccttcgaagaaacaaacacaaaaacagccgacccaacagcccgcgccgaaacctgcgaaacctggaatagactatcaggtccttttactggccatggctgacgagtacctcaatactgctcatagccatgggacgaatgttgcattgttgagggacatggagctggaggaatactacaggttggttgcgactggccttggatgtctggaagcagttctgaaggtttgctcgctctagcccgtggcacactgaaaaggtctgacgtgatgtgtagaactggaggttacaacctcgtgtcgaagccctggtgcgactgagatatgcgcgcgtgctctttgaggaaacggacaacgacttggaggctgagacggcattgagcaagggagtacgtccaacttctgaccacgcaattttccattcactgacgtgcgtctcctagattgatttatgcgagcgagtgagtcagatacagggttcttgtatgttgttcgacatcatacttataatccttagaatcgtatgctcgatctgaagtacagtatgcagcatctgctagcgcgtatgttgtacaaaacaaacccgaaggccgctctgaaggccgtggatgggatgatccaggacgtcgaagcgtaagttagccctggccaccaatcaagcgctgtttgacaagtttaggtaccgccactttgcatgggaatacgccttccgttttcttcgagtgtcgctctccttgtcatcgcatggtcaccaagagtctacatcagctttacaacatcttcataagatctctattatggcaaatcgcaatggtgacagagccgtttctgccatgtctgccataatcgaagccttggcacatctccagcaaggatatagctcagactcaattgaacaagcccaacgagcaatagcagccgcacgaagccatcaacttaatgatgaactacgtcatgttccgcagctcacaactctggtccaaattgtggatatctgctgcagtctgcttgaatatgatgtgaatcaatccgcccagaaactcaaggtattacaagacctgatggatgagcgactgaacgattcaaattggcgcattgatggctcattctcaatacctttgagtggtaagtcagcgggaccttcttcaattgacacaggggatatccttcaagtacagagcggtactttactactcagtttcagttggctaccccagcatgacctctatgctctctgctactttcttagttccatcacactgagttgtaagaactcacatgatgggcgtaaggctgaaaagtttcttcaggagggtgtacgcatgctaaagggttggttgcccacctataatttagataaacactaacactccgcaggaaattttcaacaaccgcaggaaatcacggaatctttggctagtgccaatagacgtgttgaatggcgcaggacgctattttgcaatctacttatccaacagatattcttggcttctagccgcacagactgggatttcgctaatagaaccctgaaggagctccggctagaggtccaatcattcggcgacaatcttcctcatacaatgcaatgcctgatgcagtacgcagcaggtaccattgcacaggcgacgggcgatttagagacagccttggccgtttttcaatccccgctattcttattatccggtttcaacaaaaccgctcgcaatgaccctcaccgcgacctcgccatcctggcaaccatcaacatcgtcctcatcctcagcaacccagcccacccatctcattctcacctgccaaacctcctcgccacacttgagtctttctgtcgcgcaacgcctaataagtacatccaagccgcatatttcttgctctgcgcgaccacaaacaccgaatcgaccatccagactaaacaaaacctccagcaagccctccaggctgccaccgcaatcagtaacagccaaatcatatgcatgaccttaaccttcatgagctggaaatattttcgtggagtcgtgggcgagcaagccgaaaaaagcgctcgcgcgggccgcgcaatggcgggaaaggccagcgaccgtctttgggttagtgttacggacgatatgcttgcagagactttagaaaggcaggggaaaggcgaagaggcgaagagtgtccgagaggagggttacagggtcatgacgaacctgccaccggcattgagacggcctacctagtttatgttacgtttcggcaggcatttcccgtgtaaagtctcgatcattgcacgatcttgtacagacattcgcttcattttgccttcttgctcgggcgtattctgctttaagaaagggtgcaactatgcatatgatgccatttctaaaacttcatccggcgttttgtctacagggtcggtctttcttggtgcatcagttcggttgcaataatgtcgcatgctgggtgcagttatttacggagtattcgggacaaattgatagattgggcttcattatcattcaatggaaatatgcatccaatcacttttacggactccagccccttggtttcagaccgtcctcgaccggacatactcagtaataataaatttagccccaggtaactcgcacctaagctggatcgaatgactgcttccgaacatgccataacgccgtctgccctaatatagtgcataagtaccctcgaccataacatgttaaacccaggcaacccgcaattactccttaacactgtgcgcccgcaagtcatgcacccacagaaaaaagaactggagctcagcacaaggcatgatcgtgctcccgtttggtctgaaattgacaaaaacaccaaaaaaggacaggtcaagaagattggaaacattccaatagttgcttgttttgatataccgcaattcttaggatgcagtgctaccaccaaccctgccctgagttcatgctctctcagtaggccactagttaggccttgagccatatccatatactcggactgaaatggaagaagggatatcgacacaacggaaagaaaaagtgcgaacaaagagattcttggcaagagaagttcagccaagaccaccccaagctccgcgaatcctacgcgcaacgtggatatccttctgcattatcgtaactcgtttcgcgtggatggcgcaaagattcgtgtcctcgaacaagtgtaccaaaaaggcttcagcggcttcctggagcgcctggattgcatgcgactgccatcgcagctcggagccaacgtctgcggggaggatgtcgagagcaacttcgcggacgagacgtgcaaatggcaattttcggagaagcagatcgtaggagcgttggtacttgcggatttctttgagggcaacggtaccaggtttgtaccggtgacgacggcctttgggggttgggtcgccggctgtgtagtgttagtttgggctaattgagcaattgatgtttctgtaacttacgttggatgctggattgatcgtctgatggtgccgtcggtggtcgcttacttcccttagatttcgacaccgatgccgatgccaatgcctttgaccctaatgttctggagctcttagttacctttggagaggcgcctgaggttgtggtggaggttgtctttgcggatgtcgcttttgagcttccggtacctgcggtagctgccgaggatggctttcgtccttttgggggcatgttggcgaagtatacgttgtcgcaaagaggtggaggtcgctgggctcagtagtgtttttgaaagatcgcgagttaaatccttagattatttttccaagtggagtaggacaagtgagctaggtatgctgtgaaggcggctgaagactgtttcgtccgatctgggtatcttgctgcactgtaggcggtcgcaggatcgcaagatacgtagacgcaggttcataaccggggccaggaccaggattactcgcgattgagcctcaggagaagcgacagacggttcacaattagaggtggctgggccctgtgaatagcttctcgtagagttgacgtactcggcttagcgtttcaacctactttcattagtccgacgcgagctcgcgtacgcgatcgttatctatcatggaaggctacccagtaatatataacacttcaaacatgtctggagccaataacagctcgcatagctcagttggtagagcgcgtgactagtataatgtgaatttcagaaatctgaaattcgtcgttgaaatcacgaggtcagcggttcaagtccgcttgtgagcattactttttttatgaaacaattcatctgcataaactcggtacataatatcgtcattctatctatgcattctatgcattcgaaactcttatctgcgtaactccatggatacctcggtaagtctcacattcagtgtcttggcaaaaaaggaatatatcaagcttctgtagttccgccaccgtcaaactctcttccaagtatattccggaaaatcactttccaggtatcacctctcccctaattttgggcttgcacagtagctgattgattttttttttttggcaggtagccggcttctttgttacaagtgtgaagccttgccatggctgatacacaggcttccagtctttatagctcattgcctgtatcaaccctcgtaggcctggtgattgcaatgggacttctctcctgggctcggcccagtgggcgagtatccttttttagctccaaagagaacaatcttttcctcaataggagaaatgggaaagccggttccaagcagaccacgctaaaagaactctgccgcactgctacaccagcaagatgtgatctcaaccctctcttgttcaacggccacttgcagacctgctggactacagtgaaatttgatgacgttcctgtttactacaagcgccggatattcgaggccgacagcgaggcgtataaggggcatttcgccgttgactttgtcgttgagccttacaaagcacccaaatccgctgaagcaactgatgcggagagaaagtataccctgccatcaggtctcccagaacggacggcaatgttctccgaggatgaattcgccgctctaccttcagaagactcaaagcctatgctcgtggttctgcatggtttaagcggtggttcccatgagctttatttacgccatgtagtccacccgctgattgcggatcgaggctgggaggcttgcgttatcaactctagaggttgtgcccagacaaagatctctacggggattctttacaacgctcgcgctacttgggatgttcggcaagttgtgaagtggttaagagcagctttccctaaccgacctctcttcggaattggcttctctctcggtgcaaacattcttacgaacgtaagtcttttgctttcacaattggaaaacaggctaatatattcagtatttgggcgaggaaggagacgcctgccagctgaaagcagctgttctctgcgcaaatccctggaatcttgaagtcagttcggtggccatgcaaagtaactttatgggcctcaaagtctatagcaaggtaatgggcgccaacatgaagaagctttttgaacagtacgtggcttgctgatggattttccaaaccctttgggatttactgacatagtacaggcatgccgacgaagtcgtgaaaaaccctagggtagatgcagaagcaatcaggaatatcacgtatctgcacgaattcgacaggtatggaccggcttgcctatctcttgcgcttttcatgctaacgttcaatttaggaccctgcagtgcgccctatgggggtatcctacggaaggcgcatactaccgtgacgcatcctctatcgactctttactctctatccgaattcctttctttgtggtgcaggccgaagatgatccagtaaggtcgaagacgatgccagaatcccatatactgacgggatacagatcgttaccgtaaaagcggttcctttccaggagatcgctcaaacaccttatggtgtcatgatgaccacctcatggggtggacacctcggttggtttgagtttggcggcgggagatggtttgtgaaaccagtgagtgctatcattctgttgcagcggtgtatgctaatttgacaggtgaccaaattcctgaatatgatggctcatgagattgatctcgatacccctcctgtggtcgagaagccggaagctgttcctggacgtacttccagccttcagaaagacgccgctgtaaaagagcccaaaccggcagctttcagccctatgcggcgtaagtcagcctgccaattattaactaggaaacctgttatctcgaatagaacactgtgaataggctcgagtatgatttgctggttgacgatgacgatattcatcagtgctattcatgtcatgctcaaggatatagatagacccatagaaacgccggaaccctctagatacagactcgatcttgctatacataggattacttttgtaaaaaaccaatcaagcaaatgcaacgctcttcttcttgccgcctgactttggctttgggctctccgtctcagctttatttgactttgcgctcgaagcacacctttgtgtt

SEQ ID NO: 5868 - DNA, 6275 bp, Emericella nidulans
tacaacgaaaatgttggtcagaagccacctcgacatgaaggccgaagccttgcagcctcaccttaacacaacaatccaggcttggtaccgggtgcagaacttagtcaaatacggggaaattgagattgatggcaataggctagatatacccggcgtggtagcagtggcctggtcagtggagcaaatttctcagatcttcttcaagctcatgttcatagtcataattgcatacccaagatcaccgaggacccagctgtcttagagaacattgatgccagtataaggttactaaaagaccgcctcaatcaaggctatagcgtctatggtgtgtgtattcttgcatagttaggccatatacttaccggtatacaggagtcaataccggtttcggtgggagcgcagactcaaggacagacaaaatgaccgctcttcaatctgcactgttgcagctgacgcaggccggcgtcctcttagagtcagataaaagtggcaaccaaaacaagctgctggagtcacacgccatgcctgcttcttgggtccggggtacaatgctggcccgttgcaactcaaatctccgtggacattccgccgtcaaactttctatactgcaatcgattgttaaactgctacagcatcggatcactccaattgttcctctccgaggctctatatctgcgtcgggagatttgatgccgttatcatacattgcgggagcgatagaggggaacccagacgtgtacgttcaagttgacggcctcgacatgcctcggatcatgaagtctatcgaagggctacagtacgcgggcttggaagctcagaagctcggcccgaaagaagggctaggtctgataaatggaacttcaacgtcggcagcagtggctagtttagtactgtatgaaaccaatcagttgtctgtactcgtgcaagcgctatcagcgatgggccttgaagccctcacggcacagcagaaagctaccacccttttatttcggctgtccggcctcacgatgggcaggttgagtgcgcaaataacttactttccttgctccgaggctcaaagctggtacagggtctagatggccagaagtttcaggaccgcccaggcctcattcaggaccggtacgccctacgctgtgtaccccagtgggtcgggcctcagctggaagatctccttctcgcccatcgacaagttaccactgagctcaattcgacatgcgacaatccgctcgtggatgtaaagtctaagtcaatctattctggtggcaattttcaggcagtctcgataacttcagccatggagaaaacaaggcagtgcttgcagatgtttggcagacttattttctcccaagcgacggaaatgattgatcccagtatcaataacggccttcccactaatctcgtcgccgatgatccaagcttatcatttaccatgaaaggggtggatatcagcatggcttcatacatggccgagctgggctatttgtcgaatcccgtgagctcgcatgtccagtcagcggagatgcgcaaccaagctataaactccatggcgttggtatcagctcggtacagtatgcaagccgtggaagtgctgtccctgatgtgcgcttgcgacgtgtatatctgctgtcaagctcttgacctccgcgtccttcataatactttcttggagaaagcgataccccagctgcactctgttacagagagagttctgtcgccgtttctgccccagccagcgcttgaggacttgaacagatctcttgaccagcatctgacccagacctggccgatgacgaatcgcctcagtcctgctgatcgagtgcacacggtaattgagaaagccatacctgttctcctggaaaacctcaaaagccaccgtggtcccagcttgggcgacttggaaacgtggaaatcacaggcacgcaacttactcaacgttgtataccaggaaattgccgagtcattcttcgtgaaaccacacaccgctgattacctcggcgagggggctaaggccttatatgtgatggtccgacaagaacttggtatcccgtttcaccagggcttcattgaacatcctactgttgaaaacgaaatcttgaacggccgtcctaagaaaacaactggatcgtggatatcgatcatatacgaggcgattcgtgacagccgccttatgggcccactaatacaagctcttacacctacagacagctaatggtagaaactctcgatcctgcgtgattctggaacttgactggattaaacctcgttcctccgttatcagctggttgaaagccatgtaatatggctcctttaaatatcgtctatgactaggcagataacaataacaaacctgttgtctttgcagtcaaatagagtcacctcacctgtctttgttgttttggttggtgttatggggctgcctcacagcattgagcacatttcagtaatagtgaatcaatcatgaggctagaccactgccctagcaacacagcccctagagaatagcaggaatgttcatagcaagcattgcaaaatctcactcctcaatttttttctttctgaattcttttctgctagtgcctcctttcttattctttgtttgcccaccgcaccctccctcttcttccacgtgacactgtgtgccctacttagatttcttcatacttatgcacttggaggtacttggaagcactcttggatatctggctgcttgtccaaaggcagtaggaagcaaatgccagcaaaacgaaagcctccggttatcgcgactcttgcctcctcgcggagcagacggtatccgcatcagtctggcactgtgcctgagcctgcgcatcaatctgaattcagacttgaacctggacctgatcttcaaataagactcaaagttgaagttgaagctgaatttggactccacggtacaaggcaccatcaacctaagccttttacacaggatgggtcgaccatcagtgctcgtcagtttcgtccaggtgaacttgagccactgtcaaaatatgaagacgtcagcaacgaggacgacaatgacggttcaaatgtggctaaacgtcctaggatggtggtggttctgcgactgcctctatcactcaacaaaccggggccacggtttcagtctgttcagagagcccatgacacgtctgtcactgctaccgatccatatccggattctggcgcatatagagcagcactaaagcgtgagcatcccaactctatagttgccactagtgctgttaagagaccaaggcgatctcctagatttcaacagtccaatgcaggacagctcgaagccgcagatgaagtcctggatggagccaaagctcatcaaggagtagcgggtgtcaaaaacaaaattccgtctgctacgaataatacattgccctcgccttcaaaaatggtcgccgctatggcccgatcctctattattcagttctcgttctccagtaccggctgcagaatcccttctcttgatgacaacaatactgaccaagggccttctcgtcttgaccctaatactcctgagttgatccgttcccaaccttactctggccgcatgcgccctcggacccagctcgctcaacaccttccgccactttacaagcttagtgacatcttcaagtctcttacggagcgggctatcgatctggggctcgacaaagttctaactcatcttggtaataggcgacttcgtgttgctaccgtttgttcgggaacggaaagcccgctgctggcgttggagatggttaaagagagtgagtgttgcctacatatatcctctactttgccgtacctggaattgtggaaacttttattcatggcttatagatttgcagaaatatttcaaccgagatctcgatttcaagcacctcttcagtgctgaaattgtaccctataagcaagcctatatcgagcggaatttccggccccgtcttttgtttcgagacgtagctgagcttaaggatcgggtcgcgtacgttactcccgttagaaaaaaatcccttcatttggttctaacttgaagaaaactagtcgaacggcctacggatctctggaaaaagtacccaagaacgccgacatgctcatagccggcttctcgtgcgtcgacttctctggcctaaacaactaccgtaaggagctcgacgaaacaggcgaatctggtgatacgttctggggcataatctgctacgcgaagatctaccgtccacgcatggtaatccttgagaacgtcaaaacagcaccctgggctaagatcgagggccattggaacgatattgattacgtcgcagtccattctgacgtcgatacgaaggcatactatctcccacagactagagagcgcggatatatgttctgtgttgacaagcgtcttctttcccaccttgcacagaaccaccatggcctgggcttggacgcagatgaaattggcctgaacatgcggcgcgaatgggtagacactttagcggcatttaagcgtcccgcgagttcgccggctggaatgttcctcctcgacgcggaagacagacggctggagcagatagagaaagatatggcgcagaagatagtagcctctgcagccacagtccgggcaacagttaattgggatcggtaccaagtgcgacaccagggttatcgactaaagcaagggctgggtcatcgtcgaccgataagcaagtcccaggatgatgggacttgtaagatgccggactttgcgtggcaggtttggatgcggtctctgccggagcgagtgtgggatacgattgatgtgaattttctgaggaagttggtggacggttatgacatgaactacaaggagttgggaatccttctttccaaatctgccatgcttcgttttcacaatagctgattctgcattaggaggtgtctcgaattatctcagggactagaccgagagatggattcccgcgcgtttgggatcgtcggctgcatcacgccttgtggtataccatatatgacgactcgaggcgggcctctttgtggccttgagtcacttgctctgcaaggtctgcctctagacaggctcctactgacgcaagaatcgcagcgggagttgcaagatctcgctggcaatgctatgagctctactgtcgttggagcggcgattctgtcggctctgattgctggtcacaaggtgttgagaaagggtgacttctcacaaacatcaaagcctacttcacgcactcagaaaagcaggatcactccccaaggcgatgtcgcttgacttcaagcaacatgcatctggacccggataccgtcattgacattctaaagctacgggagcaggctactactagtgcccggtattgcgtgtgcgaaggacacaattcgatacgggcaagtaccctaaaatgcaacttatgcttatatacagcctgctccgagtgcagcggaaatccacagcatgcttacgaacgctggttggatctaccacgcaccgtaccactcgatttcgtcagttctctccggtctatcttgccaggtagactagctgtacgtggtatcacgcccgacagctacaaagagctaaagtctaactcctacatacctgctaaatgctggtcagaattcttggacgccgtatttagggctgttggcgacgagctccgcttttcggacatcaaccgaagtgagtgttggactgtgacctacgacggcaaatattccgttttgaaattggttattgagccttttggtagtatcacttggctcttttttgcaaagccgcgcgaaacagaccctgctttatgtttgattcgcgaggttctctcgaaacccgtagctcgaatgaccctgccggtgccttcacatcaagcagggtcaacttctagctctatcttggaaggtgggacttgggaaatatgtgccccgctgtcttcaagctgttcattgaaattttttggaacaggaagcaaggttgactcctacgaagcaagatgcggcttacaattgcccgcgtaccaaaattcgcaggtttggagccatattattgtccacggtgctgataaagacatcaaagacttggaagttgatgtacgtggcacttatgagcttcttcctgattgcggtactgcaaattcatgtctgcatagaagaccagcaaccgcgggtggaaacccaaccatctacctcttcttggatccgacaaagctaggcgagcccacaaatgactcgtttgtttttgcattagagcataggcggatcccaggctatgcgactcggatgactattgctgaggtgtcgcatacgtg

SEQ ID NO: 5869 - DNA, 3583 bp, Emericella nidulans
  unsure (1)..(3583): unsure at all n locations
aagcccgtctttggagttgctgtccaccacgggctagcgggaatattgtgtctcgatgaggttgccgagatttggtttccgcgaggcatgcttggatggggaggagcttcaaatatcgtctggtgggtaaaccgagagcgaggcgtggccggtttctttgcgactcagcagatgccgtttgggaatgccaccatcaagaacctggtgaatgcttggaagaaggacttttgggcaggctttaatgcataaaagaaaagatttcactaggtgactgggaaaatgggcttagtctggcaggctcctcatccccttgcaatgccgaatggaaacagatattcaagccaaaaccttactattctaccttaatttacggctagaagcggacaatcgtgtcagctcgtagtcaaactttgaagaaaacactttttgtaaactaggaagatagatcaatggtgcatttgtctatccaccaactcgctgcactacccagctcatgccggaagcgccgcaggatcaaagaggcgatattggatccctgatgccgttgggctggtagcttgcactcgacacaatggatccgactgaactcaggaaggaccgtggaaactgtagttgacatcgtggctttggccaagatgtcgccaaaatgcctttcttcaagattgaccacatgccccgccactctggccaacattggccccgtccaggggccctccatatatggacatattgacgaagaatagcgagagcctggtggcgtgtggcgtgattacgacacttcaaggctgtaaagtagagtggcgggaatagaccactatctatcatgaatgttggatcgacttcgcacgtgtccgattgaagagggcagtcggtgctgtggacgtcgctgtaccgctggatgatggacttgaaaacgtggagatgcgcatcataggccgtctctttgacggtaaagcaggtggacaggaggattatggccacgtcggcgtatgtccggagcatcagcaaagcaagcctgtgctgccgtgctacggacgcaaacgcagattgtattgagttatcatagcttgcaatccagtcctccaccgcagcttggagggatttctgctcctcgagcatgactgcgctcggcgacggtgggtgtgcgtgggtgcttcgagtaagacgctcgacttgcatgacgagatgcatgaccgaaaggagaatgggacttagggcttgacgagcctcgtcggccgcagagaagcgacgcggaagataggaagcccggccgtaccggaaagagggcacgaatgattctttctgctgggggccatgccctagcataaggaattggaggttcagtcttgcgaaaacctcaataatatggtcgtcaaatagctcaggatcatgcttgacaagaactgtaccagtggttgccgccgatctgtggctctgacgctgtagttggtacagcagtctgatccctgccgcaaaatggactttcatggcgtccagattgccgcgcagaatctccaggcagatgaagagaatacacgagacagtcgccacacgtacggatgtggcgctctccagggctccgttggtgagtagggctcggatggcatagttgtactgccttagcaggaagggcgccggtgccaccatggccacgttctcccgtatctgcgccagggcgaacgaatcgtaggcagaggttaaggctatcgaggcatgcagcactgctggctccgacactgacagcgtggaggacgagtgagctccagagatgggacccgaatggtcgagtgagtttgtccgtcagcaggacacggaagcggtccaggcagcgcctctcctcctcagcgaggccaggaagagtccgcaggggatagaccggggagggaagtagtctcgttgacttgggctggccccagatgccatagccgtcacaggccctgccggtatccagacaccgacgacatgacggcctttgttcatcgcatttaacccgccgaaccttgcatgttcgacagcccgacctagttcggggcgtgctcttgcgcttcgccatagtggcctcttaagggttgtcgtgggttgaagatgaatgttcccccccaagtcacatcttgaaacgcgccggtagaggagtctttccgccaactgcctggctccctggccccttccaaatctccaatggccctgtcttaaacccgatcgaggcgggtcttatgctagccagcaattggttgcgtcgtgttctttggatattgattggtcatgagcgatcataagcgcctcaccccatttggggcaaggcaattctctacgccacaaaggacccttatctgacgatagtggctcgttttcgttagcatcaacgacagatctagaatatgttggaaggtcatcaacggagcttgtattagtattatgtccgccaactccgagcgttgcgtatagtggtaccgatataataagaggcaatgatcactcccgaccttgggcattcagtcacaccatcatcaactgccattcctgtccaatacatctttgttctgactctttgatactatgtctattcctaccagagccctcggtcgcaatggccctgaagtctcctccgtgggccttggcctcatgagcattggtggcatctacggcgcagctcccagcgacgaggaccggttggcactcttggaccgcgcccacgccattgggcagtggttctgggatacggcagacgtctatttcgacagcgaagatatcgtcggcatttggcgagcaaagaaccctataaaggcaaaagatatctttctcgcatccaagttcggcatcacgatgcgtaaggacggcagtcaaactgtcgatacctcccccgaatatgccagaatcgcactgaaaaggagtctggagaggctccaaactggaaccatcgatctgtactatgctcatcgtgttgacggcaaaacacccattgagaagacggtcgaggctatggcccagttcaagaagtcaagtcgtctgcctctcgtcttttcccgaactaacacgaattatagggaaggcaagatccgatttctcggcctcagtgaggtgtctgccgacactcttcgccgtgctcatgctgtccaccccatcactgccgtccaggtcgagtatagcccatttacattggacatcgaggatccccgtgtcgctctgcttgagacatgtcgtgagcttggcgtagccgttgtcgcctacagccccgttggtcgtggactgttgacgggtagatacgtcacgcgcgagagcattaccaaggactttttcctcagtgtcttgcctcgttactccgaagaaaacttcccgccattcgaggctctacgattcatanaaacgtgctgagagaaggagtcacacggcacaggcaaccctgcctgctgcttcccggagcctctgtattccattcaggacgcggcgacaagtcttaattagacacggagtgccattcactacgtgacaggacgttttaccaaccgaatgcaccatagtggaccgtttccctggtggcaagtaatagtaaaggctagcacgatcagttcaaactcatggaccc

SEQ ID NO: 5870 - DNA, 3682 bp, Emericella nidulans
tcatgcagctctctcgttacattctgggccgttaacttctcgcctgatatgtgtatcagggggaactatatcttgaagactccgtggcgcatttccgaccaagacgccagcgggccaacggcgtttctaacaaactcaattcgataaggtggagacaagcttatttgaagagtgccatctaagcaggagtggttcgcatgattcattacactatctttgatcaatagacaatactgggctgatggtatcactcatgttggtacttggcctgaactcgcggccgtccaacaatacggtatattattgagctcgagaaagaatcgagcgatcctttcctttctctgccgccaatgattagaaatgagccccctgttctcatttggagatcttgattaatactctctttgatttgatttagggctcaatgtgctcatgcaacgattcaaagaaactacatatacgaatattattccagattcacacgtcccttacttgctttcaggactctgtcatccaacctatggcctatcctatagaagaatgaggattatgttgtattcgtgattagggtcattagcactttggtcgaaaaggtactttcaaaaactactagcaagcaccagaccccttgtaatagtatcagccaaagcgaaactatacactcacgcgcaaggtaattttgcgtttgattgtatataagatgcctgattataatagtatgggataagataaaaagcaacggacgcttaacacaacccacctcaggcccgaaccaagcctaccttcttttcaactacacgtcgtggcagatacccactccccaaattctccatcagtagtacagtacgcgaggcccacaacctagtaccagcgagaatcagtactctcaaacggatccagccccaaagtgactcgattcgcattgacaaattccttgagctcataaagcccctcatggtccgcaaaattcattgtctcaagcggtttcgggtcatctggctcggggagaatcccagccagatgagcatttggaccagtggctggatacccgcacgaattgatgcaaacgtctataaggtacggtaattggcgtagttgtgtgaggaccgcgtgccaggtgccagattgcaattgtaccaaacataattcgatgtgcttgagatgatctttgcattggtcaatcagcgcgcggaagtggtcgaatctgatgaggattcgtacgaggcgtagggaggtgagacggcatgactcgcctcagccgctaatcccgaaagggagaacgtccgtactgccaatatggagagctgttaaattaggagccagctctactaacctgaggagatgggcggcgtgcaaatcatttggaagagcggcatgcgcaggaagtacgggagttccccagtatcgctgtccccgctcttgggtatacgcagtgacatgcaaacctagatatttcaagcggcgcagtatattctccatcggaatgtgcagtgaagtagaaccgctggagaagaagcatttaaagtcatgagctacaggaaagaaaagctcaagtccttccaaacgcggtagagccacatatcgtagggtagaaacaattgctctaatagcggtactttcctgctcgcgtgtcaaggactcgcttgaggctctgaatttcaaaacgcgtagattggatagttgggcaagacaaagcgacaacaacccggcaagatcctggatatcttgaccgaatgatgtgctgtgataagagggccatcggcagtatccagtctctagatggcggacatgtgcggagtatttgcttcttgaaatctcagcaagtctctgtagggagttccggccgcgtatcgaggagtcagccggtgctacaatgtgtttgaacaagtggcttgacgcagcagcacagaaattcctgctgaccaaacgtaaggtcttgagttctgaccgagcactttgcttgagcgcatagggaaagatatcgcataacgagtagtccctttccactgttgccacctgatcaacgacctcaggatcaagttagcacacagtctggggtcgcgcacagggttcttaccatgtggcaaatctcgacgggaatcaccagtgccatatttatatgatagtaccgctgtggtattcaataagagattggtgaagtttcgttcctgttggtgattccttttctcgttgtgcatcagtgagggattgaatcgccctgattgagttgagaggcgcatgcgactaattatatacgagtttcgtgactgtcagactgatttagccgccgactgtgccagatcctgccttggtccaattaggctcagccacactgaaatggttgtcagtagatactcccaaccatgctgaagagtcggcgcaacgcgtgacaaggctgacctggtcgccattcccagcttgattcgcggccgcggctggaaagattggatgcgccggcgtcgtgactggccaattttattccatggctgatacccaatccgtagttcttgggcgagcctggtcttcgttcccctaagaaattagtccataccgatcccctctccagagtgggacagtgccacggcacgaaaatagacttgctcggagcgattcagagcttttgagacccttgtcgaaccgatgcatacaagtatgggcaaacagtgaccacgcctctcgtgcagtcaaagattggacggcgaaacatccatacatttccaccccacaatatagagttctggacattataccttcccctctcaccttcgccgaaacgtgatagtccctggagcgggtcaagcgtcctttacaggattcctgatggacagcgactattaggacgattgaccagagcgcatggaaggattttgtatcaagttcatggctgaatagatggcgatgtcaagtatcaaagagtatatcacccagtgcatggctaatgggcttacctagacagacactggctcaaagaagctgtgtaagcggcgattgtggctgttattgcagccatatgatatccattaaccataaactggtgcttacagagtttagactttctcaacttattttccaggcaatggactttttattactctccacaatgcggcaaacttgagcttaaaaatcctcttggctggctaatgcacttttgtaaactcgactaacattcgtcctccttcttcaacatcgcgctattaatcgtctcccataatagaattatctacacctcataataactgtccttttatctacattctatgtcatagtatgccctttactgatatcctgtttctttttttacctttctattcctctcatcttcacaccgccatcttttctcgtatttaataaatctttatccaaccattactacttcttttatcctctttaacttactcattaatttatttctcatcttactctaaagaaaatctcattccttactttttctataacactctcttctctctccgtctctcccttactttcttcttcttcttcctcttctttctcttcgttcaatccactcattacttatctttatttctccatatctctcttcccttaattcactcttatctctgacttcgttctatcgcttctctacttactctaaatcatcttcttcgatacacctactttatctattaataccctacacaccgttcattctaactcttcg

SEQ ID NO: 5871 - DNA, 3006 bp, Emericella nidulans
cattgcagaagaaggatgcatgtacacaggagttccctcgacaagcgtcttatacccttcctgcgggtccttgcgtgctgaattgcggaaaaaccctgtgcaaagagcctgtcgcaccttggtagtgttgcgcccgcatgagacgattttgtggtgatagcgctgcatgatgccaaggagttgctggcggacgtcctgcgcgcggcgaatctggcgtgcttggatgaaattttcgtagcaccaggcgttgctaaagccggatcttttccaggcgttgtaaacgttgagtaacgttagatgatcgccgtgggggtcgtgaaatttggccttcttttgatctgcttgttgctgtttttccttgggacggtagaagacggattggatggagagcatggcgacgatggagagcatttcctcagagcagcccatgtcgacggaagcaatcaagaccttagctagggctggctccatgggaaagtcggccattttgcggcctagacgtgttaaaagaccttcgtcatctagtgcggatagtttttcaagctcttgtaaagctgtgagcatggtgtttgtcggcggaggatccataaagtcgaagtggagcaggtcgttgatgcccattgctttcagcatgaggatggtatgcgacaggttttggcgttgaatgtcgggaatagtggtagggagcatctcggattggtatgcggcttccgtgtagaggcggaagcattttccaggaccagttaggcctgctcggccggcacgctgtttggcttgcgcctgggagattggcgttacgactagagagtccatccccagctttgggtcgtaggctttttgcttaactaaacccgggtcaatgacgtaaaagatgttgtcgattgtgatggaggtttctgcgatgtttgtggcaatgacaaccttccggccgccggggggtgcagggtcgaatatgcgactttgcatttcgctgggtagcgctgagtagactgggaggatcaccaactctgggacgcttggaccgagagctttcatccgctcatataaaatctcgcacgctgtgtcaatttcctcttgtccggtcaagaacagcagcatatcgccaggaggctcagtcaagtgaatctgcatgacggtgatgagagctgcatctaggtagtctgattcaggttctttcgagtacatgatctccacagggaatgtccgaccagggatagagaagatgggacagccgtagaagtactcagagaacttatcagcgtctagcgtggcggacgtaacaatgagcctcaagtctggtctccgcttgagtgtcttcttcagcagcccaaagaggacatcagtcgcgatggttcgctcgtgagcttcgtcaagcataatcacagaatactttttcaagtctgggtctagcaaaacttctctctggagcattccatccgtcatgtacttgatcttcgtctctgggctagtacaatcctcaaaacggattgtatacccaacctctgcaccaagcttgcagccgacttcctcagccacacgcttagcaaccgacatcgcagcaacacggcgaggttgggtacatccgataattcccttattggcccagcctgcctcagccaaatactgagtcacttgcgttgtcttccctgacccggtatcgccgacaacaatcagtagctgattttccgctacggcctccagcagctgctggcggaatttgtagaccggcagactttctctctgttgcttgattgacatattcgtccgctttccgaatgacggggttttgcccatcgtgaccctcttccactccggaaccgcttcgtcagtccccgtttgctgagtagaacggaggtcggccgcaaattttcgctcactagccataggatcctgccactgcgcgttgagatccaccccagctgcctgttcggctgccttgtcctgggcctcctgttgcctgagctctcttcgttccttggctagatttgtacctgccattgcggagcggttcatggatccatctggagccttgacaactcggataggagacagctccagagacatcttggtctgacccgccaggaaaggaggttcttcgtctctaacttcgatatcaatgtcttcctcttcttcaaatgtgccctctccggtcaaggtagcatgatattcttcgtcaatatctgggtaatcagctgcggaaacggccccggacgcaattaactgcttgatctcccagcgctctggggatgttagacgctttcggttcttcatagatcggccgtcggattcctcaataacaggcacatccgcactgaggttgccgtatctatcatctgatggcatgccatctagtcgctccatattcgctcccgatgcaaggcgcttttgcgggactagatcctgcccagtctcctggtctacctctttcatggataggccaatgcgtgagccttgtatactgatcactttgaccttcactggctgaccgcgagataccaagtctgagggatgattcacacgcgtaccctcctgcatcgcagatacatgcaccagcccgtcaacctttcccctaacgcccaccaggttcacaaacgcgccgaagtctttcacacccgtaactcgcccgtcgtagattttatacaaaacaggcgagtcatcgagctcaacaggcggaggtttgcgaaagtaatcttcgtcggctcgtctcctcctccggcgttcactccgtccatcgcggtattcatcgtcatttgaggaccggccaccagtcgaccggccgaactcatccactggatcctcatccctcttattataagccggactccgcgatctcgatctcgacctcgaacgataccgatccctccgtcggcgccggctataatcatcgtactctggactcaaactacccctccgcttcctcttcgatactggccgtgtcaatgttattgtagtcaatttgaacctgaccttcccacacaccccctcccggaccttgtccgtaacatc

SEQ ID NO: 5872 - DNA, 7072 bp, Emericella nidulans
  unsure (1)..(7072): unsure at all n locations
attgtcaaccggaagctttcaccaggctgcacgagagaggtaatgtcggcttcaaactggggtgtaaccgccaacatgctcggcaaccaggtgctcattgacatagacgcggccatgatgcgttgctgactccagacggaggaaagcgcgctgatctgcccagccccgtgggacagtcacagtgcgttggtagtatacccagccgacgtgatcgtgaatggtcctgtcgacgaagatgtcgttgtaggatgcagggacgggacattccaggccctttgggagcgccgccgtccagggagcagaggtgctgtttgtggcgtcttcgagggcaaaggaccacagcccgtcgagagaaacgaggtctctcgtcgacgtctgctggggtttcaggttgatggttagggcttgttgtgttggcgggagctcgacgtcgcggagctgaggcgacgggacgccgagcgagggagggatgagtgcgagtgacaagaaagataacactgggaagaccctcattattggcgactctcgcttggttgaatggctacgacgatggggtataagttgtcagagctaggagttagttcgacctctctgaacaaacagtgatttatatgcttctttctcgtctacgcggcaattgcctaccgccccaacggcttttgagatccttggcagcatgttaatataatctctaatactgcaactatcccgctgcgtgctccattaccatatcacggtctccttgccaaggcactatatcacttccccgcgggggacaaatccggggaggacgcccgggatgtggagagacggatagtgcatgggatgcagatcaactgccgtgctgcatagagtgatatcaaagaccgagggtttgtctgttcttggtctgattggtggatttgccgagtctgcattcctcctgcctgattaagacgaagcatccccaggatagtctctcgtcggctaaccctgatataccctgagtaagcaccatacattctcccacgtagttttccggccttcattatcatgagtcagttaaaatgattgtttcccctgaaaaagtaaagcgtagagttccacatttcccaaccatcgcctactccaaacccctccacatcccgacccctcgtacttggtcctcatcatttcagcctcagtgaaagcttgctgttccttgtcagaggctatctccttatttgagattgaaattactcgttctgcacctctgttgttcatcaacgccttgtggtgtgttaatgttgttgctgtatgtacgcattgtctagaagaggatcacgttaacgaccacactaacaccaattcagcaagacttgacgagcagatccggagcccagaatgcgacgcaagagtcatggcgctgagtattgcatcataggatatgtgaattagggtttatctcgtacactggcacgagcatagaatctaaaaagcaggcgacactggtacgcctggcacctgcacccgctatcttcctacgccttgtccctcttgaaggcttcaatgtactctctcattatgcatcatgttgcggagagctcgaagcaaaaggggcggagtcgcagggtgctaagacttctgctacccaacacggtggcgcatttcgtgttcgtacagtgagcattctcgtctcagcatgggagtcaatatactgtacatgaatcattttatcttcaccatcactggaggccagatataccatacagtacacagcaacggaccagatacaaagcgtacttagttctgttattcgtcgtcaacctggttcccggctaaattagattaatccattcacgttgggatctgcgctcggcaggcactgcggcaatgagctcgccaatgtcttgcggggttgggggcgacttccttaaggtaagtggatttcctgtgtcccgcacgtgttaagatgacgctgagatgtgccctattggtatatggggaagtacctattcaaatgcgtacgatgggtttggttcaactccagtacttagatgtcttagtgcttaggtccggccagtagtggcttcatggagcctagatggtaggaggcaactataaaagtttttgatcgcgggcttgtgacttgaatcggttgtctatcttacctacttaataaattcgaggtaaaattcgaggtgaaaaaggtcacgaatatcacccacaaaagaaaatacgatcacaaatgacctagagtctccgttactttgctcactgggaggtttataacatagacccatttcgcgcataggccttgcgagttgcaacgatgaggaggcattgtcggaattcaggagatatttgtgccttcaaaatcatgccctcactaggccacatactatatggtctgtctagtcaacaaggacggaacatatcaggaaatccgacctgagatccagattttctcatctgcatctgcttccattgaccgtaccgccagagacactgtcttcttttctagctgggtcagcatgcactcctacaacttttgctctcaccgtcaaatgtccagcttcagggaatgggacaccccgatccctcgcaacgcggacattctcctccgtagtgtcatgcaactggtagtcaaagaacgttgcgaaggaggcgagggcgaagtaaagctctgcgtagccgagactgtatacggaacagacgttagccccgcctacgatgatgaagctgtggaagggaatagattgtgtaataggcgcaacataacatacttgataccaatgcattgccgacttcctttcccaaacgcggtgatgaatcggtcaagtttctctcccctcttgctagcttcaatccaccggttcgggttgaaggaagcagggtgtgggaaaatcgagggatccatgtggacaaagtagttggacatacctacgggggtctgccagatcttgtcagtattcacggcgctatggcagaggacggcaacatacaccagccggaatgacgtagcttttataagtcagggcttctgtaggtgatattcgtggagaacggatagaaaggccgtgagagaggcggagggcctcgttgactactgcagtctgtcggctttcagtacatgttttgcaggtcgtatatcacagggatgctcaactcaccaaatacggcaactgctcaagttcagccaaagacgctttcttaacatcgcgtccactggcccgaacttcttcgcgtatagtggttagaatatccttctggttgatcatatggaacgcggcaactgtcaatgcattagccgtaggttctgtgccgccactaaggaggatcatgccctcgtcatgaatcctcgacatcgttcgttcgcaagcgggcagctttgggtcagtaagtgcatcgaacatggtccattcttccttgcttgatccagtcattttgagcgccttagcagacttctccgctactcgtttctgtattcccgcaataacggcagtcgctggtttaacaatcgcaaaggcccataccggaacatgtcgaataaccgtcaacacgactggaaacaatcgactgatatgatctaacttttcggtctccataatggcgtcgcgcacctcgctgtggaacgacccgtcctcgaggaagtcgaaactctcgccgtaggagtaggtggagattatatctgccgtcaaggccgcaaatgcagcgctgagatccacctcagtgtcggtttggtagaactccgcgagccgctccatgagcctctgcacttttctcctgataaggggtgatatatctctgattgagcgcttggaaaagaaactgctcaatattccccgacggaaccggtgatgtccatggtcgacggttgcgatcatagaggttggtgatccaaacatgccgacgaagttggggtctttgttgcattttcgtgccgaggtgtagatttcatcgtagaaatgggggtctttgacgtgtatctcccaaggagttattcgcacaataggcccttccagcgagtcaacacagccatgatcagtttggtggatggagcaagtaccgtaaacttggtgcatttgctcaatctcccacaggaactttccccctcgaacgacatcgtggtaaaattcgtacagaccggttgctgctgtgatttttgggccggggaatctcgtaagaggatggaagaaaaggcgatagactgttctggtgagatagaaagatatgatgagcaacaatggcacctcccatcgcatccactgggcaacagtcatttcgggcatatgctgactgcgtagaaaggggaccgggtagtgttagaagtctgatgataatcttattatataacctccaagaagatttgctttctgctcaagacccttcagaccacctggtatcgccctatcacaagtctatttgataaagtctaaccataccagcgggatctagggcacagttatataattactcagtggtcgcgcaaccctactaaagttacatgtctaataagaacccatatggtgcaggttcaaatactacaggcaaggcagattgtgttaactgaaccagaatcattggagcccttctagcggatatagttggctcaacagctgagcaattaacttcgatctagagctctattctgatctggaatgaacacgttatcaccaacgtcgtcgctatcagagctttattggttctgggtttaaattcagtttgtcagaggctcctaattggctttggctatctcaattccgtttcaagccatgggccagcgagtgggatggtaatttgtcggcacatttcatttcagcatgagggtgacgctctatgccgccgatacgcataaaagtccaacacctaactagcgccgctaaccctggctaggagcgcatcatggacaaaatctcggttcaagatctagccaacatcctggtcgactttctcaaacggttcaactacaatgataccgcccgcctcccctcggaagagctgaagcctttgtatgacttcgtccttccgtacattccctacaatgagaaaatcgtccgagagctggccgaatacgcccactgcacgttcccgttccttccgctcgaggtgcgccaagccgtggccctttatgacacgttccagatgtcggtcgacgacctgccagtcgagcaatacgacagtctccatgacctctgtgtccagctctcaagcggagaaacagtaaaacacccggtttggaatggatttttcaactctcttccaatccttctccaatattacggtccgtacgcgcagacgaccctttttcgcggggcgctggaattcatccaggccacttgtctcgagaggacgctgttccgcggatttcccgggtcgtcgtaccctagctatgtccggcgcatgagcggccaaggtcccgtccaggcagccgtctgcttccccgaggccgagttcccgcaggaacaatatttgccattaattgcgtcgctggaggcggagctggaatactgtcgactagaaaatatgactgtctaagactaatttggaagtcatgacgcctttttggcttagcggtatattttaccgatagttatgagcccggttctccactaccagtgaaaattcctcataccacacccaaggatcaagcgttcgaatccagtttgtggcattgtacctagtataagtcggtgttagaagatatgaccgcattgggtagtgtccagaaaacatccaagatagctgaatgctataaagaaatgatacagtttgggtgtctgtaatataaggatcatgtgtaatacaagggtatcatttgtattactttcagtatggaaatacaagtctttcatactgagggggtgtgtcgactagaaaatatgactgtctaagactaatttggaagtcatgacgcctttttggcttagcggtatattttaccgataaatagatataaatacaaggacaaaataaagttaaaaatgattcgcacctaggagagtctatcaagtgtatggatgggcttgtatgcgccctgcctgtatgtacgtttgtacctgtacgtacctgtagcaataccctaagggccttgatttaacgttggctttgtgattacaatcggcatggtgtttaccttgcaggaggggtctagtcctcattcttggatttcctgaagcattcgtactgcgtattgagcctcatgaactagatcatttagcatcgctaggccgcatgagcgaagagtcagttcagtctaagtcaattgtatccaatccgcagattgatacacagcacaaactgcgcggcatcaatagcaatcaatctgctaaggcgtggccagtcgacgataccaagtaccgtaccgtacgatacccatactacatatattcagccttcctttctagaagggcagacggcttttatatggagtactcagattacttaaatcatgcaggagatcatcttatctagaccgagctttttattggaatatcaggcatactgcttggcggaatacctagcgtacgtacgcgtccattcaggttcatgaagatgcctaccctaataaatatccaacagccatcaaacagttttccagtccactccgcgttgtcagatacgcagcctactcgcaagcgggcaattcctcaaacacacaagcctcggtgacatcggtcgagacctcctcgggctcgccgccgtcggcatcggcttcgtacgtggtgcagatggcactgacatccgtcgcgcagttggagctgtcaatggtcaccacatcgccaaagttcccattcgccccggcaatagtgctccctgatacggcaacgacgttggtaatcgtcgctgagcgctggatatcgccgcatgtgccgcacgatcggtatagtttgccaaagtcgtataccgtgaatccgtcaacgatgacctcgccttcagagttgtgctgcattctcatcagtcaaccagcgagcactaactttgggaggattcgaagtgggaggaatgctgcctacctggatgaccttgtcctcgggcccctgcgcgcctncttcagtgacgacgtaaggtccgctccctttcttcagggagagcgcatnctcgcagacttttt

SEQ ID NO: 5873 - DNA, 7594 bp, Emericella nidulans
gaattgtatgttcaatagtgaaattatatatatctaagatgaacgattgatatgggtatattgaaaaataggacataaaaagctaagcgtaacgagtgatcatccaacaacccatccgtaaccgtaaaataaaaactcgacaagattcatcgtccctccaggaccaatttggtctgacttgagtctccactactgccgcctcgacgaacatgtccgtaagcgaagacggagctgtcggcgacgttctctcttctcgaatcacctcagtcgtaacctcaatagcaccagggcctcttttctcccccatgaccgacctcagcccaggcccaacacccacttctgtatcgatagtatgcagaccaaattcggggtcgtgctgggaatacatgcctctgtttgtcgacctaaggcgcattgagcgtcccgctgttgtgcgggttggattcatactgtatttgttgtagctgttcgtcgaaaggaatttggggaataagcggctgacgagggggcggaggaagggcaggcaagcacatatgatcgctacgttgcattcagctgctgtccagtagccgacgccaacgttgctccctgtttcgctttcgttaacaaccagttgcggacaggataggaatagggaagatggggagaggcgtacaagaagtatcagtactcttggctaccttgcgtagaccagagagacgaaggacactggtgatcacgacactaattacgcatgttagctgcctccaatccaaggtaacgtttctttgcaaaacatggaaaactaacagtccaccgagcgcgaagacgcccatgagagcaaatttctgcctcttggggagctgtagttgtgtgatgagaggcatcggtagaatgaggagagtaagatcggtagcgatattcatggaggcattgaagaaccagagcacttcgaacgaaagacagtgaccaggtagttctcggtcccagaacttggccacaggcacgcagttgacaaacccactgacaatggcccacgccgagtatgcagccacaattcccattacaatgtaacatatgatacgaaacttgtaacttgggaagatgcgcaggtactgcaaaagtagggatattttggtgaacaataggcttgcattgtacattgggattgcagcccacaagctctgtggggagggtatgagttagccatggcccatcagactgtacagtagatgtgtcctctagggtctaaccttcagctgtagccttaattcatggtgcgacagagaatcgctgtgtttccctaagccatattggtattcttatgatagtcagcaacaagcttcacgatatccattatgctgacttacgacaaataacaagagcgagatatatgattgcaaagagctgcaggctatgacttaatataaggctctgatattgaggacgggaagcgtaccagagaaagtagaatagtccaatcttcccggccgctcgatttcattatcccaactctggtgtatatgcgcatcgccacaataacaattgaaaacgaagtgagcactgccgtcaccaccattgccgttcgtcctcgacttgcaccctcatcatcctggcttctagggagcagaatatgctccagagcctcgtttagcatcatgcaaagagaagtaatgaatgaacgtgattgtaaggtataaagagcgtcaatcaaagcattgaaaacgtcaagtgtccgtgaacattaggggtcggttcaaaggagtgtgagattctgttctcaagaaaagaggcctgtggaacgcccgggcaagggacggaggggaacaaagggcataaattgatcgggacagatgtggcggccgtcgccagacatatatgaaccatgatagctgaagacagctccatggtacggagactgcaacgctgccggatatctgattgggcatttgaccacgacaaggcagcgtttgtccctttttgacggtaacccgtttccaacaatggttctctatgccgtcgcatggcagtgggcccctcaatcaataatagcgacgatcgacggcctgaaggcagtatcttatccacaagacggcagtagggaatgccggtttggtggtcgctgctccaccaaagaccacctcgacgcggctggtgttgccgcagacatgcgtatggcttgaacagccagcctttgggcgaagtctcttagcgctcccgaacagcacatagaccgagagtgatgctattgccaaggatatccaaagtccgatgccatccgaagacgagaaagcaggtgcgagcaagatcggtcccgagatccgagctaaatgcttattgctcccagccctggactgtggagttgctaaacgatgttgtgttggggtggagatcatatcattgacactgacagccactaaccagggtttcattcacatcgcttaggtaatcgtgacatctaccgagaccttttgcattgcaacctcgctaagatccaatagtctcgacattgtgcaatcgtacctcggaaatatcgagattacggtaactggccaaccgtgattttttttcttttctttttttttttttctctcaggcacggaataaaccaattgagccgcgttgagacagattagatctcgaatctacagacgcaaatgtgttgctttcagccgcgaattatacctttcctgcaggaacatgcaaaccttgacccctgaaggctgccatgcggtggcaaaagtatgcatttacctcttaaaggactcagaattaagtcctaacttcgataatgcacatcagtcccaggctagtggtaccttgcaaggaaaaactcgccgagggataaggaacgtgcgctgcggcgatctggggccttggcactgtgccctttgtgctcgtttacgacacgaccacaccagggacaaatccccataggagcggcatcgtgatgatcggcatttggtccatcgggcagcttcggcttccaagaggttctcagaatttggttggtgtagtactgtgtataataggcctgtgcgcgctgcgtgcttgcctggtagagactgaatggccagaagatcgactgtactattcctcacagggttgcggcggtccgagatactagtttgttcttgtcgatcgataggattgagtagataagacgaatcaatgatgaggctagacctgcctctgctgactgttgaaacataaccgaagcgaaggtcgaggtaagtaagtcggagaagtggaactgggtagagatgaaatatatgcagcacgtgccattactcattaggatactgatatcggaaacggtatattttgtctcatctcttaagcacccaagacattttgggtcttttcagagataaggggctcacatccatacatgcttgctgggaatattcaactgcactacttcaacgaacagacagcctcaccgttcggcccatcttccgactaccgagacactcatgcagtgtctcagcgcgacccctttgaccggtatcgcttcctcttgtttcacggtaatcttcactcttcatgcacccattttgccgtttatcaagatttatccttttgagcttctgtcccctcgagtcggcaagcggcccccataactccgttccgacaccagacgccgaatttgccgcctatacctcgtcattcctctgcctagaagcgcgttacgttccagcttgtggtgctacaacgatccaagcgtaatatacaacttgagcatccaaccactggcgaacgtatcagtgtcttcgctgacgggcgaggaggataattctgcctagagctcaatgataacaggatcgaagtacctcatcgcctctgacaacttgactgatctacaatcagacccaactatgagcactttgagtaactcgccatcaagtgaaacccaggctctactgctgggccgaaagccggcttctttcgccagttgcgttcgtgaatacgggcgtaaatcatgctcagctatttccgtcaacatgaatactcggcatcaacagcgttgagccacattattctcactctatcaaagttggcgtgccgcttatacttgttgtgatcgttgtcgtaaagtgcgccaggctcctatccgatactacaacattccccgcacgtcgctaacaaacgcaacaaagacttccctcccagtataactctgattctaccaggtgtattagcagtctgcaaagttcgtagagattgaatagatgaataatgtatttgatcgccggcctggacgcagggagagtgcaatgctaggcaacgaaagtgcctgaggtcaatgatattctatcggctggggtttcggggccctggagtatgagactacttgctgaccagtaaccgttagttctcactggattaacaatgtgagaaccgccggtctcatttaccatgctgaacaatttcatatgctgaacaatttcatatgctgaacaatttcatactgtggtcctgaagagccttgagtttggagtcagcgaagttaggcagtgccaaacttggagctcaggccaggaaagccatacattcatctttcgagacgcgttgtatatggccaatacgtttagaagcttgtagaacactaatagagcctagagtacggagaccagaaatcaattcatgcggtttagtgtactatatgtgctctgccttatccggccgacagtcggaaaagaacccgatcacgcgcgggcaaaccttcaaccgaacccagcctagcagtgagcactgataacagtagccgggccccgctattgcgagatcactccccgcatcacatcttgcctatataaactgccctctcttatctaccaggttatattctgccttccgaccctttctgaaggaccggcaacatcggacattaagtcctttaccgagcctatcccagccaacgcagtcctcggccaatttgcttctccctatcctagaatctccgcattcccccgacctctaacttcagtactcggatcctccttcagacgcacgatggcttccgcaatggcaaagcgccttgagggcaagacaatcgtcatcactggcgcctcgtcaggcattggccgaagcacagccagggaattcgcgcggacagctccaaaggaccttaagcttattgtgacagcaaggcgcatcgacgccctcgaggagctggcaaaggagattaaagaggaagtcggcgagggtgtcaagaccctgcccgtgaagctcgatgtcagtaacccggaggaggtcaagaactttgtcccatctctccctgccgagttccaggatattgacatccttgtcaacaatgcgtaagtctgctacgtagcctgctttgtaaaacaggtctctaataaacgtagtggtctcgtcaaaggcgtcgctcaagcccccaacatcgaccctgaagatatcaacatcatgttcgcaacaaacgtcactggattgatcaacctcacccaagctgtcctgcctattttcaagaagcgtagcgatggcggccgtggagacatcatcaatattggaagcatcgctggtcgtgagccctaccccggcggtagcatctactgctctaccaaggctgcggtcaagtcattcaccgaagccctgaggaaagagctcatctccacgcgcatccgcgtcattgagatcgaccccggtcaagtcgagactgtaagtgctcgatgccatcattgaggatagtgcttacaaagctggtaggagttctctattgttcggttctacggagacaagagcaaggccaatgccgtctatgcgtaagtcattcgacgtggacgttacgcagtgaatgctaatgagcttgtagtaactgcgagccacttacaccggacgatatcgccgaggtcatcgtcttcgccgctggtcggagggagaacgttgtcattgctgatactttgatcttccccagccaccaggtatgttcacctcatatgtcctccacagaagtaaagttatctaacttgttacaggcgtctcccggtcatctgtacaagaagcctcaataaacagtttcgcacctgtttttagatcctataaatagtaacttgggcatatagacaaagaaatagatgtcttaatgccatatataccatacgatatccaaatggcttgccatgaagcgacttattatgaggtgttgattaacattctgccatatgctgaaaatcagaatacaagacctggacatacaaccccgctcgtcctatcttgattccaagcccagacctagacataaagatggaccaaatccatcaaagcattcccttacccccatcgtcaaacctcccatgtctcccttccccatccctgaatctcctcgcccccttcaccccatcccccagaacccgaattcccttctcaaattcgttagccaacgcatcctcgaaactcttagcctcaaacgccgcataatagcaactcgcccgatccgcgtttaaacatgcctgcggaaagccacgatctgtctcgcaattcccatcgcctcttccaccccagccccccgaggcacgacccgattcgccaaccccatctcagtgcctcagtcgcaccaaccggccttccggtaatgatcatatcgagtgcacgtcccagaccaactatagcctgaagccggactgtccctccgtctatgagagggacaccaaagcgcctgcaaaacacgccgaaggtggcatcttcttcgacaacccgaatatcggcaagaagggagagctcaagaccaccggcaacggcatgcccagccactgcggcgatgaccggcttggtgattatcatgcgtgaggggccaattgggccggtgttgcggccttgaacgcggttgtgcggggacataatggggccggtgtacttgtctccaacatttgcgctgtcttgcggacttgcagtggatccgtcttgactttgagcttggggttcgtatttcgctacctcatgcaggtcaaaccccgcgcagaaggtaccgtttgcgccgtggaagacacacactttctgagatgcatcggcttcgaagtctaggaaagcagccgtgagtttctgggcagtgggaccgtcaatggcgttgcgccggtgagggcgatttatggtaattgttgttatgcctgagggggtttttggtgctttggatggacaagagctgctcgcatgccaggtttgtggtcgctgttctgatagtgtggacttgcagctcacaaaggtgggtgttaaaaccctgttcttggtgtgtcaatacatgggtttagtgtccctttttatgggtgggtaacgtcttttgatcatgctggtaatgtcagctaaggacctcctacttcgataatactagaacccattgtttggcccgatctttattacacatggcggtgaatggcaattaattgcccctcttttaataaccaactgttatcggcatttcgccgacagcccgccagcgttttgttttcctaagttggggtttctacgcggcgttatggttggggtcatgcatgatattacatattgttgttgtcccggaacccccgggcgaccattttacttaacctctttttttttttcttttttttttacctatacttgtggtcttttttttctt

SEQ ID NO: 5874 - DNA, 4985 bp, Emericella nidulans
tattctggccatatgtatctgttttttgtcatagtgtattgccatctccagctttccgaagccgggtctctcataggcaacatagacaccagttcccgatggactggggatatacgctcgcacccgaaacacgttcgcatagtctggagatagagggcctttatgcaggacgtgagttggcataaacgagaatcctcacagatgctaacctgtaaaacttcctgtaccgtttctgaccaagttcactcgacgtctgaagaggataaacagattggcactcgctgaaccagtatgctttcagactttggaaaccctacgcttcaagtatgcacttgcaacttgtcatcggactccgcgagatctgcttttccctggaggtgtatggggttggacccgacatcctagccaggagggagaggtaggtgtcgggcgagatcttcaatgctataggcctgagtgacagatcgacacggttataatcgttgttgaacttgatgccaatggatgcagcttccgaccctcagtattttcgagcattaaacagcagtctagtccgagaaaccttttcaagacagttttttgcagaaaatacggaactggcaggcacagccaccaagactgcaccgtcatcgccgcttccatacaggacagtgctacctatattcatggagaacggcaactgattggtagtcagcaatatggatgatgctctttctggtctctactaacgtgatacggatatcatcgattggcaggcaaagtggtggtcggctgaacagcggatagttcgcgcaccaagttctcatgcttttttttaggttagacaccgtttaagggggatgtgtggtgtcggttttagactcagtgacagcctctctagaaccacttgagataaactaactgactgattgacgggcgttgaactcttatcctctgtgcaataatctcagtctcaatgctctcctccataaagccatatttgacgtctcagagaccctaagtctagggttccacctcgtatattctatggatcagatttactggacctctatacccaacaacctttcatctataacccgcacctcctacttccgaatatcctatgatcactcccgagcgacactcttcagggccaggacaggacgatcaaccaaaaaattccctgaagaacagtactttgttttcaagcaacttgtgcggcaatagctttatttcccctcttcggcctatattacttgactcggctaaaagggttgctgataaaattcggcaaatcgtcctttgggggtgcatttagctgcctaaaactttgacacgcaggactggatgagtacacatcggccagggacactgtatagtagaacatgaaatgatattctagtatcagcttgcaactcttcgtttttatttgcaccgggctggggcaagggtgccttagcagaactgctcgcgcaaatattaccttccctgattgatgcaagcttttggatcttttgaataaatcatgggtaatggtattgttcgctaaataacaagaatatctaccaacatatgtattgtgtatacatggcggcgtcactgcatcgagtgcgcttgctgtgggtaatagcccaagatagaccctgccttgtgctccacatcctcaaaaaggtaatccgtttgttccaacaaagacttccttcgcgaagagtaggtcccaaatgagcgtgtcgacctcattctctgcagagtgctcacggtaatcgtttgacccgcatccggcgcggcgactaccattgtacttggcgtggctgtcggaggaggggagcgactaccagagcgaaataggggatgtatgttgctttcatcaggcactttgatctttgaaggaggttgcttgtttggcgctaactgcgtagaggacgatattgttgataaagggcgaagcatcacactgtcgagggaccgtttaatttgcgagccactccgttgaagctgctgtggccgactgtgacccttatcgctgccctgatcttcataggaagcgctgactgtggtgtgtgtcgttgcactttcgggatagggaatgagagtgggagtccaggtcgagtgaattagatttggagtctgactggatcagtgttttgccggataacggtctgatcgagagacgtttttctcgaaatcgatggcggtcggagttattgtctcaatggacgggcattgcgatttcgcaatcgacgaggctgcgcgagacgcccctttcctgtgtacctctggtcggttggaggcatactggcgagcttcgatgcaattggggtcggccattggttgcaattgtcattgctcgaggtggtcgtcaaaaggacgccgcacaacattccttgggtaagaactgagagtgcccataacacacagcgggcaatcaacagcgcttgtcgatttgagccaatgcctgaacctgccgcctcactcacagcctgcaaggcactccatgttattcctcccgccgtcacgccagttgcagttatgaaatacccgaatccacatccgtaggtgatggttttccatccttctcgcggtaccctagcgttcatttttgaaacgtttgtcacaatcaacagcaaggcgagaaccacaaaacaactgagtacgccgaagctgacagtgaccgcctcaatgaaagatccacctggtgtaaaagctctagaagagccataacacacaccatggaggacggtgacaatgatgtttaaaaacaatgaggcgcctcccagcaggtagcccggggaggctttgggcatgtttgataggggtcttgaacgtttgtagcagcacaacgcagaacctaggatattgggggaaaacaccggtgacagagttctggcttgcgagctgtaaggcgcgaacgccataggagtaggtgactgcgagcagagaaagctcagatgtgcgtagaggaattaagagatataggtgaggtggggagttgttgagactgttaagatgattggaaagagcaggctgtatatctgaggaagggatgccagaaataattggacaggatgaaagatgttagcgaattgtcagggataggcttgtgttaatgtttggatcggtagcaattccaagtgactcagaatagactatccaggccaagcattgaagccaaagtatgactgaccacgtcttcggtcaagagcagaatgacgacaatagcatgctatgcttggaaatataccactttagcacaatcgaatacgttacaagctcattctctcaagctcaactgctcacatgatgtctttccaaataacaaggagcaaggtttgtttggcagggaaaacccgaggcacctgaagccattgaataagcatcacattgaacaatcgagtatcattcttcaccgggatatgagctgtgaggccgcataggtgcccgtgcctgacatgcctagacccctagaccgcaattgactgcttagggcttgtacttccgatgctatgaagccaacgattggctgcccgctgctcgagaaagtcttgcatggttataccgattaggccctgtcaacgaacgattaaccaattcgtcaaggctttcgacgtgcctgatttcagtattttgaagtgccctccaataatgaccactgattgtgatcaccgatagacacgggatgtgctgggagtgctagatccaatagatgctaggatccactatgtgacgtgtccacagaacacctggagacagataatgaccgccagtttgggtatgacttcagagagcctgatctcagaacaccgctgtttcggtgtgtgagttagccaagactcgggggctccagtgtagatggtcatgatatggaaatatgtaaatgatctcaacgacgcccgacggtgcgagcagtcgacgaggctgacgagatcatacatcacagagctttcatgcatcgcggtcttgcaagatcatgatatgtgactgatccatggggatatgtccactttatcacaggtcaaaggttgattaaaggtcgggcagaatccaggcgactgttcgtgagaaagtgccacaatatgctgaactaaaccgatatcgccaaagcgcctaaaaaatgcttcatagtactctttcatacggagtatggcaaatagatggcacaggctgccgcccactcggctgcatgttcaagaggattgtatctgtttgcgatgttaaggctacaatactgctgccgcttgaactaatatagggcctcatgtgcggatgaatagacttggtgcctgtcaagtgccatgtttccgcctgaggcgattccagcaagaagagaggggggacgagaggggggacgtctaggctcccacttcaggtagatgatactagaactggatatgggacctggaggggcattacttgtggcggtgcccagagaatatggctggtgcagtggctggtgtgaggggagcggctgtgactgaccgccttctgccttttggcaattcccgttgctccatcctctctactggcaccctgccatcataatttatcatcttcagttgctgcctctcagctcttttgcagactttaattatccctgtcctgtgtcttgttttcatctatctctgtataaaataaatctctatccgccaggtccttaccctctcctactcccagtcggccgtctcccctcccccacttttagctatctaccttcctccagtggcgcaagatgaagctcacattcagagtatgatccttgtgtgctacaacaagcacctggattttcatgaattatgctggcatgtgtcaatccagtatttcaggcaacaagaattggagattgatatgtaaccttaggatagtgtgagtcacactgctcgagctcgaaagccagtcccgatgcgggcctacctgcattacaggtcgcccaggtgtgaaagcagatctccgcgcatggaggattggatgttcattccctagagctcatttatctggttagttcagggttc

SEQ ID NO: 5875 - DNA, 333 bp, Emericella nidulans
tattaaaaaaaaaaaaaaaaaaaaaaaaaacccgggttgttccttaccgggccctttccctcaaaagttcctttccatccggcccccgggtaaattttttgaaaacccccccctggggggccctcccgggtggatttccaggcccccaattttttcccggcccggaaccccttttgccccgaaaaaaaatttttcgggtttttaaatttttttgttgggcccggtttgaatgccgttcgggccctggtcagggtggtttcagccgtttttccgaaacgtttcgaaaatgggttttaaaccccgggttccgggtttagcaaaattcccggggga

SEQ ID NO: 5876 - DNA, 6143 bp, Emericella nidulans
agaagattgactgtgacgcgtaaggcgcagcaactatactaccattatacctcgggaatcctagcctttttttaaatgtgacagggataattccttcaaatcgacgccgaggttgagctttttcaggagaaagatctgattgactctcaaatatcaattgaaataatatatatagcaaacactcaggactgttttgccacaccagcgaccaacctgatatagctggcgcaggcgaatcagacaatgaaactgtcccaacgcactatgtaccagaaagaatgcaaaactatttacaggtgcagagtagccttcaaaggcactctatgctaggtccaatttatccatctagatggtagccgggttcttggagcgccagtcgcgaatactggtgtaggggctggctcgcttgacggcacccccagagaacaggttcttggactcaagatcaaagcaggtttgggacgtggccgtggtgttggtgccgacaccactaccagtgcagagagggtatgccttctttgctcccatgtcgcaaaaaatgttttcctcaacgtgcacaaagtcgggccccatggaggtctcggattcgcagagcttgacggcagagtggaacttggattcactaacgacgagctcggtctcggtccaaggagcgcggacatcgcggcgagcacgcatgcggcggctgttcagatcacgcttcttacccttgacccagtagttgatgctgctggggtcctcctcggtgcggaggccaaagtcgatatcgttacagatgttggccgggtcggtgttgccctcgtcgaactggtcagacgagtaccggggccagcgtacttgaaacccggtgttgggctggtcgccgttgccgtcaatccagaagcacttgggctggtaggagttctctccattggtccacaggttgctctcgtaccaggttccgccacaggcttcgccgtagtctccagataccgcatacttgttgccgcctgcagtctcggcccaggttgtggtcacccaggcaatgcagatggcgtcgttgttggccgagaagagggagtagacaccctgctggtcgtggtcgaccgtgatggtgccaatgttcccgttgctaacagagccagggtcggcagtcatggccttgtactctccaaaatcgttccagatgcggctgtttatgcttagcaggaaattgcaagcgttgtgtgatccatgcacttacacatcgggcaggtcaccaccagcattctcagtgccgccgggaccgtcaagaccaacggcaaccttgatggtcgaaccaggatcttgatcctggccaaaattgtccatgctgaacgacacgattgtcaagagaccggagataaccccgattgcatcaacgactccggccatggtgatcggatgtggtaaaagagaattggtacgagaagacgctgagaactgaaggctttagagctgcggccgagagcctgaagaagcttagagatggatgagaagagctgctgagaggcttgaggatgatggcttcatcgtcggtcttctggctggtttatataggctggccgacttcggggtttggttgttgttctgtatagttcggcccggaccgatttgcatcaacatcggtatactcacagctctctcttgcatagcattcgaatagctctgctagtatgttacatcgtcccaggggccaaatcctgcagtgtgttgaaattgctctcactgcagcttcatcatatagatcggcgtgggggcggccccagcaaaatcggaacaggaaaagactgtacgagaagcacggtcatttggtttggttccttggctagctggggccaaaagccctggagagcatccttcgcatgaatcatgatgtttcttcaaccttgattcagccctcttggcctgcagaagcgcccagtgggtccccctccgggccgacgtttacagcgactctgaacctgatagtatacaggctactccttagcgcagggctgagcagacgatctgcagcgatgtgcgctgacgagaggttcttgacaagccgctgaggtcatttgcttagctcttcatttaactatggtttcattgcactacagactggttccttaaagcaccgctatctctatcgacatcctccgtctttctctccagatcacaccagcactgttcctcttttggcttctcatacaatccttcaagcccaacatgatccactccaaagtcctcttcctcgcccccgtcatctcaagcctggctcaggaccttccgactgacattgtcggctgcaaagacctcgactgccccaacgagggctgggactcttgcactgtagcagacgagacctatgccggtgttggattggcacgggtctcaaacgcgccagactcattggctggcatctccctagtgaagggggtccacatcgaggatccaaagtccggcggaaatgccgggggtgatggttccgaagagtctcgctccttcaggtctgtctactatcttggaacgccgtccaatttggaggtggccgacgtgtctggctgtgctgtggtcttcaacgaccctccaactggccactttgatgtccccaaactcaacgacagcatcaccgtcgacacgcgggcctcatatgggacttgccccgacgtcatccagcagggttgcattgagggtctgactcggcaggctggcaaattacagtactccggttccaatgcttgctcagcgcttgcttcagaccttcgtaacaatcctccagatgagtgcagtgacatgacaggctccggtgatggactgggcagtttcgacgttgtctccttgagcaatctgtctaccatctcgcagtctgccaatggctcctcgaactgctggcctatcttgcccaagacagacaatctcgcccagctttacgatgacacgacaaaggtatgttctgccatctttcattatgtacccctgctgatggttgtcatctcataagggcaactacacggaacaaggaaacctcgccgagatgtacaagattacccctatcctcaccgtcttcacctcggacaacagcaccaatagcccggtcaacaacacggctgcctccctgacctgcttaaaggtcgtaggcacacaggatgtcaccaatgccacggatccgaccgataccgacgtcgacgctgcgccgctgtcagcggtgaatatggttggggccagtgtggcggccattgctacactcatatttgtcctgctctagactttctatgaactgtttgtaaagctgtctcgcaagctttccgtgaatgttgccatgaatcattcctcttcacataaggttatcatctcaggtctttgtacaaagaacctcaatttcattatacctagcattctacaacttatggttttgttactgcatcgagaggttgaccatctcgtgccgttcagactgcacgtcagatcgtaggtgtagactgcacccctgacaccctgaaacaggggacatatttggcctgccacaaggggccagaaattgaatccgcattgtcagcagccctcttgaacccagcccttagaacacattatatataccaatatggggatatctgactcttagcctagtgaaatcggatgtagttcaaccaattggcctctagtggcgcctgtaacctaagacatgcagacgacacgcggtgtctttattaatctagggacgacgcggaagcagtagttctgacattcctcgcttcactattcactcgctgagctcagtggctgtttttttccccggattattgagcaagcagtgcttgactgtgtctctaagcgctcaaccacctgcgccattcaccccggcattaagcctctccaaatcattcgatcagtagcaggacaattcatcactatttttcgagtttacccttcagcgtctggtttgaccggcgttctgcagtatatatgggctctaggtgggcttcctgtaatgtagttaacaactgtctccccccatttaaccaagcatatatggactaggaattttttttttccaaatgtttttctttttttacttttttatgtttgataaattgatgattggagtcaagtataaagtctaagtattgcccaggaacatcctcgacctatgtcgcgcgcgcgtcaccagtctctatgtcacagcattatgcattagcccagctctgttggaccccacctgacggcgatcttcatatatctaatgcaagccttttctgttttcaagggaaaggtaagagcgcaaggtctattaccggggttgttgaggcagtgttcaacagctgtgaggtcacattcaaatcctgttgactcggcgaagaatcggttcgcataatctgtacaaaattcggccgtcggatagattccgtggtcatttacggcttgacatgatattcggtcattccgtgtaggtttccatcaagatttgcgtgtgtcagctggcggaatcgcgtttatgctgcattcaggagtcggcgacgtgtcgtgcttatggttacaaggcatttgtaacactattatactccgtaaagaaatagtcaatcaaaatgccaataagtcattcgccccttgtgattcgtcattggctgttcgtatgagtctgctttctctgtccagttacgaattcaaatcgtcactttcattgggatcaagaggcttatccgagttctcgagccccagtaggatcggccaaagacactgcttctccctcttcatggtcacaaataggtcaatctgccctttgtcactttttaatatcttggtcctaggtttcgcgttcattcacaaaccttggttgttccaaatgaggggctgcgacttcggctttgaagtcctatatcgtccctattctccctttgtactcagtgccaaaaatcattgagccatctatgatatccaagagaaaggctatccaatgtgagtacctactgtaacctctcgataaagggctttagtaaaccccgttttcaacatctcaagggattacatattgcagaatcaatggaggtgtggatataaggacctcagttctactttcaaatttcctgcccatcatctcgcttccgatccatcaattaccaattactgtaacctcccttagtcaacatgagccctcgtctagactacaatgaaggatacgattccgaagacgaggagatcccccgttacgtacaccattctagaggaaagagtcatagatccgtgaggacgtcaggtcgctcacgcacgttggattacgacggggatgatgaagctagtgaccacgctgccccctccgggattgatcgggacgctcgagcctgtccaacatctcgcagatatactgatgactgccttgagacacataaatttcgaggtgcccgctcctctcgctcccgtggacgaaccgatgataacaaggttttgtactacaccaagtatcgcagcccggctaaggacttgcctatcgagcgtgatcccgagggtattaatttattcaaggtccgacagcacacacggccaagtgacgctcatgtgcccagtggataccgtgagccctacgaagtcaaggtcgacgagtatgaggatgatcatccccgtacatgcactagccgccgtgactctagacagccgaaagtctacaaggtccgggttgatgagtacgagataacctccctgcacgctctcacactgactttcgcgagtctccacggtctgaaagatgctctagccgctacaccgaggactcgaagcctggggagcttcctccccgctcagggccctgtcggtccagcaggccttctccggtcgatgaggacgtcgagtatgagatccgtgagccccgagggcatcgctccagtcgacactctacagatgttgactttcagccagtagaacaacatcctcgctttggacaacgtggactcagcagaccttcgcgggttgatgaggaagtcgattatgagatccgtgagccccgtggcaatcgtgtcagtcacgctgctcatggtgacagcccctgtcaggaccaaagctccaggcatatcggcattcaattgtggagtacgcgcggaccccgggcggctggccgtggccggggtcctgatgagtctgacgatgttgagcctaggcagggaattgcgtaa

SEQ ID NO: 5877 - DNA, 8895 bp, Emericella nidulans
cctggtgagagtttgtcacatagaatgacagaagaacaacgtctccatagacgttatcgcctttggtgacctcgaatcataccagactaagaaactcgaagctttcgtcgaaaacgtcaaaggcggcgacggatccaaccttgccatcatcccacccggtccgaatctgctctccgaggaactccaggcttcacctatccttggcggcgatggatctggtggtgctggcggtctgggaggcggtgatggtggtgatggtggcgcgtttgacctggacgctgcagccgagaacgaccccgagctcgcctttgcgctgcgtctgtcgctagaggaagagaagaaccggcaggagaaggagaggcgggagcgggaggcgcaacagggtaaggagaatctggagggaattccagaggagggatcgtcgagcaagaaggataacgaggatccggacaagatggataccgcttagatgtttctatttaacgttaatgcatacccggcgcacctacctacgaaaacaaatctgtcgtactattagtataagcaatgataaactgaagattatcgtcattcgtatcgccatacgtctgtccagcctattatcccactaataacccagagaaaataaatgatctaagggtagtgattctatacaactaggtacctcgcacgcttccatggcaacaaacgcaatcacccccgtaccctgaggaatccccccagccccctatcaaacctctcacacctaatcggcatctcaatctgataaaatggattcttcatcacatagtccgcatagagctcatatatccccttcatgaccatatccacattatccataagcgggtctgtgaatagtaggaacttcgtcccagtgagcgtttgaaaacacgtcaatcggaacttgtccgtttcaagcgtttcgagacccgttaccggaagatgagggttcgggtatgtcgtggtggggtttacggcgggggatggtgtgagggttgtcgtagagagggtggatgtgtgggtgtggtttgaggacgtggctggtgtgggcgttgatggcgatggtgaaggcgacgatgttccggcgccggaagatataggtatagaagtggcgggggagagaggatttgggagtttgggcgttattgagcgggttattgcgtgtacgctgtttgcgcctcattatcagcacacctttcattaaacttctgttccctccggcccacggtagaccaattgaagtgaagggagtcattcaaagagcgcacccatgaaatgtccctgcaaggactaagtaatcatttgtggagagctggcgcaagccaggctggaactcgcgctggtagatcaagccgccggctttattgatgattataagggagtagacgggcctgcaacaacggctattagtatctgttcgcgcttctgggtcgggtacttgtgaaggagcaggacgtacatggtaatatattcagatcgaggcgatgagaagaaagagtgcggtgcgtgtctgagaggttcggtgctcaggctgtttcttaggtcgtcaggtctagtctcgagtaattgggagctgctgcgtttgctctttgaaaaatgaatgagaaaaataaatcatattcattagcgcagcaatagcagggtacatgtgtttatatggttggagttgaaaatgaaggcggaagtcgaagctccaatgcggaggtggattgtctcctgggtcgcctatttaatcagcacccaatgcaagtggagcgtagatagagatatgcacaaaatatatacaaaccttggtaatctcatgctaccttatactcaagaagtcattctccctggacacgtctccaaataactccaaatctccgtcatactacatacatcctcagatgctcttaattatattcgccttcaatccttctggcgtcagaaccgcattgagtagcgacgatccagaatgaggtaatcaacgctggctgtgcgcctaaggcgggcatccacagagcctgaacggttcagatctcacagtggcagaagtgctatttcacgatgatgtcgattctgctattttgctggttctgcccctgctcatctttctgatactagtactctcttaaaagatagtaactacaagatcgaacatccagacgagtatatattttccaaaaccctcgtctcaaactgatggtatatataattctggcagtacataagcctcgccgggggcgctgtctccatcaggtagtcagtaatgtctcctttcgcattggatgtgggccagacacaggtagttgttcagtattccccggctgaaattcctttaggtatgaatgatcggacgtgttagcagggcctgcttggtctcagagttaagtacaaggtcagaccttcaggcaaagctcttggatacttattgatgcagttagtcgataaaaaaaaatttaaagctgtcccctttataaaggaagcccaggaactttcggtaagaagagaagtttgaatctgaagtgagcgttcactgaggagcttcctataattgagcacgaaatttcagatactcagagcaggcgtagactatctaccgtgcacgttcagtctgaacaagaaactgccgttacgattaacagaacatagtcagcattttgccatgttagatgaaaagcaagtaatagaaaccgcccagagaagagttttatatcgtgtccaaattaatacaggatatcatcgcatcacatcacatcatgaatcataattatgaccaaaactgtgtcacggcgaccaaacaccgaaccctaccgaaaacagagccttcaaacaggtatcactaaccgaggatgatatacaataaaagataagaaaggtaaaaaagggacagtcgcagatcgaaaagaggatttaatgaagccagccagacaggccgaagatcacttccgccaaagactaaccaacttccactctccattgacacaactcacaattccattcttctcagcccattctctcaaaggcaaatcctccttttcaggaccagggtcgcgcttctcatagtgtctcgccacatgctccatgcgctccttccaagcatttaccccgcaaaactccatatcacagaacccgcagtgacttagcgttggtggctcccgaagctgatgccagcaccgcttaaccactgcctcgagggattcttcaaaggagtctttttcggactgggaggctgaggaggctttacgggaagatttctgggtagatgagtttgcgctccaaggagaatgcatgcggcgctggtgctggatgaagaggtctttccggttgaagtcgttcacgaggagcgttagtggagtcgacggggtttgtgggaaggacgaagttggtgttcgaagtccggtaggagacggggagcggttgttcagactgcagcgaccgatgtcacatctgtagaagcctgtctggatgtgctgagagtagacgtggcgcttccattcgttcttcgaggggaaggtgctttcacaaccatagcgggcgacagcattcaaagcggcggtcggtagtctttttggacgtctgtttggttgtggctgcttcggcgcggctgggtttggccgctgtctttctacgcgccttgctgctgtgcttctgaacgcggttgccggtcaacggtctgcgagcgggtagaagggcttcgcgctcgcactcggcagtagaggtgaagttgcaagagttctcgtcgggttggtgggtggttggggtgtatgcttgcaggagcatacagttctgatgtggcgttgcgtgagtgggctcagggtgactgattgattcttgtttgtagagtgtacttggcatctcggggtatgaaggtgatggcgaattttcaaaactggatgtgcacgatatagagtcatcgtagctgagggctgacatgcaattgctctgacagtctgtctgaggtgagacgctgcgcaggctctcgtcaaacggcgacaaaggacaccagtttcctaggtccggagcagatgggggaggagggtatcgcattggttcgaatggaggaaagtgggcgcccttgacggtagcctctgctgcaatgggaacgcactcaatcatagcatcagacataggaaccgccattgcatcggcaatgtggtgaggatagtactgggcctcgacctcttgcgcagttgcaagatgatcttgtacggagtagtgataaaagccagggtagtggtagtggtcctccattgttcagcataagacagaaggctgatcaagtcaagtcaacaaaggatgacaggcgcaggaacaccaagaggcaagtacaatgctttatttgagcttgagcaaaacaattaagacggccatgaccacagaggagccatggcggcatttatcctccgctaggctccctcgcccgaggataatttcctggcgtgggaaaagacaaagcaaaaccgcaatgagagcaccgcgaattggcgaatctcgaatgagcctcaagtcaccaactcctaccctccatcaggacgaacaggcacaatcgccggtgggaactgggcatatgtccctgtttggcgtctagtgccgacggacggactccatcgatgcggaattaggagtggacaggactagtcagggcggttgcattggagccaaccctttcttactttttcctctccttatttcgaggtagtttctggaattggatttttttcgagtccaaattcgcatagacacaaatccacgcacgtaaaatacgggtacatgagcgggacaaatggctgacggggtgcagcgccgcaaacgcctgcgtcgtggagagcattccccaggactcgtgccacggggacggagttcattacgaaacgataacagtacgtgactcatgagttgagcctcaacccgtccaaatgaggacttatcattagatgatatagggcggagcagtgagcagcggtaagcgtggcactggtgaatttcatcgttgtcgtcatctagagatgcatgcactcgttcgtgcgtttctttttctggccccctcccgggcttccttcatcggggactgaccaatcttggtatgaaggatgcatcatccgaccaatctcacagagggtggctggcaagaacgggcagtgttggccgattgtggtttgccctggtgaaagggccccttgctctgggcctctggcatgaagacggtggcagcttggcgcagataacgaagcgaagataactggagaaggggaccaacgaagaagcgatcggcgatgtcatgagtgaagcgtgctgaatctatcgaagacaaggtcggaattcgagatgagatggtggtggtggactggtagtcgaaatccgatcagacctgcttttagcacctggacctcgtgttgcagcgctaaaccgcagctttggactgctgccaaagaacagcccccaagcaaagaagccatgttctatttagagctcagctcaagtcgcgaatgtatagttttattggaaatcacaagtgcaagtgtgcttgggtggaggatggagatgccagctagttggggcccggccaggaagtcccagtgtttgcctgatcgggacatccccacgcgacagctgatccactcctgagtgtttggagcctctcagactccttagattgacgacattgattatcattcttccgagtattcattcgacctaggatcgcctcgatcaaacccccccagacccagacctgtctccgaccatcagattccgccaagccacgccaccagacactggttggtcgctagcacggccctctcccgcatcgagccccgtcaagtaaggcacagccgatgatcactctgatatggaatatctgtgcggtctactatcttgtgacagtcgtcctgtcccgttagtcgctctataccgcaatcataccgatctgccttgggcgcaggcgcagtgcagcagtagcgcaaatggtgcctcatcttggtagcacgacattgctagctgcatcagctgagatgaacgtcggtatgcatctctcaggggcgaaactctgtctacaccttcttgtcatcttgggatcagaggtggatagtcagacaagatcgaaacgggcgcggagctctgcatgcttatggacgaaggagcttccaatgaaacagagggcaaaagcaaagtaagacattcgaaccgccaattcaacgagaaccatgactctggcggtgcgggtgccatgcagcggctatgttcggacgacttgacgcagacctctgccggaccacgcattcactgcacatatcagcataccatcttattctcagcttgcccaattagagccttttagcgggctgtcagactgactggaactcagttctgtcttgattagctgggacgtgaaggtcttggccaagttgtcttgtatggcttatctgccagccacacttttagcgacctcaaggcttagaagcccctgcagggtctttgacgtccggcatacgaacagcatccccagatggaacaactctgtacttggatgcagtcgaatgttcaaactggctttgatgatgatagtggtagtggctggtccaggagttccctctccaattttttccgctggatgagttaccaacaaatcgtctggaaaactacagggcgatccctttctcagcgtcagttctcaccatcttcccgcactaccgctggaagctggtccgaccgacagactaaactttgatcgcccccggcgtgcagccattgtcaaaagcagtgtttgatcttcatgggaccgagccgggattattggacaaagatctagacagcagtgcagtttgttggctcccaatttggaagagtgactgtcttcagagaagccgagacgccaggacttttgacaccagagtaaaggagtgaggggccaaaatgagagacggatgtcggtattgatgataaagctggcactggctgatgaaggctccatcttcatccggacaataatctggtagacattattcaaagactccatcgacagtgtcttagctgtcgtggctcacgaccaagacacatggggattcctctttccctgctttgctggagacatccagaaccgtctacgttttcagaggacgctgatcaaacatgcctggcctgagtttgggggcgggaagtaaccttctatctgagagggacctagacgaggggctcgacgatcctgctctccaacacatatacctggagatgtagggtgttcagtccattttctactcgctgtagttgctttttaagccttgagctacaagcagatttccttccacttgcaggcacaacgagtcaggctagtacaaacgccaaactcgacgatctctagttctagtctctgggtgagtcggagtcgccctggagataagccaagtgaccttcccctcatcaagatgttcacgtccagccttggaagaatgatacgagtcagccgaacatccagacgagtagtcgacgattgtgagaatgcaaggtagccgctctctgctgcattttatatatccggaaagtttccctagacacttaacggcaaaaaactggccgattgaaccgattgcttccagctgtatggaataatttacaatctttatacttattgtttactagcctaagtaatagctactctagttatcagggctatgtgtttgcgtttgtatataagactaccgggtcatggccggatatcgatttctcactcgagccctgccacgctacatgttcaatttacgggtatattgccctgtatattgacgacagtactcgaagacggcctttacagtgatgactaggtccagctcagacctgcgatggagtgtgtgcagatgaagcagcgatctagcttggagcgactcgtgatgtcgatgttactgatcaacgggtcggtgttatcggcgagtaaggccagaatcgccatttcataatgacactaaagcactcagcacaacaaacaattaacaagcactattaagcctcggttggtgggcgaaagagcaggcgaaaccgaagccggcggtcctggaggtctttcgctccttcctattctggtgaatgagcgaccctcgccgcttcggcacattgtcccgggtagtgctggagagtaccaagcaagcatgtttgcaaccgcaatactggatacattagaacttcccatggactgagaaaaactggatggtgccttcacgctgtcacagcgcatcaacaaagcagacctcggattcgatttgcatctttctcaatacgcgcagtggtttattgccaatatacagatcacggcatctatacagaacagcacggctctcgctgtcttctcgacattggatccgtcttcaacagactagcatgtgaaggcggctttcgaccaaggaaatgcgaggttctcgaatgacttcatcgctgctgatttccatatatctgaccaacctcatcagagctttctcctgctgactctcagttacctcgatagcagcttattctagagagtaagtattatgcatggacccgaagctttgtctacggtttctggcaccgaccacgttcggtgccaatgctaaggattagctgggagcttgaaagttgactggtggtccttcagggcagtcaagcttctgagcagtcaactaactctatcaatcttggtgagctatttctggtatcagtcactattgtctgatatcgcggattccctccgcagttcaaggctagcgttccccgcaattcggcctgtgacccaaaaacaatatcgcccgttaaagaacctagtgccgtcccccgcatttcaagcagatcctcagccgagaatgacgcatataccgggtaaatttcagctagtgataacactacggcagtacattgaaatgatcctagtattctatagtgtcacctaaa

SEQ ID NO: 5878 - DNA, 3990 bp, Emericella nidulans
aagctcagtgaatcgactttctcgaccatcactcatcactgtcacaatactttgtctagcttcataactattctatcgtctctacgaacaggaagttcgaaactttatcaaaatgtctgcccctcaagttgttcagtccctctccagcgccagcggtccggctggaggatggtttaggacccagttggcgactttgaggaacagattcatcaacactggtatgcctttcttcatcttcccttttattatcctttccactcgttctggactttcttaacatcgaccagagaagcgacgccagcgagcagctctcatcgggacctcattcgccgcccaccgaccagtttggatcaccgctggaggcggtgcatacactacagccgttgcggtttatttaacgatgaaactcatgcggcgtatcccagtatagcttgatattcgcttatttctctgcgagaatttaccgaaactctacataaagacgtggttgagcctagatctagaggcggcacttgactgtctgtgcgatagacggcttcatttaccattgaacattctttccctttgttcgtacaagtgcactggttggactgggctggcaaggactggaaggatatgactcgataggaatgaactgggatggatgggatcatctgacagcggggcgtgacgttctttcactggcttttctttggaactttgggcctatgtcgacctgactgaatattgagtgaatatttaatggatactctcttttataagcaacgatggcccaactgtctcctctcacctctcctataaaggaggggcgcagaagtactcgtacaccgtccaatccagtcaggggcagctcttgacctcattccgtatcagatccgacaaggttgcacccaatcacactggcacggaggcaaggatccaggcatatatcagacgcattaatgcctcactaccgatcaaccccgtccaaagaccgaccgcatatttcaggccactcatatcgtcgcaggatgcgtcagcggctgcgcgttccggggataggtgcgtggcctgattctcgccttttctatttgtcacttgggaacatcccgcacctatgcccggctcagccggaaaatcgtgacagttaacatgacatctctattaagttgtcattgtggtgggcctttgtggacctcgccgtcaaagcttcagtgctccccatccttcaggaggagtctgggggtgggccttggattccccggatcggatccacgcgagctccctagtgggactaagaaaggtatcagcccacagtgcgcttagccgtgtttgtccaaagggataatgctcagagttctcggctccggaggtatcctgatgctattggatagattccatcacacagtgtgaaccccgcttctgcggtctcacccccggcttcttggcggctgaaccccgcattgggagcattcaagcagaccaggatacgcattaaatcagtgacttggtcggggatgtcacttagatgttgaactttgtaggcgtcttcagcttgaacaacaagtttccttgcacagaactagatatccggtcggtactcaaagcccagatttgagacaaggttcgaatgttccagcacagcggcccagatggattttcttgcggctattataggtaacaatcgacataacgcaacgattattggcttgctttgaatagtatctcgtaatatggggcgaacagccaagctccaggctgtctaggggtagtcgcacgcttcctcgttgaaccgtgacttaatggtcgttggcaaccagttatttcatggatatatattaacaggttatgtaaacagtgtgagacgagtgatgttcctcctatagacgttcagaggcaagtagtgtctatttctgatggtcgcttcagtcaagttcatgttgactgccaacattcatcatcaattgtgtttactggtttgtcaaatggtaagcaaatcaaggattagataaaacagttcttataggctatttactcgttgctttgactgatcaaattgataataatattcctcaaaagttgtgaatgaatcttaggaacgcgcagagcagttaagctacagctaatctaggaagaacaaacaatacgtactctgacgacgggacgtattataggacgatatgagtgcagttatattataactatgtagctgacaccagacagtttcaatattcatatctcaagtaagaatcccattatgacccgaacacgcccatcgtgatggcgcccattaattcggcgctcatagtctaggtggatttaatcagtgcgtctaaatcaggcttatgacgagtctcgaaatatggtagtgcttcagcagcgcagaaagagagtgaacggcacttgataggagcccggtccaactacggcgaggtgcgtggtgggagggaggcagacctggcggaggcagtcaaggcagagctgtactcgcggcagctgccaaggccaagggagacctgctggtaaggcagcgaacgaagaaccctaatcagagagttgttatcatactatcagcaactagtagatgaagagcacaacaacagttagaaagaatgtacccctacactacaaaggcgggcacaggatgattgtgcaactgaccggctccctcaggtaaaggtatatcctacatgagtcgaagtgaccgaaaccttatggagcgtatgttttctgaagggcttattaaggttctctgctgtacagccacgcttgcctggggtgttaacctgccagccgcgacggtggtcatcaagggaactcaattatacaacccacaagagggtaaattcgtcgatcttggcattattgatgtcttgcagatcttctgtcgtgctggtcgtcctcaattccaggatacaggtatcggcttcatttgtacaacacatgacaaattgaaccactacctgtctgcggtaacttcgcagcagccaattgaatcccgcctttcaggtcgattggtccataatttgaacgccaagctcctattgtgtgtaaatggaaggatctggaggatgcttcatgaatgttctggctttcagattaatagtgaaaattcttaaggaatagacgaatactagacggcgacattttggcttggtttgacctctgttccaataaacatggcaggcaccacggttcctctacggatttctgaccgcttccgtgttcgttaatgcgttggagagtcttgaaacttatatgaccagtcatgtaaagatagaagtacctagttgattagaagtactatagaggattcaaccatattattagtaaacattagcttctgaaccacagcattaccctgcctatagaaccataatcacacctccaagcaccatcgcacccagaagggaagacctcagcgcattcatagccgcagcgccagtgaactccggggccgcggggccagtatcagtattgctaggggtctcaggctgggttacaggctcagtctcctccgagacaccgccactagactcggggccctcggggctagtgtcagtatcggatggggtctcaggttcgggactagtttcgttttcatccgagcttccgcctgtgggtgctggggagacgcctgtttgcgaggttgtggggactagggttgtcgaactagaatcggttggctctggggctgggggttcggtgtgtcctgggccagtgggtggttcagtcgatgactctgtctttgttggctcaggctcgtcagtctcagtggttgaggggggcggggtctccgtttcggtctcgcaaggttctgaagtagatggaggaggggtgtcgctttcggtctcgcatggcgtggtgcttgatgggggtggagtctcagtctcagtctcacagggctccgaagtaggaggggtctctgtttcagtatcgcacggggtactagttggctctggcgtctcagagtcagtttcgcatggctccgtcgtcgaagatggagggggg

SEQ ID NO: 5879 - DNA, 8442 bp, Emericella nidulans
tgcaacatcgccactgggaacacgtcaagcgttcatttgtcctcgaagagttcgttgatgatccagtgacaggggtagacagttcatcccgagtcccgtcgctatcttgttccaggctccacggtggagctcctggggaagagacgctggtcagtgcggtgacagtcgctgttccagttacagtgtcccgagtatgtcaggcaaggagggtcgggctgctcagagtctagacgcgcaatctatacagagagacaggagataagtatggaaagatgaacttcgtccaataccgccgggtataacacccagtcgcagcctgagactcgcaacacacaaaggacgggacgggccttaacaaccatcattcccttcaaattggaaggggtaaatcacacctcggccggcgggcttggcgtcaatcttactcgattgggaactccagggtcatcttgggttagcccagttagtgggcctgttaagccgtctgcactagtaggagctgtcagactggctgaagtcccagttgaaatccaaccccgtgataaatatcctgcagaaattgaaggattagtatgagcggtctgttccttattcttgaagattgaacgatgctgaaaagctctgcgcgaaggctaccgatgggcgacctacgaagcgaggtccttaacaataccgagtatactcagagtacatattagtaaccaaaggcaaatactccttccgctgcttctccgttcccgaagtggacacgattaacggaagtctgatacgagtcgatgcgaagccagctatcattcacataaggcaccattcgggaggatgctgatctcaagctataagtgggatcctgcgggcccgcacgagcttaagtcgagtccgtctccacgacgggccccattccattatttgtgggttcctttggagcccgggacgacgcgttgcatcgctggtggcaggtagctgaccgcaattgtaagggccaatgttacaggaagctcttttccgggggtgattctcgtgaagagcatctttggccagagctagaggtctttgtctgagtctaagcctgggacagtgcccccagatagcgaggcgtattggcaacatgagtgcgggagaatgcctaggcgacgctgttcccaatgtaaggaagatgcattgtatatcccagcgactatctggacaggattcaacgcgcctttcgttacaagaaggggcgcagttctgggtactcgtcatagcctagactcttgccgcaggtcgacaggtctagagctcgtcactgggttccagggtaggacggattatgccccttaatatgacacaagaatagctaccggcaagtacaaataagacggttagagacttcaacgcctcgaaccctctagattgcaacgccgttcctacgttcaacgcctttcatactcatttcaacttcacccgcggtccgcttgccctcaacagtaatcagtccgcactctgcagcttcgactcgatagatatgatatcctcctcgctctcgacctcgataaccctgttgacttctgccgtatttcgcattaactcgaccgcgcccgcatacatcattcgctgattcgggttgcagttctcggggagatagtagagcaggacgtaaggaaccgcaaggcgaccagaaccctagaccagtcagtacacttgaggtgatagagaccacgcggcggagaccacgcggcgatatgaagatgcataccagagttaaggggtagctaagaaggatgaaccggggagacgactctgggagctcgtccgccaggtcttccatctttgtgtacacctcgccatcttctgctcggatttcctggcttttagcatcgatgatatctggagaggaatcagctatcgtcctcacaatatggccatatgtgaaaatggatatagtccagagggtgcgaggcatgacaccacatacagatgatcgcttgcggctctttcgcccgggatgttgtcaagcgaaacttgcgcagcttctctttggtctccggagagaaggcgtataacctttcagaggactaccttgaaccaaagcgcgggctcgcagtcagtgataaattcacaaaggcttattctcgcaagcagtgcggggcaccctcaccatgctgtcggacttccaggatagagcgaaaagatgtactccggtatgttcaatgtctgtcgtcaaatccctatcgaaacgtatgacgtgggctaagggcgacagatatggaacgaatatccagcgttcgtcgaggggttagataaattgcggacgcggagtcagtcacgtcgtgcaccacctcagcaccccactttgcggcgacaggctaacctccagcccgtttccctctcccacctgcgtgcggaattctccatctctcttctctccaacccttcttcctccatgttcgcccgattgactcaactcactcgacatcttcaccgaccaccattcactcgtccgcccgtatcttttgcttcctcttctcctttctcaccgtctagtgcgcacttgccaaaaatgacatcatccttcccgaacaacaaaacgatacacacggcagcgtgtctaatcattggcgatgaagtactcggtgggaaggtaattgggccacaaaacaatactcttggaatacagagcagggcagaagctaatcggacagactgtcgacacaaactctgccttcttcgccagatactgcttctcgctcggaatccagctcaagcgcattgaagtcatcgctgacgaagaagaagagatcatcgaggccgttcgccgcatgagcaaaaactacgactttgtcgtgacaagcggcggcattgtgaccaacgtttgtacccttagcccctctacacccatgtatctaacgaaatggacgaacagtcacgacgacataacctactcctccatcgctagagccttcaacctcccgctaaagctgcatgaagccgccttcgagcgcatgaagaaactcaccaagccccatgccctcacccccgacttcagctgggacacgccctcccccgcgctcactgcacgcctccgcatggtcgagctccccttcgatgcctccctccccgccgagtcccaggccatcttcgtctcagatgacatgtggggttcccatcgccattgtcaacggcaatgttcatatcctccccggcgttccacggctcttcgagcgtctcctcgaacacctccggccatcgctgcttcctcgtcttgttaaccccgagggtaaggggatttaccgatatttgtttagcacaccgctgccagagagtgcagttgcgccgtacttgacggatctggcgacaaggacggcagccaggggcgtcaaggttgggagttacccgcggtggcagaagaagaggaacacggtcacgctggtggggacggataaggagtttttggactcactagttgccgaggtcgaggagaatgtgcaggggaagaaggtgtcggcggaggatgagttggattcggacactgaggagaagtaggtgggtctgttacatttacctagcaatattgcaatagaatgggataatagatctctgacaatgcggtatattttcccgcctcacctgattatctgggacgccattggtttggctgttgtgatattggatcttgaaggctttagcgatatctaaactgggatccagaacagagtcacccccggggtgaaaccgggagtgaaaagtatgcggccgatagctatttggagataacattcaatttaaacgagctcatcagcatcccagaggccaaggtgagcctggctcacggcgacgtgaggggcgcggaagcaggcaagattatgaagtgtgcaagaggcaaactcaagaaaacagcgtactgtaccagatcaaagtgcaattgaaaatgtacatacatacgaacagctcaaatctattggcgcgcctatcctcgcatatcaacgagatatgtatcatcagactaatctttcaagtaaaaaaaaaacatgggaataaatggtaaaacacagtagatcaaacagacaaccagagggggaatcgaatattcatggatggagaagatgacggcgtgatggatgggaaggtggaagcggacatcgtatggttcggtaggtataaaaaaagcgtcacaatccgcaaacccgtcgacgagcgttcattattccgttccgaggtggctgtcgctaaagtcggggtttcttctctatgtgaaatctttcctttcgtttctcaaacagcgtgcttgcatcctgtcgagcccagcgcctgccaattacataacaatacatttcccgcagcagccggcgctctcaccaggctcgcttacgtccattttgctgtcgggggcgcgggcgccgaatgcaccggatccagatgggttggacatctccttgttgtaccggcggatctcacgcacaaggtcgtaaaaagcgttttcgacattgatgcgcgatttcgggatgtttcgatgaacttgcagccgaactgtcgtgccaaggattcgccctctgaggttgattattagccaactgtgataacgaaatgacctgaagcgacgtattaaacccaccttgttcggataccactcgctccttgtcgagatcgcatttgttgccgacgacaatgatagggaagtagtccttgtccttaacgcggaggatttgttgttggaatgtcatgatttcttcaaaggattgacgcgatgtgatggagtagaccaggaggaagccttcgcccgttcgcatatattgttcgcgcatggcagagtattcttcctgtccggcggtatcgaggacatccaacagagcgacctcatcgtcaatgacacactgcttgcggtatgaatctattttggggatccttgatgagcgacagttcgatacgattgtgaagtgacgagctaaccttcaattgttgggtcatattcgtccacgaagtggctctggatcaattgaatcgtcaagcatgactttccaacaccaccaccaccgacgacgaccagcttgtactctcgtagaaactatttgagaccataacagtgagccacgattgctgtattttcccgacgctgattgcaagatgacgttggggtcggaaggaagaaaggaggcgagcagggggccaaggggagaaaggataagacaccctacctttgaagccattctggaggattctgttcaacgatctaccggtgtgggaaaagagtcaatggtgatccggatcgaagctattccaagtgacagcgggtcgagcgagctgctgagcacaattttcttttgcagaaagggtcgagagtcggggcccaacaggtcgggagtttcgcgcgagagcaggatgcgcctaagaggcaggccacagcaacggcgggtccagtgactaggccaagcttaaagaagccagacgggggttcgatgaagaggatcaggggggttcgtggaactctgtcacaggcggaattgagtgtgagccgggacgcgattcgcttggctgcctcgacttagcatgcaaggttttcgatccgcgacggctttctttcaaactcgacgagagcccgtcgttcgagaaagcgaatggaatgatatggatgaatcaggagatgtgagggagggagaggagggaggagcgagtggagaacgagacggggaggggaaaggggatgctgatgattaagagcacttgtaaggcgacggtcttgtttaatgggggccagcttatagaatagaactacggagtaattggccaaattatgaaccatctccagaacattcaaattatccatcatcgtccatgattaatcgatacggcctcttcgccccggtcgcgtcgactcgcgcagtcagcccgtagtacagggtcgattggtgtgtggcattaatgggataacaaatatggctgcagatcccacctgaaaaaaggggccttccatcaacctctcctctgattatcagcctcattcagccaatcatctcgccagcttctgcaaataaattaaactcaatgtgctttgattgcgacgacgcattctggcttcaatttcaccgggtctctactatttaaggatcgagggcggatggtcaatatcaggcgcacatgcatcctttgcagacagaggccaaatatgacgactcgtcgacacgggcaatcacactgccatttttggaggagactgcgttccatgggccattaatcttcttttctttccagaatcatctccattctttggcttgccgtggagacactccgaaacattaccctggacgggcgaggatctacggcgttttttttacaactgcagtgttggagagtaggagtcttcaaggagatcataagtgatcaccgctggaattggctctatttccacgaaaactgaaagtgacagatgtcgcagcggctcggtgctcatctccattagaacggctgttcgaaataaatacagtcgagcaccttgccgccaagctgcccagggctttccccacgcctccactctgttcagtcaaagattggctgatgccgacaacatatttagccacggcggcacatgtcatccttcaaatcgaccttgacgtcgttcaaaagtactctgtgcatgtcgctcggtactgagggtgatcttgcatctcatgcgtactcgtgaatacacccaaactttaagtacaaaactccgttcgaatacgacggttaccgaagaatagccctgtttttgacagtcccccggcgagtctcattggagcttcatcaagtttataggcgaagatcgaatgatacgcgtttgatatatgatatgtgacacctaggccatgactcgcttggctccactatatcactttttagaagtccgcatcaacctgttcgagctaccacataagcaggccgaattcaattcccgccagctacacttcattttcgttgttctcgggccggcgaatctacccggtcaagacgtacaacaattagcccagagtacggagtaaggatgccggccggccccagaagggccaataaaggcgatcctggcgccgttgtgcaaccattccaaaagtcttatttccatgccaatggcagggtctacgctggaaagtcttaaaagattgcctggcccggttacaagcgcttcgggcttgccaagtatccctggagaaatggtactgtatctcggtgtcagatctcgattgtgtaaccccagtttgttgcggattgtgacctatcttccaattcaacagctgaagtatacgccccgcgctgctgggttcgacggcagcttgtgctacgcaagacctgggagtcgggtccaggattttgcctggatgtctttgccgacgaactgcccccgagcgatccggtagtactgttcgggtggtaccaagggggattgggggatgaaggaggcctggggcctttgcagttcattcgttgggaaatgtcagccaccgtgaccatgatgcgagtgattctgccgactgggtgtgtaacattgctagtggaattcggaaaattccagggatcatatggatggcatggtatgctgcatgtagtgagttggctgactttgagtagatccgacgggtaaggatcttcttctggatactcgcgcgactgtagaaatgaacaatgcatatggatattttccaacaatcaccatctcgacctaaactcatctatctttttggcgttcaacaatgaagtcttgcaccgtacccgagctttaagagaccgattagcatcagacaaccacgttctgctaattctctctactttgtacgaatctacatgatgcctccagtcctatctctattctatttctaggttgtagccgtctctgagcagttgtctagtcccttaccatcatacccgttcgatgcctgtttttgggtacaacgacaccatattctaaatcaaatcagcatcccgctattcagagccagagagctacaatctcaccttcacccctctaggctcaatgaacaaccccctcgcctcagccacaagcacgccttctctttcctccacactcagcgtatcgccgtcaccaacctcctcaggaatgccatccccagcacctctctccctcatctcctcagcctcaaactcatttaaacacctcattctcccatacacccagacctttctctccttctccaccttctcaacgccaaccctccaaacataaacccgtcccggcaccgcaggcgcgcggaaatccagagtcagattcgcggtcattccaactccactggggaatatctcggctgcgagacgcgcaaacacatcgtcgaagagaatccctatcaagccaccgtggatgtaccctgcatgcccggtgaggtgggtggagaggtaggctgttgctgtaatctcagcagactctggtgatttggatggggccttggtgaaagagtgcttgaggaagtaaattgggtcgatcgg

SEQ ID NO: 5880 - DNA, 7626 bp, Emericella nidulans
  unsure (1)..(7626): unsure at all n locations
tctctcgaaaagcttctgagagcgcctccaactgcagagcaagtgtacagtgtacttactctcgctgatcagcgcactcattgggagctgcgcattgcggtcggacttacggagtattactgctgaaactgaaacgcaatagcgcatcccaaatcctcggttccaagagcctcttccgcgaataataacggtataaaactttaggacccatatagttgggaagacccggctatctttaagtaaggcgtaaaggatccgcgacggccttctgttcctcagccatccatggtcatggccttggcttttagctttgcgtgcaagtgcagtctcgttttcaaaaacaaatttattaaacttatatcattccgcaatacattactatatctagaatatgtagtacaatccaattttgagtctatgatctcgtatggtcatgtcttgaagcctatacccggcctatagccggtgagctccatcttcatgcttcacactccagtcttcactctgtagctagcccaccccactcttcagagcgggcacgatcaggagtaagcagattggtggaatacggatcccgagctttatcgcaaactcttgggagtggaagttggctgaagttggctgaagttggcagagtagcggtggctggaggtttacagctgtttaccccatcgaagcaaatggaagaggaaataccataccgtcctgattcgttctgattcgttctaatacgtcttgatccgtcttgaggaaagggaaagtacaatttgacggtatgattaccgtaccgaagtgcaggtgggatcagatcgatccatccatccaccaatgggtcctggtcctagtcctagtcctagcctggtcctggtcctggtcctacctatatctgttcgtagcttcagttgcaagaagtccaaggtctacctggcttgtacagtaaaaaacggagaacagagtcatcggcggttacagtagatggtcgattgacatgcatttagtacacttgcatttcgagaccctgaagaagggaatattaataagcatggcttgggctgcaagaacgagtttgtttcagtttgcaggacagaatttatcaaagtaccaaacaccgtactttgttttcgtccatttcttccaaaatccacgcatccatgtccgtgcactgtctgtgctcggtttagtgactaatgctacttccaccaccacacagcacaagacaggctattctgtaaagggggtagagagcatagggtcccatcgccaggaggggcctaacaaccaaatgcagagtactatacctgatttcaaatcccttagactgcatcgcaacgcaaccgatcgtcgaatcgccgagaaggatcagatcaaagatcgattttgcatcgcctcgatccgtattttatgtatgtaaagagagagtgagtgcggaggcggagtgcggagtcattcggccttcctcgggttgctacagtggcactggctgacaatttcatgtctctgcagtcgagtctggactgcaagacacctaagcgaggtggctgtgtatcatgatgagggacagggataaccctacggtacgagcccataccctgcatttgttacagagtacagaggattactggggtactggatgctaactattgtacgcttgcacggtcacccatgtcattgttgtttaccccgtatgctgctgcataattctggctgatgaccgccaagactactgtagctagagaaggccaggcttccctgcattggaagaccccgctacttctgctactgtactctgctattttataccgtctcccctctctgcttgacatctggataagcatagttctagagtctactcgtcctccctgagctgtctcgcattctgagatctaattttgtagctgtctcatctcagcgtggcgctccaggctggtgcagatgctgaccctgaccctgctcgtgcatgcacttatgtacgtatgcgtctgcagcaaacatgcatccctacaccgctggatggactggtgagatggatggccaggctgggccatttcatccgtctgattatagtgacgtctggaatattttggtggtatttgcagttatgtactatatactggctagagtaggaaactaggcaaagtaggcaaactacctagggccatagtcataatgagccctagtgctggaaattgacaatttgaagacaaaacgcctccctgatcaggtgctagctatagacagtcaagcaaatggcatcaacttttatatcgctattttcattccttcctccgcaattctgtaagtcttaatgcccaaccggcaaacatacagtgcatcaatgcacagtgattgcgttcccgtcactgtcaagcagcccagcctccttgacaaggtcgtagaatttcccgcgctgcttgatcagtgccgccggggaatcgaactccgcaacgcggcccttgtccaggacgacgatgcggtccgagtcaataattgtgttgatacggtgcgcgatcgtgataatcgtgcggtcttggaagatgctactacgcagggtgcgttgaagcagggcatccgtttcgacgtcgacggcggcctagtgttgttagttttctccagagcccaaaaaccggtgagcaatgccactcaccgttgcttcgtctagaacgaggatgttgctaggcgttaagagagctcgggcaagggagattagttggcgctggccttggctcaagttggatcctgttggtggttaattaagcgcgatgctagggatatactagctgcatgtgctgtacatacctccttcttgaatgtgcgcgtccagttgaccctgcatttgagatacatgctccttcagtcgggcgtgctctgcatacagtcaataccattaaaccactgattcaccgtcatgtgcaggcccacgtaccaagaacgctccacagttcggtatcgtcatgtacatggcgagggtccaggttgtcccgcaccgtgccttcgaacatggctgggtcctgggggatgatggcaagccgcccgcgtagatcacggagccctattgtcgaaatgtccagattgtcgatactgattccaccgttggtaggttcgattatgcggaaaagcgccagagtcagtgaactctttccagcacccgtacgcccaaccacgccaatcttctcacgaggcttgatgtcgaggttgacgtccttgagcacgaggtcgagtccttcgcggtagcgagtgctgtaattatggaacgataccgcaccctgcgcaggccatccggtgggcgggcggttcttgaaaatgacctcgggtgcttcgctcggaagactggcgtactcaaggacacgctcgacggacacgatgttagtctcaacttcgacggtctgtcggacaatccagttgagggactgggtaatctggagagcgtaggacatggccaagccgaccattcctgcggacaatttgctgccagtcgcaacagacacgatcgaaagcaatgcagacaccaaaatgatgaccgagccaataaactcaaggcgaacagcaagccaccggttggcactgatggaagggaaataagcacggaggttcgcatccatgcgccactcattttccaggctgaacctttcctcttgccggtaagcgcggatcgtagagattcctccaagtgactcctggaaatgggcatagatggggctgcgcgtgacgctgtcgaggcgttttaactcgcgcgatgtgcgaaggtagtatttttggtagctgaaatagatatatcccaatggaataaccgcaatcaggaacggaggggtagaattagcaataacaagcaaggtgaagattgccttggctgagtttccaaaaagcatgttaaatgtccgggcaagaacctcatcgatgcggtagatatcactattcacgttagagtaattcgatcaattcttgatagcgcgcttaccttgagaaacggttcaggactcgaccagacggtgtcgtctcaaaaaagcgcattggggaacggaagatggagaacgccatacgctcgtggagcttcctggacgcttcgatcgagcagaagatccaaaggataagattctggaggataaccaaaaaggacgacccaagtcccagggccaggtaaattccaataaacttgccggcgtttggtgctgactgcctctcgctcacttcagtccagtgcttaagccagtaactaccaccaacttgcgctgtttgcgcgccaaccagggtgacgaggtagaaggcaacggcaatcagattgctgttcttggcgtactctccatatacgctccacttcactttaccctgctgcgatgtttcctgggtctgcttgctcttcaagacattctcttcatcgcctagcttgcgccgaggaccttgccagcttacggtactcgcacgacgtaatgtgactgtgctggtcctgcgtggaccggcggccttgatcggagcaagagagccaatctgctgttcagcctcgtcagtatctgaaaagtcagagtcgggcccctcgattatggtagtagtctcggagctttcaaggctagcgagtccgccgctttcggcgcttgagtcttcatcacccgactcgttcagagttgtacggacgaggttggcgacttcacccttcatagccatcagttgctcatatgtacctttctctatcaaggtcttgtcgcgaagcaaaccgataaagtcagcctctttcagaacaggaatagcattcgtggctagaattcttgtcttgctgttgaggattccattccgtccaagtacgcggttaatcagatggcgaccaacgtgctggtcaactgctgacagaacgtcgtcgagaagataaatatcggcacgggcgtacacagctctggcaagagtcaatctggccttttgtccaccagatagtgagatacctctttctccaacctccgtctggtcaccatcaggcagatttttaaagtcgtccagcagagcgcatgcttccacggttagctcataaaactgaggatcccagcggtgaccgaagacgatgttttcccgtacgcttgcattcatgacccaagcggcttgcgcgacgtatgcgatgcgtccgcggacgacgacttcaccctcagtcttccacaagtcgccaagaagtgcctggaggagcgacgactttccggaaccaacacgtccgacaatgcaattaagctcccctttgcgacagctcaaatcgatattctccagcactgtatcatccttatatcgagcccaagagaaggacgctacacggattcggacagactcgactccaaggtgggatactgggtcttcatttttgactgcatcagttgaaagctcttcggcagcgaaataatcagtcaaccgcctgacagccacagaggcttcgattacgaaagtaataaccatcgaaagaatcgaaagcgggaaagtgaggaggttgaagagcgtcagagccggaaacacgatcgacgtggttagaggcgnatcttccgtcagaacaaacacggtgaacgttgagcaagaaaccaggaacggggtggactgccaggtgaagttcgcaacggactgcgtagctccgatcttgcgaagagtatttaattccaaatcattacggatatggctgagcttgttcataaatgcagtgttccaggcgtagagcttgatactcttgatattgttcagaatctcggtcatgagtcttgatctcgcatccttgttcttcatctggacaagttggagcttcttcatcatccgggctatgacgccattaagcggaatcatgaggatcatgacaccaataccagcaaacatgctgactccaactaactggtagagcgaaatcatacagagggtaatttggaatggcgcagaccaaagctgcgtaccaaattgggttagatcagacagccgctgctgatccacggccatgtggttaacaatatccccggtcgttttcgatgcgcgaccttcgctcgaaagtctcagggacttagcatagatcatggcagtgaggccggacttgacacgcataccggtatcgaatgcgcgctggaaatactggtgaaggaatgatgtttgagacacggagacaacaaacatagctagtgatatagcaactcctctaatgactggctgaggctcagtagtccggtatgaatcgatgaagttaatcagaagccgcaggagttgtggctggacaaaggccagaatatcgcttccgcacttgataattgctccgcggacataagggccaccatatgacttaaacaaagctgtccatagagacggcttgtctttctgcaattcatactcccaattctcctccaacgtagctccggtagcgcgcgtggtatcccttcggcgaaggttccacagatcatcctgagtgaggaagttcttgtacccaaatttcatcataggtgtcatccaactgaaggtaaggaccgagaacacatccgcatattcatatggacattcatcctcgtcgcccaaggcatcgtaagcactctgcttcttcggaaccaagtactccagtaagaactccaaaatcgcaagtcccagactgacattgaggcagacaaaggacggcaggcgatcatcgtaggtcttccgcgctacatgcgatcgcagcttcacagtataggcaatgatgaaaaagagccagtagaagagaacaacgccattcggataccggctgcgccaatgttcatagtactgaacggcaaatatgacacatagcgaggcgaaaacaaggacggtgctccagaatcggaagtcggcaaaccaactggcataaatctcaacttgaagggccgcctgtagggcagtggtgaacaacaaggcggacagaacaacctacgccggagacaacacatcagcaaataatacggcgcaatgatgagataatcccagagactaaccagcttagcgtagaaatgccaattctttgacaccggctggggaatgcgcttgttgagcaagaaccacagcgcaccacttcccaaaaccaacccgaacagagcaacaaccgagaccccgacgtccagaaaacagggcgtcagatcaaaccggagtctgctcaaagggccccagccttcgacatcgccgcaaaagggctgtagctgtgcgtattgttggaacgaggtcgacgacagggattctgggacgatcgccccgaggacggtctgggtgctgtcgtccagcatttttcccgggatgtgcaacccaacctcgatctcctccgccaaagcacacagaagaaggggttggagaaaacagccgatcaagagcgagagtcgcgaccacagagaaagataaaagtaaagttggagagccccaaccccagtcctgcgaaggacgaccggttgcagcctgcttactaaaagataggcgaacgtttgtcgcttacgattggtaatcggagttgtcggtcttaagtactctttacagtctacccagcaatcaccccataatcaacaaaaatgattctatagctatcttctgcaagtctatatccacggaatagcgagcgcaacgaatggtgaaatgcgcttcttaacgcaaaggagatggaatttcatcttcgcagtagtctgaccgctgcggaga

SEQ ID NO: 5881 - DNA, 3396 bp, Emericella nidulans
cgctggcgggtagggtcgaccgggcaccaggcagccgccaccgcatgctgaacggttacaatgtgggatcaggtcgagcgacggcgttggggggatatcgtctcatcggtaggatggtaaaaagagacagagctggatatactgtgtcgacaggggaaaccggttgcctgtggacggggtatagacggaggaaatgtccacaaagcgcgagaaatgtggtgctggcagccgtgggcggagagactcggtgccagtggaaccaacgtgattgtccaatagatatggaccggtcgagaacaacgagatgtggagctatgatttagaacagttttgccgactgaggatgatagtgatctgaaggacaaacagaaatcgatggaaagatgaataggaaaggtgagacgctgctgcaaagtgcgaaatgggattgtgtgcctcctggcaaggggtcgatcaggctccgtcttttgaatggtccagaagcaccgagaagcgctgaccatagcctagcctatctgggactagtgggctgtcatagattaaagcccgtagccagccactataagctgcgtctacactactccgggagtgtgtcctccgtctctgcgttgcacaatcacggaaatttattgttttttagactatttctgtactgattcaattctgagcggtatagaataaatcaccttcttcaacctccattatatgcattcagcgttatgaaagataccgctcaaagaactccgcaagctgctcgtacctacaaatgatcagcatcaactaacccacatcataccagagccaagcatacccacgaacatagttcttcagactctcttccttttcaaagtccgctctagctcccatccatccatgccacatctcgccatacgtctcaacaaagcctccaagacccttatcctcgataatccgcttatacgccgcgacctcatccgcaggctcatccttcgacgccagaatagcatgcgggatcgtcagcgtctgtgcatcagccttatccatccgactaccgagcgaataaacggttagcttataaacaagggaacaagtaaattgagaatggactcacccaggatgaacttgcaccgtctccgtaaagggtgtcccgtccccggacgatagcgccagcactgtacccccccaacaaagtccataagcgccccatttctgcacggacgggaaattgcccttgtaagtgtcgaccaagctggggaggctctttgcaacctcgacgaaagacgccttagtggtcacgaactccataagcgcagcggtcttctcatcagtgtcgggcggaacccactcatgcttcgctccatcgccgcggaagaaatcagggatcagcacaagggcgttgaggcgttttgcgagcatgtcggcgccctgggtggtttggggggagttgccgaagatgtcgtagattgctaggatagcgaactgggatgtcaaggagccggtgacgtctattttattaggtagtctggtcaaaggcaattttcgaaatgaaagaggaagggtaaatacaagtgctgaatccgagacctccaatcaccgatgaggttccatttggagtgtagccctcggagataacaggtgggatggtgcggcaggcttcgcaggtcattgttgctgctgtgcgactttgaaacaagacggtcaaagctgggtaaagaggctctcacacagatatgatctaggtgtaacactgtggtccatataaggtatccagtctggaaatagcggtgtattcagaagataatggatataccagtgggtctgaagacccaaatcatttcgaacttgcgtatatgcagaggggtcgcatacctgacgcaaacgatgaccgtgccgttagccgaatgtgactgagattcctgcgttctgtttatcatggacagcctgagtatgaactagatgcagttcagggtcacatcgactgaattcagattcgtacagacatcataagcatttgcactgcatctcccagccgaatacaatcacattgacaagaccaatcaactaatcacagactagccctactacaccttctcgcgaatctcagtcgtcgcacccttgtgctccgtctcgtcaatctgcttatgcacggcagcagcaacctcatctgctttctctctgccctcgaacactacgccattgttagtattaacatctaaaaaagcatcaacggaaaaacttactgaaagacaactcctcgagcgtacgtcccgatgtctctgggaagaagaagtatataaaaacgacttcaaacgccagccagcagcagtacacaatcagccatctccactcaatgcggtcaagtccaattggattgacataagtcgcaaagaaagtggctccacggccgtagaactggaaccacgagaggccgcgggatcgattgaagtacgggaagatctcgatgagatatgctttttagagttagcaaaggcgccttgccgagagaagtgaggggcatactgtaggttaaggcgttgtatcccaggttatatgcgggcgagtaaaggaagatgaaaaggatggttaaaacagcagcagctttggtctcggtggtcatggccctttccatcgagatggtccaggcaatgtacacgctgagcagggagcaggcggtggtgaggtacattgttctgcgtttgaaacgcggagctgtcaaggccagggttgttccgcatacaagaccccagcaggcgataccgacgttgatcttcgatttgacgactgagtccttgatgtccaccatatcgagcaagtcgctcagataatacctgaggagatcagcatctcgctaaagagtagttgggagaacctacgagatcagagtgtttccagaccactgtgtgaacagtccgaggaaagcagtgataaagaggcgacggcgcatacccgcggtccggaacagatctccccatgattgcttggattcttctcgctcgagtaggatagttctttcaatctgggcaatttctgctttcacaataacggagtcgcggtcgccctcggcgtggtacttggtgaggatctcgaccgcttcatcggtgcggtccttactgaccaggtaacgcggactctcggggaggaacctagcagcacatcaatcagcgtgactatatcaagtgatatgaagaaacatacataaccgtcacgatctgtaccatagcgggtgcaatctggagcaaagagggtactctccatgcccagtctgacggaatcgtaaccgtccccaaccctacagcggcggcggtgatttgaccgatgaagtaggacgaattgaacagcgacgtgaggatcggacgttcctttggataacccagctcacccaacatagaggaaccagcaacaatgcaaaaagggata

SEQ ID NO: 5882 - DNA, 8036 bp, Emericella nidulans
gctgtgcagcctgtctggacgtcattgggggtgtgctccctgcggggctcactgactcctcagggttgggcgccttgtcgtccgccatggtgagggaggggtatgagaagcgctgggtatgaccttggttctgctgtgaaatcgacagaggtagaaaagcgcgagtgatacacaggggtcgggagtctaaagtcttaagtgaaagtctccatatccccggactgtcacgatccaactgatcagcccgatacggcctggtgccgaggctcggaacgatcccgtcagataccgacaccgtccaactacacctgtgcagcaattccgagaatacatttccgcccctccaaaacacccagtcaaaagacaaggtcgggttaatgatccgatttgaagcttacactgaataccaactcagcttgagattaggtaaatcacatccactatcatcaacactcactcccgcaatctggctcaaaatgcattcatgcagagcaatgccatgaaaatctaaaacttcgagttgattatccattatcctgcatgaagaattttcttcttcttacgctaactgttatagtataccggcgcatccatccaatgaagccatattctaggaaccaaccgacctatcgctgtcccgcacgttcgtgagcactgacccggttctcaggttcttcactgcgaaagtccatgaacgcggcttaccccttggcgccattatgcgcctcagtgcggatttcagtgctcagatgtcgaattcctcagttatttcttcgatcgttgacaagttgctcatagcgcccatattgagggaagactcgtatcccgcaagatgcgaaatgcttctcactcgccgacggtggaaagcgcgatatgagcactgcgagaaataaggtggtggagcgggagggcaaggaggacgtaacccgaggttcttgacgaccttcacgtctgacacaggtgtctcccacaaatcccagacgcttgggggtgtggtatctggatcgttacactcggcattgaggctaacccaggttcgttgctgcagcttgcggtcgcagtggtgacaagccctgtactggcaacgaccaggacgagagtgcacatccgcgctaagtcggctttggtgtgtttcgaactgatgaaactcgtactgctgttcagctccgtggctggggtcgtaacagcttccagacatagatagagtcctttccatctcgcacaactccaaaacctccagcttctgttgccacaatttgtctctctgctcgtcggtgtattcgccctcgagaattgcgtccgttatccattcgctcagcaggaaaccgttacggtctgttgacgctgaatagtcggttgtgtcctcagtgcagaggtagaaccatctcaggaagggtcttctgccacaagtgttgcaggtttcgtgttgatcgatcctccactgacggattgcagtactgtgagagcagctatcatggcggctttgttgccgtgggtatggagctaccacaggagctgtggcgtatggctggtgattggaattgcctggctcctgggattcgttcgttgcctcaacacaatcttcagcagtgtcgactgattccacgtgttggaaagacgccatatctgggtctgggtctgtgtctggggacacgccaatcaagactgggtaagagcccacctcttcgccatccatgatggctggattggaattgcagacataaaaagaagtccagtgttatgaacttaacagcataaagagctataaggtgaatccttctctcggcgcaaccctctgggtgatgttccagtgcaacctcatacgaggattgaatagaatacatagtgctcattaaggtcttttcacatctattagagcctctaaaatgctctttttgtgcaaagaactgttactttcatttctgtataaagtatagattctagacctgtttgaccagacaatatatatttatgcctgaggcatcaatggtaaataaaggcgcaagcgcaaagatattaatcagaaatcaaacaaaagatacccagaacccatccattgtccttctactgattaatcatacagtgtggcaattctcagattgtcattgtcttagacaccatgatattgctgcggagtccgctacggcagtttgggggtcggccacttccgatgccgctggcctaaccgcgatataaatcgagcagctgccggcctcgtggcgcccactcaatccccctccactcccagagtccagccatcagctccagaccacattcctgactctccggagctgttttccaaggagtttttgcatcttctttgttgaaaacgcgtgtcgagctataacaatcgcggacaagcgccctgagtgaccagaaccaccaattgactccgcatcgcaacctcggtaagctccaggagtcccgaatcgatctggtgttgtccagcctctccataaacaaacaccacttcccctatcctatattattattcgcccaacgatccccaaccccatattttccgtcttcgtccctgacccgccacgtctcatcgctccatcttctttcccacatcgtctgtcttcgcgtttcctgttcattgcttttccttgagctcaccgcgttctcgatcgctgcaggtctcgtcttatcgctcctccaccatcgcaaccatgtccgtcaagtttaaagacgtgcaaaatgcagctaccgctgcggcctcggcggccgacacatctatccgggcggacacaaaagagctggcgcacaaggtcggcgagcgcctgactggaggcaatccccagactggttacctagccgtacgttccctttgtgaagactgggaatttggtgatcgtacctgactgattatctcgcgcacagctgtacctacgacagcttcagtccaacccgctgcgcacgaagatgctcacctccggtgtgctctcttctgcgcaggagttcctcgcctcttacctcgccaacgatgtagcaagcatgggcacctactcagctctcgtgtccccaagaagcttctttaccggatggtcattagtgcccctctgggcccacgttctggtcgggcattccttcagaagggtctttcgcgggtcgcaccagcttgaaggccaaggtttttcagattctcgccagcaatctgattgtatgcccttcgctccacgagtatcttatgtctgtgccagaacgctgaccggagttcctaggtgtctcctatccaaaatgtggtctatttgacctgcatggccatcatcgctggcgctcgtactctccaccaggtccgcgcaactatcaaggccggcttcttccctgtcatgaaggttagctggattacttcaccgctggcgttggccttcgcccagaaattcctccctgagcatacctgggtgccattcttcaacattgttgggttcttcatcggaacctacgtcaacactcacaccaagagaaagcgccttgaagcgctgcggaaggtaagcctttctgagcatctgtccttattctcctccgctgactcctcgcagcgttacgattcccgccgcggcggccccggcagcgagtacgagaagggccctggacccgactaccggtaaaggatgtaatttcctcccggacaaatgatgacagtcgagcacatatcgcgaaccgcatgatagaggcatataactctttcatcgatcgttcgacaccagattgtatactcctacctttccgatcatatttaccctctcgcttcctttgtcctctgttcaagtacggcggactggatcactctatactttataccgtctgttagacgaagatatgtttaagcttacgatgaatggttgttattatttttgtttcttacgcccaatctacatacttattacatagtttgaatttatgacgccgctcggtgcatctttatttctttagaccaaaatggtccgtgctatcccatttgcatggccgacaaccatgcagtaagtgcaacaccctgcttgttcagtcgtcgacggaatttagttgcttaagtgtactttgtctacctacttaggacggatgacagggagagattgcatgtgacgatgtggcataccctcctgaaaatccacgattctcttgattactggctcccgtcaattctgtgattgcacccttggcacactggacctcattcctccatagctccctcatcccccctcttcttcctaacccaagcaacgaagtcatccagcgttccaggccaagccccgtcctcactccaccacccaaaagcctcgtcctcgtgggttttgcgcataaaaacttcgacctgttgccacaaatccttgttgacgggctttttgccgcgttcttcaaggaactcaacccaccagtccaaccagggagttgtcgtcgtgttccaggcaatcccgccctttggcgtcgtgaagaaaagattccactgttcaacggcgatttcgaattgcaggttgcgctggccctgcactaggcagaggggaaatgtgtagcggtaaactcggcggaagaggtcgggttccgatgggatgcgtgtacggaggtttgccgcatgggcggccattttggcgatggagtcgcatctgatattgttagattggcttcttcctgagtgctgcgagtactggtccttactggacggatctccagccgtttaggaagccttcgcgggtaaattcacccatggacggtgattggagaagctcagcaatggcgagacaagtaacctcatctagctcgacctcaatatcccctaggtagcgcatggcgccttcaatgccaatagtatctggattttcttccggtgaatctgtatgcaagttagcttggtcctctactcatggtggtcgtttaaggatatacctcggtactgatcaaagatctggttgatgcggtcgtcgagccgcctccgcccccagaactttgaaaatacctgaaacttactatcagcatatgcataccacgaaactcttttagcagaaacgtgaagccatagagatacaagacccagtccgccagtgcatcattaccagcgggcaagcccggtattagcttttggaagattgatattcgaagcactgcttcgcgcacaccagcagttgcacaaggctagatggaaatagcctcccaccctaattcagaccaggacgaaaggagaataccaagactaggaatgcgcgaagacctagcataggttaccatccaaacacggtaaaccacggtgtagcttccaaacgatggccgctcatagcctgggttatgtaggcataggatcgcgtaatgcaacaaagtgtttgccttgttaggaggttgaagggtacaaggccacgcaattcctgatcttagcttacgcggaagatcaagcccatagacgccggtgcaatgcggtttttaaatctacgcaaagacgcccaaatgctggtgtggaagctgcatttcctgtcctggctgcgtgatggagggaagagtgtagaacatagcccagaagcaagaatatagatggccgacttacgcatcgatagcctcttcagtgttccatcggctttgcctcagaaactgttcgccaatatgtcagtatatttgccatcacgtgatgtataacgtttaggtgttggtgtttagggtcatatctagagaagggggatgaaataaacgactaattccagaaattacctttgcagctgttgtattattggcctgtgtgaagctcacaaactgagttatttgctgcttctgggcggcagtgtatggcggcatggcggggtgaacaggcgaggggtagagacaatcttctaagtaggctgacgacaactgacgatgacaggcagaggtgatgtactccccccagacgtttcgtaaatgttatatgtgagtaggactgcttggaaaaagctaagagctacttaagaaaccaggtcatgccttggactcactcgaagattcacgcactgcgccagctgctgactgatccaggcacgtgctattcagggctccttcctattaattagtgccctagcaatctagcaactggagagcttttttctttagagttagagtacttctagcaaccaggcttcattactacatcagtcagtgcaaaaaaaattacttctctctaaaagaatctggtacgtgctctgcctcccagctgaccgttcagagtaaacagcggtggatcggcgactagcgggagttcttggcgctggaaaaatagcaaaaaaagtttccagatcgtcgagactggtacactccagttttccagctttagtcttgaacccagacggacgtttacagatggctcccggacggacgacaaaaaggagaagggtgagcccaccggatgaagaagagaacgtttccaatcgcaagggcgacttttattcccacgccgccgaatgggacctcgaacaagactacgagcagcggccgcgcaagctgaacaagaaggagaaggaaaggaccaggcttccgattaagactgcggaaggttttcagaatgtcgaagcatccgaatctgagcccgaagacgatgacagtttcctggcgactgacgacgatgacatggacgaggacggcgacgcggaggtagacgaaacagaggaaagcgaggaagaggcgccgaagatcccattgaagcagcagattatacaagcgaaggaggaaatcgctcgaacggcaacgctgattaacgaagaccccgaagagcatatttcatcgttcaagtcgctggctgagatggtagacggcggatcacacgttgcggtcaagaaactggctcttgcagcacaggcagcgatctacaaggatgtcatcccgggataccgaatccgtccgctgagcgaagaggaagcgtccgcgaaagtctcgaaagacgtgcgcaaattgcggaattacgaacagtctctgctgtcaggctacaaacattacattcagaagctcttggcttttacgaagccttcaaaagaaagggcaggtactgataacgggatgaagactgtcgcgatcaattgtgcctgcaacctgattctatccgtaccgcatttcaatttccgcgccgagttactgaggatcctcgtcaatcagttggccaggaagcgcgttgatgatgacttcgtcaagtgccgggataccctccaggaagtgttcgctcgggacgacgacggaattgtttctcttgaggccgtccgccttctttcgaaaatgatgaaagccagggactttaaaatccacggcagcgtcctggatacattccttcacctccgactgctccgcgaattctcttcaaagggttcaagagaccgagtagaccgcgacaatgaggaagaaacttctggtggcaagaaaatgaaacaaaagaaagaatggcgcaccaagcgaaaccgcaagctcgaaaaggagctctcaggccgtgaaaaaagacatgaaagaagctgacgcgctcgtctcgcacgaggcccgcgacaaaaaccaagctgagactctcaagctcgtctttggcatctacttccgcatcctgaaactccgcgtcccgaatctcatgggtcctgttctcgaaggtctcgccaagtacgcccacatgatcaaccaggacttcttcggagatctcctggaagccctcaaggatctcatcggacatgccgaggacgacgagctcaacgaggtcgacgataacgaagatgatgaacacatcaactccgcctcttcgacaactcgcgactccacccgcgaatccctcctctgcaccgttacagccttcgctcttttggaaggccaagacgccagcaaagccgccgcagctttgcacctcgacctcagcttcttcattaaacacctctaccgctccctgtacactctctccacaaatcccgacgtcgaattcaaccccaatgcctctaacgccctccgcctccctgacccttcttcctcgcaacaacagcaacagaacgcgcaagaccgcaagaaaaaagtaaatttccaaacgcccatcgtcctcctcctccgctgcctcaatgcct

SEQ ID NO: 5883 - DNA, 7033 bp, Emericella nidulans
atgagttgacgccgatcagggagcggagtgccctaaggagtctggatagtgtgaccgagtaaggtctatactttaatttcacaagtagatatcattcgatatatagttgttgaatcacatgacttgggtgtttctccgcactactccaccgtctctcttgatatccaactcccacgcgatctcatttctagttgtcgctatagacaacacactaggctcgcatccattctctctttacatataagataggcaggaactaaaatgacaacccttcctaatgtgtggcacctccggcgcgtggcggatacggccgcaaaagcctgcctgatctgctacaaaccatccagcagtgttttaatcacgcccaacaacaaagtatacacatgcacctttcatataaatctcttctattctgtctaaggggatttatggtctaacacaatctcaggactacttctatgtttgcccggtgcacctcaaggaccggcatttctgctcgcccattgttgatgccgaggaagaggcagcgaagaaaaaggccgaggccatggcaagggagatcgaaaaggtaaagaaggagtatgaggaaaagcagcaacgaaagaaggagaaggagaaggagaaggaaaagaatgacgatcctaaggacgacaaggacaaagacaaggaagactctaaaaaggcagacgataagaaggaagagaaggagcgggatgataaggttcgttcgtcttattctctaatttggctttttttttttttgctgacagctggtagattgacgctatcaaaaagcaaggtacatctacgacagatgactcgccgcggatcttcgctttgcataagtatggacttttttctatattgtcaaccctagtgtggcagtccaagtgggtataatctgacaggcatcgcttaggaacttctaccaaatgcgcatcgacagaatgcgtaacatagaagccgccaagcgcaaccgtcaacggcttcaggacccctctttcttcccgtctgttccgtcgggtggtctgtgattgcaagtaaataagcccacctctaacgaagcgggaaggaaacgtggcggggcgtcacaacgctaggcgtccgcacaacgcgagtgctgctcggtctacgcgcgctcgagatgacccgagcgaccttcaagcgtgggtgtttgatagaaggggaatgatcccaccaaactttggattaggacttgttatgttctaagatttgcgcaagaaacagggttcagtctggtatgtgtaacatgccgattttcgaagggtcctacctccattcgtgaccggcatgcatgggcacgatatgatgacatggtgtggtgcgatatgatgcgcgtacgtgagcgttgtgcaggcaagggcaacatcagcgttcgtctgcaggcgttgcgtccccgctcagacggcttaggcactgattgcttgctgactgctgtcagcgtcagcgcaggttcgcgggctgtctcatgctagacttactcgggacatataaggcgtccgaaggcagcgaaatctggggaagctagtcgagattgcaaaaacacgtcccccgaagatggagcttaaattggcgcattaatccgaagcactgtctgcgattacagagcaagctagtcgacattcatcgacttcagatcaagtcggtcttccccggtcatgccaggtcatgccaggtcaaggtgtcacgtccgtagacagtcagcactaacatccctcggctctaacaattgtatctaagaccacaagaccgcctgctcctctcgcatcctcacgtcatacacaccacgtcgcgcaacggcagcgcatgcgcatgcgccggcgcatctatcagcactaactctagtgtagtgcagtacttactaggtaccctgcagtctacataggaagctgccgccagcgctcgctcaatgttgcccgaaacggttccaccggcgaagcagataagcgctagtcttaggtgggcaaacgcacgcccacgctcaacggcgacgattggattttgcattgtctgatattctcattttgtactattgttctccgtcttccgccttgtgttgcaagccatttaacgcatacggttctggtcctggtcctaaccctcaccctgaccctcgcccaaatcctggccacagaccgggtcgttcctacatcgtgtcagccctagtgggatgggtctgaaactatctttacatcggcggttcgtttctctagcggacagttgctgccatggactaaagcatccgtcaattccattccgggaatagggcaacggggcaatggggcaatgccacttgcattagatagcccgatacatcccttacttacctgcatacgagaatgagacaaactcctacgaattacgcccatcttacgcacttcgtcacttccactttagtttcgagggtagccagcagatttgacccgcctgaacaaccacgggtatccaagggtagctctggagataaacacgtccagaaagccaactacgcaagtcgacaagtcttttatagttcattagaagtataatcatcaatggcacccttggttagagggatgattaccgcgaagacaatatccaggtagcgtgcctgttgaagtcctgttctgttcaactttgttagtacgttacactgtctgtcgaaatggttagctaccctctcttcctattacccttcctagtaccctttctctagtacactaggaaataaagtgtcacggtcagtctagtcaaggtagacagacctcgctgatcttcgcaaggaaagatacgactttgcactcagaccaaagcacgttcaacccgtgctggcccccttcaaagtcggcatcagcttgttccattagagttttcaagtgggagacgcagggcggcctttactgcatctagattctgggttacagtaagaaatcataatcattatcttgagtcctgccagcctactcaggagctcgtcgccataggtagcatagtagcagaaccgccacttaaaaagaacgctcactgcaaagttcgaaattgacatcgaagcatgaatgagacataacacctgtcttgtccatcccgtatcatgccgtgtacaacccttactttgccactttttcagggttcttcgatcattgcactggtagagctcccaagggttgtagtgcatatggcactagaatctggggccccctagtaaaggacacttatacatatctcgcccgattccgtctctaatgttcatatatgtccgtatatatgcatgcaagcacatcaagcccggtacagcaagcatattaggaacactttcgatttagccggacatgactgtcgacccgtagcacctgaacgctgcactataacaaggcaaccattttccaggtcaaaggttgctaccctactgcctatctaccctgcgctgtactgcagggacagggataagggccgagccggccggtcttaaacctggaaactcagagtcggtactatgggctactactgaccagcaattgaggcagtgctaggctgcatcaattcgactccgaccagctttgggcgtccccgattgtagcttaatagggaggctgacgacgacatactgaaactaggcatccatctaatcgatccgccggggccctctatccggtcgtcagtgccgccttgccagatgtctacgtaccgtcaatgccggtgaagaacgttctggctgcagagcagtggacaccggagtgacctgtatctctactgcgagtggaaccatccgttcatgattacactagagtactgtaagtgaaatgaacaggacgaaaattggttaagacgggagaaataaagtccaagatgccttgagcagccatagttggccatccggctcgtgtctgattaggtcgataacctaattctctggcctcaagagtgccagaatgataactttcgtaccctcctcattttttgctctttttggggctggaagtatagcccgcgctcgtatatgcaactggagattccaagaacaagaatccagaatgccaagcaccatttaagtttgatatgcgtgtattgcttgcattcagtccctgcgcaacaaggtctcagaatggagctgaggaatgggacactgtgcggagtacgtagacgtagtcgatgtaactcgatattcttagagtggcggcattgggaaccggctgccagagtcaaatatttgataataatcgactatcagctgcagcccagattgccacgagacgagtccgtgtactgcgttttgaaaattaccgccgaacccaagctccagaaacaagggagaatgtcagtcgtgagcgttgagtggtcgccgccagagggcgttgcgtaagagcagttggcacagcccccttcccggcgctagtgatccagcctagcggggcccttgcaaggtggagtgtgccgctggaatgttcttccacgccgaccgcccatgctgcagatccccgaaatgccttctgttcctgagcgtccgagtttcaacctcgtcttgcaaggacaggcggcaggacacgcgcacgattggttaatctggcttagtaatggcgggtccagcctcgtgggatagatgtggggttctggccctggttttaggttcctcaggcttcaaccttcaaaaactgcagaggtctggcaactaagcatgggggttccatgccggctcgtctatctaggggctggatgctcggtttgcgtaacaggtgaatatttctatctcggcggctacctgtgctattggagcaagcgttgcgtgcatccgatcctttacgccgacaaggaatctgaatgagattatgagacgggcgatctggcggttggatctgcgacttctgaaacagcagcgaattgacgccaatcaacccttaaatagagtttcaacgtttaggtgtcttggctgtgcttgcacatactctgtaccgttctgcgcacgtaagggtccatgactccacgattccataatccgtaccgtcccagcggtctgccttttcttagttcctggcccctatctccctccccccgctctggagattgagtggcggtgtcctcatttcgtgaaatgaaatcgaagatcgcgaaagccacgtgacgttctggttgcattcgctcggatatcagacgcattcgctgccaggccgaaccactccagctatgcaaagagcaaacctttttccgcggacggatcattacgtaggccgcacccgccgcagactgttgatttttttttgtcatggccgcgctcagactgcaatgaagtcgatttatgacgttatggatcaaaggctgcctttcgcggtatccctgataacaagatttgtgttactttctcctcgtatttatagtgacagctaatgatcaaagctgtacaagacgtacctttcactttcaggcttgacaccagcggcacctataataggtctcatattcggtggcaagcggataccagaaggtaaaccggggccccgtcggatggtgactggctccgagatgtccactcttgccctcgcaaggccaattgcagggacaacccagtcgccgcagctacattgcattccctgccacgcaaactttccaatgttggatccgcatgaggaattgggacatgtcaaccggcctgacaaaggtgcatccccaggggtgtcagggaaaagactaggtcgcatccatgttagcggactcatgaatatgtgtgcgcactcagagattattgcgccctttacatccccatgggatccatgtggaaacaacaaatggtgcgatcgccagctttcgcctatttatagtgagtaaaatcgctgttttcagaaattagaagaccgcacctgcatttgcggcattttatctccgttgctggacccgtggtagctacattctggtgcgactgttcgtcttcgaaataaacggagtccatctcgggagcacgccagcaggcaacgctctcttcaacctctaggcgataaagccaccggctgtacagagggtgccaagtgacatcatcagggcatcccatttggtagtaaacattgaactgctccatgaaccccgggttgggttcacatagcggtcgggattccctaagaagagcaagagcggactgcggtgtgagcgcattccgttgccgacgcaaaaggtatgcaatgcagacagttgcggagcgggatttccccattgcgctggatgctgttagtggcctacaatgaagcaaaggcattgtagggacgacacgtggtgtctaagatgacactgaactagatgagacgtaaactaaccaatgaactagcacgccgccacctgcatctaagccagactggatgaacttgatggctgacggaaaatgctcaagtagattctcatcatctaagtcatcgacctcgatgcggtgatgctggtagccagcgaacaaatcatccttcggccgtaatcggatcactgaaaggacatgggtgatgttggcgccgctcatggcaaccttattcttcagggcgaatacgctaagggatttgcgttagcagccattttcaaatccctatgggcttgcttcctagtaccaaccctccgatgtagatgttatagccgggaaccttgttcatagccatggtgtttttattgcatacagcgaaggttcgctgtaaatgtcctgaatagcactaacaagagagaaagaccaggtttatattgcaataatgtgagaacgtagagagtacgcctttgcctgactcacactctgactttggggatattggagttgatattcagcggccccgccaagactttaagagaaaatgattggcgctcaagtcggccaaggattaccaaatcgagagagttagggtccagggtaaggttagggctagtcgcgtgaccgtaccaataccccgcactttcgactttggcgtcgttggctggtttcaagcaagtctcagctcttgccgccaaccacggatggcccaaggctcacgggcattccgatggctgcacatgttctccagatttcaggccccataga

SEQ ID NO: 5884 - DNA, 12433 bp, Emericella nidulans
tctactccgtagcccttagaccatgtaacctgaaacccattaggtctctgttagcactaatacggaaactatgcattgtccaagttaattgttctctctgttgcctatgcatgtcttactacctaacagacccacttatcagcacctaactagatggccttccctggccttaactgcttatgaacttaacgccgctcatttggagatggtgggcccagggccgggccgtgggagaaacttccgcgctttgttagcccgtcctcactactctataaatgagtgaattcctaatagtcctgatagtcttccttaatcctaatacaccatatttatcctcatctacaggcccctctgtacaagatagcctccaatggacacatcaaacataaaaccatactaccttcctgcaaatgcagtctggcttggttagtacctgtgtaaaaaagccccctatacggagagactgcctaacacgttctacaaagttaccggctgctcgtcagggatcagccaatccctggtgcaactaatcgcgaaatcttctaatctgatcattgcgactgctcgtaaccctggttctttgtcttcaattctagatggttccagtgtccttaagctagcactggatgtcacgtcaattccatcaattgaggccgctctaaaagagaccctaacaaagtttggccgtattgacgtccttgtcaataatgcagggcatactcttgtgggcgatactgaaatagcacaggacaaagagtcatgtcagttgtttgacactaacttctggggcatggttaatattaccaagcatgtcctaggaattatgaggggaaaaaaccccaatagaggaggtgtgatcctgaatgttaggtctatgggcggatttattggtatccctggcggctctttttaccatgtgagcaagtttgccgtagagggatggactgaagccgtcgcgaaggagttgcctactgagtggaataataagtttattctatggctattattgataatgtggctaaccaaaaaaagaaaataaataaataaataaataaataaatacttatagtccatctatgcaatattgagcctggtggtgtcaaaaccaattatacaaccaccttgctgaagactatagcaaaaggggacacccagcctatgctgacctgaactatcccaccaacactctgctggggtatataggtaaggcagaaaactgggcttcctgggcagaactaagcacgattactgcagctatatattgacttgttagttgcaggggatgtattcctatttgtgttctactaggtgctgatgcctatagtacaattactatggacctggaaagtatcaagaaggatctagaggagttgaaagatatcagtcttggtaggtgatgcaaagcagctggactctattggtttcctacagaaggcttagggttgggtctgaggaagaggtgttacttaggcctttagaaaaggtatatccttatttctagctttataaaaggagaatttggagctaccctgctctttacaacctataagagacaagatacttaaaatagaaatagaagtaacagtatatactgagtagtagcaagttaagcttgatagagagcaggtaattgctcccacacgcagttccctgctaataaagctcctatactgccttaggttacctacattaaccacctgcagtcagaagccaggtatcagaggattataagggattacaatagcactgtgttgtagtttgtggaatactgtgttagtttatagtagctttgtctgtacttagcaggccagctgaggccagattatttataatatatgcaagagtacagataatataagtactctttaactactttcaagattatatatgcctttttctgtaaacctgacctggattatatatttatagtgtcaggtcttgcaaggctcctagcaaccctctgggcatctaaataccttggtatttgtgactatctctagtcaaatacccttcctactatagatctttggcccgccagcaaagttgatgagttcttgtcaagtttgcatattctctcatgcaatttacaggaactgaacttggtatcctgttcttagatatagatttccttattccaataaacaggggcggcattcttacctactatatcctccctttactggccttgcctcaagactgttgtcctaaacaggattcctgtaaatctcttatctggcatgatttcctgcccctctttctatacagaagatgtcctgcaatctaacagatattccttacaggtaaatagctatttaactacaaacttgaaagtggcgacgggattttcaagagcccctggctgaacggcggatacagtatctcctgcgagagaatgaacaccgagcacttccaccggctgttcatttcactgaactaggccgcgcggtggatgcctgtcctgcaaacaatccccttcagcctccgcggcttgccatacagtacgggcagtagatacaatataagacctgcttctgtcagagctaaaagtgttaagttacagcacaaacatgagttgtctattcaagaatcatcgctgtacaatcccatgtaacaactcctggtcatgaacaactacaaggcctgtttccctctgtatcaatgttgcttctaacttgtttagtacatacgaccacagggtgtggaaaacagggcttcccgtccgctcagccgtacttaagccacacgttcaacgcggatgagcgagcaacgagccctgggtgtgttgctgcttttaggggtgagagacactaagcctagggtgagtgcaggtgagatgggtgagaacaaggtgagaatatcacccacccgagagtgtggggagcgagaagggtgagaactaaaatctaggccactactataatccctccaggcttaacattgtcgtggaatatgctcagaggagaaagggcaggaggaaactgcatcaactacaccaacgtggcctactaaggatcggatgccatatgacgattgacacctatcttgttgacgatagattccttcatttcttcccttgtgtgtattcctctcttccccactatatatatacagagggtaggaaccttctagaaacaggcgatgtccggtcaatctaccagagatcacgtggcctcatatttccgtatcaaacataaatagcaagggctttttgacttttatccgatgctttttgaactgaaacttaaatccttttaccttccatcttgtatacattttccctatcctggtggtttggttttattatttaacgtcactcggcggatcacggggcccacgtgatctgcggcctcccagggggcatctggacgtgctacctaaacagaactgcctaggaactagctagatacaggtttgaagcagcaactatggacaatatatgttggaaatgagcggaagaagcacccggcgctgccctggccaggtcttcgagggcagatgcccgtttcgactacctatagattggggggaggggccggaccctttatccaggtagatgtgtggactgtcgcactatcaagcgctccggcgggcccagttcgggcatatatccttgaagaaggatgattcttgcacgatgcggctgaattcttcagccccggcagctgtacttaagagccagtctattgtttttgacgggccgtcccttatacatctccatctatctttccagcgctttctggtgtatgggcagaagaagaagtgcactggggtcttggtcctaccacaagagcagctctccaggtagtctgagtggttgaagcgttggtggtatgccgtaaagtctccgtggcctgtacgggcggcgacgagtcggccaagtacccaacggggaagcttgtgctcgcgggtgcggctttcctttgtatggaatctgatatccagggtcttgtaggcttggggtgccttactagcatatgctgtatatgtccctgtacgaagccactgttttgtctcccgttgtaggtatgcaggggatggggggatgttagggctgtatatagaggacccaacgttcgcaagcttgtctgccagctcgttcccagcaatcccagaatggcctgggatccagcagacttgaaggggcttccatggcctggttaggattgagggagcttccaaccactgggtagcaagctggccaaacgggttggggcgggttttcaggcctagctgatccgcccacgcgggttttggggtgggttaccttcacagtaaaccgcccatgggtttagcaaataattctaacccaacctaaataacccaaaataacccagttatgcatatcattactttaataagcagtgatctacatagttaataaaatactgtatttaatactgtattataactatctaagtaagaaaatataatctaaatacagtaatatacctattcagatatcttggcaacccagcgggttgctccgccgggctttggggcagccaaaaatatccaaaacccaatggataattagaaggtctaacccaacccatttcttggcgggtcggggcgggttggggcaggtttcgtgggttggatttaacaagtctaattatatctaacttcatcaatttaaaaattctttttattaaacttagttttattgaatctctgtatctaaaacatcatggcctgatataaattatttagtaaaataatatgtattgtataattttactataaaaaaataaatacacgcttcttacagctgaaaaatatatatacatgttaagggacgtatttagatggatcttcctatctagacgtgccgtacgtacaagaaggaatcgctaaagaagaaatgagaaagaaggattgttgttgcaaggaagtcttgtaggtggctcaccgccttcaggacagcgcaggccttggccgagtcactaaggtctaaggtccttgtataggcaaaggacccataacaatacacatctcaagttttagtctacgttgctccaacattaccaaactattctagtagacttagaaagcaaaccttataagcttaaggagcagtctctaaacctaaggtttactctatattactataatcctataatgctgcaatgttataatgctataatactgccatgccagcagcagctatctggcagatgccaagacaatatattattagatgttataggtttgtattacggacatcagaacccgcacggatttgcgggtcaccgcgcgggttctcctattagaacccgcaacccgcgcggactgaagattttgcaacccgcaccgcaccgctgcggcgcggtgcggtgacccgctgcgggttgcggtgcggattgacaaccctaatctgatttcatcaagcaacatctcctttactggttagaaagccttggccttattggtgagctctggcatgggatcctaagcctcaagaagctttcagcttgtcagagccagtattaggctatctttagggaggctgaaaaatttgcaagtactaatgctgtgataatacaggaggcccctttacaaatatatagtgctatacttgtcttctggccctgagaaagcttaagcaaaagaatgtactggaatcagtggtttaactttatagagcaggcatatgttatgcaggagtcctgggacccatgttgtcacgggcgagccagctggcgacgacctggccctgtgacacgtgaccccaatccctcaattcccacgtaacgcggacgggcgccttaccggtgcctatccgccagtaggaatatgagggatcgccagagccgtaccggtccgccagtaggaattcaagggacgagccgtactgggatcaacccatatattgttgcagtgggatgtggtggtgtacgcaatcaccaatgcgtcactgtaatggtattgcttggagatgccaaactaaccacactggaggttatataaagggcctcctgatgccatgtatatagaaatctccaagcaatcctttcaatattcttcagtaccaatcgagctccctccattggataattatcggtgatagtcatcgcttcgttgtagctagagaaccccgacgttagatcacgtcttacacatgtatacaggtccttgagggccattgaggcccgtctgcgccgtggccttctcacctgacgggcagacagtggcgtccgcctccgaggacgagaccatccggctctgggacgcggcctccggtgctgagaagcataaacatcatcttgatgtagtagtaactactttgtcattctcagataacagctgcctcaatactgaccgcggttcactttctttgaaccaccaagcttgcaacttctccactgaacagccaaagaatgaaatattcatacatgagaaatgggtgactcgcagcgggcagcgcttgatctggcttccaccagactttcaggcgacatgtgcggttaccagtggcaataaagtgattcttggccatagatcaggcggcttgacatttttgtggttaaattaacaaatctcgtcctgtgctgcatgctatttccccaagtgcttctcaaccatcttccaacttactctattttctagtctctctgtaaaacgggggccagggggccacggttactatatacttgttgatttgaaacaaatgatactccagaatattctatataacctgtaccaaacaacggtaagcagtggcagacagacaattagtggtcccaggctcgcgacagcatttttaaccatgccgaagctggttcgcagattccggatcccagagggcaattcattgcgcagcggagcaagcgaagcgaacgtagcagagcaattataaaaattaacccgcaggctgttagaccaagtattttgataacaatcaatgacgacttcgcagcctctgcaggcaaacttgggtattactgatggtcatattaatattcgatccaatccaccatcttccatactgtatctttcatatcagattgccagtgaatgtcttgactgtacgtaggatttgggggtcaaatatgtctatccaggaaagcggtgtttagggtaatctcctcagcctgacgtatggaataccaagttttcggtcacaggtacaggtttgatacgaaacctttcttttcaattcagtagtggtggtggtggtgtattaccctgacccctcgccgaagcgattatgcaggataccactatctaatccttgtctaaaactatgtacataaaccattgctttcagcgaatttagagcctcgtcgcggcctgtggtggccaatgcctggtgttccgttcagcggccctccactcaataaccccgcactagaagtgggttgtgcagctatatgggccggatattgtggaattgttcgaggctttgatgtggtcgacccggccctcctgccgatcggtttggtcagccagtttcggagtgagagggtgagttggtcagagggttaagcactgtttgcctactgagcgataactacccgggcccacgagcgttgcccttctcgctctagtatgtaagcagtgcctcccttcaatagcgtgccctaggtgagacgggcgagattgtggggtagtaagagcaagcgtcatgcgacactgggatacaccgaatgcgcccgactggctgattgggcgcatttgcaaaggtgctgtccatctttcgcggaagtgataccttcataattttactgaatgccggatatttgttttaattggttatctgaacaaatggggagcagacgcttatggcatgcggcgccgcgggccttcccccataaaagcaaatatcgcttggaagtttgaaatgtcacgcctctgggtgcgacgtgattgaaatcacgaaggcgtctgcgaggtcgacgaatgacattttgatgttcattgacaatcagtgcagatctgtctctgagggatggggggctgcagtggttggtcacgcataatccttcttcagcctcgcagcttgagggggtcttgcgttccactggcaaagtcaaatctgacattggagccacacggaagccgaaaatacacggttcgaaaaattctcctttgctaagtctcctctctttcatctttcaagaccacgtttgaagcccaagcagggttatgagtgtggcggtggattacgagcccgcgcgttgaaagcttgttgcctcctcgacaaaccgttcacctacgtggtcctaatttctggcctggcacaggtaccagcactttgacatggccccaaggcaaaatccagtcgccttgggtggccggccacctgttgagcccggcgatacaacgttagaggatggacggaacagtgcgttcgactcgctatccattttcgaagacacgcaagaagatgcgttaattgaactctcgtctgtcgactctaatgaatgggtggtaagtttgtgcctgctttcattgtaattcaaccatacttcctaacatggtacaggctccgcgacgaactttgcaacactttcccgaggactcgacagggtatggattaacttcatctgtagctaccctttgtgccaaggagtactgatactatctagacccagggtccaacgttatcaacaagggtatagtcttcttgacgttgatgacatcgtgatggtgccgtatgttctccctactgcagaatggaaggcgtgtttacaccgactgacccccctgaatctgtgtcagtcccaactttcacgacagtagggaagccacaactagcaatggtgctccaatgcaacgctcaacaagcccactcttatcgctctttacggaaacgtcagagctggagggctacggagatgcaggtagcagcaacctgggtccgagtacatatccagagcccgaagagcgatgttattgtgggtctcttcccgccagtgatatgcgttgctacttttgctacccatgcggccacgtattctgcgatagatgctggggaagatcaccgccccatgtcaggaagcgcgtacaagggggtataccgcacgagaagacggatccaaggctcgccaagatcatcgaacagacgctggaggtcgaattggatgagaagcagcagtcttggatgcatctgaaagatgaaaactcctcttggtttggaacgatgagggatgatgatgatgatatggtatttcatgatcacggaagattcgccgatctaatggctgagatgtcagcgcgcaagaggcaggtgcgctatcccggtctggtttcgttcgtcggacagaccggggccgggaaaagcacggttgttaagctcctgatcgaggtacgagagaccttcaggccatgtctcagcgctgacaatccttccacccagctgcaatccatatcacatccagagacgcgagtgccggttgttggatccgcaacaaaccaggagttgcccacctccggtgatgttcatctctattcagacccggtatcttgggctaccgaaacgcccatcctgtatgcagattgtgagggacttgatggtggcgagagagagcccctgggggtcaagatcagaaaggtgggaagacgaatcgcaaaccacgcagttcccgaccactttgagatcaaggcgcgccataatacaacaactcgcgatctcttatgggctaccaccgagaagaccaagagccgagagtatattgtccggaatctgtacccgcgactgctctacactttctcggacaccatcgtctttgtgaccaaaaatccccggtaactgcgcgttccgtttgatagcggaccctgctaatactaatatcgtccagggtcgtcgaaaatgttatagaccagctgatagactgggcgacagcggctctggaaaagtcatctaaccagcctgttcttccacacgcgatcattgtcctcaacgcagcagagaacagtacagaccctcggctatgggatatcgatgagtctactgaccacctcatggaatccatgaacgaggcaataatgagaaaccataatcttcgcgcagtaagtgctcacccgactccacgatctgccagcccgcctttccatatttactctcatccgatagcgagttagattctgggtccccagacagagacgtatcacctccatgcgggagcttcttctttcatactactcagacattagagttgtccgtgtgccagagcgcggacgtccgaagctcatcaaccaacagattgaacgcctgtacgaggaagtcaagatagcttgccggaagtcccgcgaagcgaagcacaagttgcgaatgcttctcaattcggatgaacttcaaccttaccttcaatatgcctttgaccacttctctcgcgacctcgagatgccctttgactttgtgcaggcatcctttgcaaacagccccatcccgtcagactttggcggcaacatcttgaaactggccatcaacatcttggatgtgtggagtgattgcctcgatggtccggctatattcagggagcttagttatatcattgcatcggccacaatgctggattctgctcggcgcaagaccctaggtaaggccgagctgtggatcgtaattcgcatatttgttgatcacggctataggccccgctgaaagcgtgttccgcgagtacctcgaccattttgatgacgctctcgatgacttttgtgaccgtcactggccatgtgaatatgtaagtgctcagggccgatgcgtgaacgtccgcagtggtcaccaagcataaggtcatcagttgagaggcggccgagtcatcgcaattgccgactaccaatcctcattttcaggtgacggctttcggactacattccgctcaatgattttcgccaacctcgatgcgcttcttcgcaagttaggtgatgctacgttcaatgccgcgaacagagaactcgaagaagcggccgcgattcacagggacctcgtcctgatgcagttctttcatcacttgggtggaccctcgaaattcattagccacacggtctgctacacgtgtctggtagagccgccagagcatttgctgccttgcggtcacgttctctgcacgccgtgcataaaggcatttggcgtgaaccgagtaaagaacgtctacgagatggtagcctgcccaatgcatcgtgaccggacgtaagtttgtatcctttccactgcaccaagacggcaactttctcacgaccctgtaacacttaggaagggacaattccccgaattctggtctatctcaatcaagccccacggagcaggaactcgcatcctgagcctcgatggaggaggagtccgcggaattgtcgagctgacaatcctccagcaaatcgagaaggcccttgggcagggactctatattcaagatttcttcgatctaatcgtcggaacaagcacaggcggaataattgcgctgggcttgggagcccacggcctgtccgtgcaagacagcatctacaactttcggcggctatgcaagaaagccttcacgaggcgtaaaggagctgggatcccagtgttagagcggattataactgcctcaaaccacagtaaattcgaaacaaaacctctggaagatgctctaagaagcatctatggcgatacaaaactcttcggtggctcgcgtggcaacatggaggagccgttatgcttgcgaagactcacgaaagtggctgtcaccactacgaccacagcggcctctgtggttgtgcttgccaactacaacaggcatggctcgacagaaaatcagtcatataggttctatcgctctgagaagcccgagagcgagatgaaggtctgggaatccgctcgagcgacgtccgccgccccgaggatattcaagccatttttccataatgcttccggtcaagagtaccaggacggcgcaatctaccataataatcccatcgatgtggcttatagggaacagaagttgatctggccagatatggctgacagccatcctgacattgtcctctctattggcaccggttacaacccgaattcacagacacgggacactcatctctcgaggccaggcagccgtgggatgatatcctatgttatgggactagcaaagattgctatggaccatatccacagtagcctggactcagaaaggacgtggcgtgttttcctcgagcgaactcaccccccgtccagattcctcgacaggtacgtcagggcaaacctcgccttggacaacgacccccccagtctggacaatgtggaaatgatcgataccctgagtgagatgactaggtctcgctttaccaaggatatctccttcatacagtccatctcagatcgtctcgtggcatcgtcattctactttgagcaatcctcctcagcgatgggcgcggacaatggagacggtacctttaccatcaatggccacatattgtcgcgttttcccccgggctcatctcaaatacattccctgggtga

SEQ ID NO: 5885 - DNA, 8205 bp, Emericella nidulans
tacatccatagaaccaaagtcatcgagggtctgagggaaacctcgaggagcgcgggccggcataccggacagagtgcaggctggcaagccaagtgagaatataatgggtcgacaaacgcccaggcggcttgacaaaggaataaaaatggcccgccaggttgcattacctgattaattctcacccgcgtagagcaatatccacgtgttgtgaggacctgattcgcagccacactggcggctactacaagagagtgatatcttactgatttgaagcgatttacttctggatcgagaaccacactaccgcacacagctatacagatggcagtgaaattcagcaacagcccacactcgggtgccaggacacgtccagtccggccccgcgacactacaaccatcaaccagaacaatggccctcaaaggagcacatacactggagcagacaatgacggcaacggcttgaaggctgacccattgtgccttcaggtggatattcccggaagaccatgccggacctctatggtcattaggttgcccgtgaggaggaagatcatgaagtacgcgaatgtgggatcataagccaagggtgtgacggcgccaagaggcctaataaactccccgaggccaaagggcactggctgagatgtcgattaggactggacgtttcttgctcaacccccgccagtatgagcggggtggaaggatgagcatatgcttccaagtagtggagggacaagagcagcacagcgacccttcacccattatccctggatacgccaatagcctggaaggtgataccaggctccgaccatggccaatttgtccgaccacttgtcgataagtcacttgaggttcgtcggtggggttgagcctggattttgggagactctgccggctcgaacctagacgttgggcggtgttgcctccttgtaggggcagtatcgatatgagatagtctaactggcaccagacgatctctggcatggggtaggcccttgaccaccttcagctgtttattaaacaaagctactattgctcgccggaaaatctggttttgcaacccggcgtcctggtcaatgtgcatgctgagagtttgttgagaggcatcccctggtccatgactgctcgctggtcaggaaattcgtcttcctctcctccgacccttaaagactgctccgtctcccatcgctctgcccgttaggtgtttcagagatacttcacaaatcttgctcaagagatcgatttcgttaacaagtcgtcttatccattgaacgtgtcagatcgtactcccaagccaacctggaatcatagctcagtcttttccaataaacctgccgctattggagcggtggatatacagctctataattatgacattgggaacaaacttggctgttgaccctcacaccgcgaaggccttggaagtattaatgagtatactcggacttgcaaatccgacgcccgaaacagtggcctgtgtcatggcgtttgcgccccctgttacactataattgggttagtgacaccttgctatgtacggtttagttatctagctctaggtgtctcacgatggtatttacatatcacggaaccatatccatacagtgcaccgaaacaaaaacagcttgctgcaaagccagtgcagaagcaaaaaagaaacggctccatccgcggatcgaacgcgggacctctcgcatttgtgcttcagggttagccctaagcgagaatcataccactagaccaacggagcagttgttggaaacttgtttaacttgatgcaaatatgtggataaaaaaaagtcttacgccaagaccagtcacgccaatttatcgaggggtcaagcaatttatcgaggggtctcttgacccttctgtcgaagcatgggttgccccatggtctgcacagtcttagtcagcatgtcattagtatttagcttagcatccttgtgcatccgcacccctgaataccagactccttcatgcttccacaatgcagcagctaaagccttaactttctcaatggctagaatatcaatgtatgtttatcaaaaacaaccaatcaattgctccgttggtctagtggtatgattctcgcttagggctaaccctgaagcacaaatgcgagaggtcccgcgttcgatccgcggatggagccgtttcttttttatatattccactattggtgctgtcattatgtctgcctaattgtcctctaaaaggtagctaatcctaattgcaggatatcctagttgcaggaaacgcttttttaatagctcaacactgttttttcctgatcctgcaagcgtcattctggaaacccttacgtagccctagttccagttgataccatgtatgcctcacaggatgactgtacttcagcacatgagtcgaattcaggacgacctgactgccagcccagcagacctgcttcttaaccagttcctttcttgagactgtactcagcagccaccttcatacgatttggcaatcgtcgtgccttgccaaatgctgaagacaaaccacgatttgtggtcttatctcacctgttgactttaccaactctcctatatgtacctcagctatacgatgccatgtactgtccttgattaatccagattcggctatatctgaatctcagagcctcgtctaccggatcccaactgatcagctgctcattttttgctacaagctcgcagacttgaaaggcctgtcgctgaccatgcatgctgtttcacacttgaggctttcaccccctcctcttttcaactttaactgagtccggacgagtcagagagcgcaaggaaattgggagataagcgagagtttcaggtaggctagtcaaaaatgggtggtcgttgatattaggggtgaagcattagctgagccccctcaatgagtaagacttcactcaaaaatcaatctggatgtcaaggaatacccagatgcgagattttgcgcagtaacggatgctgcgaagtcttctctgctccggatcatcatgaccctaacaactctgagaaacctaggaacagtcgaaatcgtagatgccatagctcctccatacacaggaaatatcgcctctagaggcgcacaaatgtatcaccggatcagggacgcgagcgcattggcatgtttctccattcgccagttcgcatggcgccgttgctcggacagcagtagtgctttcgaggcacctcgaggtcgctcccacagcggattgcacgaatcatacaccggtccccagccgcgcgaatgatttctgcttcgcggatactccggcccagagcacgagtctctgacaggctttgagctctgctgcggggaaagttccccaagcgccaaactcgagagtaaagggatcaacacacacgtccacctgcctctaagatggaatatagttggagcacaccccagactcgcacgacacaagcttcgtctgaagattcagggacatggtccaagtgaccccgggtctttcagggagggttgcactgctttattcagtacctgcatggtagggttgcacggtccaaaatgacgccgtcaccacctatcgttttcccacatgatggttgcaatgaccacaggggagtatgcgagccaagcagctcgatattgcacgggcgcttcagccagctttgtaatgaaccgagggacctattaggccatttagggctggatagaagacgcgatattcagggcggttggtcagttgactgtaggtggcaattccgctgggcagagcaagcgcagagtaggcctggatctcgatccctaaacgatactccctagtgttgactaggaccaaaatagtagacaataagtaaccaaaaggcagtcttgcaaaacgcaagcttggtttagagggtcatttggagaggtcatctccagctggagctaaaatctcctagagcgatccctaagcgccgacaaggatattattagatcgcggggaattctctgcgaatgagcgtaatcttcagctgcagacaagcctttggcagcccaatcacagcgctggactgactgaacgattctgcatctcgatgcgccggcccaacaccccccttgttcgctcccgatttagggcaagctgaaggatctggagtttgcttgtcagcgcataccgagcccaatggcagagctgggtcgagctcttccttcatgggcgcttttaaccggcctctcactcgacgctgtttatagatcagacccttggggtctcgggtagagatcctcgtcggttttgtctgcatggtcgtacccgccatcttgcaggaggccatcaataccgttctgggtatataatcaacccagcctcctacgccttggattctgcagccatttcaattcttcagctttgatttttgtttttgcattttccttggtcagctgaaagccctggtggtcatcggttttcctctttgttttgctctccactcaacttttctcacatatcagaccagctcactctctactctcaaccttgccattatacccatctcagttatccatcattgcccgcatgcggaatgcgttcagcgctccttattagctgcctggcggcatgctctgccgctgcccccatctttgagaacttctacaacttctccgatgatatggctgagttcctgggccgagtgagcaaggctatccacagcgaggtcaactcgttgacctgcgacacatcctcaattgctctcccctcttttgcctctggcctcccagcccccaccggccagaagcccctctacgtcgcactcggacgcgggacacaggtgagcacccagctcgattccaaacccatccgaagcagaacctaaccggctagtagaactacacctgcgccgactcaacctcctcctcgacgcccgaggccgtcggcgccgtcgcccgcctttacaatgcaacatgcctcgccgcgagactcccaaaggccatcgagctgctccccgcgattgcctacaagctcaccctcccagcaaacgaatacgacccactccccccatccaattttaacctcctcggccaccacttcttcgagggcaaagtccccgtctttgaccttgacacaacgccggaccgacagctgggaatcgcgaaagtgaagaaagaagccgaccttcccgctctaacgtctgcggtgcgtggcgatgacgacgaaggcgccgttgcctggctttatctttcaagaagcaatggcaccgtaggccggtactcgagcgtttaccgcgttgataccgcaggtggatcgccgcctgagacttgtgaggggatggcgcggagtttcgaggtcgagtatgcggcaaactattatatctatgggcaataggtctttagctacaggcaggatgggtcggcggtctgatttctatgtatatatcgaattaatgaaatgtgatgagatgtcaatgtcttgaactggactatacccattatcctactctctcccttcggtttctggcctgtgtatcgactcgtcgactgctgtttacagtaaattgtgccgtcgggtaagggacttaatatgaaaaagcacgtaaattgacccatgtcgagcaatcgcagcaggctttcaatctaacggcagacatgacggtatggttatgtgtaatataatatgcttcagcgaccaccaaaaccgctgcaccgttccttgaggcggatagtgtggtggtaaattttagccaataaccctaatttgcttgatgctataactttcccgttttatctccttcaatcgtatgggcggctaccaactctttattctgcgttctggcctatgggacgatggtcagaatatatgtagacgaggtgcgacaattcccagttctgattcgtgaacgtgatgttcgcagtcaaactgggagaggtatagagaaccacggtcggtaccatcggcagtataaacgccaggcattgatgaactagatagtatatacttggattactcatatttatatctggatggaaaagtgcctcatatcttctgtaaagatgaactggcttgtgaagcgaggtccaggaaggccaagttagggcttaggaagtcaccacaccccgggtatccaccaaattacatacatcttccagtgactctacaataacctgagaacagcctctataagtatgcactaactgtcgccgcgtaaggagctcctcttacaaaaaatgatcgaacaactgaattagtaatgacagatgcaagttcaagtccagcaagtaagcctcagggccctgtcatcattctatatcattcattcctagaaaactacagttctagcttgcagactcaggtctacttagcctaggttccatatttcctacctgcccgtagattatgcctctcgctactaagtatctccccaaagatttgctcaaaaaacattgccccagagatgacggtacttaatactcggcggtcgattagggtccctgtagtagccttcagctcaaccgggcatcccatcccctccagagttgtcccaattcacgaacatccattcgtttggaagggcggtactatcgacatcgtagctcatactttgatcttgtacaattgaattcccagaatgccgggcagaataaactggtcagctagtggtaggggtcagctaggcacgtcatcttttaaatcggggccagtgagtctcacggtcatggaaactcatattgtccggtgaagtgttatctaggtcaaagtcgccggtcgaaccgggcatggtcatgaccgggcgattattgccggcgtgtttatcgaggccgaggggaagatcgcctccgctcgctctaaccccaatccttgaaagcacaataccaacagtgtctgcagctctctttgcttctttcgaagcggatctcctgcgtatccagactgctctcgcacgctggagcgcccgtaaagtctcatctttcctctccattgcttgttcgtggtgtaacaaggagcacaagatcattgctgccgtgaggaactggtgattcatgagggaggtgaatcgccagcgcatcgcgtggagttgacctccagcgcgagtttcctcgtcgagcacactctgaagctcgagagaacccattgatgcatcaatgcaagcttgctgtgagtgacgaaagctgtcctcattgttagagggggactgcccgcccaggaatcgctgatgtagcatcatttggcccttgtagatcaaatgtctgataaatagtcgagcaataataacctgtggcgaatcagtcacactcgctgctattggcttccacttcagaggtgcagggatgctagcagcagcatcatgcaggatccggtcgacctgcataacctcttcgtaggagcagagctttaccctgtgtgtgagatcggcaacgataccgagggccttaagtacccgtctacgagcgatgatgcccaatgaggttgtaagttcggtttccggtcgtgaaggcggcagttctttggtgtcttcatcgaaatcggcgtcgttcaggttccgcggctcggccgtatcacacttccagtcggagatcatccgtggcatccccatttgatttgagatcatgatatcgctcataagcacagttgcccatacgcggcgccgcatctcaccacgaaaaggtgagattccaggaaagtggttgggatcacgatggtaacccatgcgcatcgcgaggttgacctctatggcgaggaggaaccacatatccttgttcgcatccgtgcatatgcagaattcggcgtatatatagttgatgaccgtttccagtacatatggacccgactttgtatattcgcccatgatcaagcattgaacggttttttagcggtagaggtcaaacaggagagattgcatttctgcttccggattatcagcctggtttgaggccacacatgcaagacatatcatgctgaacagcagcccgacccacattatggggacagccgaggggtcggcccagaaggcctcgtactacggcctgttagtatggaatcttcaaagcatatgatggcgggatagttcgaactctagcacttgcctcgcgtaagaaaacgggcccatggacagcagctgattttaccagaacatgtgagccatagatcgtcaatagtattggtggacgcaccagaggagacgagatccaggtagttaaagtagcgggatatgtagcgatcaactgcgtatcttggaagcagcgccgcgaggatttcctctc

SEQ ID NO: 5886 - DNA, 11043 bp, Emericella nidulans
aggcagcatgctaccgtacccttccacaagcgtctgggcgtctccacgctagttgggtagaatccttctgtaagcatggcccagatgaactctagttgggaatgctagacaaagggctatccaggactggtattttaggtatagaatggaaagagatttcccagcatagcatgtactgataaaatgaagcaaaggagtatcgggaggcctcaagaggagatcgctctctctacagtcagtctgcagcgcaatacaacctgaggcaagcaagccacttagcctgaaataatgtcatcaatcagcatctggaagaagaatcccaattcttgtctaagaattgaggtcaaccttccagcattataacttctcccatccccgttccttctatcggttcccctcccagaacatgcccagactatgcggcatagcgtctacaaacccattccgcctatacagtttccgacccggctcgtccgcaaggaggttaacatagggctccccctcggccttgttgtccatgatataccccagcagattcttcagaatggaatctcccagcccttgcctctgatgctcaggtaggacggccatgtcgacgacgtgaaagtaccagctgccgtcgctgatgatgcggcccattgcgactgggactggttcaggagagtcaccggagggatcggtgtatgtgatgtagcagccgtaccaggtccctgctgcaacggcgccgcttgcgcaggggttttgggggacaagccggatgtcaggcgcaggtgcaggtaggaggggacgggaggcgtgcccaccctgaggatgtagttctgaggaagggatatggttggattggtgactgccattgtcgacgtcagtggtgttcgatctcgtttcgcagttatgtgctctgctgacagaggactggttcagtgtaatatataagctgagggaattcagtctatctccaaatcagcaccaacaagcacatgattttttatcacgcccccactaccaagacattagcgggaaaaggagctttcattgagtcaccagcacccaaacaagggctttgtgtgttcccatggttctaattttataacactgaatatgcgcagtatgggggtgtgcctacaaaacggaatttaatacgcatacgtattaatacaatgccgtaatgcagtcttacaaaatgactatcgattgcctttcccagcgtggttttgacattcaagttaagagggaaaagatgctatataaagcgattagcttaaacagcctgtcattggaaaaaactataaaacgtgttcagttcccgcagtaataagttcttgtggatactgaaaatagagagattcattggaggtctcgagtagaagcgtgacattgccatgagagtgccagggctaatttctgcaaagtatcctaaggagcatgtcttaattacggggactttttgtcaatagtatgggaagacattatcccctgattcctgggctgccggtaagccgggggatgaaggttaccaatcctcctattcagcgctaagggtaacaatatatcactttgtcggcgaccatgcgtgtttctggacggtcaacacccagcgccttctgatgccctggcagtacgtgctgatatgctcttttatatctctcggtttgccctgtttaaaggtagagaagaccaagattcatgaccgcgcctagggtatatgggtgatctgaacctattgcttcttatggccagccgctgcttgctgatatatctcctcatcctcctccagcttgagaacttttaaggtctgattttcgtctttcaagacttgagaattattatcacttttgatatccctagaatgcaagggaaacactatttggcgatatcaattagatacgccttaccggtgtggacaagattgggctcagtgtgcagagagccagtgcttggaagatctacttggggccagctttgagtagatcttaggtggaaggattgcggggactacgatacggtagatccttggagctttcccacattgagttctgaagacaggtatggtcaacgccgggatggagacttctaaagatatccaatgctttgtatataaacacggccaggatggtgtgggcccccctggtttgattgcttacgattgaaaaactttcttatgactattttctttcccactaaatcttgattactgcgcaatgatgacccctgggttgtgggacaatgttgagtagaatctatgccggaacatattcaatatcacgagcgagcaatatagaagaggtggtatcaagacaaagttaccaacaatccggtgtgtaaatattacctcaccgaggtgattaggatattgtccttatttgacttgctcgaaccggtcgtcttcaagcacctgcaggaagggcggtttcgacgccgccggtagcaaaatatattaatggagggggagcccgccaaaccgtacagtattcatgttctagtttatgatttcagacatgctgaaccggtagaaatggaggaatcgttataacttgagaaggttgggagagtgaaaaaggcgactgggttaagctagttcatcaatagggatcttatttaataacctaataaccactacaaatctttgtcgctacttgaatagaggatcgtacagaagtgaagaaccatgactttgagaaacataggtacaaatctatggcgatagtcttagcctagggcataagtgagagcaggtaagtttgaatgaacctctcaacgtcgtgacacaatagtggcttgcgctcttgcccttgccccaaatggttgtcaaggtatgcgttgttattaagagcataaaacacacgaagctgaaacctcattcgaaacgcgtcagacctagatccgcctgtatacctgctatttaaacgtgaatgattgctaataatagcttgtttggattaagctgaaaaccattctggcgtctgcttgcttcaaacaacgtataggatcttttttagatcacgtagcctgatatacgggcctgggaacacggtctggctaataacaacactgtatgatctgatttagatgatattgccctcctgataaagatcctcaagatgctgatcctcgtccttaagcctccattcctccggtgcacagacataactagcctcacaaccagtactgttgtaaataccatttgtacttgtggggcttgaggttgcaaaaatagctggttgaagggtcatcgttgaccactcatgcagtctatcttgaagactcctgtctcccgtggattaggatatgtcttttcaataataattccctgggcaccaatcctctgttttatctcctcagccatgactgagtctgtgcttaattctgcctcccgcataatatccaagtgatgttgaactcgggcacttcgtgaagaatgtttgaatagcctgcaacaatgcatgcatgtgcaactgttgtagtcatgctgggtactctccttgcaagcttcctataagtctcaggcctagtattggcaggtaccagatacagtctgtttctgtatcacgtttcatttcaggacaatctcgctctgatatcaggcattcgcattgaagccaggttgccacatcattgatacaatcttagaactcctcgtccgctatataaacgatagagagcagatattttattggcccgtataggacctctgctgaaggattatgagctatgattggtattcaaaaaagctgatgcattcagataagattggttggaaggactggagactatagtcatacggctcacccagggtctgacgctgactctagacagtagttatgactagcagtcaggctcgacaaattaatagcacagcttcagatcatgaacacgagcaacccccataaacttgtctaactaaccacctccacctccacctccactgccaccaccacctccgccactaccaccacctcctccactaccacctcctcctccactccctccgccacctccgctcccacagccactatatccccctccgccataataacctccaccatacccaccattatcaccctgcagcgccccagcctcggtactggcaccgcacccagaaccgcagttatgctccgcaccgtgggtaggatcatcgtcgccagccgtctgatccgtcatctgaaattgtccatcagcacattgatagccttcgccagaagtgcgggtgtcagtgatgggataataataggggtaatagttggcccctgcgttatcagaaggtctgtgatcggcccgttgaccctggaatcctacatacccgtaggtgatatcgtgcgttgtggcactctttcggtaccgcggtgtgccggctatctgccagggaatctcgaagaccatcatccgcgcatctcgaagtttctcataggcttttatctgctccgcacaattgatcatggcccattctgacaggaagtagtgctggttggcgccgagttcatagtagtggctgaacggttgtgcgcggtggatgccaccgagtttagcccgagaaagagatggttgtgtctgcagcagtcggctgtcttcgtgcagccaggccgtgacttttccaagccgtggcgattgcgccattgccgttgcgacgcggtggagggcatctgcagcggcgaggatgtactggcgagaccggacccagtcaactggtgagattgctgtggttccggctcgcggagggtacaggtactgctcccgctggaggtggagggtgatcaaggaccagctatcgaacggaaaggcccatacgtgctttgtgatgctacagtcgccgcacttggtcggacaacgtttccatttttcagagcagtcccatgggaaggtgtgctgatatcggcacaatgggccgccaaagaacgaaccccagtcgtaccagtattcttgtagagtgtcgattatatctgcgtcattgaaacgaccaaagtaatatcgatgcaaatatttctctgtgaagccataaggaacatcgtgcttggtgatgatacgctggtccggatattcggttgccgttggacagaggaagctcatcaggtagagagggcccccgagaaactcgcgtatgggaccgttaaaaaggggtccaaatatggccggatcaagcagtgaggagcaaaatgtgggatcagtggtttcaatggcagtgctctggtcgacgagtctttcaccgattgcctggaggtagatcttaagtctggccccgagaatattttttagcttgtccaatattggggttgtcgctgctgcaagcactttgctctgctcggcacttgacagacccaaatccaaggcattggcggcggccaggagaagctgaacagtttcctgctgcgcctggccttcctctccttcagaaagcagaccggaaaatggagcgccgaccacctgcttcatggcgagcttataacgcttcggtttgcttacaggctgctcgcaataccatagctgcgctgctgcttccaggtccatacggagcatgtgctggttgccacgaatatgaaatcggtcatggaagactggcagctccttcagcgttatgaggacattcgtcctgccataccgtcagctctttttttttttttcttttgaaagaaacgcaagaaccccgcttgaacgacttactctgacatcctctcaataagaattggtcctactcgtagaaccatatgcacatagctgaacggattctcgacgacacattctcgagcgaagagcgggacatcctcgtctgcttttgcccttccagtcgaactctgcaggtacaacttcgaggccagttcttctggggcgagcggcgaggcctgtccaattgtcgataacgagtgtctcttcagcttgctcgccactcgagaaagtccaaatcgtttcctcaccggcggctctaatcccgcggttgcaagaagccctttgtatttgacattactgattccctgtgagatcttaaacactggacacgacttcgtggcgctaatttgatagtgattgccatctttgaatttgaggtggtaccatcctgtgagctgtttagtattttgctcgcatttgcatgacccttgccgttccgccagctcgatcgcgtcctctacgatggaatgcttgtactgcttgacgtacgattggtcgccataatggtgagcccaatagcagccttcgcagatggtggacgtcgcaaattcctcgttccgacgcgtgaacatgctgccggttatggcgttgtggcattgggcacacttcagcactcgaaattcgacaggtgtacccatgctcttcgccaccactgacggtttcagcctttagtttgacccccgaataaagaggatgctcttacattgcggtataccagggaccctcttgggcctcctctggtctggacggtcctcgatcatctggtctatatccaagaggcctggtccaattaggctaggcggtcacagttcaagggatctcttcatacctgctgtctgaagcagtaaccatgcttgcctttcgatactagatcttttcgggtcgtctttggaagttcgttagtgggtatcccttcgagggaaggtgtagttgttggctcacttgtcagattctctcgaacttctgctgtcaccctggcgctgctcctctccgcaatgatatcgtacgtcagatctcgaacagccttctcgctatccagaactcttgttgtagccaggccattatactccgttcgctcgtctcctacatattggtaagtttcctgccccgattgtgccgcatggagtggaactcacggtaacgaagcgcaaacgcggcagcttgctggttgacctggtccaggaatgtgtcatatccatggatatcgttctcccccacattatcaatcagcccgtccgcgtactctggggcctgaaatattctaagtgtgcgaatgatattttcgatctcgccgcggactccttcccagtaaagggtctccaactgctgcactaaatgctcctttgccggaccaacttgactccattttgtggaagggtcaggcagaggggctgcggatctggtggtggatttccaccgagtatggaacgagtttcgtgacatggtaaagttagggtgccgatgatttgacactgcccaaggccacgggtcggatatttaacactcagcgcacaattacggtgctctgcccatggactcatgacacgagccggtcaacggaacatgtctgccttgcggcttagccaggacacgggatcgtaactgggcgggccttgtcgcttaccacgccttcttttggggtagctctaggcgctaggattgtgatatttctcgtattccacttgccgaggatcttgcccggtgcccgagactttagaattatttgcaaggcagctttgtgatcggcagactctggcaggctgccatcaatacaaagcggccgtcaaatcctgagcaggcattttacaagcgtcaaacttcgtcggcaatcatggctctcatatctcccagcaacctgttgtcccttcaccgcgcaagtggcgaccagactgcggcgctgaatgccaacccatccaggaaatatcgttatgttgatagcaagagcaaggagcagccgctagatatcccagatccagccctttttaaagatctaaatacagttaaccatggatcaccaacctttccgtcgatcagcgaatgtgccattcaccttgaaatgcttgaagcgttccacaccctccgccatgaagtcatccattctccccagctcgacgttgccttcaatatctctccccagccaaccaccaagtaccgggtgaagaaagacacgcgcagaagtcgaaaccgccaagttgagactgtgtccatcgcggactctcgtttccccgatagacgaaagcagaaatggacgcactttctgcacattgcggcgacgcgcttccgtcagtggatacaagtagttgacactcacctcgaaatggcacagctcagcagccatgccccacgttacctgctcctgccgccacttggtgagcccttcccgcccctgttctagatagccgctgatggtttagacgtcctgatgatatggcatgcgtttctcctgaactgcgatgattttaaggagcactgcgcctcttacaacctcaatgcatgtccagagcattgaattcccatggtcagatattgtatgaactctgaacaaacagctttggaagactgctgctgactcgtagtagcatgccgccatcgactcgaatagctggacctatactcttccgaaagaacatagtgactggcttcttacaacccacaatatccacggagacttgatcacaacattgtcagaggaggcaagccaaccctgtctgattcagaatctgttgcacgcattctatgagccaaaggccccgtttcgaatctcccgacgcttcccacttagcccagaccctcagggaggcttttcagatgcaagacctgaacaccccgcttgtccagaatgtcgaacgccagtgtgtctttgttgacaagatgcacgcccaccgctggatttgcagtccagccgtcaacggaaccctacgtcgggcaatcgaccgttacgacaattttctccatttgttcaggctctaccctaataaattcctggtgccaacgcttgatatcgacctcgtctggcatacgcatcaatgcagtgcggttagatatagaacgttcgtcactgaacgtgttggaagattcatcaaccacgaagacaagatcggtcgtgggacgctggatgacggattcacaaatgcagagcagtggtacagacttcattacggcaaggaataccaggtatgtctatgttggtcgtgtgaggcaatcttgtcagctgtggaggaattggatgaagatgttttggatgatcctgatccgcagattgggggcctggtgacggatattgaaaggaaggttcattattaccgcgagatggagattgcgagaaggttggggagggaattgccagtctggaatcatgattagtttgtttacttactttttttttaccataatctatggtttttcttataatggttagatgaatgggtaacattcggtgtgcagataatcatttagcttgagagatattagaacgtttacagaccctggctcagtccgtaatagaataatgtactttcacgaagcagcagtattgtgcatgagtactctgataccatataaattatggcacagaagccatgttatagcgttcaatacatagacctcgctaacagctttgctttcactagctttccagtagcattattagtgcagccaacattccaataacacccaagctgatcccacttaaaagggatatgttctccagtatccatgacaactgtaaaccaacgtcgataaacatattccgctctcacgccagttccttgagctccgcgctaaccttatccagaatctcctggtcgatatctgtctctccctcggcatcagagtcacctcccaagacctcagcatcacccctcttcttcttagccggagtacctgttttcgagcccacaggagcacggcgtctcttcggtgtattgctgggtatatccggcgtgtttgcacccgcattaccgtattcttcagccgcttgcttcttcagcttggtgaactggttctgtacagactttgcgttgcattctagccaagaaatcactattagtgtgctactgcacgtaaatgtacatagaggagcgcgagaaaatggagatcaaaggattagactagcgcgtaccgggtcccatgtgttcggcgagagccttgtagtccagcttgacgctttgggtcttgatctgttccagaacgccgatgaagagctaggacgctgtgtgagttcgtgcgcttgcttagaagacgggttctcggatgtagttgaggcacgtgtggaagtggaatgggatggtgcgcaccttgacgtttgcctctggggtccagctcatcggcatttttgcggaatatagcggaatggactcttttggtgagctgggtttctgcttgaatttgaggctctatgcggtttgtggactagagttgcgggtggatgtgaggatagggttgaatacttgagataggtgtacactttgagaggagacatagaaggaagagaagaggattggaaagaattctctgggaagaagtgttgacgcctttgtttcgctgaagagctgtcagctgtgttagtcctttgaagggatgcgtcacttatcctccctaacattagggctcttttcactattcttcttatgatcaattcacttcttttttcaaattacctctataattatttcactttcttttaagaaaacacttgttccatattactatcataatatactgtttctcaaaaacggttcaaattatagagtctcagctgaaaaactagagacttagcatgtcagagagtttcatcatgactgggactctcctcccttctagctctagcaacttttcaactccccttaacagccataccttttatttgaccataacgctgactgctcatttcgacgattggtagttgggacaaaatccattcacttggaatttatttccacgcgcttactggagctgaaggtcgccaaagaaggacggaacaaggataatggaaaataagatactatttcctcagcacgatccttcgcttgcatgaaccgagcatacggtacactacaacttatcgctgtggctacaggacccttatgggtacgatataatagcccgtacccccttcgtccctttcttgggcaacggcgcaaacaagtccgagtgataccgaacatcgtcgaccgtcgtttcgtacaagctcatccacggcaagacccgcaaggtaagcgctgtcaaagccagatacaagttgcagtacgcgagactggatggatggtaccatattcgtcagcatatctccggcagagataatacccggaaggcctcgagaaactcacttgatacccaggcactgcctgctaccctttgagaatggggtcaagcacgagtccatccggc

SEQ ID NO: 5887 - DNA, 8038 bp, Emericella nidulans
  unsure (1)..(8038): unsure at all n locations
ttcgttcttaaaaaaaaaatattgagaaaaattgaaataccgaggaaaagaaagatccaacggttcatatcaaacataaatcaagaacagacaaatgaaagactacagctctgaagcaatagcctggatatatggcaactatgcattccttactttatttggtggtgttcaggtagggcccgtattcgacgccaggggaccacggcttttggttcttggtggatccgtgctagtaatgctgcaggtgataaccatgggcttctgtactcagtactgacatttggtcctttcaataggaatcgctggagaactaggaacctccatgatcttcacccctgcagtgtctgcgattgggcactatttcaatgaaagacgtggagtagcaaccggcctcgcggctactggtggctccgtcgggggcgttgcgtttcctctaatactggagagcctgttccctaagatcggctgggcctgggctacgcgagtcattgctttgatctgcctgatatcgctggccggtgcatgtctattggtgaagtcgcggctgccaaagaagccagcctcgaaggagaacgttctgcccgattttcgtatctttcgcagcctcaagctcagcttcacaacggccggtatcttcttcattgagtggggcctttttatcccaatcagctacatctcctcgtatgctttggcccatggcacttctgagtcgctttcctatcagatgctagcatttctcaatgtgggctccgtcctcggaagagcaatccctggcttctttgcagaccatctcggcagattcaacactcttatagtcacagttgcattgtgtcttgtttgcaacgtgtgcatttggcttcctgccggagacagcgtggccataatgattgtgtattgcgtgatttttggctttgctagcggcagcaacatcagccttacccccgtctgcatttcacaactctgtaagatcgaaaattacggaagatattatgccacttcatacactatagtgagcttcgggtaagttaaaatattctcatttaatttgacatgatactaatgtctgtctgtcagcaccttgacaggaatgccaattgcgggtgaaattttggcccgctgcaacggggactactggggcctgataacctatacgatctgctgctacgctagcggtcttatctgtgtgacaactgcaaaattgctccatgttggctggcgccgaccttggataatatactaaatcaaccatccaagctgcatctcatgacagccagcagcttcccaacgataatggctattccattattcgagtgtcaaatattgttcttgagacgcgcggtccaccttagaaatgccaatcattcttgtcaattatcgcttgacgacgtacgctgaggatctaggctcatattgcctgataccaccacttagagtaacaaatcaacgacaaaccttctttgcgtttcgtcgccgagacacaagccttagggttccacggatggcctcaataccaatcattcctagcctgagaaatgggataagcttaacctttacacggtaataagaatgcctgcaagtcacaacgcatcggaaccgcaaagtgtcttagtatgctcagtcgaactatcatccaccgttggcttttgcagtcagcccacgacacaattcccgccatctatcgtcattcaccattatagcttcataatcacagggtgtcatttcccgcaggatggattcatcgaaccacccttccatgacggcctccatgacagtcttcgcaagcgacatgtcgcgtcaaagtttgaggctccgtcattcctctccagatgacataactgatggccagagtgcaatacaaaagccacccacccggtgtctgtctcacgcctttcatagctcttcttttgcgctagtttgagtctgcatcgctgtctattgagctagtcacttttggctacaacctttcgtcccaaaatggccccgttgcctagcaaacttgtcctcttcctctctctggggacgctgctccatcagacgggggctgcccctcaacaagcccagaaatcgaaatgcgctaactgtggacaacaaagctgtgaccagcgcggttactgtgtgtacctcaacgcctgtgggtggaggtacccagaccccaactgcgcctggaggagtactaccgactccctctggaccgggcggagccgtaggtggacatcccagtcacctggaggaggtagtggtaccccaagccagcctggagggagcggaagcagcacaccaagcgtgactgtaccagttccttccggtaccggggttgaaggaggaggtggaactccaagccagcccggaggtggagggggaaccagccctagcgttaccccaactgtgcctggaggggtagtaccaagtccgtctggaccaggtggaggtggcgcaactccaagccaacctggaggaagcggaacaagccctagcagtaccccaactgtgcctggagtaactgtaccgagtccctctggaccaagtgaaacaccaggcgaaagccagcctcctgctgctggtggtggtggtggtggtgggcagcctggtggtcctggtcagcctggtggtcctggtcagcctggtggtcctggtcagcctggtggtggtggtcccggaggtcccggagggcctggaggtcctggaggtgctgggggtcctggcggtcctggcggtcccggtgaccaacctggcggaggccagcctggtcatcctggtggtcccggaggtcccggaggtgctggggggcctggagggcctggcggcccgggtggccctggagggggccagccaggaggcggcggtggaggcacatgcttgtgtcagtgcccatgtgacggtaaaaacaatcatccacagggacctggaggttggggtggacagggatgggttgcaaatggttggggtggggatggatggagcgaacatggatggaaaggtcagggaccgaacagtcaagtacaggacggagccagttggcctgagcatggaggcggggggcctcataaccccgagaataacaacaaagtgaaacgactcctcgcagcgcctcgaggtcagggtagtgacggacattcgggagacagtacattcacgcttcccacagtaccagctccgactcctactgactacaaatctggagcaggtactccgtctgctcactcaattcacggccataacgaccctgattatcgagaatctgaccacaccaatgcagattttaatgattccgattataaagatcccggtcgaaaacattccggctacaaagattctgactacgaaagatcctaagcgacgatgaaaatgaggccaaatatccgaaatatcactgctacaagcaccctcacgatccccgctgcaaagaccccaagtacattggctacatagacccgaaggcccccgactatgataaatacgccgatcctggctatggaggtcatggaggccctgggggtcgtggaggccatggcggttctggttacgacggtcaggacggtcagcgtggatattccgactatagagatgaagacgacaatggccaggaacagccttcgataactgaggcgccagtagcaggcatcactggtggcaacattggaaccggggccgcagccggagctggaggcggctacgggagtaacagagctgccacagaatcgagcactctgagctctaccagaaaagccacaccaacttcctcagctagtccgacctcatcagcggtggcatcgtccacgagttcattccaactgcctactatcaacactagggtattgcgttggtggtaagatgattcactgtctagggttgattttggatttgtgtgcttacagagtgtactgtaagcggagggaggtggagaaggagaatgaaaagctgagagattttacgtcgacgaaaacgcgatagggaactaaaagcgtgaggagcttaagtcagactgtttactgccttttctctgtgggatttggatttgaatctgggttggtgggcatataatataggtttttttttagctgcagtgtagctgtagcaactactgctagaggcaagttgatgtgaagatccaccagcctagggtcagtgcagtcaatccagttttagttgtatccattactatttttcatgtgtataatcaaaatcaaggagtggtgatttgatccatatctctgagctcagggcggacaatctgccgtgacataggacctgccgagccactatgccctaccatttatatatatacgcataagcttctaatcacaaaccacataattcaatttgacagctctgggcaggataagtacgcagtcagataggcaggtaggcaccaggagagctccgacaatacaccaaagaaacgagtacttccattatagcagtctgcctgaacatagtttgtgaacataatccaatgctcgttactccagtggaatccaccccgtacgtatatcgatcaaaatgataatatcgtcaaaatcactacttgttcctgctcttacgtatcattaggagctacgtctagattggtccacgtgtctagagctcggtacagtcgagtacttattaatgtagcacgtactcttaaaggttgggatatacccaaatacccttcccaagccaagaatatgtattcgagaacccaacccgagcaaaggaccagcaggattagatacaagatacaatagagatagcactcgaatgcaatgaagttgcccctagcgagtgtataatagggagaccgatatagagacaaaagatagaagcaagtataagtagagaagcaagagacagataaggacagctgttcaatcagagatagttcgcatcagtagatatgacaatgatattgcttcaataatcatatctcaaggaaagaaagcaatgcgcagactcggtctcatgtctctgactgacttgtccgtaacagggttcaaagattcaatcgaacatcgaaattcatgaaaattcttaaggtcccttccatgcccttcgccgaggtttcaatgcgcccaaacaccatgtactgtcacccgagactgagtgtagaactgccggaatcaccaaacataatatactatggaataggtcaagagagaacagaagaggccgcgatatccgcaggaacacggcccagtgaccacaatatgcaaaatcgaggaattggaagggatgtgtgaccggtagtgcgagaggaggtcagagttggataataaaggtggaagcggaggtatgagatgactggaccgacagaagatcacaatccccggaaagcaaagttcttacatgagtaaagaaaacaggatgggtatatagatctgaacgaaaggactcgtgaagatcaagcagagcagaacgcaaaaggatgtttggaagccccgtcttctcatgagctattagaccgcagtagcgcctgctcgtccagtcagcttgtggagactatagactgtatacatggtatcatggtatcatggtcttaccctatctatggagagctgctcggttcgctcggcactcgtgctagcgagcgtgcggctggtggcgctcgacgaggtgatcgatcggccttccattcccgggcgttgcgacttgccgtccggacccgtatggacgtggtgcatctcaccactgctcgaaatgcgggactccttgctcttttccagaagagacccacctagcgtagcgcatttcaggatggtttgcatcatctgattttgcttcagtggcttggataagtactcgtccatctgtgcttgtatacacttctcgcggtcacccaacatggcgtgggctgtaagagcgataatgggtgttctgctcagaccgctgtctcgttcgtattcgcggatcttgccagtggcttcgaacccacccataaccggcatttggacgtccatcagtatgacatcgtagcggcgctgtttaacggcttcgacggcttcgaggccgttgccaaccacncgatacgttgtggttgtgtttctcaaggatcttcacggccaatttctgattaacgtcgttgtcctcagctaaaagaatgtcgaaagagcgcgagtggtcggtagttatgggtgtggagcgcccctcgagcgcaggtaacatgccattgcccagatcaatcggctcgcatggtgtcgtcatgtaggaactgattccgagatccagggccgacttcaagctaacgcagaccagtggacaaaccagcacgatggggacgtatttaaagtcatcgtacgtccgaagcattcgggctgtgttcacagaatccacgattattacatcgtaggcatgaccggactccttgccggaaggatcttggatctctggtggcggcacatgatcctcattacgcacgaccaacggttccaagtccagctttttaagcatcttcagaacgttctccgcttcgggcccgttctctcccttgtctatgaagaggacacggtggttcttgtaaggcaggatttgtgaggcaatcacattcagtgactggtcggccagtttcacgacgcaggtgaagtggaatgtactcccgtggccatattcggaggtgacccaaacatcaccgcccatcagattgactaggcgtttcgagatggaaagaccgagacctgttccaccaaaccgccgcgtggtcgatccatctgcctgttggaaggtatcaaaaatcaaatcaagtttgtcttcctcaattccgataccggtatctgagacggagaattcaaaagcatattcattggctgcacattgctcccggtcagatttgcatatcgtgagcttgacttcaccatgctcggtgaacttgatcgcgttaccgaccaagttaaggataatctgtcgtagacggaaagggtcaccaataacatagtcggggactgtgttgtcgacttgatatgtcagactcaggaacttctcgttcgctttgactgctaatgtcttcagggcgttgaacacagtaccgcggactgtgaaggggatgctttcaatcaccatacggttcgcttcgatctttgaaatatcgagtatgtcgtcaataattgtcaatagactgtttgcgaggttgtgcacgacattcaacatctctcgcgtgtacggtttcaggtcgtcggtgtccaaagtcagctgggtcatgccaataataccattcataggcgttctgatttcgtgactcatgtttgccagaaactcggatttggtacggttagccaattcggctgcttccctggcggccgtgtttcgttgaatactatcccgcaagttcgaaaccattttgttgatcttgcgcttcagctcgtccatctcaccagaagcgttaactgtgatcagcttggtaaaatccccgtccgttgcagcatctgtaatctcgccaaacgctcgcacctgggacgtaagattttcggccatggtgttgacatcctccgtgatctccttccacgtccccgcaattccctccacgttagcttggccgcccattttgccatcaacaccgacatcgcgggcaaccttcttcaattcagttgcaaatttcgccaaacgatccaccatgtgattgatggtgactttgagggttagaatctctccctgggcgtgaacttcaatcttcttgctcaaatcacccttggcaatagcttgtgtgacatcggatatacttcggacctgggaggtaaggttctgagccatggtgttgacattatcggtgagatctttccattttccttctacattgtcgaccttggcttggccacctagcgtaccatcggttccgacctccctggcgactttgctaacttcgaaagcaaatgtatttagtcggtccaccatgccgttgatcgtgcttttgagatctagtatttcgccctggacattggcggtgactttcttgctgagatcaccctttgcgacggcagtagtaacatcagcaatctccctgacttgagtagtcaagttgttggccatgcggttgacgttttcggtcagatctttccatgtgccttccaca

SEQ ID NO: 5888 - DNA, 5400 bp, Emericella nidulans
ccgggagatatccaccgagatgtactgctgcggtttgctcttttcatagacaagaagttccatggggttccatggggcgataggttgctttaccccctccacaagagcaaagccagcgagtaggctagcacatcctatagaggcaacttcaatatagtcgtcggggacggtcacaagctcgtactgcgagagactccacgcattaatcgacacgagtagaataccaaatcgaacacactgagatatgaagaccccccgcatgtttgcagagcgcgatggctgagtatccagatgtgcctgctgtggtctctgccaatcatgctcatcattatctggtgatttgatggtaaaagctcgatcaaaaagattctccagccctgtggaggcatgatcggtcactggaaagaatttaggaggcgcgaatacagcatctggagaggccgttttgcgcctccaatcagcggacgattgagcagggctgcgatgaaaaggattgcgctcaacgacctgttcgattggttttggtctctttgaggactggcttcgcaagctccatgatggcggcactggagcgggaggaagagatccgtaaaaaggagtagggccggaaaggagagactgtcgctggtcgcgttgatgaacagttgaggctggttggaaactatgctgtatagacggagtccagtccatgtcgtcgacctcgggcggtggcgtcggaatggcgcgctcctcccgagcgctctgcggagttgccagcctttcaataggaaagcggggtgttatctgctgagagatttcatggggggtgtagaagggctgtttcgtgtcagtggtcaatcgaggagatgcctccgttttccgaactggggttgtcattggagtagtttcagcccaattgaccagtggtcgagtgttatagcagacgatgcgccgcgatatgatgacagactaaagtatgtcaacactctttagtgaaatggtaccaagaaggtggtcctaccaaaactgtaaaaaaaaacatgaagagatgtagagcaggcggcagcgtggcatcaaggccgctagacgagggatccctaaggacggcccaaaacgcgcaccgcacgaccatgacaataagctggactttatagtattcacctagtcccaagaagcggccgcctctcccttcaacctttaagcgcagcttcgggttataccacagcgaaaatatgccggccacaagagacaagcctgcatagggtcccaagtccacaggaccatcagatggtagatgaagcgtttggaggacttgtctaatgcgtggaacgaccacatgcgacattgagaaaccatccgagtctcgtaatgatttttcgacaggcagtgcattggtcaagtcccaggcaagttgacctgcaatgctagcccagtaacagatagcaccggcaaacaccaaaagactcctccagttccattgtcgcgctttgcgcgctgcttttcctgctttactcctgtccatcattcgccgcagatggtctgactttgcttcgtatccggcctggcggatgcgcgccttcacacgaggttcacattgatcgcacacttgaggataccgctcttctagattttttcggaatttgggatattccctttcgtatgcgctataattcggatcgtctgagggcgggaagtaggatgccaaagcactagtgaaaaggtgttggttccgcacacactgggcacaaaacaagtccgagcccgtcaaacctatgtcaacggattcaagagaagattttgttgggccgggtgtaggcggatctggattcgtttcggtggcaggaggatctgttatatctccattctattaaggcagtttattagtagttgtacaggggagaaacacaaaagagtgacgtacttcgtcgagatagttgacggcctcacagtgtttacattgccattttcggagagggccttttccaggctgtgcagagcgacgaccgcaatagaagcagcttagtcgcttcgagaagagaggagccatgatgtgtagaacatttgatgggtgatgaagggcgtcgtagcagagaatacgctctaagaatgcaaagaagtcttaaccccgacaacaccaggtgcacagaccacacgtgaatcatcaatagaccagatccgccaggaacacgttcagttcattgcaactacaccagcacattcttcatcaattcagtcgcaggcgagtggattgatgatttgctacaatttttgacacaattacttggtctttttctttcacgatgcctgcgatcctgcaacttcaccttctgcctcccactctgttctaccaccgatcataaaagtttcctggcatatcatactctccgatctcgcacaattatgtctatttgtctgttatctctcatcgtctctaccctggctgtcggttgtactgccttgggctacggtcttatggctttgttacagctgtcgctccccagggtagccgtcctggcccccctcttcatcgcaagcgtcatatcactggtcctggttcgttcgaatccccgttgcactgagttccgtgctaaaaaaaaaaaaaaagaagccaggctaacgtagcaaacgtatagctcctcggtgtttatacaatcttccagaacactccggtgcccaaatggcgtcccaagagcaccccggtccatcttctggtcgtcctcggcagtggcggccacacggcagagatgctttctttgctacggcgcgtggacattattacaaacaaatgcatttatcggacctatgttgtcagctccggtgataacttcagcgctaccaaggcgctcgagttcgaatccagtctcgggggacagccagagtcctacgcaatcataacagtgcctcgtgcccgccgcgtccatcaatcctacttaacggctcccttcaccactattttgtctttctggtcctgtattctagttctatgtgggcgccatccggaccagcagcgacacaaacgaccagcgcaacttacctcgccttatccggatctcatcatcaccaatggccccgcgacagccgttagtgttatactagctgctagattcttgcgtcttcttgcttcttgcctgagcttcctatctttagccaagtcccaccggcaatctatgaccggcaaaggggcgagcgaggctctgctgccgggagaataccgacttcgtacagtatttgtggaatcttgggcgcgggtgaagacattgagcttgtcgggaaagattcttctgcctttcgctgaccgattcttggttcagtggcctgcgctggaagggaagcaggcgtggtgggggatgaggaagactgaatacgttgccggtcttgtggactgatgctctgcaagacactttgtgcatgagtcattgcgacattgagcacggatttgggtacatacctgcagtagcacatcgttgagcctctggactattacagtatagtccaaacggaaagcgccgcagccgaggcctttccctcattgcggctgtcggttgcatacttgggatccatcgaacgaatcttacgcttaacacacggctgctccgatgtacacggaagttgcactgtataccactgtagctatatgtccagtgtattggtagacctcttgtgcaacccgtacatgtgcccgctgcttactccaacgtaagcccctcatataccccgcatctgaccagaagcgattaccataaacctcgccctcaattcatcaacctcatttttagaacataccatcatcatgccatacgcgctacaaaaccgcaatgtcctcgtctctgcgggctctaggtaccctactgaccccaaatgatcccaacatgtctcttagcagcgcacccaaaggcgacactcaacaattgctaatccactattttcttattttttagaggattaggagcggtcgtcgcccagaagtttgctgccgaaggctgcaacgtcgcaatcaattacttctctagcagggatgctgcggaaaaagtcgcatcagatattcgagcgcagtataatgtcaagatcatattgattcagggtgtacgttcccattggcttgcattgccacagtttgtctgctcgcgcggattacggtggtattggcgttctgattgaaggtctgcgtttgtataggatgcgagtattcagagtgaatgtcagagcatggtgcagactacgatcgagcaacttggaggtctggatattctggtttcgaatgctgtgggttctcgtccttggtcagagccttgtatatggaggaatgtgctaatgtggggattgggctggaccaaagcggcgacgatcaacgacttggatgccatgaatgaggaagactgggataaggtaggtagcagtcggtgatctaagtcatatacatgcacataacaagggcttacagagctggtctgccaatgtgaaaggtcatctatggctcttcaaggcggcacttcctacgttcagagccaatccggacggtggtgtcttcctactcacctcatcagcagcggtaaatatccttgctctaggaagtaacagtaatgctcactgacataccgcaaggccgtttctgcgtcaggaagtagtctgccatattctgtcacgaaagcggcaggtatgggatatgacctcaggaatatgagtgtatggagatgactaaacgaagcacaggcttgcatttggtcaagtgcctcgcacagactcaaggaaacaaagtccgcgtcaatgcggttcttccaggcctgctcctgactgaatgggtacgtagtaatgattcaagggaatgtggattcaagtgctaagtcaagaccagggactgcggttccccaaggagaaaattgaggcttataaagctagaactcctcttaacaccctggtatggagtcccagcgaagcatgaaaagtattgttttgtgaactaacgttccatgctcactacaagcctgaagtggaggacaccgccgatgcatatatcaacatagcaaagaactcatcaatgacaggacaagcagttcagataggtatgaggctatctgagtttcatgtgtgcagaatatctaacttcacagattctgggtttgtggtgaactactaagctgagctgtgtggcgcaaagatagaagtgaggtgccctttaggattgaagatttgagataatgcatggtgttggttttacatagtatacattgtgtttgttcttcggccttcaacagaaaggatagtggaatgcattgaatgaagcaccatgcgatgagaaagtgcggctgcccatcattcgagctgtgagggcagcacggaacgcatccgtattgggcctgccctttcaccttcatcatatggattctgaccagcttttcgtctagagtgaagacatatacccct

SEQ ID NO: 5889 - DNA, 2006 bp, Emericella nidulans
aatctttccctaagaagggcctccatttccttcttgcgctcgcgctcgcgcgcttttttctgaccagagagacgggtcttgattgacagcagtccagactgcataccaacggcaatatgcttgtcttcgcgtgcagcgccggaggtgattgcgcagagggagaggatgggcgactggtatttgaagccagccacgacattccagccagttgtttcgtgaatcttaaggtggccatcgagagcaccgctgagtaaccgcgttccgtccgatgctaaggagagtgatgtgactgtcttttgatggctctgaatcatatgcagtggctttccagccacgatatccaacaccgcgatcttgttgtccgccgcggccagcactgtcgtgcccgtcggcatggggagaacagtttccagcggcgcgcccatcttgaaagtcatggcagaccggccctccatacggggatcccacaaccgcactgttcgatcgtaactaccagacactaacgagccagacgaagccagcgaacccggcatgaacgccgcagtacgcacatagtcggagtgacccacgaatgatttgatactgttctcactgggcagatcccacaaccgcacagtccggtcatcgcttgcggacagaacacacgtcggatcgctaggcgagaacttggctacccaaaccggctgcttgtggtccttccacgtcttcaaaatcgctcgcgaaccaacatcgaacacctgtaatgtaccggtatcatcacccgctactagaatcctgccatcaggacgaacgtctgtgccgcgcgcagtgtcatcgaaccgagtgatcgttcggagcagttttcgtgtgcgaatagagtaaatctgcacgcgggcgcccgttgtgacggtgaagacatcggggggctgtgtgagcgaggggaaggcagaggcggaagagggcgcagatggttgtgtgatgaagttgacagggccgtttgctggtgatggaatgaggagaggatttttgaaggtcttccagtggagctgctcggggcttaattgtgatgcgggcagctcgggcagcttgacctgcgttaacgggaggacgggggccgccatgctgaagagtcttgactgggctatgcggatcaaccgcgtcgctggctttagttgtctgaagtgtctggtgaggtttcgagagttgatggattttttcgttatcgcggtatcagtacgctatacccgattgggcttttattactgtaccaatgtattcaacttacgcttgctcgctcatacaatcaacaacgaactcattatttcctacttgtgaacttctcacattttggtggcttgaattaagcctagtgtacaaggctataatgagttagtggtggtcgacgtatgaatagctacatgcattgtcgatgctgagggttacctagccaacccccagctttacttttcttcatcgccgagtcgtggcagagtccagccagtttgttgacttgcctcatggcctcaatagctaactcttttttcagagatagatagacagctgaggcgtgtcattatgacaagaattaatcaacaaagttacgcgataacttagtctaagtgttgtcctacagcacctccaacaccatggcgtccagtactctaaagctgccgatgagtgcgaatagcatcaatgctacttccattggatcatatgaaggagattgacgtgattcattgtcttactccttgcatccttatcgccccttggagtaacagtcaacggatcacatccgatctccgggaaggcgttccaagggctagcatggctaaagataagcccaaattcttcagttgcctccaataaaccccgtatacttgctcatattcctccgcagtgcagtaccaagttccatcagctgccatcatgcacaccagcgaagagcgtggcaaggttgcagtcctgagtccgactgacgatgatttgaagagggacttcaaggcccgccaggtatcgatgtatcaatg

SEQ ID NO: 5890 - DNA, 3855 bp, Emericella nidulans
accctatgcggaggtcgagctggagactatgaactttagtgttgtagggaccgtcagtgtaatagttctgagtgtcttctattatcttgtgagggcgcgccatgtgtacagggggcctattattgagactagcccgctgtaaataggacacgctccaaagagattcgttgtgccgtataaaggcacccacgtctgttaccatgtatctatcatcggccattataaccgctaaaatagcacgcctatctaaacttccacctcccacggcttcaccgtctccccttcaacatacctccccccaggcggccgccacataacgatttcgtcaatcggtaacagagtgttctcgtagtgcttccactccttcacttcctcctccgagagctcccgctccggtacaggttttactcggttcacaaggactacgcgaaacccgtactgtgcatacaatggcgccccgaactcggaggcatccaaccaggcctctaagccgcgctcatcggcgatgcgcgtgccccaatccatgaacagccggcctagtccctgccgacggtactggggaagtgtgaatgcaatatggagaactgccaatgcgttggtcagcaaatttcaccttttatccttgagtcatatatgggagcgaggagctcacaggcatgcggtctttgcgccatttgctcccgcggccgctcaaactgcctcgcagcaagtgtcgcgaactccctcccaatgccctcgggataccaatccgcgacgagctggccgacttgcggccctgtatgcggattctccttgtaaaaataccatttcgctgcggccgctaatttgtcaccgtccagcgtgtcgacgatcttgacccatgtcacggttggttgcagctggcggtactcttcaagttgactggcgatgcatgtctgaagacttgcttcacggttattgttcaggattgggaaaaacagtcgcaggactccctgaaaggggttttcgaatgattcccagagtttagagtagatttccgggaagtcatcctcggttgcgatgcggagttggaaacgctgcaacatcgctggcgaaataatttagaataaggaattgggtagtctgtagctggcggtgttctagggagaggccaagcatgcatctttaatatggtgttcatttctccacatatattactaatgacctgcttgtatcatggatcctacgaactaatctgtcccgaatcacatcaccagccccagtctattttctcatcgtctggaagaaacgggtaggtaggatgagcgcctgatgttcgcgcaaggggcggccgagataaattaaactagaggacaggggtctggatttttttctgaaaatggcctagagagattacctttccgaatcagatgtaacctcttacagggctataattattcgttttgcgggcctagcacgtagccccctgctacacggagtttggaacatgcctagctctgcatggacattggggatgttttatggtggtacgactgtggataacctaagccgactcctagtagtggtgtatacctctaaaggcccaccttgctggttctggaataagctaactcgccgggctgcttcaggccccctgccgtttacctgggcagacacggtgagtaggtgggcggtgattcagagcaataagaacagttactgccctccgtgtagatgtcttcatgtagcggacccacggcattgtataatctattcccttataagatatcttgcgcaatatacggagaaaaaaaactaattaaattgctaccgagacgataaaatattgtctgttaagggacgtatttagatggatcttcctatctagacgtgccgtacgtacaagaaggaatcgctaaagaagaaatgagaaagaaggattgttgttgcaaggaagtcttgtaggtggctcaccgccttcaggacagcgcaggccttggccgagtcactaaggtctaaggtccttgtataggcaaaggacccataacagtacccccccctccctctatgtaggaagtacaggtcacagggtaggtcatgttgctttagcctttatatatgcatctctgtttagtgagccgtcctgaagtctatattgtttcgtacgatccagccactcatccagagcttgtacttcctccaaagctgtggcagcttcccaggttggctgagcatagcctgactatttcactaggtattccagccggtgacctctcccgtatctcctgcgatgttcgtccaggattttctctaccatgtattcttcctcaccgttcaccatgatgctagggggctggctatcatcattcttctgggaaggaagtggatctgatgaagccagccgaagcaggtccacatggaagactggatggatccctgggggcgtattcagcggtacagcatgactgcccaccaggcctataaccttatacttggcgttcttccagtcaagtttcttactgggtcggtccgtacggatgttcttcagacttagccagaccttatctcctacttggtagtttgtggccgggctcctgtgtttattagcctgattctctgtattctgttgggaataggccatggaggcttgagcccagtctagggcttccttaactttctgtacgatggcttcccctttctggataggactcttggttggttcttcagctagatgctctacctccttggtaggggtaaatgggctgaggttgtacctatggcttagatagaaggggctgacccctgttgctgttgatgtacggctattaattgctagctctgcaagtagaagtagcctgttctagtccttctggtcatagcaggtatacatgcagaggtaggtttctactgtactgtttattctctctgttgatctattagtctgaggataataggctgtagatagccggtggttgatccctgtcagggtacatatgcgggcccatgtattacttgtaaactggcttcccctgtctgaggtaatagccttcaggatcccgtgtttgcttataagtacttgtatgagtgcccaggccatactctcagagtcagtttctgacattccttctagtatcacacctttggttaattggtctgtgataaccatgatgtttgtacaacctttgctctctggtaggtctgtaatgaaatctattaaaacctcctgccagggatgattaggcacagggaggggctttaatagcccccttctctggtctctccaagacttggtcctcctacatatatcacagttccggacgaatcttctgatatcccgggacatgttaggccagaagtattcacagctaaccagtaaatatgtttgctcttggccaggatgtcctgtcaatatagagtcatgtgcagcctgaattatacttatacagagctgtttactatcaggcacctacctcctcccatggaagaggatatggtcttgggcgtccagctggcattctgagattctgactttcaattataggtatagaggaaatctccttgctccatctttcaggcacagtactgctttactatatcttttatcctgtttaagtacctccttctatatatcactttttttgtacagctcccatggttgctcttcagccagttagagggtggcaactaccatcttccccaagtatttttctgtaaaaagttgcattgtacaagacttgaccctgtcatcttcatcatcaggcatgtcttggtctctctgtgaaagtatatcagctctctgattggctgaccctttcctatatactagcttgaagttgaactggctgagaaataaggattattgtatgtgtcattctgtcagcttcaatggaagaagaa

SEQ ID NO: 5891 - DNA, 9067 bp, Emericella nidulans
ggcggtacatgtgcatagtctcctaggcgggcattcaacagctaaaagtttctagctatgcgacctaatgttttcttggctacgccaccagatcgttgagcacatggcgaggcttgattcaccggtgacgaggcggagctctgcagaacaagggaccttctattccgagtgtgttaagcaacgacgtctgctcagtctgcttaacactcactaaccttactcccaacttatgagaagatactcttctcaataccagcctcataatatattctaatttgagcttgtcttcctctatttccagtcagattcacggctcatgaaccatgacgacaaatcagagacatcgtagtcagcccccagttccagagcctgagtatgacaacctggagatccggtgcacttggagtggggagtatgaggaagtatcgaatattagaatttctctggaggtaaggggtctgtcttcacgtcttgcgtcgcatcccgcactgagaatgtctgatttaggtcaaatgtgtcccaaacacgcagcttcagctgttgagtttacgcagccccggcatatttttcgaagaatcctttctagaacgccttccacaaaccgaagatgatacaggcgacctggacgatacgaaaaccccacaaagccctctttttgggttctcccctcttgtacgcgacgccagccgtgatactggactgttcgttgatggctgctcgggttgcataccagaaaccctgccaattgtggaagaaaaggagcaggcacttgtagcgagtggaagcattaagaacggctcggatgcccgcagtgctgaagttgttctgggaaatcctgtaccttcgacgccaactactagatgccgatctgattcagttgcgtctgaggccgagagcttcactagatcacgaaagagaagcgccagtgacgccgagcttcctgattctgggtcagatgtgggcgacacgcatggagttctcaaggatatcagtaaccataaaatgcggcaaaagagtcggttcgcaccagcaagtccagcggatcgacctacggaaagtttgtcatcggagcatttagatgcctcacacaaacaaatggagagtcccagaagcccaaaaaatttgggcgcaaggaaatcaggaccgacgaaaaccacaggcctaactatccccaatgaaaacgccagtcctagaaacccgagtagatccactgttacagaagcatggctcatggacaagttagtatcgccaggaaagtccacgcccaaagggaaacagccacagaagtccagtctcattcctaagccagcatcaactggcagttcagagactttacagttaacaagttttgctaccaccgccgtgggattccatctgacgagtagaggtgcccttgaagaccaagcaccggcaactgctactcgcaaagcacaatcagttaaggaaaccagggtccgctttcaaatacccaacgacgcgccaactgtcacagaacgttccgaaggccagatatcgtcgccagctacatctagggagctgggagccgctatggaacggactagccttatatctagcggcaagacgagattatgttacgtaccggggaattcaggagattcccgccgccccggggaacgtaccgacgtcgaacagccggagccatccgatcagccagaagtggaagtggtaaatgggctgcttatcctcagaaactctaaacgggtacttccagcaacatacaaggtcactataattgcagcccgctctatatactatccgaacgaacagggatggagcgatctggaaatcccgggaattccaagaacaaagagtggcaggattggggttctcctcttccttatgcctgctcagcacggacttgagattcggaccacagatgttaatagagcaactattgtcgaagactgcctcattgcggagttcgttagcactggaaacctagtgatcccccttcgccgatgcagcagagagttctgcggcgaaattggtgatttcactgtggaccaggaaatcatttcccagagtatagtcggagtcgcaactacacccggacaaagtgatcagtcagttatccagatgagatgccatgcagcgtgctccgtacgactgtacaaccgctgtttctggagtaagaggtgcatcattcccctttgtgtggatggtggtccaagtggtttcttctattgtgacctgacttcccagcaacgggttacgaagagtatctgcatcaccgccaggaggaccaaaattggagtctcccgtatccgtgtggtctgctcgccaaaagatattgataggctctatctgagatggacgatagagttccccggtcgcagagcagcgtattggattccacgaatatatccagcattgtcgacgtctcatgagctcagtcagcactcgctgcggtacaaattgttggaagtaatgaacgacccgtcatacttgtactccaggattgacgccaccgaagtgaactgcgacagtagtgaaatcgctcaaatatacagggactatgagcaggctcctgacgacgtgagcgaggatgcggaaagtattctttcgcagcctgcggcagcttcaaacgcatcgcggtctaaatggacagctgagatgcaggatggcctgaacccgagccattttctgaagcgagttctggtgggagtactttgccttgctgtgttacggttcgcttatgttaagctccccgatcgaagttccaggacgcacccgtcttcaatggggcacgtggaagttttgcagcagacagagcaattaccgtcgtttcattctttggagacgcagttcaaagactatcaaaaatggctcggtaatcttgactcaaaacccaatttgaacgcattggatgatgacagacatgcggccagccttgcgggtggtgaggaagcaaagatgcctgccagtgatggaaaacaaaatgcgcagagcgtggagatggaggtaaaagttgaggagcgtgcaaagccttcagtctctcttagggacagggtcgattattggctaggttggacggggcctgtttaagagtagttctggcgttgcgtcaaaatcatgatggtataactagaacaagtaccatgtacgcaatgactatattcagggccttgtgctcttttccaggtgtttcaagatctcctcaaccgcccactttagcagatccgccatagggagggctccctggccaggagcaacagtaacgccagcatccattctcagcttcacgccctgcccgactctgcggatcagctcatcctgatcctcagtaggcaaggcctcggcgccgtcgtcttcaggaagcaacaaccatgcatgatccctcacataacgcggccaaacaatatcatccacataaccaggcgggtctgtccaaaagttctgtggcggccgatcatcctcgacctccaggtccaccctttcttcctcagcttctgaggccgatgacgacctctgcggcaactctgtcgtcggagcaggcccaatagtcacatacccgctcctcttctccctcctttccttgacaaggtcatacggcgcagccagaaacattggcaaatcaatctggtcatgaacaccgcggagtccatgttcttttccacctttttctgttgcgggtggcgcatatagcaggaatccttctaggagtgctatcgtcactttttcctttccatctagtcgctcttccgcaaccattgacgaagatgacaataaaatcatctgagtccggctagagacgtaccctctcagctcatcaacgagcgcatcatccacccccgaccccggcgaaacttcatttagatcctcctttgagcgcagtcgaggcggaaggtgcccgtgctcgtgcacgtagcggagtgccgacgtcagaaattttatgtccaaggcacccaaacaatcccagtcttgaattctggcgccagatttggtggttgtataggggattctggaatcggattagcttagagtgaactcgcggggtagttcataaattgcttcatgattgttctaaggggtggaaaggagggacatatgcatacttatcatccgaatagtagaagtcgtcttcatggattatgaatgtggatatcagcttcgacaattgtgatccttcttgcgtttgtggctggttggagaaaatgcgctgcaggaggcgggcgagggttgttttgccgctggaggaggggcccgagagggcgaatatgaaagtcggcatgtttctattgttttttcttaaccctgctctagttgaggtcctgtcgtcatttccagatgttcgttgatggtggttggaatcgtagaaatgtgggtcgtaatatcatgtgatcaatgtgggcttccggattaggtaagtttgacactattccaagttcgaaaaattgggcagctggcgtacggaatctacaaaactaacaagccctgaaagtcagctacagctttttgaactggggtatctgatagtattataatatactgtgctgccgctaactacaatacatctacctagcacccgctagttcggcgtcagtttcaacagcggagcgaacaacgaagcgttgagcaggagaaatactcctcttcggacggggagactccatgattattccattcggatcacgaaactgcagacgagatggtgaccgccgtcttttagccgaaggtgaaaggagatctggctctaaattcacaaacccaactcccttgctactggttggggtcacactaacactgcgcctccgttttactggcgtagtgagaagcgtatttccctccgctttcgcttccatcctcggcctcgtctgcacttcgtcgttatcaggaatcggtagacgatgtctattgaagaaaccagttggatggcggaggaaagccagggacgttgagtcctcacagcagggcatgggaatgaaacgctcatgctggatgattgagctcatggtatagtcatccagcagatcattttgaatctcaacatctgccatggctttccggcgttggagaatcttgtcctcgagcgtgtcgcggagcacgagggtctcgacgaagacgggacgggtctgcccaatgcggtgggcacgcttgatagcttgagactctatgttcggttgccaaattggattgactatgtacactcgcgaggcctgtgcaatgtgcagcccgtgcgaggcttgccggaggtccattaggagtacgcggacctgctcaaattcgcgaaataggattaagtattcttcgcggagggtcggttttaatgtgttagcgtagatccggaagtccacccccagcagttcgaggccctcggcaatcagtatgccgagttgttattgtcatagaagatgatgatctcttcagccttggagtgttcttgaacctggtctaataggtacgttagttcggctgatgcagtcgcgatcagtttagtttgtgtgaggggcgaataagggggcagttccttgtatatcccattcagaaatgtttgcttggctttgcgtttaaccgagctctctggggaagtcttcttaggggccgcgactgatgcatcaaatccttcgcggtgagacaactccctacgtatcttgatgccagcgcccgacaggccttcggctgggtcaggttcacagaggatgtttcgttacgaattgctgagcgagacgagcttgtgagattccgagtaaaagaggctcacactgggcctgtgcgggatctagggcccaaaagtttcgagcctctgatggaaagccagtgacaaaaacgcccagttcatgcatgttcttgaatccattccaggcaccagagttgagtgctgtctgagcaattttgatgccttgcgtgagtgttgagatgtcgtcttcagtcattgtctctctgttctgctcaagatatgtcgtagcgacattgaccgtcccctgtaagtcgaagtcggagcccgcccaccagaacccagcttgtcgcagattgctgatgacacggctgagatgttttctgttgcgttggtgaaacatgtaatctatatcttgccgttctgacgtgaccgcgttgacagccaggatgaaaataaacaagtttagactcagtttatcgtaaaaagtcggttcaagatgaacgactttattgtacaatcgtggcaaagggatttcattgttaataacatccagccgatgacgtacaactaggccttgcagcgttgctcggagggatggcgcctttcgtcgcctcccattaggtccaactggcttgatgtacgtcgcccagtcagcgggatcatcgctcctcgagttagaccagggcttgaggcccaggaagtcaacaacaattcgacgtaacttgtcgagatcttttagctcgctatccaacccctttccggtcttcttcctaccgtgaagcacggcggtcgttgcctcggtcaaatcagtgtcgctcgtgtgtgtttcacgagacgccaggctgacttcaaccccatacagcccactggacggagtaccagaaacaacccaccgtctctcgacgtggatctgatcgagaaggtgcgacatattcgtcttgtggccatggccggcgacgttatgcccttcatctacaataaccctgagccaatggagctttgttaacggcgaaggctccttgcggcggtcccggccgcctccattaaagtcatccgcctctttctcaaatcgagttcttgagaaaagaacaatgtcataagcgaataagtcctcgggcggcggtgtcaagtctgcgctgctccgcaacgtgagagtcttcaggccctcggtgtgcatcgcaatctcactcatccaatggtcaaccagattggggggtactactattaaagtccctgaatgaagatggatgcgggggtattccacaacagtacggccagtatatctccctgccggcgggcgaaagatatatgagccgcggtttgcctcgcaagacttgatacacccatcgtaaatctcccccatttgactcaagtaattaaaatgtgctttccaaggcaacgacaaccgaccagcagcagccgccgccatctcaaggagactcctagtctgagtcctctccggatttctcatggactgatactcgaggggaatttgcggaaagtggccacgggtagctaaaatcacagctaggcaaatcagagtcttaccgcagcccatagtctccgcgagtatccctccacaggcctccgaatacatcgttcgctctcgcgcgattttgcccttttccttgtcgtagtagtatttttggccagttgggcttgaacaagactgaagtcgcgggtccagcatttgatgcggctgtacttctcgctgaatcatcgtagccgccgaacgcctttgatagggatagagtggtgttttaagacccaggacgccagtataggtttgccctttctcaaccgcgctctcatctgaagcggtggtagagagtaaatcctgcatggctagcttggcgtatggatcccgcatcatctctacatcgggacttggaccttcgagggtattaaagatataccacagagactcatcttcggcaccaacagaagagaggtccactatcctctggcccgatctctcctgcccagcccaagcgtcgggggaggggtccactttggacatgacagctttcagggcttttctaagtggggcgctagagcgtggtatgaacttccgcccaacatcatcgggcaaaacataaacacggacatagctgatttggggattgagatgatcttcgtgggtcgtagtccgtacccaattctgtttttccaatgcattgatttcggcagcagggaatccaggaacacccttttctaaaacgccgacggcgataaacgaatccagattctcgagcagaagcgccatatctgttttctgagtctctaccagggactcgggagttgctgggtttgtggatgtgaaagtcgcatcagcagcgtctccagaaatgttaggcgttgactccactgggtgtgagggagccatcataacaacagggctctgtaagatcccgaaacctattgtgttatcaactagatgcatacaatgagtctgtattctgaaacgtttgcgggctcgcaagacgtccgagtcattgagagtagtaacacaccttgagaatagttagcttcatctgaataaagagttgaaagttagaagacacctttccatgtatattttctgggttagtaagctaaatggactctcgggcccgtattcctgcattatatatgagaataggtggatgaaaagaggggagtgaggctcgatacctcccatgaggctatctcttatccgagatcctgattgggctaggagtgacattgccttgcacttttcccgatgcggcttagtatgattattgagtctttcgtgcacgtgatgctgaatcactttgtacactctttaccgagtgcaactacgaggccatgaattgccatacgtctggtctgcattttaatatttacgaacactaataccagttgctcaaggcttccgactgatgatattcaaaaccacagctccgtagttctgtgattatgactgcagaaaggccgtcagaatgatcccctaaaaattacctttgcccttccacccaatgctagtggagtcacacagcaggagataccctagctagctaaaattctctaagcaacctagcatgcagtctctttaggctgtatttaggtttagttatctcgacccagtctccccaccgccgcaaagaacccagttagggcatctctatggacttggcaacgggctaactggtattcgaacatgtaacccgctcgccagcgctctgcagcccagaaaccaactatctatcctgcaccgaagattttcgtttgcttactgcctcgtgtagttgatatggcggccaggcttcgccgatagagtcgccctcagactactcgtcactgttaaccgtctgttccacgatgaggataaatatatcgttccccataacaatgactatagtggtactgctgttacaggagggcggttgatggtgattgtaggatgat

SEQ ID NO: 5892 - DNA, 5326 bp, Emericella nidulans
ggcagataatttaggtatattatgaactaggaatacccaggaagagagcttataataactggtaatttccttttagcaaattactgctctagggacagagacaggcctctctttcttaatagagaaaatagaaatataatacttctctagaaagcagcagcagtatctccccatagttactctacctagtataggggagattataccatccctatatatatagtagttaggagttcttctagatacaaagcttacttttaaagcctatattaatttggtctttagctgcaggaaacaacttgcccagcacctaaaaagacttaataatacctagcatagctgcccagtagcctctatataggcagtagttatatagtatattcttccaacagctctgtacagggcagaagtcttctatacaggcaaataataaaaaggggtagttaactgcctgctttctctcttctgcacagcagccctggctatttatcctagtctataagactacccctactacagtactcctctgcaaagcagacttactagacctagaagctctacttaacagtatcctctagagggcagtagtaagatatataagccttaatactaaatacctaattatctaaatagctgtagagactactacaggcaggcctaaaaccaggcttaaaaggatcttatagctcctcctcagccccctgccagagtatattataataaagctgcctctccctctattatatatactcttaacagacaataaaggctacagccctgcccctttatagattttagtatacttagatagcttatagaccagccagggggcagggtatagctatataatctattttagccctattcttatatctaagggacatggccctgcaggccccaggacagaagtctataatatagaaattataggtactatagaaggcctatacatagccctaggataactatatattagctattctacctagctagttatcctcctagataacctagctgcagcctccctgctagcaagctatagactaacctcttatagacatagtctgtcagagacctttagccaactagctgcctagtagatagaaagccctttaatcctaactatgcaatagaagcccctttaggtctactagattctaggctactctggaattactgggaataagctggcagacaagcttgctaagctagggtcttctatatatagccttaatatctccccctccccagtatacctacaacaggaggtaaaacagtggctctatacagagatatatacagtatatgctaataagatgcctaaaacctacaaagccctgaatattagaccctatacaaaagaaagctgctcctacaagcacaagctgccctggtaggtacttagctgacttattactacctatacaggccacagagactttacagtatactaccagtactttaactactcagactacctagagagctgctcttgtggtaggaccaagaccctagtatacttcttcttctgcctatataccagaaagtactggaaagatagatagagatatataagggatagcctgtcaaaaataatagacttgttatgggtcctttgcctatacaaggaccttagaccttagtgactcggccaaggcctgcgctgtcctgaaggcggtgagccacctacaagacttccttgcaacaacaatccttctttctcatttcttctttagcgattccttcttgtacgtacggcacgtctagataggaagatccatctaaatacgtcccttaatattaggaatcgctcaccaatctcaataatagtatgaggagaccttttactatgacaatggaagaagaaagcgtcgcattgttgctacagcagctccaggagctccgtacagagatgcggactcagaaacaacagctccaagaagagaataacagcttacaggcggaactacaggccgtacggaactcgcaactgagaaaccatccaccagttaccactacagttacatccgcaacgcctaccccctatgaacaaagctatccccgtccttgtcacccggatgtcgaaccctttactggagaagaccctaaggactaccctcctttctagataaacctttatatgaagtttgcaatcaacgccgcctgctaccctacagaggaggaacaagtttactatgcctacagccgcctgagaggaaaagccagccagtgtgtactaccatggctcttggctcgccagaaatctgagactcccgtgctatgggcagaattctctgcggtactagacaaggcctttggtgaccctgaccaacagagaaaggctcttgtacgagtaaatacaataaagcaagggaaacgtgactttgaagagttcttgaatgaatttgacaaagaacttcttaatactggagggattaattgggatgataaccagaagaaggccttgttggacacggcaattaatgttgagttgctaaaagccatggttggtattaggcaggaggattcgtacaacaactactgtaatcaactgcgcgaaatcaaccacaacctccagagagtggccaggcttacataaaaaggatcttgcgctgctgtccccacgcatattgcttgtacaagaccagcaggaggctctgaccagaccgggacccctgatcaaatagactgggaagccacccatgctcaaattgcagccctacaaaaggaagtcgcggccctctatatgaaagggaccaggaccccaagaaaagctagtcaggcgcctgcagaggagaagcaaaagaggttgtctgagggcaaatgcctacgctgcggtgatcctgaccactttatacaagagtgccctacaaaacctaccaggcgccctaggcaggtggccatagtttaggaagaacaagaccaaatggatgactacagtgagagcgagtcggaaaatgaataacctctgtgcaaagtcgcgtacagaggggttatacagctagagaaatactacttgattggcaagatttcaacagctcgcgcatgaatacccccccattcttggtagaggcactagtcaactatacctataatgctcgtacaatgatagatacaggctgcctgacctatagggtaatcagtgacaagtttgtcaagatacattaaatacccaccatacctatctacccgaaacctttcaagggagtgaccaggaatatagaggagattaataagattatacaggttcagctagacatcggggcgcatacagaaaaaggagcctacttctatgtgatacctgataacctgggctatgacttgatcttgggactcccctggctggagcaacatgatggaaggttagaggctaagaggggcaggctgtacctctgtactactggagtctgtctatggagtactataaagaggcccttaccaaagctgaacatagcacagatatccaccacaaccatgggaggatttatacaaaggaaaaggtgccgtggccaagatattgagatatttgcagtctcattagcagatatacagaaggcactggccccaaagagacatattgacccccgtacaaagctaccaaggcaatactggaaatacctaaggctcttcgaacaagacaaagcagaagaactaccactgtactagggagataggattgatcacaaaattgagctcgtacaggaggagagtaggaaggatcctgaagtcccctggggccccctttacaacatgacccaggaagaactaatagtcctccggaaaacactctctgaactattacagaaaggctttatccgcgtgagccattccccagctgcagccccagtactctttgtacaaaaaccaggaggaggactgcggttctgcgtcgactaccgtgctctaaatgccattaccaagaaggaccgctatccattgcccctgatccatgagacactgaaccaaattggacaagccagatggtttactaagctggatgtgtctgctgccttccataagatccgcatagccaaaggccaggaatggatgactgccttccgtacgagatacgggctctttgaatggctagtcaccccttttgggttggctaatgcaccgagcaccttctaaaaatacatcaactggaccctccgggaatatctagatgaattctgctcagcctatatcgacgatgtgcttgtctataccaatggggacctccgccagcaccggaagcatgtatgaatggtcttgaagaaactggaagaagcaggcctatatttggatattaagaagtgcgaatttgagtgcaaggagacaaagtacttgggctttataatataggcagggaaggaatttaaatagacctagagaaggtaaaagcaataaaggaataggaaacccctactattataaaaggtgtccaaggattcctgggctttgctaacttctactaaaggtttatccctaacttctcagggatcatatacctactaaacaacttgacaaagaaaggaatacccttcttatagactaaggagtgccaggatagctttaatctgcttaagaaaaagtttattactagacctatcctagcaaccttcaacctttcctactatatagtagtagagactgactcctcaggttataatacaggaggagttctttcttaatataataaaaaagggaaattgtacctatatacctacttctctaaaaggaattctccagctgaatataactacaagatctatgacaaggagctacttataattatataataccttgaagcctgggatgctgaactgtacttatatagagaattctaagttattataaattataaaagcctagaatactttttctccctaagaaaattaatagaataatatatataatagtccttatttcttagctagcttgattttaaactagtatatagaaaaagatcagctaactaaaaagctaatatatttttataaaaaaattaagttatacctaataataaagataacaggcttaagtcttatataatataattttttaccaagaaatatatagaaaatataaaaatcactatcttttagctagccagggagctgctatataagccctataaaaaataaatatataaaaaaatacttaagtataataaaaaatacatagagtaagagattttttctacacctataattaaaaataagaaccttagaatactgaatagatatttaaaactatatcctcttttataaaaggaggtagatatttaaaaataaataattctataataataaaataccctggctaggaataaatatatatgcta

SEQ ID NO: 5893 - DNA, 7191 bp, Emericella nidulans
cggtttatctcaccggctataaggacaacgttccatactattcggacagttcctcttcgaccacgtcctcttcgaacagcagcagcacttctacaactagcggtgattctacaacgacaaacgcgaatggtgccgttgtgaccacctcgagtgctaatggacaacaggaaatggccaccagcacggcgtcggcagacaacgactcaagtaagaaggacggacctaatactgctgccatcgctgcgggtgtggtcattggtgttgtgggtctggctgctctgataggtgctggcttcttcctctggcgcttcaagaagcgccacccagctgatcagcggatgcgcgaaatgagcaacgttgaacaattcggcaaacccatgtcgcaagactccatgtctgaccatcggtttgatggtgactttatggcccacaggcgccagagcaacggtagcatcgatgatgaccgagatttctctcgccgggtcttgcaagtcacgaatcctgaccggcactaaccgttgtgtctactacccagtatttgcacctcatgatattcggtttgcacctccggatttacattcacgaactcaacctgtcttagcggacaatatcgccttctcggataagctatcgaatccgccccatagtttcaagctccgcccattggtcgtcttccacgagtttagggtgccttggaattcctcgctagactcaacgctagattgacagagcaactttaccgcggatcgcggatgagattttggtatgaaggcgtttgggctggttgacctttttattctaattcaaaatatttcgtatttattctgttacctgtatgttcttgaattgagaaccacattttttctcatgtcctttttggttctcaatcatgtcgtgcaagcatgcagtctgcacgcctggctcccaacagggatgcgcttcgttcaattggcacgcggcatatagtgaatcgtatcctccgtgtgcatgtcctaagcgtctcccctttctcttcccacccactcaactacaatcagacgcatactaggcacgtccctagtcttcgtcaacaaaacattgaaagcgtacacattcgtcttactcatggtgaagtgtgatagtgaatgaaacccctccagtctacatatcacgaataattacacagtccatagtcctcagctaagaaagagctaatacatacgaccatagggtgtggaaaacagggcttcccgtccgctcagccgtacttaagccacacgccggctggttagtagtatggtgggtgaccacatgcgaatcccagctgttgtatgtttttgtcaggtttttttgtattttgactccattatcaaatgtggatggtataatgagcccagaatgggttactgctttaagaggtgaccgcaagcgagatgggtgctaatgtagggaggatattaccatataaatatttccatattacctacttatttgggcgagtaagggacgaatatgagtgtcatgaccctgcaggccgcgatcccaacccagtaacccagtattgcaagcatcggacaacagcgaccctatatcctcacatgaacattaaaggcttgctaggatcacggctattctaagcacaatgcatagaataagctatgttgcatgagataaagtaactagatatgcgactcctaactacctaccttatcaaattaggcttcgctccgcaaaagatctcttataacggcttttccgtgtacattagttataacgcatgaatatattcagctagctgactggatagcccggccccaagaacagtaagagcgagaatcatacttacacggtcaggacttgatctgccttgtatgatatttcaagtggatctgtggtgcagttagggtctggcagaaggccgctagctacttacataggtgataggtactttctattgctagttaccctggtggtatcccgatagggtcacatttttccctcgaagcccgcctcgccattaaacgtagtattgggcttttgacaggtatgtgtgaaagctaggggtgtccgatttctttccaggctacatccaagactaagagcctagccagcgaaggtagatatgatttaacgtctgattcagtcatgcttgaagatttaggtgaacaagtatgtatatacgcccagtctagatgtggctgccatctgtaatctaatatagttattatttttaaagcagttagttgatatataagaaatctgtagaagcaagcttcaccaatcagttcctttcgatgatttttttttatcctttgataatcagagagctgtcgttggacaggctgttttaagagaagggagttagggaaacgtcggatgttgttctcagggaaagcatgagatatggatgggtgagacctagttacttgggagacgataaagcctagtatacacgaataaagtggacaaagatcaccccgatatccctgcaatcgtggtatacgggaaacggggagctctgcacaaagtacaggttcatgcatatatcatatcgtagatcttaagacagaccaaatgggtaggcgaggtgataaataatgcaacatatttagccaggggttaaggcacacaggtaaggtgtcagttgggtataagtggagcggcttcgcatatttcacgtcctacgtagagaacctcatcccctatgcgcgtatttactgaccttaagaggccaatgattacgggcctgactgatagtagtatgtatgagtccaaggcattgaatgccttgctatccactcagagtccagcttctggaaaggtctttaagccataattcaatagtggaggtagagtagctcttcaatgtgtttaaacggggtgcaaatggtgattgagattgtgatgacagcgattaggtaccggttggattatcaaatgcggttatggtagagagtctcgggatatggatagtggatgaacgactcggggcttggaggatgatgtagagtaggtgcgaagggaaatggctttaagacggtactcggtaggcttatattgctatttgtcggagttgaagacaatgaatacgcgaggcaaacgcaaagtagctttctgtggagtacatcgccgccgggagctatagtgctgagaagtcagcaaatacccgttagacaggagcagattgcaccagtgcaatatacaggtggagagcagaataggtaggtaggtaaggacgacatacctcaggatcggtctttgtactcgaggtcaaaagtccatagaaccgcaatgggtcaatctgcgcatgagaagggcaccaacatacctctcacatatacacagccaacgcccagcttacctcccatatagcatcaagtgcataatcgaaaaactatattgcatgctcgtgtagaccgcctggaggcctaaaaatatgagaaagcttgctatggcctagacgtttgttttcatggcacggataactagtgtatatgtcgtatttctcgccttcggacggttatggacgagtaaaagaagtccgctgagggctcccggtcgatggagtctgttcttgtggagcttgatcatctcgcaggtcaaaaggttcgccttctgaaagtattgtgtgaaatctcgtccgcagtattgagccagctaaaggggtaatcattagtagcaataagccatcttgggacaaaagaaggacatcgatcaagctgatccaggggccgcctcatgccgtaaatgacgcatgcagagtacagacaacaataatgtctctggagtacggccaaggaaagacttggccacaacaacgtgcccttgtgagatgcgactgtgcgggacttaaccaggccacactgtaactaaaaaaaagatgaaacgagcccatagcagatatggtcttgcccacgccgctgacttcatcgaacaaacagtgaggaagtacaaacgtggacgacatcgggttgtttggagctaaaccaaacgacgtactccttggcaagtccgtatgcgctttcggattcgatatgctctacctcctccaagtgcaggatatgatgtcttcatgggttgagaatggaccttttccacgagtggaggtatgttggtcgatgagaataagcaaggccaacagacatacgtcacagcaagtaaatctgttgattttgttgttttactgttggttaagttagataatcctattggacggtatatagatgaattcaagccaggctctctgcaccataagctgagactgatagcgtggatgcccatatcttgaaggatcgcctggatgctactttggagtaagctcggtgcagagtaggagcgaagtctaggcagcaaggatcgccacccctgtgggattggtgcttttgacgctggttaccaacgagaatgttatccaagccatttcatggagatccttgacaacggcgggaaatagtcggtggcaagagcgtcgtgcatttggagcatccttcatggtcggtgtataccatggaggtaaggcggggttaattattgttaataaatgagcaatatggttaaactattcgagatgctcgaggaaagtaccaactgcagctgcagacggtggagaattattggcgaagaccacgtgttggattaatatgctaatcgctatcccctgtaccagatggcgatggctcaatgagcgtgttatgattagcggccttcctgagcaggtaccatgcatagctagccgctctatagattgacaagggtttgaatccttcgacatctcagccagcggttggttccgccgacggcgaagaaccgggagtgcggtatccacatcatgagcttcgtaggtaatcttattgaagcaacgacccaacatattgagcgcatgcggtgactgaggtccgatcagctacggaaagaaatcatgcataccaggaccaacaacatggggagtatgtcatagtaaaggtgctgcgtttgactgaccgcgatgtcaatctccgccagcaggatgtccgggattagtgcagcgagaacttgggacaccttagtcgcagtcgcagtagtagcagtagtagaacgctgaagctcgtagcatgatacatcgttgagatgaccagaagcagccactagcctccaggtctcaggagtaggttactcattattccgcgcaaagcggcagaaacttccgattgcaccatgaagaattcagcctgaccgcaacggtggaggcgctgattcgttagctggaactgggaacggatacgataaggcgctggggtttcccaaactctgtgcctttgacccacaatgatctggagctcgaacagacaagcgagagatgaaggggttaagcgaagttatgtcttttgtgacctaccccttcggggtgggctctaagtctgcggttcagggctggatccaaaggggttgctcgaaagtggataagagactaccggcggcggtgggacgacccgtcttccaaagggcaaagagctaggaacgttgaggtaacgtagcccggctagccactttaaacatgaagaaaacccggaggacgaaaggagaaggaacaagagcacgcggaatgggtttcgataatatcgtcttcggttacggtgtgcaatgcctcctgatttgtcgaacgacgagactggccgctctgcaagttttacggggatgtcggccgctgtcggcgcgatgctgcgaactggcgaagcatagttcaagctaaccttattgtcactgaccgggtgctcgggtcccgcatggcccgacctcgattcactatcaagacaaatgtcgatctctgggattttcaacttggtgctccaatccccgaatcgggctttgctgttgttccgctatccggttactactggcacaggtcatacgctcaagggcaccccttaacgaagtcagttggatcaccggtctgagctcaaactgagcttggacgattaccgcgttgttgcgctgacttctagagccgaagcattttgacttcgggtgttggtgtataggtctggcagtggctgcttagcgcggtcagtagtgcggcccagcaagaacggcagtggcctttgcattatcggacaggccactatccagccttcaaatgcaaacttgccatgcagtctaaccgaaagacagttgcagctcgtcgaacggctgacctccgtcagtgaaggtccaggctgagggtggagagccagcgggacagctgtgagggccagaagctccaaaaactcaggagtcagggtgagtgctctgtaatcaccacggaatcggaggcatctactcgtctaattgtccaagtgtactcaaagtatgagaatggttggttctgtgtgagcggaaataatttccgccaccaccaatcaaaacacagaacgggtgatggaagcaaaggtaataacggggaaggagggtactctgcatgaagtataatcaaagtgtcgttgaaactgttgaattatggaatccccaggttagagcacgcgatgggctgtgcctgacacaggcagcacagccctgaagttggggctctggggggaaagctcaggcaaggcagattcgggtttcgtttaaagcttgactgcagggcgcagcgcggcatggttctccatgtgagcccagacgtgtttcaggttttgcgacccttgcatgccgcaacgagcgagcggctcattctattattatcgcaacgtggccgtgagagcttcggccagtgggcggttgctgcaaacgaaattcaaatgcgtagttgaggttcctcccgcggtcgtaccgagagcaagagggctctgtcctggtgacaccgtccgatggatagaaataacttttctcactggtcggccaatataattatcaagacggctgtcgaatcgggtcattagccttagcgttaagagcacgctccatacggctccatcacagtgttctggacttgccagtgactccatcaaaggtcgtatggtcctgtcttaacatacagcagctgagcactattattttgctgatttcgcggtccgccgatccagtctacggctagctgcccatatccctggaacgatcacagaaattaggaattgctgctgaacgtggaatgcccgccaagcctctggccacgttgtaacctacgttcgaaatgctaagaatcgcaaataacaaggggggattacatgattgccaggtggcatgtgcattatgtgatgt

SEQ ID NO: 5894 - DNA, 9274 bp, Emericella nidulans
ggatcgtctgacacgcagccctgaatcccctgcaaggttcggcaacctaaatcctgccacgagtttgaaccgtgggtcagggaccaggtccctgcttcctagccttcccaggatctttgacctccgttggatgccaagaatgaccagcagacatacctaggtatgcggctctcaacgtcgcccattattggccgtcatcacctttctcatcattgacccagttcttgaatggggtatgaatgttagagtgggaaaaaaaatttttattcgatgcgcgaatggtcgtgatcaagcattggcactggaatattgcaggcgggctttactagccagagaggaggcaggactgctatagaaagaggaggtctacaaaaagaaaccttgtctagcggaagagaaaattatacgcaggggagtacaaggtaaaagagaccgccagcacaaaatgattcaatttttattcaacccgctatgagctaaccagcccaacccagcccaaatgggtatgcaacactaaagatagcgataaaaatagccagtatccggcaaaggatggggtatacaagaagaatggcaggcaccctctcaagccaaggagcgtatcaacgaaacggaacgaaacggaaagagaaaaaaaaatagtgcgcttcaaatcaaaatcgacgagcaaacctggacatgccagcattagagatcgagacagaaaacagaaatggggtgttatgggtcacgccgtgaccttgaaggagtgggtgaaggggataggtgatatgtcgatccttacagcttagcctcgtctgaagagccattcacaaactgttgaggagcacccagggtagacaggatagagccaacttcccgctccagagattgaacctcagtgtgtgggtcatacatgcgactcttgatccacgcatcaagagtttcatcatccatcgttcggagagtagtctcacgatcaactttggcttcttgagcagcccggataacgttgcgagccacgacaacgctgaccttgcgaatgcgggtcagatcagggtagaggagaccacgctcaatctcctccgcggtgagggccttggagagagcctcaccggaggcatagatcatgctgtcggtgaccttgacggccttggacaggattgtgcccagtccaataccagggaaaacatacatgttgttaccctggccggggtagtacatctttgtctcacccgccgagttggtgaaagacattgtagggaagggggagccagaggcgaagaggacacgaccgtcggtgtttgtcacggcggtctcaaagtcacactcagatttagacgaagggttggagagagggaagatcatcgggttggtgttccactcagccatcttacgcaggatctcgggtgtgaaaacgccaccttgggtggaaagacccatcaggatcgagggcttgacgtggtcgacgacttcctccaaggtcttgaactgctggcccgcattgtctgtgcgagcaaagtagaccttgtgttcggcaagcttgtcaccgcggtctgctgtcacaagacctttggtgtcgacgagccagaagcatgaccgagcttcatcctcggtcatgccctcgcgcatgaagaaagcaacaatctgttcgcaacacccactccggcacttcccgcaccgaagaaaactgcacgctggtccttgcaagggacccctgagcgcttcacagcattgatgacaccaccgaggatcacggcaccagtaccctggatgtcatcgttgaagcatgtgtagacatcctgataccgttcgagcgcagggaatggattcttgaagtcttcaaactgaatgacgatactgcaaagaagttccccgttagcctccgtattctcgggcaaagttgggtcgatcgaacttaccccggccagcgctccgtcagggcggccatcagctcgtccaagaactcccgctcctcatcgggagtgatcttatcgcggcggctacctaagtagagcgggtcttcccggagagccttgttgcttgtgccgagatctagagtcaaagggagagtggcctcgggtcggataccagcacatgtggtgtagagagccaacttgccaatgggaatacccattccgttgatgccaaggtcacctagtccgagaattcgggaaccatcggtgatgcatgtgatctcaacgttgggctggggccagttggcaatgacagaggccaagttaccccggtcttcccagctaaggtacatacctagttcgggcaagttagctaaacctcggcagctcgccttattcgttggcttgaaactaaccttccggctgctggtagatctcggaccacctctggcaggcttcgccaacgaccggggtatagatgaggggagtcaattcctattcgacaattagcttcctgatcgacaatagctatggtgcaatcccgaaatctgaccctaagatgatctgtgaccagacggtaaaacaggtgcacattgttcttacggagagtgctgagatagaggaatttatcgatgggggtttgcttcaaggccaactgggcgagacctggtcctgttagcatgccgctggacaaacctccgcgttatatacatacaccgtgtcttctgggtctcgtagctttctgggcgaggaggagtcaggccgtatgtgcggagatacttgcgaatataggccgggttggcggtgtcataattttgttcactagaagcagatatgccgtctgttacccagctagtatcataaatgcgaagtatgctagacagcaacatacattggcccattgtggttcacatggggggtcgcatggaccggacgactttgttgtgagggaaaccgagccattctggatttctgagtcacagcagcaccactatggcagcgagaaccaaagacgaaggaggaagatgggaagacagagagtggcaattgagctgaaggcgacggtcttattttatgtagcaatccacgagacactagcattgaaccccctggagaaggaatccaccgcattccgagattgcaaagtcacaatgatgaccctgcgagcttcgaggaggtaaccgcaggactatgaacgtcgaccagagctggagctgtgaccaaacgatgagtctggggccaggagtcgggaagagtcggggaacagagggccagtcagggaggtcgggatcgcaacggtggatatttcggggggacgatggttgcatggcagcggaccgttttgacttctggctggaacaatggtagaaaggtgggaattgctgggaaaacgaagcttttcagcaaatgagcgctacttggggccgacgtggagaaaacgggatgtttccgacagtccttaggcagctcattttgcctgaattgaatgcggagaaagcgaacaaaaagacgagccgaagtctgagtcactggcagtggtgaggattattggaggaaggaaagttctgggtgaggtatttcttcgcagtcccgagactacaatgtagggggcagaccgctgagcacacgacctgtcactgttgctattcaatagtgcatcgccagagcccgtcccaacaataatcgctcatcttacgttgtcgcgcccccttcaattctgtgcgtaaacgatccccagcatccaaaagaaggacattactgatctgtacttcaggttttgcagcaggataacatccgaatgtcatcccgatgtttttcctgtggagcatctccaaccccattcccacgctagagaaggaacaggactaggtctaccgagtagtttcaagtccccaaggggccagctctcgacagcttagcctctaagctcttagcctaccgcgtcaactctgccacatgagccccaatccacctgactgctagattctcagctccaactcccgagcgctaagcagcagaaactagcctctagaggaaggattctggatgagactggatcgggctggggcggccgactctggaccacacttttagttttcgtggcttccgttcaacgaattcttcaacacctttccccgcagccacacgcggcccgattactgttcacccggctccaattcgtaatattatatgcgcaatcgagcatcagcacatctctccctcgctgcgggagacaaagtacgctggctgctgtgcgtggaatccaggatccagcgacagatgagcgggcggaaaatgccgcattctggagattcccaagcacttctcagcatctggtcgtacaagggagagctccaactctagaccagagtaagtgacagcacctctgtcgtctgcgcagtatcgactcaacagctccgaaaccacggcggttgagaagccgacttactcggtcccggccgagaataccggaagtctcatacccagcactgcttggtttctccgcaccattaaagtcgaaacagcgccgtcaaatgagattgccaatctcggatccattattggcgctcacgaatatataccgggttgagcattaataatgttgggcggccagccaacatgttcgggaggcaaaactctgcggcatctctgacacactagaagccctacccgctgtaaacgcagtaacatacactcatttgggtcagtttgttagctttggcggtataaaccctggtcttgattccgtcgataataaattgtatactcgggacatgtatgcaattgatacaactccttggacgtagcctgaaagtaacctgcacttttctaccgaagattaaccagagaacgatccacagtccccaatgccacccgtgctactcttgaaacccctagaggcactggacatgatgcccgatggggacgatcatcatggtggtccttcagcctctaggcttcggaagatctcagctcctcagtgtgggtcaagatgctgtgcgatccatacctcttatgcaatttcataaagattctaaaaagccctaagatcgctctaacctcactctccggtgcacgagtctatcaagaactaagccatactccttatcgatatacgtatatactccgtgcggactactatggggctgtaccgggcaccctaggtggatggtacggcagattgtgaagcttgatgctgctgatcgcgattgcctctatccgatacgtaggaggcagtttcgaatttgattatcaaaaataatatattcattcaggatatgatgctgcacttatcaaggagatgctgactctagatcaattggtggccgagatcacctgacaataaagcggcggccagtgacgcaagagtgagctggctaactcgaggtcaaagcaaggcaacacttccagactggaatcctccagctcgatgaaccagggttgtattcctgtcatgcaatcttccccattgcattcttcgtcatcatccggctgggtccgtgcatcatctcatcactccatcacccgcgtcgaaaccgtacgcagagtacacatgagcgatctccatcctaacaaagcacctcggtgagcttgcatcctcagttgtacaccactcctatcaccatgtcgcgggcagaaacggaaccccttctccctcgctatgacgacgaaacgagccgtcagcgtcggctgcatcagaagatccatacctatcagatgcttcgtgccttttccgaggggtacatgccatcgaccgagcaagcagtcgccaacctccgctctttactagcgttcgatatcttcaaccctcgtaatcccgatataggttcggtgggccgccagctggtccgcgattgccgcctgtggatccagttgttgatcgagttcctacagactaagaacagcgaggatcaattgcaggaattcatctggcatctctcccacggcagggccactatccacgccaggcagctcacgcaacgagcagctgatacgaaagccaaagcagacactaaagcaggtaagatagaccatttccctaagtttacgtatactaatgctgtcatgacagcttatgatagccttcggactgtcggaaccttctgttaaccaatgccgacttccgcctgttcgttgaagacttgaccaccgtaggtcgtgaaatattctcggatacagcgttctctctgtccagagcgtcacgaaaagccgggaagaagctcaaaccaaagcaggaggaccaacaagctctgtctggcgccggtgcggatgaggggcataccgtttcaaatgaggagctacgcgaagaagtaactcatgtcgcagacgttgctaagaatggacttgtccaaacgggcaaggaggctaaagagtctgtcgaggaacacctgaccggaaaggagcaagagactctgctatacaggctgaagcagacagtcctcaagctccgcgagcgcagagactacacggactcggttgcgatccttgcacggttgttgcagaagtatgcctcggtctacgtgaatgccgccacggacgccgtcgcaactgccgaggacgagactgagattaacgaagacctcaaaaaggcgatacgtaaattttgggcactgcttcagacgattggtgattccaaagaatggcaagctttggaacaacggcttcacgacgtgctccagcacgccagcggggatcctgattttgagaacttggtgtcagaaataggatccgccatgcaggaaatgatgacaaacccagactcttttgactcggcccaggagaaaattggagagcttaaggagaaatccaagcaagttggcgctgagtccagtttgcgaaaggatgtggacgaattccttgcccaggccaaacgagctctgcacaccatctcccaggatgagtcagtttccaaactgactagcgcgtctcgcaagctctacaaggatgtttcagagggctatcataaccggcgtggaaatctgctgcggatatgcttgagatctttttgcctcttgttctccgcaacatccaatatattcctattcctcgcctggagatttctgcgccagaggtcgaccttttgattgagaacctgattctcgaacccggtcacactgtgaactactcgtcgttccttccttatcggatgcatgttaccacccgcaatgacatcgacgtcgtcaagcggcactcgaagaggactacagcaaatttgaggacaatgttcaccgtctcactttctgggatcaacgtgagtgcgtcagaatttggcttttggctccgtacccataaagccctcttcttctatctcaaggaccaaggtattgcaagcttctacctagacaaacggggtatcgatatctccctagacgtgagataaaggtcgagaccgcctggagcagatcttcaccttgcgcggagtacgtgtgcgcatccacaagctcgactacaaagtgcacagcggtagatggagatttctgatctggctcaccaagcccttcctcaagcacatgatccgccgggtgttggagaagcaaattgccgagtcaatcgtccaggcggctcatgcactgaatagggaacttgtgtttgctcgggagcgtcttcgagccgcacgcatcgctagccctcaggatctattcacttttgtccgtgcggtactggcccgcttggcgccagcccctaacccagatattgacgcccgcgtgggcatcgacgcaccaggcagtggagtcttcaagaacgtctatgctcctgggagtcttgttaaagtatggaatgatgaggcacgacaggcacatgatgctgtggaggagggcgaggaaactccaggcttgcacaggacctggcgaaataccatctttgatgttccagtatgacgatgtatatgctagctgttatgcgttatgatccatccaccaatgtttttttttcttcggaagctctatgaactgccactaataatcgactaatgtgatcaattgcttgtcacagtcaataaattctggttcagttgctctgtcctaaatgtacacgtgaccatagtgactgtagatttatcggaatggatcaacatctcccggtccggccacctcatccaaagctgaagcgacaaatctcattcgcctaagtacatcattatctccaatcagtcacttaacactgggacctttcttgagatcttgactgatcttgagaccccaggccaaccttggatactctccaatttggattgttttacgacaaacgcaactggattgagttgaaccatcaccgcccgacttaccccagctcgcgagtcaagtccgctgttcgccagagcttgtattccgatttagcttcactcgacggaggacagcacacaacccctatcacttatcactacctttccacgaggtgtcagctgctaatgcgctgaagacacaggccgtcataatgcgtcttatgcgagagcttttcttcacattcgctgttgtgctgctgcttgtgcagttggtgctcgcggccgaggactactataaaatcctgggtttggataagggtgcttcagagaaggacattagacgcgcatatcgcacactgagcaagaagttccatccggataagaatccgtgagtccgcgcatgtctcaggtggaaaaggaatgctataactgaccgagtgtagcggcgacgataccgcacgcgagaaattcgttgagatcgccgaggcgtacgaagtcctgtctacaccatccacgcgcaaaatctacgatcagtatggacgagagggggttgagcagcaccgacagggcgggcaggcaggcggccacacacacgacccgttcgatctattctcccgcttcttcgggggcggcggacactttggacatgcgccgggtcatcgacgcgggccggatatggagttccgcattggactgccgctgcgcgatttctacactggtcggtcgtttgagttaaatattgagcggcacgagatttgcgagacgtgtcagggaacagggtccgcggatcgcgaggtcataacgtgtgataagtgctcgggacggggagtggttattcagaaacatatgcttgcgcccgggatgttccagcaggtgcagatgcagtgtgataagtgtcgcgggcaggggaagactatcaagaaaccttgtcctgtctgtcatgggcatcgagtcgttcggaaggatgttgagacatctgtcacgattgagccgggtatggacaagggcacgcgccttgtgtttgagaatgagggagatgagagtcccgactatatcgcgggtgatttggtcttgattcttgaagagaaagagccggagctgggcacggcagaggaataccgaacagacggcacatttttccgccggaaggacgaga

SEQ ID NO: 5895 - DNA, 6524 bp, Emericella nidulans
acggttggttcatgatgaagggacaagaaaagaatggaagtgcgcctcaaaacagggccatatgttgaatgccaccgtttggtcaccagagggtggcccacgcccgcgacaagccgaaaagttttgggatggtccaactccatctagcaggggagatgaccagctaaaaaagaatagagcgcggaatcatcaaagcgattattcaagacacaggaatagagaattatactcagggcacaaattacgagccggtagccggatctctgtgtatgggagcgagggcgaggtcacccccactcatttgatggggtccgctgcgctcccacagggctggcaaagacgcaaggaagaatcgtagctgcaggttggttaaggaatctagatcgacgtcagggtaatcctgtaatggtgtaatatatctttacaattcaggtgctcatttttcggtatcgtgcgtgctttcccctgaaacaacccaggttgcagacatatcagaacaggaaccccgtccgcggcgagcacctaatctcaagattgaggcatgatgaatctctgatttggtatatctgccaaatctcagaaaaggcgccggaaggtgagggaaacattcgcagtatgtgcaaaggaggaattataagaaatttcgtaccttaggaattctgcaaccacaagacttcaaagtctaaagagatcagatatcagcattgcgtgattcgtttccctattttcatagaaaatgcagctattcaatgcgtgaagtgcagctgtctctcgctcgcaagaaggcttgtcgcagaaggtagagttgatctgctgagattagttaaaggcagtccagcgcaaacaatggattctgcctcgtagtaatatacccaggtcaagtgtaaaaaagcaaattaatgcgcggagtcaagtgctttgtttgccattgtgatctctttctaataggcagtcccatcagtcattgtttagcttggtgagtataaaactggaacaatcactgtatcctgcctgaaaagtccgttattaactccgtacgcactacgtagatattgcaaaccttgtttgaaccagggtatacttatctagaacctctgtttggaactcttggaaacacggtgtggagtccgatcagcagataaaaccgttggtgatacccccgcattagagaatctttgcttgattaatttgacgactcggcattgtttccttggtcgtacaatactgctcattggctgagtagtaagctggagctgcgcggcctcgaaagaagcaaacatatcatacgtgtcgtgcgagatatagctgataacccttcttgtcatataggcatggttcatgagggttaaaaaaatacaacacatacgtgcataccacttttccagcccaatcaactacaaagaaggaacatgatccccaggacttggggaaaggaacctaggagcctactatccatctcaaatctttttcttcttctccatgttaccttttctctattgaataatggcaaagaagaaggacaagagaaagcgtccgtcagagccggaggcgatcaatgaaccgcccatgccaacggagtacattgctgagtatcaatgctgagcccgaaccgccaaaggctgacccagtagaggcccaactgtcaaagctgcctggtattgagtacaaccagcccgcatcatcgtaagctcaaaggcttctcgaccgggtttgatattcctctaatatactcgagagcagcccctatgaataccccatcgcaatcgtcaaaattgggagaaagagctacggaatacctgcctactacatccgatgtataccccagataaagtgcgaattcgaatggcacccactaggcagcgtctcactcaccgacgttgacgaggatattggtcacacatttgttcactttctttacaccggacagtacgagacactctattcgaactgcgaccgtgtcagggaatataggagaagtgtgttcgcataccaggcagctaggaaatacgggctgcctgtgctagaggcactcgccaaaagatatattgaacatttcagtgaatttacgccgcttgagaacatacttggtacggccgtggacgtgtttacgaagctgccccacgacgaggtatggttccaaagatatctcagggggtactttgttcagtcctacagagagaacatgcacttttttcaccgagacgagttcaccaaatcaacaggaatgtgtcctcctcttgacaggattattctgcaactaactgttgatatcctgtcctctcgtatcgcggagctggaaagtaccattgagcaggccaacgaactcaagcccgagactgaatttgagtcactacctgaacctgcaccggagcccgagactgatatagcagctaaatcggcgcccgagcctgagtcgagcgcaccaacgagagccagcgattatgacgcagagtcctctgcgaattatgtggagcctgccgacctgggatactcagaagaagcggcctcatttcccgtgcctgaagagcccggcaagcctgaaacatgcgatttgccagaatgcacagcagagagctcagtcgaagttgatccgccggctgcgacattttcccctgcgcagccgcatctcgagacatatggtaacggtgacgtttcacctggggcccggtctcctgtggaactaggccctgtcgcagaaaacgcccaaggaaaatacccctcccaggagtaccctgtcccagagcccgtgccctctgacactagtgatggcttgtacggcagcacctcgaagatgaaaaagaaaaagggaaagaataagaaaaagaaccgtcctatggttccgcctccccctgtccctataatttggagctaagtctccgatcacacatggccaaggcatgccagcagcttttacgttgactgacttggcgaattgtagttgtttgtgttcagctttagtatggatgtcaagtacgggaaattgaaccaatgctgctagtcgtatctaaagatatttggtcttctttggctcaatctggcacaattatgatgaatcttacagtcatccttgaagacttgagtaccctagttttgatatgccagttcttgatgacggtccttcacgtgcacgaggagtccaggaaacgtggataattgatccgtcaaactatgccatgctggagtggatgtttcactcccagacctgtgacctagaggtacggtcagcccaagaggcgcgactgttagataatctggagtggccagcttgagaggctgccgtggatgtactatgtctctctgaagaaccaaactaaacgatgccaagtcctctccttataattttcctgaagaacaaaggtatgaacctgacgagaatggggacggaaccacatatcattaccatggcttcgtaagaggttaaactgagacaaactaatatcatgaaaggcataccataaccttgctagtagtacttgcatacaaggctatacacataacgagaaaacttgattgccccaatactgaatctaaggctcttcttaccctctgcttgtttcatgtcagggaaactgtccggctctgagaattgtgctgtcatgtataatgccgtgtttgaacaagccgctgtgaaagccaaactgtatgtacagcccagcttgtacatgagagacttaaaactaataatgacgatagcccataacaagtaccctgtcttccctcgagaagctagaacaagccgactacaactaggaaaggtgatgctcagttcttaagatacaaagtctgcaagttacaccactgcctcaaaccctgcaagccattctccgtcccaatgccgctctctttatgtccaccgaacggcgccctgaggtcagcttcaaaatgagtgttgacccaaacactcccagcctgcagctttgctgcaattctcgccgcttgttctaggtccctcgaccagaccgatgccccaagacccatttgtgtattgtttgcgcgggcaatgacatcactctcatcactccaggagaacagaggcataatagggccgaattgctcctccgtagcaatgtgactgtcctcagctggtctgtcaatgatagtgggcttgataaagtagccagccttgttgtcaaaagccttgccgtccgggtgggtaaggctgagctgttcctttgtgaggtcggcaaagaatcccttgaccttttcatactgcatgctgttttgcagtggacccatgaagacgccttcttgagtgccagggccgacctcgatagttttggcgtacgcgactgcagcgtcgcggaactcattgtagatggattcatggacgtagattcgctttacagccaggcagatctggccagagttgaagaaccctttcgagatgacctgatgcagttagtaggtgacgttactttattggcactctaggccaggcttacccggggtgcgacactttgaacgtcaacgtctccgcacacgatggcagcgtcctttcctcccctactcgttgttagcacccaggaaaaacgtatgtgcaagacaacttacaattccagggtgactctcttcaaagtcctactggcactctccatgaccttcttgccagtcgccgacgagcctgtaaagcttattttcccaatcccaggatgcgccgtcaaccacggccccaagcggtcatcaccactcagagcctgcaccacaccgggcgggaagaaccgctgcgccagctcaacgagcttgagcccacaatatggtgtgaatggcgatggcttgatgatgatcacattcccagtgatcagagcgggcgccagcttgacaacggtgagtaagtgagggaagttccagggaatgattcccgcgccgacaccgattgggatatgtcgcacgacgatcttcttctccgcactgtcttcaatgatttcgtccgtgaggccttcagcaacgtcggccgcggagcggatgacctgggctgactgggcgacttcgttggcggcgaattggagctgtacagttaagctcttagagctggaccccaggataaatagaatggcttacaggcttcccctgctcctgaacaagaagctttgcaaagtctgctacatactcctcaattgcatcagcataggccaacagggccttccggcgctcatcaaaaggaacatcaatccaggttttgaaggcctcctgtgcggccacaacagccctgtcgacatcctccttgattgcgacggggacgtcagggtttggctcccctgttgcaggatttatgccgtggcgtctttcggtagtcgaggttttttctccattgatgatgttttgaaagttctcaaagatagagaaggccatcgtatcgtgttacagatcagtaccgttcctagcggggaaacagagaagagtggaatagaaaagagaagaaaagcaagataagaagaagcagtcgggttggagaggaggaaagaccagcgagttgcaccttctctagtgaccgcggatgtagggtaaacttacttcataacgatgatgctggaggaaaattcgacagcttacagttgtcgccacggccaataatgggcgtcgaaccttgaagcccgtctgataaatcctggaattcacataaagcactgcactgttgtacatatacctcgccagactcacaagaaccatactcctcaattccaggcccatttttacagaatcctctggacaggtaggtcttggttgtgataagcaaccgactaagctggatagaatattgtgtatatagcacgcttctctaagtgggcttgttaccattttatatcattccgcttctcagtgattcaatgaaaatcctccaaggaccccggtttaggagcctgcaatatattgactattgtacaagagggattcgctgacgaactaggttcaatgatcagcaaaagcataagtcccctagtccacccttgaggtagaccaccttcaacctcaggagccctgaggattgaactggagggcagacgatgacagatagggccaagttctctgtccagtcgaggttatccaatccagagtacggtagagagacaatagctcgctcttgcatccgacaaaggaccttggatcaacggtacgcggaccgacagctgttagctgtggccggcccagcatactaatcgttatacacgccgaaaatatgagtgggagagggaggagactggttatttccttaagtattatagacagcactggtaactcccctggtagtagccataacctcttatgcgtggactcaacggagtttttgaacaccccgtacaccggccggattcacttccattcttatttcctttctatcctggaaatctagaataccctctgcagtggtcaataacttctttcttttcgcggaggtaatttgcctcatccagacttctcatgatcaaaattgtttccttaaaattgcctaatttccctttttccctttcggaaaccctttattttgaaaagttgaatttataaccttccggctttgaaccaaccac

SEQ ID NO: 5896 - DNA, 5605 bp, Emericella nidulans
gcatgggaatgaattatagttctgtctatttttggccatttccacagccctatataagcgattccgcgtctgtggtgtagtggtgtgatataactttttgacaacggggctagtcaattttgtttccgctcttctccaggtcggagaactctaataatgacatctccaatagtcctctccaacggattatgcgtggtgaaatctagcccgttctctgaggggagaacgctagtaccgtcgctgacacccaatatgcggcttgggatgccggctgtccaggaaagattcttttccggaaattttcgataagtgatgacccgaaatgcagctccaatcttaatgatgatattgtacgctacgttactggcactgttctcgaccgaaaagagaaaaaaaaacaaggccagggtgcgtagacattggcaccttgcatcctactaatagatccgtgcgaaatgctctgctttgccttttagcccgtaggtcgacgctggggtgcgattgatgagccaagagggcgcgaatcccccattggatatgtggtactacttcacgggtgcttaaagataaggggcagcaagtcagtctctatgatgcatctggatctagcctgtccccttaggtggccagcgtgccaacctggcccatctccctgagcacctttcgcgtgggtagcagcaaacttggcatatgtttggggttatgaaatcaggtagccgctattgttttctattgtttctttcgattggcttcatcgctgttttgttttttacataccaatttcattgacgggattctgttctgccaaccgggcactgaagaaatataaaaaaggccgtctctgactgacttcagcccctccaacgatccgcaccacatgacactcctaatgcaatcatttcaaacccttgaatattagtcaattagtcccacaagtagctaagattaaaccaacgccaacagcgggtgagatcccgaatgcatcggctgtcacttagcatacctatgacaagacatcagtaacttactttctcctgttagtaagcgcaatccatcgacctagaatagaggaaagcgatagttctgaaacaacaggcaagactcagagggcgtgtaacccagaatgaatggtctgcatccttgaaccaaatacccgtaccacgtgcgagaatccatgatgtaagtaggcccttttttgggagtaatttgagttgaatatgttttattagaaatgttctttcatcaacaaggagcgccgatggtggagtggtatcatgtatcattcccaagtactatactggaaaaatgatgagtcccgggttcgaaccccggtcggcgcattttttctttttcctcccccagctagctagtcttgcgcttcatctcctgggaccctgcagtccagtgaatgcatgccggtttccttgcattcttgctaaaacagaagccgagacaagatctagtaaactagtctgaataccagaacccaatgacataagtattcaatttatttttgtgccgcaagatggagtttgtccagtaaaacatacgttggaactcatatggcctgggccttcttctacaagcagtgccacttaattcacacgactaacatctccccagacaagcagcaccgaaactgtccaataaatgtactcagcacggacagatacgtacggactccacacagctgatggagggaggctactgacagataccattaggtagaaagtgacgtccacctcatgattcctctagcagagtcttgtccaatgtacgtagtgacacccattcaagatacagggggactgccatgttgtccagatccgactaggtgagtgatcggaggctcccacctcgggaacacctttgtaaccttaccagcgcctgtgcacgcatttattgatcccaagcctcaccaataatgtataatcagactcctagttgtgacatcgggaccccagaagacggcaacatgatattaactcgaatcttccaaatctccggcattccagattcagcgggatatcaaacatagaggtacggtcaccataccgaaggtcagttatggggtgggcatcctaagctgattttaaaacaatttcctgtatactacccgcaatgctcattttttcaatatgaaaaaatactttcgtcaaatcctcgatggtctaacggtcatgatttccgcttgtcacctcataggaacaagcgcgggagacctgggttcgactcccagtcggggagatttgcttcttgcgtggcttaagggtggacacgctatcaagtctttttttccttgggagggagcgtgccgccgcgttaagttggtggggttcgacggctcgcctttcggaacccactcacccactcggcacaggtagtttgtggtagcccgtacggctgtcatgtctagtttcagctgccagggtccatattccactaagagcgagcctcacactgccggcaggtgctttagtgctgcactcgcctatgtttaataaacaagaagtgggtggcctacacctcgtagtgcacacgcgtgcgccgtaatgccgtcatcagttggcgcaaaggcggtacagagctaactcggcgggaattctgctagtgttatattgacctaagtatagaccacggtctattattgctacagaaagcacagaaagcaaggcttagtgatgcttaaccatcttccatgtacaacacccaatagctaaaaccgtcaaaccccgctactctaattatcgcgactgtaaacgtccttggatctgtggcaattctttaatgcatcctaccatgttcggctttgtattgttatagcaggccatcgttttttatcatcaggaaagcaatctcgaggaggactacatagaagcccataacctgagtcgcccaccactcccgcagcctactagcatcagcaccataaatatattccacaggaaccgcaaaaggtaagatcatatatcttatctggatatctgcaagttatccgcccaatagataatatgattactcacacagtccatccagtagcggccatatctgaatagcgacgagatcttatcagataagatcctccccctcaggtagtcatgtgagcggtgtgagtcaccccaccaattattcttgctatcagcggcagaatcggtgattcatctttttttttcttcctcagccgtctccttatcagtcgcgcctggacttcgtttctcgggctggtcttgctttaggataccgctcagaccccattgaaccgtatccattgataaacgaatactctcggatttccattgaccgctgcaggccatacaatccccgaagcgagccatatcacaaccccaccatggccgacacaatccctcacaacaccttcgacacgattctcgtgttggacttcgggtcccaatagtatgtctgcttcaaggctgatacagacgaacaagactgacaccacgcacagcacccacctcatcacccgccgccttcgcgaaatcaatgtctactccgaaatgctcccgtgcacccagaaacttgccgacctaggctggaagccaagggtatcattctttcaggcggcccatactccgtctacgaagagggtgcaccccacgccgacccggcgttcttcgagcttggcgtcccaatcctgggtatctgctacggtctccaagagctcgcccaccgcctgcacgcggataacgtcgttgccggaaccgcgagggaatacggccatgctgatctgaaggccaccaagtttggcggtcacgttgacaagctcttcgagaatattgagggcgatatgaccgtttggatgtcgcacggtgacaagctccgcaacttgcccgagggctttcacaccatcggtactacgcagaactcggagtacgcggccattgcgcacaagtcggatcctatatatggcattcagtttcacccagaggtcacacgtgagtcccatgaaaggctagagtggggcggattctaatagtcgatagacactcctcaaggtggacagctgctgaagaacttcgctgtgggcatctgcggcgctgagcagaagtggacgatggcggaattcattggtcaggagattcagcgcattcgttctctcgttggccctgatggccaggtgctcggtgctgtcagcggcggcgtcgactcgaccgttgccgcgaagctgatgacagaggccattggcgaccgattccacgccgttctcgtcgacaacggctgcatgcgattgaacgagtgcgagaaggtccaggaggttctccaggagcagcttggaatcaacctgacggtcgttgacgccggtgagcaattcctcgctggtttgaagggcgtgcacgaccccgaacagaagcgcaagttcatcggcggcaagttcatcgacgttttcgaggatgaggcgcgcaagattgaggccaagagcaacggaaaggtcgagtggttcctccagggtaccctctatcctggtacgtctactctgattcatcacccaactccttgttcttgctaacaagttccagacgtgattgaaagtatctctttcaagggcccctcccaaactatcaagactcaccacaacgttggcggcattgccgagcgcctcatgcgcggccacggcctcaagcttattgagcccctccgtgaactcttcaaggacgaagtccgcgagctcggccgccaactcggcatctctccggagcttgtcggtcgtcaccctttccctggtacgcacttatcctaaagtccactcattatcaacaccatccacaaaaccaaactaacaaaaaaatacaggcccgggcatcgccatccgtgtccttggcgaagttactcgcgaaaaagttgaaatggctcgccaggccgaccacattttcatctccatgatcgcgaagcgggcatctacgacgagatcggccaggcttatgcggcactcgatccctcccgcgccgtcggcgtcatgggcgacaagcgcgtctacgcgaacattatcctgctccgtgcaatctccacgaaggacttcatgactgccaccccgtacccattctcgtacgagttcttgtccaaggtgtcgacaagaatcgtcaatgaggttgcgggcgtttgccgcgtttgctacgattacacgagtaaaccgcctgggactatcgagatggaatagagagttggtttacaacataaggggggttcggaagcggcagaaagggactagcacgctattagatggacggacttgaataggatagagggaaaagttcaactacatagatgaaggctatattttacttagttttacgagatgttgtttatgatttcagccaatgccatgcatatatacattttacattatctacatcctgttgagagcgttgtagcaaagaactgcttatcagaagatctagcaccattcagcgtcaatcataaatttcccacccaatccagtaagacagggaatgctctgagaagccacacccaccagaccctatctagccctaactcgtactccacccgctatacaccggggcggcaaggcgtcaaaaaagtctccgtccgccaaaagcaattaattagcagcagaaaaagcaaaaagaaa

SEQ ID NO: 5897 - DNA, 11312 bp, Emericella nidulans
gtgtattcatttaatccttatctccctattgtgagaatggctcatacgcgataaaatgcactgggactcactgaaagggtggatgtcctgcaaccggggaaatccatccaggatcgcttggaatttttcgccgaatgtttcttgagtgtacttgacctttcgagtgtagaagcctgaaataacgatgttgattaatcattcaagttctcacagcaaaataattagggccacaagtacctcgaatacgactgatcttgaagcctgcacgaatctgagtgggcaactgccgctgtgtacgactgaggacaatatccaggaattcctggctggtgggcaccggaggaatctatcaagcggtgaaagcgtcagtggtgttttgaaagaggctacggggcgcaggatacttacatctttccaagtggtcttcatgatgggcacctccgtcgattatgaaaaatgacttcaataaggttccccaagatgcgatgagggcgatggggcaatagcctgtcaattaaaaaaattatggtgagggcggtcggaggcagaatttttggcgggcggtgagctaatgtgggggttctgcagtctctaaccgagttatccaatcagcagttctgagctccagctttgcttcagctacaataaacagtttacagcagttcaattcgagtgctagaatacattgactaccgaagtatctatggtaaacactgagcctgccctgaccaaccaaaccggtcatcatatcatagcagatcatatcatcatacccagtaactccattgcttttcgaagtcgaccactaagaccaaacacaatccatgaacatgcatcgatgggaatgaatacgaaggagaaagagggaataggaacagggagtgctaatcaaaagccgtagaaggatactcttagcggaagagataccggagaaatacctcgacagaccagctcactccgtgttgaactctagtacctgaacacagttagcacaaacctcaggcagacttttgcgcagataaatttaccatatctgtccagccaccgccaccaaactgacacttgcttgggcccctattctcaaacccaagtccttcgtaaaacgggatgaggttatcgtgtgcaataatcacaatgcgatctgcgatagctgcctcccggattcgttgaatataggacttcatcaatgtgcttccaacctgctttccttggtgttcgcgtagaaccgccagagagtggattgcaattgtgcttccatactcgtcgtgaccaacagtctccccatcaacaactgttgagcgcatggtctcccagtcagcgggtagttccatcgacttatccgtgacgaagggggtggaagtccgagtcgcaataacgtgtccgacgagtgtagggcgaggtttgggctggtcagggccgagaatcggaagagtgaacaggcccaggcaaagctcagggcatcgtccaaggcgatagatgaactgttcaaacgaagtcagtacgagtccgcagtgacattagcaggaacgcatgccttctctctggtgcagcgctcattttcgggaaatgactcttccacagcaagacagtcgtccacgtttgattgcgtcagaacctgtacgaacggatgcaggtcgtcgagctttgacggctggcgcacgggcgggcgacggaaccagtagggatattcattcaaatcgtcatggtcaacggcgacatagtcttcgtcaacctcttcctcatcttcgtcttcgtcggtttcctccaaagggtgtccgttggtcatgatcgcgtctgaatggtcgtagccgccatgagagagatcgttgccagttataggcagagaaaatccgtccgcattcgataagggcttgagcccgttaatgggatggtctgcgggctgctgatatgactggtccgacatggcttgggttgcagggatgctgaagacgcaggtacgcaagcgtttcggtttgtcttatatatagcgactcgtcgtgtttctgagcgaaagagcctaaggcagtatgagactgtaaagtgcagtggtctgaaaggagcgattgagaaggcacagtgtgggttgtggactgtggacggtagattaatccgatcgaaaaaatggtcagagtggtgcgctggtggccactggtggggcggcaggaatgcaggtgataagactcgaacaaacagaaagggaggtgacaagggtcgagaaccttgccagatcttgcagactgcaagggtcagatcctgttagtatattgactctcacgtacttgatacctgaccatgacgcacttaccactccgaggattctattgagtttgaagagttttcgtccgtcttccgaagtgcggctcgcggggcaaaggacgcttatctgggcaggccctggtgcctatcttcgatctcccccacttctcggtgcttatcgaattatcctgtctcaactctgttcctgtgcaggccagctcgagccgacaggtgaagggaacatcatgagtctaatcaagcaataggagtcagtagttctccccgatccagtgcgctttctgattccttgagcgttaacaaatccgtctctcgctctgtctctccgatggttttaccgagatgagggagcagtatcaccttattgttgacaagcttcggatgattgatggctcattctaattctcatagacatcagttcaaaaggcaacttgctcattcgaaaattcctcgaaactctttcatcagtgcgtcttcggctagccggttcacgcatagtgttgatgataatcgcaccgtccttcatcttctgaatcggtgattctcaaacaagatatgatgtggcagcgttcaatagcatattcagtctgataatatcggcgtgcttcaagagctcatttgaaaacagtatctggcattgcctccaacaggtcaggcaagaatcagacaaccggattggctaagcgcaccctcttctttcttgcggactcttggactcttggactcttggacattatgacagatggtcttcatacaaagttctctattccaccatgcaagtaccccgaaaccagtcagctctgcacccgaatatgttcaaagtacagaatacctgcgcggatcctgccgtcctcgttcgcccgaggatcttatttgcaggattgcgatcactaaggatcccggccttccattcatgattctgcactacttctatgagaatcatggcgtggcgtaaaggtttcaggatcatagacatggcaacatccacgttcgcggtagcgaccactttggaggactgagatacgtatcccgcgcgcggtgtaggctaggacatcaatattgtcctaaccagcgccactgtgttatatgtatcaacgcgtttggaagttgtgcacaaaagcctcaccaagtttgcctttcccagcaacggaaacagccataaaagtcccacgactccataggccctgtcgacagccgttagaactgcctttttgtctcgtttgacactgaagaagcttatacttcgacctgggcgtcttctattcaagctgagtgctgtagtgggccgatgaggagcagacctggcctagaggtggtgctgacacctctattgaggatctgtgccactgtaccagccaagcgtcgcgtcgggactatagaactaagaactgagcgtcttcgaccggatattggagtttgtgggcatgaatagccttcacctgcataaagcggggaatggtgagaggtaacaagcatagtctcggctttcacactgaacaccatggccggcgaaatgcgtccttcgctaagtacaaaataggtgatggtctattaccagggtgctaatgatgaggaacatatttcaggcattacttgagcagccagcctgatttagaaaatgtgccatcccgcgatacgatatcaagatccactatgtatacggaactggcagtaggcacccccacggctttggatttccacttcgaatgcaaggatgcatttcagagagcccgtcattattggtcctggttaattacctcagataattcgacgggttagtcatggtaacaacgcaatcccgtaatggcgctcaatataaggtgaaatggttgagaaatcgctcatgtagctacttcgtatactactgcagggaacgagagccgagcgggatcggcctcggttgaaattgacgcagccgagagcggagcggaagatgcatcgtcattgactcatttagttctcgcgatatcgacccatttttcttcctctcttccgaccgccaactgctcctccacaatgttctctgccatcccggttccttgaggggcttgatagcttgtctgtccctgtccctggatgggcctccaacaattccagcattaccatgagctcgagggtgctcgcttcgcgggccgcgcagcctctcaaggtctgagactacacccccaacaagcccaattcttgctcatcctcgtcctagcggcatccaaccgttgtaggtgctggtgatgaagcttatcccactcctcgccgatgtttctcttcattgcacgatcgcacagttaatcagagcgccgacttctcgtccaccagcaaaaattatgatcgccttggccgacgggcgaaggagaagttgcttgatcgggtacgctatccagcactttaatcgttctttgggcgtgtatctgacctttttttcttttctttctgcaattaggaattctttatgagcttgttgaactcagcgtctaccaaacgagaagccaaatcgtacctcgcccgccttaaggcccaacaaccagcgaagccgcaaaagaagttgcagagcacaacagtacaacagaccattgccgaatcgctaccttctggagtcaacctgggatctttctacggcgcatcacgatctgtatatcaaagtcctgtcttcagacaagactcaacccctgcccctgcgcgcgaggacataccggagcgactgcacctggcacttgtcaagataaagactccgcagctgctggatgactctacccttgatggagtggccaggacgctttcacagattaaccggctgggcttggcctgctgtgttgtggtcgatccgggctcggacggcgacacccatactttgcgaaaaatagctacggagcaggtaggccgcatcgcaacggccgtcgatcgtcaaccggattcgaaatcttcccatctatattccgttttgtctttcccagctaaaagaccagatataccgactgtctcatcccggaaacagcttctcagtccgttacgagatggtcatatcctgatcgtcgcgccgattgcttatacggaggacactcccaaggctcttatggtacccgctaatgatgccgttcttgctttgacaaaagaacttgcaggtttggctacaatgccagatcctgacgaggacccgatgattacagctcagaagatcaatgatctacaaaaggaagtttctttagaccgggtcatcttgctagaccccttgggcggtgttccagcttttcgaggcccacaaacatctcacgctttcatcaatatggaccaagaatttgaacatatcgagcgtgagctgctacaggttcgcaacccagccaataatagccagggcgagagtgtggtcacaaatcctatctcggacagcaatgcggtctcagaatctgccagtacagagccgacgtctacgcctgccaagcaagcgctattgcctatgagcgttggcgaggataccattgatggccatctggataacttacgactgtcgcacaaacgttggccatgctcccgtctgcatcttccgggataatcacttcaccagttgaagttgcgaaactccgcacgttcgctggaatcgagtccttctgagctgtcaagtcggtacgcgacggcaaagaaaccctctgatccataatcttctcacagacaagcctctgctttcatcgtccttacctctgagccggcgggcgcgtggctcgcttcatctccctgcccctccaaccaccttcgtcaaacgaggcatgcctgtcagccttatccctgacccgcgcgtccaggtgtggacggcacagacacgcccgaacatgaatctcgacgatcctcatgttgaccttccccggctggtacacctgattgaagactcattcaaccgcaagctagacgtaaaagactatctgaaccgagtgaatggccgattggctggtttaataattgccggcgaatatgagggtggtgctatattaacatgggagcttccccctggagtggaggatgacggaagcgaatctagcacggccagaatggtgccttacctggacaagtttgcggttctcaaacgtagccagggtgcaggcggcgttgcggacattgtattcaatgccatggtgcggacatgctttcctaacggggtatgttggcgtagccgcaaggacaacccggtgaataaatggtacttcgagcggtctttggggtcctggaagctcgcagataccaactggaccatgttctggacgactcctgacctgcctgagaagccgcagaaattccgagactacgaagctgtctgtcggagcatacagccgagctgggcagaagacacaggtgtaatagactgatttatacaaatatgcacgtagacggtatatagaatcatacaatgacattggaagccacaacatcacctagtagttaaaccaaaaatagcagtacagcgtcgatatatactgagtcctttctcaccgccttcgggttatcctcaatcaacaaggcagacagagccacatttctcctttgcgtagcacggcatattgtcctcctgttctgaagcgctcatgatgggctacccgtcatgccgatctgcactgagtgctcgtacccggtctcccctctgtatagcgcctacatccgctccgacgatcgatcactaggcaaaggcgtgcgcttcacgcaatgtccgcgctgcaagcgattcgccgacacatacgtcgagtatgatttcgtcgttatatttatcgaccttgtcttaatcaagccgcaggttcgtctccagtaacatctgtttctaaaactctgactgacttgagctgaaggtgtaccgccatctcctcttcaatcgcctcgaaagcgatgaacataagttcgatgtacgatccttccagacattaagaatagaataactgtgttgacggaactgcaaacatagcgctcaatcatccgacttggagtccttctactcctctttgatgtttatctcacctgggcacggatcgaaaagtccccgctgattgagacgacattcctctctcgcgctccgattatcatccaatacctcttttttcttacattgaacgccttagcaactcttgcccaccacctcacagttcgcctcctcgcctcattcattactttctcatcacaatctacacctacaaaacaacccactgctaccgccaatgccgctgccactgaatctcaagctccggttccctcaaatcccaccacgccaattcttccctccttccctcagcaattggtgcaagcacaacaagcgtccgctctgagcccgccgaagagcacaccgcacagctccgtgcaggaacttccaggtcttgagaatcaacgacctcgccagccatcaccttccagtccccgcgactcattctgcgacttgcggccgccgttgcgtcgtgcatccacaggccctatgcaatctttccaacaattatctcccccatctcaggctagtccaacagcaataagcacagcgctctttgtaagcagttgtgcgaaacttttcccgatactcctggttatatgggggccagatggccgcatttccagctcaaactctactcccagttcaggttacggtgcaagcgcagtttccaccctacagccgaatcccgcccagagagcagaaggcggatcggacctcgtggtagccggttcagccggctccggcttagcagaatcatcgccgtccgtttcctcatccctcctggaaggcttaagtaagattataccggcgggtataccggctagctatgtagcaagctttgtggaccttatgagctcgctgtttacgctaggcgcggctgacatgcatcttgtcctgctgagcaatattgaagctctttacatcctcttagggtgtggatatttgcgggcgacggcgctggctgtcgcggggttacttgctagatgggccgtgcagaaggttattctgggggttgttggggtggataatcttcgattatgcggtcagtccatgtgacttcgtggaatacttcgtatacatacattaattgaagcatggatatagattatccaaagtaggaaatagccgtacataacacaatacggttccgcaggatatgcataacctcaactggctcttctatgccgagcgtgagtttcttcgaccgtcttccatttaacaacgctactccaccatccatccaaccttaaacaaacctcgagcagaattaagaaagagacctactgcggcacccggtcaggccgaatatccgccctcttcggcgcaataagcgggtgccactgcgccataaacgtgatcgctacaataccaaacaatcagcaatttccttacctcgctggggcaaagagaagacgcgagagaagaaagaggatagaacataccccacattaaataacagctcgcaatcgagaggatgagcgtgcttcgccagagtctgtgtatattacatattagcactgctcgcagcccggaaattccgatttctgagcaaccccgtctcatcccgtttcataacagattgataaagggcaatgtgacaaaacgacggatagacatacgtctgattctcccctttcggactgaacacccaagcagcaacggcggcggccacaacgacgatgaagccgattatgaggctccagctggaccaaaaccgtcagcttcccctctttatttcacattgtctcggaaacggtaaaaaacataggattggatccggaaatgttcgtacccatttgccatgatgtgcggttcctaagcggagtatgttttggaatcgagaatgaaggataccgtagggggcagcttcgtggactggactggaccagcctagtcttcgagcccggctctggttccgacgatggcgcgtggtttcgtagaaatcaactcgattgcgagtgcgacgtcagttgaacctcgttgcgcggagaggttgtcgtcagcttcggctaggattcggaggcggagagacggcccggcaagggtacggctcgctgaacaaagagtgattctttgatggtcttggggagattgtctgtacgctgaactgaaatcgcgccctctgatgcttggaggctgctagactggcaggactggagcttccctggtgctgccacattaaggtgcggatccgctgatgtggctggtggtgtggctgtgcaggacctatataacttttgtatcttacatcttagaaaactgttgacattttatccgccagccatccagaagcacacatcaatttggcatacgtatggcatctaaatgattgtgcttaccttgtataggaatataagggatgtttgagctcagatcaggattcaggattcagaaggaaacggagtataagggacagactcctggatgaaatgcggaagttacttcgaacataatagtgaggaacgcttagcataggaaggaatgaagtcgatgactcattacggttatttgaaccacatatccaccgtcaggatatcaaacgtccttacaagtccaaaaagataaataacagtatacactggtcagagtgaggtaaaagcgggaaacggatagcataggcaggaaacaaaaatcactccttacttatcctcaaaccaagtcaacatctaggcaccctcgcggctcttacggtagctggcctgggatatgttagtatcctaagaggagtgatattctaaatggagggtacctcttgctcaacctggagggaatcaacaacaggagccagctcgctgagaatctcgtaggaccgcttgtggtattctagctgcgcggcaataaggtccgccaggttcctcagtggttcaggggtatcaagaacctaacaacatagttagcaaaaccaacaacacacctccagctcatattggcaaacatacattcttcataacgctaacagcttcctcagtttgtccaacaaactcatcttccgcctgctcaatctcagaacgggcctcctcgctcagattatccaaatcaccaccatgctttgccttgatggagtccagcatgagtcgagcattctccacgttcttacgcgccttcgcagcaaacatcaagttcgtgttcagagttgtgttccacccagccagaaagcgcgactggatttgggcgtcctgcgccagacggcctcgcccaccttctccgaagccagcgcatacttctccagggcagttgcgagcggatcctcaccagctgtagtattccccagagtctgggagccagctagcgaagcgcgcgcaatggcatggctgaaggtcttgggctgcggttttgctgaagggggtgcggttagtgcagcctgagcttcggcaggggtgctggcctgcgacagaaggtggactttttcgttgatggtgcgcccgagatcgttgaaggattcgcggatgttaggggggtagtcgtaggcttcgttggagtattgagagctgcacaccttagcataccacagccagattgatatagaatgcaacgtacgtcacctgaaggagtttctggtgcactagcttcagggcatccacgcgcttctcaagttcgatgtactcatcgggaagttgagtcttgtcttcaacctgacccagctgctcgcgaattaactgctgtgtgcgcgcagcaaaaggcgtaaagttcgcactattcaaaacagcgaatacatcagtttcatgccggtgatcccacagtgtacagaccgcagctcattgggagctggtccggggtacacattaacacgtaggctgctgataaccttacctgaagttcttcccgaacgcctgaaacttgtccatgattgatgcaactcacaacagtccagctggtttaatgaagcgaataagtaggcttgaccgtcgcaggtgaggatgtgtgcgtagtctgttagtttgtttaggagagctggtcggagagtggatatagcgagtcgaggctcccgcaccgccttgcaccgccactgtcacatgcggacattaaggttgtcaagcgacagcttatagtaagtaatataaagattcgctactcccaagttgaataa

SEQ ID NO: 5898 - DNA, 7157 bp, Emericella nidulans
ataccttccatcactatccaaacaggtccccactttttctatgtagtcaacgtactgctcttgatggtggtgaaactccgtctctctcaataaggaaagcgcatgggggagatattccctccaaacttgtcggttggcatggtcgttatgcggaaaaattgaacttaatcggtctgttgttttggttatccagagtgggaaccatccctccttcctcatccagtttcgagttgctagatgcaccaagcgatggaggctaatatagccattttcaggttgtatagttataaaaaagaaagcatttaaaagtccaagagcatcactcatctgcagctttgatcgtggtggaagaaaggcttgcgggatattgcgtggattaatgcaggccatgagtaatagatattcaacagccagttggtctagcttctgaatctgtttgaatgatatcagccatgttttcgctaccggattctgcacgtctgtatagcgttggtcatcaccaaaatccttgctaaggagctccacaacatctgtctcctgttcctccagaagggtcaagtaatcagacactttcagaccctttttgttgatatatgcagtggcctggcttatagccaacggaaggaaagtaagctgttcaagcagacgaatcatggcgtgagaatcatgaagcaggtccttgcaaagagacttttccaggaactccatgccagtttttctgtcaagttcagggacttgcatcacataaggagaggctaagtccacggctagttctctattccgagtagtaaagatgatatggccttgattgtttaagggaagaaagtcctttaatggtggagtgtcgttgctgcccttggtccacatatccatatcatctgcattgtcgaatatcagaagccaattcttgtcttcttggccgaagtaagtcttgaggcgttctttcaacttttctggctgcgtgtcttggatctctactctttgagcaatggacaaaagggcctgttcagcaacctcataactggtgcatgggacccaaaaaattgaacagtcagcctctctgtcccgcatacggtacgctagctcaagggctacttgagtcttgccaactcctcctaaaccagtaatggcaagctttctcggtccatcaggcatgaagattaaactttccaacttatggatctcatcctggcggcccacaaagcgggaatttctcccaaaggggatcaccaagtgacggtttctgcttctgtttgcacctgctaagaagattaatactgcctgagctcatactagaaactcactgacctttgcggtttgcagacatccagtacttcaagaatgcttttgctgccgaggctccagttgctgctgcgtatgcttgccatgacttgctcttgtgactatcagcatagtcacagacccctttgataatgatacatggaagattatcccacacccctgccccttccatttcaaagccaataaccttttcttttctgacaagctcatcacggtactgcccagacttcatcaccgtatcagcagaagcgatgggtccaacatatacagagggctggatattttccaaggtctttcgacatcgaactgcctgttttttgtcacatccaaggctatcacagtcctcctctaatgccatttcacaaatctcgttaggcgagttactcctaagacaggagcaccctgcaggagcatcagagtaatgcttatgaagataagaggcattaaaaaggatatccttgatatatggacgatgccacttggcccctctttgttggagaacatggagatgttctcgtatctggctctgaaattcattgcgagcattttcggccctaaggccgttcagaagagcccggatctcctgacttggcctacccagtatgtccttgacagcactcttttgttgaaaaccgccaggatactgcctgccaaagtcatattcaatcacagaatcactgatcatgacatcacctaggaatatttcttggtaaactggcggagaaggggcccctccacagataccaacgactaatgcaagcttgatctctgtatagctgacttgcaagctggaggcaacacttgctgcactttctttcccaattcctggcatgtagcacaaaactacattatgattgcctatccttccatttaagtatgcattcgcgtcgcctggctgtttgccatagtactctccgaggcggtcataatgctcatcaaaaagggcttcgacagcgtcagcctcaaggggaagggcgcaaataacagcgactgtaaaatcactgcggcttttcgggcgcatttcagtcaggacacaagtaaaataaataatctacgtgagacctctaagcggtttcgctgtgccagagtctcggtagcaatgcatgaacgaggtgcgcgaagccaagtcatgaaaaagctgaggctttttgtggggttcggcggcaattgactgtccaaaccaaccacctgtcttcaatggccgctcacgggaggggtaggtagtgcaaatcagaaagataatcacacggtcggaccataaccggtagggtttaggaggttgacgagggtgaaagtcagccaatgagcgctgtgaagcacgagtcgtatacacctgagtcatctacctgtgaagttgattagttatccgaccaaccgaccgactaccgccgatttcggaacgcgttgaacatgttcaggttcagacaaccactatgccaccaaaagcgcgcctttcaaaggaactcagtaaaggagtgaggaaggactcaaatttccacaatctagttctagaaaaggcaagaaagtatgagtattcagcgtgcagaaaccgtttccaagcctcttgatcaatgctacgcgtcagacttgacggaagctgtttaagagcgagcagcctgctataattcattgggcttctaagctcagtaagaatttggcagaacggactctgactagacatgcccatgtattcgctcttccgcctttccatgttgttgggatggctagttttccatccgcagaacagcccatcatcctgtccgcaaaaaaactgggtaatcggctttggtaaaccgcatattgaaaccaaacacttcaattacatggaataataatcatcgagcaaatgcaaagatcctagatcctaaaggcaaggtctaatcaactccacaagattcaagcgcggcattgcacccttgacattgatatcgtttaataattagactggctttgcaacgtgtctgatagcaacgaccaaaatagttactttacttagagatgaaaacgaccgaaggcatcaatacaatggaatggtcaattcgttcctggttttatcttcaaataagaccttcattaagagatggtttaagaatatgtcttgccagcagaccagggtattgtagtaagctcctgctggcagcgctaaagattggaacaagcttcaattgttggacagctactagctagggctctgtaggctttaaaaagtctttatatctttgaactgctagccgcactgttgtccagtatcaactactaaccttggatggtcatggctcccaacttatagctgcctttgacaaaataagcagcggaaacaattctatagctattgccgcctcatttttcatcattctacagcctatagaagttggttgctttggctctctgaagcatgcgaaaaggctttgttaaaatattctcctgggaccggctatatcgacaactcgttttgggggaagcaggcaggctacattatacttagacctaccaacgactcgtcaacatagccatgcccgaaggtaatcccaaccgtccctgccaggagaggtccagcctcaatacttaacataaacatgttaatgcactgctagccatcgcaggtttgcgttgagcagtgaatcagctctgcacgtggagcatatatactcgctttattatcttctttgctatctacttttgccacccttcttttgaaatcttgtacaaggagcggcgaaatctgcgtctccctccgacccacgcaatgtgatttttacccaagtcactggaaatcggtattgtatattgcgtctcgcagcttccagtagaaaccgaagacgaggaactggatttgaaatttggatacgggtatctggagctggaagtgctttcgggaatgtagacggtatgggggtcaagagtttctgacgtggtaggcgtgtcctgtttacgtccccctttttatcgagctgggaaatggcatcgcagcgccttgttctttggtgccaatgttttctgatgtttaaagaggtggaatctaggaggttagatgtgatctgtaggagttgatgactaggggattgacgggtctaattggcaagaggaggccccggggttaactctgtttgatggtagactaggcagtctctacatgacagcttcggtccttactttcgctcttacccaggcaagatcaactaacctagggctatctaaatgcgacaatagtccctcaatcatctcaccgtaagcgactgtgagtttcacatcacacccgtgagcgctggtcaatgcggaaagaacctgaggggagatattgcttgtctggttggttattgcaagcagtttccgtggcatgatgcactcactgctggttgtgatatggttgaatgcgatccatccggcctctaagtcaaacggaacatcaactggcgacgtgagtgtggatatagagagaggtgatagtgagtcgttgatgcggaagacaggtagcctgtcgttcgaagatactgacgctatagattgatcttgttagcatcattactcatataatatggtgggggtcaaactacctggtcttcgattccgtaaccttcgatggcatttcaaaattccccatactgccaggataaatgtcgggacggtgaagagcatggtgataaatgagactacctcttcgatagaccaggacatggctttgtaaagctgttttctccataagcttttccgcgcaacctctatcacttggtcgaaatctattcctgcgccatagccggaaggtataattgaaacgagacaaacaacatgaggtcagttgagtgtgcctctagggccatcatatggatttgaacctgcgtcggattctcaagtgggggtcagaaaatagacgagcatagcggtctaagcgctggttttgcttttatctgaccggtggccggcaggctgtgcagaacgcccgctggcgtctcttttcacccagcggtcttttggttctgggccgttcgagccagaacccagccactgcatttcactatataacgtatgttttgttaggcaccaagaaaataacgctagtcaaaataggggaaataattagtctcaagctgaataaactatattcgtgcagccttgtgatcgtgagcagcctgagcagcctgcgcaaggctattttcctttgatggcggcaggaaatgtgctgaggtagagtactataatctcccgtaatatcatttggtggtaggaaacagcgtataatgtagcaaagcagcgtagcatgaaaaaaaaaaaaatatgaatggaaaataaaggaaagaaggaaataggttaaggccataaacatttgtagctatagatggtgctaagaagtttggattcaacacttatcaaattaatacatcgtctaccaacggtagcaaccttgtacatgctattggatcgaacgcagcttccgaattcaccgggttgttaactatggcgctgttggcagaccctaataatgcatgctgaagtgttcacgtacagtatgaccagacgcgtgctcgatacagtgatcaactacagagtataaattctaggtacaatcatgttaacatcgacaaatccatgaaacagccggatcagttgagcagcaatgaccgactgaggtctgcggcccgagcgtccaaagggccaaggagtacggaagaggcctgactgcagggtgatcatccctaaccccatagatcaggtccattcccacgtggcagagttcgacgaggtccagatcccagttctagatccggctggatctaggctcctgctctggcctttatatatctaatgttttttgtgcgaggctctgcgctgctggttcgcgaagatgactgttcccgaaggctccagaaggccagaattccatcaacctagcggtgaggaatagagcaaggtccagactacggtggctccaatcctgtaggcgctggggttgacggggttgatgaactgtggtcacaatctaccccgggtagattttgaccaaccctgcaaacaaggatgggcccagccccttctgtgccgtttttactgaaattcattgtttaccctacgcagaagagcctagcctgagaacagaatgggtcaacatacttcggactggcagatggtaacagagatccttactagtttattccaaattttaggttagcgtaggatgacaatcagtcagagggcgcaatatcattgactcccaatgcgcgagccttcattttatgaggcataggtaggttccgatagcatcagatgttgttgtgaggtaaaaaagaaaaatttccataaaaaaggtaagccgaacgggggggtcgaacccccaaccttgagattaagagtctcacgctctgccgattgagctagcccggctgctattggtggaaatgctatattcttaagtgataaataagccgcaccaattgttctcttcccttcataatttccattgacgtatcccaatattcttaatatccgtcgcgaggctttccaccctcagcctttccactggctacattaagctcccgcaacatcccactacccagaacaccgacgtcagtgacgatagaaaccatgtcgaatccctgttgagcacggttctgcgcgtccgcgccgtcggtacctgcaatggtaagaatatatattttggaaaaccgagaacgggacgcaacatacagaaaatagcagccttcttcctagctgacttcgcagctttcaagatccgttgaatagcagcttcatgttcgtctccgccacgctggacaccaatctgctttgcgaggtcaaatggacctgtatcagaccagttaacaattgtccttcctagcaccgggagacaaacatgtcttacc

SEQ ID NO: 5899 - DNA, 7679 bp, Emericella nidulans
gatcgatactaacactgagcgattgcgatcatctttgatcgctttaatctcgatctttcttcgacccatgagggagagtgtttgcgagcggagcgcgcaacgacgaggctttcgggactaaataatggatgaagcggatagaagtgaaattcgagtcgtctttcgagtcaagcagtggtagggtttgggaaaagataacgaaaggatagatcgtgagatggatcgactggagcgcgcgatgagacaagaaagctcctgtgcatttgtcagagccacggggtctaccgatcgcgatgaagtcaggttcgacttctttcggggttagcagaagccggcaagggtgaaacgatatatgaagcaagtgtaactgcccgacaggaagggaggatgaagagcgaggacatcgaagcggcgctaattggggggctggagggtagatggatagattgacagttcggaagacggtcgggatgaggggaacgagacaaaggggagacagaattcgggcaaaacaaaggcgacgaggggcgcgtgagagtactaaccttgggaacgataaagaccgagacttcgaggatcgacagggaacaataatgggatgggaactgatggggggagggactggatggatggaagagaacggatgattcttggtcgagacgcagaagattctaaagatagcctgccaggtcgaggcggctgtccttaaccgccgcttaacgccctttagccgcgtgctatttttacacttcccagtccagactctccaatacaacgacatataaatgcacagtatacttccctacgttctaccacaggatgatatacatattcactggcattttttccctcctatgtcacaccaaccttctcggtgaggtaatacgtcgacggacaagaccggtgctgggccttttgctaatgtacggcatcttatgctcttactagccttctcaaatagtctcctagactcagaatacaggttggcctcccacaataaccacgatgatattttcaagctcattgagaacaggaacatgccatgctggctccgaggtaggatgtgccaagccagagcgctctgtgctgtgcagtgcagtgcacctggacttatcattgctccacaggctaagattaaaggtgaacactaatttgaggaaccccgattcatttccctagaccctggacagagagtctactaccgcttgtctaaccacagcacgggtagcagtaagacgcagaacatgttggctgtgcaatgcaacttccagaaaacatggaccatgctgtcataaggcaccaaatataaaagcctaaggccataaagcccagatcgttgcttccatatcgggatagtggggggtcactgcttgatcaggctagctcatggaaatacagttagacccattatgctcttttgattggacgcagcccctgaccagtcacctgatcatttcctgatgtctttcgttcattatccaaagacaattgaacgaggagagtattttttgtttttgtggcaaaataaaattgtcctcttactacgtaccgcaatatacagtacgccgggcagtaatgtgtgtatttatgccccggagctgtaagagttgcgtcgccgattgactgaagaatgcgggacccctgtttgacagcgcagcactgacaagctggataatatttaagcctgctgattgaagcataccaggcgccagagacaggcttggagcttgaatgtttacatgctgcattgacattggttgatgactgatccgtggatgattatcatttggcttctggatgggcaggaactgaaccacggctagaaggctgtattttgcgacatagtaaatttcacccctgaaacgagcgactgagtagatccccatcaccatctcttccatcttgcctctgcctcttcccccccttcctttgtttcattcgtcttcttttctcctctttttttgctttcacccttctttggttctttccacttaccgcagtcgaccgtaactccgctcgctcttcgtcttgctgcacgttcgacgtgttgtgctgcaggcgatccttagccaaccccagatggcctttgctttcctctccaatttttcctgatccaccgctcttgagctctccggtcatattatctccattgctatctcaatccgcgttcttctttgtatgtctaatctgatctgtgcacccgtttaccacgccgacattaccgcgcagctccctctgtgatcccggcttgctcaacccggtcgaaatacaaatcattccgccgttgggcatcatcggctagattcactctgttgctattagccgcgcctcagtgacagaaatccagaataattcagagtccagaatgccttcgttcactcgcttctttcggagtaaggactccaatgctgcgaaaaagagctcaaatacacctgcggcagaggacacgggcccagcgaaaccgacatggaccgacgcctggcagcgaaccgagattgcaccggaagaggtccaacaactgctgagaggttgcactcaggagctcaaagtacgaggtatgtaaatgcccctcctccctcaagaacgtggcctacttccttgcttcattttgctgatcatttcctcgttctatcttgacagctctgcaaaccccgttcatgctacttccattccgtccaagctccgatacagtcacggcccgtacatttattcggaattattttaacgagtctttgaaaagaggctctcctttcgctggggatgaattggcacacgaacttcgccttaccgacccgatggtgagatacagcttccagctttccgggggattttgcgtatcacagttctgacttggcgtgctctttttgaacatcttctaggtcctatgcagtgttatgaaatggtgctggagtagactccccggaggtgttgttacctgggaggcgtatgagctatttaaggttggcgaacaaggtacaatctaaaacctcgggttgcgcagcacaagtgtaccgtagcacgggctaatttgcacacagactctcagtttgctcgcgacgccttctccacctttatacccattagcgtggactcagacgctcggaccaaaatcatcttcgactttttcgatcttttgacagctatcgctgcacatgggaagtctaacggtctgggagggcggaaactttcccgatacgctggatggtgggcatttgaacaaaatgataccggcaatggctttgaagcagcctacaagaactggacgaggtgcgttagtatcctatactagttttcggtcatttgctgattatctaaagtgctgccgatgcaacgagtcacctattcttcgcttatctacgttcactttctcccgacactcctcgcggcatgagcggcatatctacgctgcccatcgccctgcagtccctcgtccaagccacggaatatccacctgaaacgccgacattacttcaagtttcgactaccaaggtggtcatgatcgtcgatacagtctcccccactccctttgccctactacgccgggcaaagaatttcgagtacagagatagtgataagcatttgcaagaattcgcaggttacgaagacccccgaaaggccttaactgatgagtgtctacgggtcctaaaatgtatctcatctactaaccagtctgctgtcgacgagccggttgtggctgaccacgatgcgtcatggtcgaggtttgaggatcttggtttcgggggcgctatcgaagccacccttgaagaggacaaggccttgtccagtcccaccctaaaggagtttggaggtagcttaaggtccgtacctcattctggcaccggtgacctcggccgtcctacaacaccatcatgggccgacttcatgtcatccgggttcggggatgacaattctttcaaagccccagttgctcccctacttctgcctcctgataaggtcctaccgccaatcgcctcaatacggggccaaagctcccaatcccacaaacggggactcaacgacgagccctctatggaccctggtgagttggctagtatcaccactctcgacttggacgactctttttggtgggtttggatcagcagtttggctggtgaagagcccaccgcacgaaaagcggtcttcgggcgatgcgctttgctcgagacggtcattaaaaacacaaaatggttggtactagaagaacaagtcaagggtgctgcgccagatcccgaccccggcgcgtacattgtcgaaaagaagcggtttttcgggtttacgacccggaggggcaagctctcgcgacgcaaatcttcggccaagaagattagttctgtagaggactcctacaagcgacccaacaatcaggggccgaatagcaaagctagcatagctccagaccaacatgcccgtattcaggcagctgcagctgcactccaaaggaagcaccgtgaagagcaagggctcgccaacggaacaaaatcaaccgcagggcaggattcgtactcaacaaagaccaattccgtgatgactctacagccatctattctgaacgaggcatctcaggctatgaaatgggctagtaactacgacaagaacgcttacagggccgcttatctcaataatagccgtgctgggactggtgctgggactggtgctgtggtcgatgaacagaaggaacagcctaccccctcaataacaactagcacccgacaaccgcctcctgcttctcctaagacctctgctcccccttcagccgcaccggtaccagacgcaactgagaagcccgccgatgatgcgaaggttaacactaatcctgcgaaacagtcgaccgtagattctccgaccccagaaaccaaggaatctgtcgagcccgaattgccgcacaaactaaagaaagctggttttaaaaacatgtttggaacgaccaagaagaaagagacggatattaagcaacccatgaagcctgtagaaggttctgctgtcgctgctgcccgggctgcactagagagtaaggctagggcatctcaggaacagccacctgctcgcaatggtaccactgttctgaggaaaaagcctgttgcagcaacagctccagcgaagtctgttaagcaaatcactgaggtgcatgagccaaaagctactgcgaccccagaaccagagtctagtgccccagcctcagccccagcccaggttccggagccagcgccagctccaactccagaaaacatgagtgataaacccaagattcggcgtgaggctgaatacgatgccctctcccgggtagataccaatgaacaggtagcggccgatcaggaattctcccggtttgaccagggacccttattagagcaacctgcgtttgttcctgaagactcacccgtcgaggaggcattccctgcggagaagcctgaggatgagcccacccccagttcgcccgtatctccaccgcggatcaacaatgcttctcaggaccgttgggcccagattcgcaagaatgcggcggaaaggattgtccagactggaggccgtccaagtaccgctgatgaggatggcaacaccagcgaggaagaaagtgagtgtcttgcccgtgccccaacccttcaaatacagtactgacatccgttcttcaaggcttcgaaactcgcgccgcccgaatcaaggctagagtagctgaattgaccggaaacatgcaagctgcaaaccggccctaaaataaaagcacactatcgcctacccttagacccttcgcagctctcaactgtctgcatcttggtttcgaattctatacctactgaactcttatccatgtgctcttttgtatagccatattcccctttgctgttttgcttgattcttcactttccttaagatatcgcacttacagtacatatgttatggccaagcctcacctgtcccaagttctcaagccagacagacgtacgcatgatgcccatccatgctcattgatcatgatttgtttcctgttcaccttgtaatccaccttcttttctctccacgaccgtttgctggtcctaccttccacgacagtggaaagtctcctttcgtgttttctctttgttatattccccctcttgtctttgccttgtgtttcttggtttattgtgatttttcttccttttgtgtgtctacttggtatctgtaaaataggtacctacctcagcagactatcgctatttttccattcctctcctatttcatcttctaattatatgcctaatacaccaaacataaataaaaatcaactcattggatagcataccactctatctcgttcctccaactagcgcattagcccaaggccctatttattgggacttcttaggatggcgagatcacaaactccaagcctagcaattccgcggtggtatacattatagagatagcaagaatacatatgattaatagtgcaaagcgtaaacatatgcgtatgtagtatccatacaatgcaactctttattatacgtacacgttccgcgtcaagcttcaaaaagcgcaaggacaatcattagtatatccagggtatcgagcgaattataaatgtcgctgggcggaatcaggagtaaatatatagcggatgattaggaagaccaaaaagaggaagatattagaagaacagcaaatgccttggtcgcgtattggggaagagacggagaatttcaaccggatcgtcattatagaatataccgcattcgcctcgtagcctccatagcaataagggcacacaaagcgccgatgaaaagacaaatcgaaatggcgttcggtgtgctcttgtcgaggtccatccacgttgagtcgctcgccgagtcgtcgcgctttgtgctccctggttcgaggatgctaaagacaatccaactgatgaaggttccgacaaactgggggagagttgtgtagacattgagcacgccaaggtaaatgccggcaagctcgcccgtggaggggatgttggagatgccgtcttcggcgtcggagtcatcgtcttggtcgtgatggttaagccggagaacatccatttccgaggcatccgagctgttgaggtcgccgtacgcgcctgagcggatggaggaggaggtgatcattgttacgccggagaggcgagaagcttgggaggggttcattgcgaggcgattaatttcgacgcccatgaatgcgaagggggcccagcagctgacggcccaagggatgccgcaaatagcaacgaggaaggttgcaaaggcacgggaacgggccagaggggcaaaaatcatcgtagctgcgaagacaacatgggagataagccaagtcgtttggaggtcggggcgtatcttcatgaattttgtgagcaaggctgctatgccgggaggaggccgtggggtaaaccgggcccgcttagtatctggcgactggacgcagaatggtagaagaacggaactgatgaaggtgatggaggagaagacgactagtgaaagacttccaacgcggccgacttctcccagcatatccactggtcggtctgcgtccttggggacttcgtaccgaaagtaggtctcgccaacccatgtagtactgtagaagaggaacggaaaccaacctcccaaccgtgagcttctatcctgatagactttagttaagggaaataccgatccaggcccagaattgcgcccagcaaagtggcttgcctc

SEQ ID NO: 5900 - DNA, 8179 bp, Emericella nidulans
caatcctcagacgtctcttccttgaacgataggctcatgctcacagtgtactcccactcgctgttcctcttggtgaacgccaacgagtcctccacgtgttcgtcattgccgccgcccaaacgaatctgccagatgcgctgttcggccagacgatcgtctccaattcctgcagctgccagtgcatcctcctcaatccccttcaacgcctctctcaccctctgctcaaactcaatatctggcttctctcggtacggtgagcggtgcaggtatcgcgggagttcgttgacatcatagtcgggtagccactttccaccgacaacgcgccggttcctgcgctgggaaaacaccggcggcagcgcatggaggagaaagagcaagaaaagcaggatgagcaggaaggaaaggcgccgtcgcgcgagaagcggcaggaaggattgccgggacgctcgtctcatcgcgatggcattctaacggtaagtggcgaagactttattgaaaatctagaagttggaaaatactggattcgactgagttcgattggactcaactgaactggacgaactcgaatcgatgcgaaaatatagcaatgcttagccgcaaacggtgatgttgggcgggtgaatagctgcctggcaggagcaggcgcagcaggaacatcaggtgctcacagccatgatcctggtgcagggcctcgggccaaaattcaagtgcgcacatatcggcgatcctgattatgaaagcgtgggctgataatcattgactattcgagacatccatctcagggtccaaccattctctaacagtacctgtatctaaacggcactaaagcatggaggccctcaagcatcctttgaaccgttccacggcagcttagcttcagggcagagcaaatcaaatgcaacgctgcagagctctgtggagagcaaattcttgttctggaccactgctaaggagccattgggtccgctctggggctgtgtgacgtgtcaggctcagacatagaaatgggggcggaaatggcagagtaggaacagagagtagattcagggctgcctacaggtataacagaaggctctaacaatatccactagagtacaccgcaagaggacagcattcgcaaacttgcgccaggatcatcatttactagtcttgaattccgcatgcggtatcccgtctaccgtctagcttatttccaaccacattcccgatcgcagaccccaagccttaaagggcttggagacgacaaagaatgttgtcattgcagtaatactatggccctggtagctcgactataataaagacgtacgtttagcgctggataatccggtgatataaccagggagaggcgatgctagaactcaggaaataggacaacgaagccaactcaatcgcgagtttttctctctcccactttttctttttcttctttttcttgttattttggctaagctacttgttgagacaatactacagtaaaaccccgctataaggaacctcgatatagggaataccccgttataaggaacctgccaccgtgtctgaattaaaaccccatataaaattgcacaaaaccccgttatccgcaacatgcaatttttttccctttctcccatataaatttccctataacaaggtattgtttccttcacttttcttccgccttccttaaaaaatggcaaaacgcgttgctattacaaaccgccagcggtctgcccttcgtgctcaacataagctaaggcctaatttgaccggcgtacagctatctaattggtttgaagaggtgtataatcacaagatctctatatccactgtatcacggattctctcttcaaactttgactggctggatactgcaagagatcaccagttagataccaagaggcaccgcacagagagctggccagagcttgagtaagcactttatgaatagattcagcgggcagagactcgaatcacagtatctcaagaccttatacatgaaaaggcacgccaattctggccatctatctatccaggaaaggagatgcctcaattcagcaatggctggctctgttgcttccaaagccgtcgaaatatttctttaaacagtcgtcatggtgaagctagcagtatctctatagatgtggatatagagatgtattctatttgccaggctataaaccagtatttgcctaaggatatctttaattgcgatgaaactggtctatattggaggataatacctgatcaaagccttacaacttgctctatatctggaaggaagaaagataaggcatggatcatagttcaattctgtacaattatggatgcctctgaacgccttcctatctggatcattggaactgcaaagaaaccacgcgtttttcaagctgctggagtgaatattgagaaccttgggtgctattggaggtctaacaagaaggcctggatgactggaaagatctttaaagagtggcttctctggtttgatactaaaatgactagaagaaaagttcttcttttgctggataatttctctgcttatgaagcagcttttaaagagatctccttgcagcttcagaatatattagttgtgtggctgccggccaatttaacagtaaaataccagctacttgatcaagggatcatatgcacatggaaagcttactgggaacgcaagtggctactctatataatggctgaatttgaccatggctatgatccagtggccacaatgacacttttatatgctgtacaatgggcaattcaagcatgggaggtggatctgacttgcgaagctattcaaaactgctttacaaaagccttgaccactcaagatgatacagaaatagtcaacattcagctcctaaataagcttcaagcaggcctggatcagctagcagtatccaatatctgagaaatcatgaagattgaccagttcctaaacccgatagaagaacaggttactgataatttagaggatttggatactcttattctttcctaatttagtgctgaagaagccgaggaatctgatgatgaggagatcttagaagcacttcctaaggtctctgcaaataatgctttagaagcactctacaagctacacttgcatgaagagcagcaagtagctggaaatcaaactcttcttcaggaacttctacaccacgagcaagtattgatggaaaggaagatgcagactcagtatcagactgatatccagaactttttttcctgtgaatagggactgtatttactaaaggactgaaaaatatatctttatacaagcgggcgagcattttcgctataaggaataccccgctataaggaatataaaccgcggtctgaattgattccttatagcggggttttactgtactatatatagtcgatcaggagcggcagtgccactccatgggagcatacaaggcatttccactacaggccatctcgaccactatcctgcttaaatactttgtgagacattgaaattccaaatcggcaggcccgcgccagcaggtggaagatcaaagatctccagcctaacggtaacggtcatccttgtcgactcttcatcaccggtcgacgacggcatagcagcacatgggagcgtcactccaatgctcagaaccgaccgtggtctgaggcttacaaaacatgaatcggatgggacttagcctcgagctttttcagctgacgatggttcttgcgcaacgcctactgggagtgctgctggttgacatcggtctgcttcagttggtcgttgtcgtctctagaaacagggctggtgtttaccttactcagtatacgccccgggttcggcgcaagcttaatcggaatagtacagagatgtgtatcaacctgcgtggatactccagacttagcatgggcgttgtagaactgactatcagattacgtggatcatggcgtctctccatgtgggcaggacaacacagagacgttgacggccatagcttgagcccgctaactgacgttgccgttaatcaacgtgctatattccaaaatggcttgcgaaagcagcggtcaatgcgctattgttcacttgtattactgctcgaggggcaggccgtccgtgttatcttggccgaaagggagaggacaactgcgtagatctgcagcaccggcagaaaaacgcccaggagagatcagaatgctcggtatcgtgcgttcccacgaatatcggccgcgtccgtaattacctctcacaccattgttcgatctgtggctagcctatccgagaggataagatgagtgtccccatgcccggatgcacacaacaggaatgctgacagtcgaccctcgtcaaggactcaatagccctagctaccagcagcatcgtacgcctcgaatccctggactccgcactcattgttatggaaggtccatcagctcgcgtcttcgtaacgtgggtgatattgatgtcttttgggtggtgcaccggctgtcagaccccggcttctgtgcatttcccatgatagtggtggcgggtgtttcgcacaaaaggagtgttgtgcttagtcgcgaacctcgagtctggacgacattcttagcgcaattcaccttggctaactgatgacatactgcttaaccaacctaaacggatcgcaggtcattgatatacggagtcaatggggtgggctggctgtcaaaataggtcctgaatgggcaaggctacaaaattgcaggcctggcgagaaccctgtcactctaagcggagaagaccatcggatcgtaatgggctggcgctatagagctgccagtgggctcatcaggcggccatcgcctgcgtggttggattcgtccccggtctcgaacagccagcagcaatcgccaggaaagcctcagcaggaccacgccctaatggcagagatgatgatgaagaaaaagcaaagagtcgtcattgcgaagttgagcacaagaagtctgagagaggaagagacatgcgctgctggtggttcaagaagccctgcgccgtttcctcccgtgatattgtggtctgctacctttagcagtctgacagctgcgctttgtcttaactggcgtaagctgacgtagataataagagcctgaacgtagcgatgctcagcaattgaatcagtccgattctataggaatttctctgtagactaactgcctttacagcatctcgtctagcatggaccagtcatcaaccacagggtcaaatttctggagataatcccgagcatcaaaatgacaaaccttcgaacagtaggcaggttgccacgcacgtcgttgcgatgtgttcgttttatggctattatcgtatctttggttgatactcagcgttgacgacactccggtagatcaccacgaggaaaggaagagtggctcaaatgagagatacgttcatctgttcctgcatgtcaacactatgctcctgccctggatcactgttgctcatcaaccctgatagcggttctcttagccgcaaaattgacctgtaaccctgttctcgtagccgcattgaggggacgagcttgatttgtaagaaatgaagtcatgccccactatcaccatcaactagagtcctatataatcccgtcaacaagtcccctagctaactctatcttataaacaagccattaccaccaataagattaaaatgcctaagcttttcatcaccggcatcaccggctacatcggcggcgacgctttccacctgctctcgcagaaacaccgggacttcgaattctccgcactggttcgcacagaagcgaaagcaaagtacgtgcgcgagctgtatccaaacgtccggatcgtcattggcggtcttgacgatgcggacaaaatagagaaggaggctgcgtgggcggatattgtgcttcgtatgtcaatcactccccatcgtgtaaaagaacgagatgtctgacgagcacagataccgccgactcatccgaccacgtcggtgcagcgaatgcgatcgccaggggactggtgcaaggccactcgctggaccgcccggggtactggctgcacaccggtgggacaggaatcctgacatacttcgactcggacgtccataaggtccacggcgagcacaacgacaaggtcttcaacgactacgaaggagtttccgaactgaccaatcttcccgccgctgcgttccaccgcaatgtcgacgagatcgttctcaggacgggcgttgagcatgccgaccgcgtcaagacggtcatcgtctgcccaccgaccatctacgggcgtggacgaggccccgtcgcgcttcgtggccggcaagcgtatgagctcacctcgttcgttttgaaggagaagtatgtcccaattatcgggaaaggattggcgaggtggaacaatgtgcacatatacgacctgagccggttattcgatctgcttgtgcgggcggctctggatcccgccaggaaagacgataaagagatttggggcgagaagggatacttcctctgtgagaatggagagcatgtctggggcgaactgtcgaagctggtcggcgagcaggcgcacaagttggggtacctcaaagacgctccagtggtcaaagaaatgtcggtggacgaggcgatcagttcgcctgctggctttgaggcggccagttgggggtggaactcgagggggcaggcgcagaggggacgggaagtgctgggatggtcgccagaggagaagagcattgaggaggagatccccgatattcttgctgcggaggcttcgaggctcggtctgtaggctggcgcgcctgtcttatggcgcccgatgtactgtgtaatggttaaagtatgaagtatgaaatcattcgcagacggacagttcagcttaacgataatgtttccaccaaccggtgaaactcgtctgcttattgcagtcgaatcatcgttcgccgatgagtaatcataaatcagatcactaatctctctacaaagttaacttagtttacgaagtactttacatcgtattcgccagccaaagagtcccctttcggccgtccgccaattccttaatgaaagcgtgcttcagcgatcatctttgactggggccaagaagcaattgtttgtctgttccactaggcacagatctggccacgaccgatgatgagggggaccgttgagtagacctcgtatccaacgtgtggcgtggctaggtatcctgggccttcgtatcggccaaatatataactgacgtatatcagcgagagggataaccacaatcacaactcatacacccgatcagtagttttagttcacctacctttggatcttctaagttctatttgaaacataatggagctcgacccgacggcgcctctcccctccagcaagatcgaccatattgggatcaccgccccaaccgagcagctcgaatccctcatcgagttctacctcaaagcgctggcgccgctccactacaaagagatcatgcggtttcctggggctgttgggctcggagacaaggtcccggatttctggatctcagagacgaaggtcgagactccgcagggactgcactttgcgttcactgcggatggtatggcgccttgatgctggagtcactacgagagctgattcggtctagatcgcaagacggtcgatgcgtttcatgaggctgcgctcgccgctggcggaaagtgtaacggcaagcctggtctacggacagagtaccatcccaattactatgcggcctttatcatagaccccagaggcaacaatgtggagattgtgagtctatcccctcatccccgcatcccctcatccttcatagcctcatcatcatcccctctttgttccttccccctttcatccactcatctgacggcgataggtatgccatttgcccgtggaagagtagagcagccgtcggtcataataaagttgcccgcggaaaggaagacacctgcttttatactctataaggtagtgattcggaagttgccgagattgatatctataatacaacagaataagtgcccgatcaggaaataagtcccatagataactcccatctattagtatatcaccctgtatatcgactagttcgccctgcataccttgactcgaaggagtaaaactgtcccggatatcgacggagtacctgtaggcacggcccgccatgaaaagagagtgggtcgataattttacagtgggacgatgagagatttgtttgactttgtttcatcagcactgcaagggcg

SEQ ID NO: 5901 - DNA, 3611 bp, Emericella nidulans
catccaatgaatcaatgttcagtctttcaatggtaggagataccctatccgcagaaaacacttgttccaaggatgtacttactggattgttggccttctgaggtccaaggtgctgaagcgctgaagtagggcgtcagatgtcatccaatagagatgagcttcagggttcagggttccaacacatcttcgttctctgaggcggatcaagatcgccggccaatgaatctacatttggccttcagtggttcgaagctgatgttcgtcagtttgactatgaaattaattggctcatgctgaggtcagctcatcgtgcccttgttgaagcacttaccacttcactcaattcaccccatcttggccatgtacaaagaccgctctcaaaacgccataggaattttcagcagagaacactccatatgtattaatggttcaaattcaccttgcttgaaatcgccaatgctctgaagtagggttgaacccccaattataagaaaattgacttgttacagatatctacattcctatgaccccgtcaactgcttctagcatctatcaaacagacagaaacttgatttatacttcaatttctacccagcaatggggctgaagaagaaaaaccgcaaagtctcacaatcatctatgccagccgatccagagcttgagccagagtcctctaactggccagataagaaggcacaagaacatcttttggatcttattactaggtaagaaatgtgtaacacagcttagttcaagaagcattgctactaatgtaaaattagccttcatctcaactcagaatacagcgatttggaaattgtctgcaagggtagaaccttcccagctcataagcttgtggtttgctctaggtcagagtatttcaaaagagcttgttttggagaattcaaggtgcgaaaaatcagacttttaaatagccttcagactaagtctaaccgactgcttttgtaatcaggagacccgcgagcctatctgtcttgacaatacagacccagtccttcttgagaaggtgctcgaattcctatatacgggaaattatactgtcagacgccttatccctgaagctcaagatccacagcttaatagcaatacggagtgtgcgaaagagtctttgataatgtctatctcgaaagtacatgctccagatcagcttgcatcacaagtagaagaggccaccaatgagattagcatgcgcaattcagaaaatatcgcccaagaccccattggtggaagcaacaaaagcgaccaggaggatgctgtggaacccgtcattaatcctgcagctgaataccacccatgctatttctacatgcgcgtgtctggtaaagcagactattttataaatagctccttagaagacaaagcaagggagcaatttcgtacatcttttacagattgctcagagagagatttgtttgccgaggtgatcaaggagctctactcagaaggggccaactaccaggacctaaaaacactggcaatagatgtggtggtcaacaatctgcctagtcttcaaaaaggtttcagcacagcaattgattcccagcttctagaggcagtccctaactgcgctattgatctttgtcttgcaataatagataagtatatgagcgagccacctaacataaaaccatatccactcgccacgggctttgaatataagggagttgactacaagtctctactataagattttaagaaataattgaagagcatgagattgagatgcttcttgagaaggtacaaagaataggcctgatattagcaggtaaaaagaggtttacaaaggactgagaagtaacagtaacacgtccgagtcaaactttgtttctttgaccttatcaagaggcgttgcttctagtcgtagcagactagtccagcatagatttaagagatcttttagaattctgtatgtttgtttgatatacttttagaggaagctaccacgcttttcacacaggacttccagaaaattgtcaaagtggcattctagtacttgttggacactagtaaaggggtcagctctttatagaaggatctttgggggatatacatacatagtatttgagatctcaaactctcctctgcttggaagaaaatagactattgatttaccaaactctagggcaagtatatgccagttcctgctattatatagtttacattgtaggattttatattagtgcctgaattctggatcatcctgttctagcagcaagaacctcttagaagtaatatatactatagtctcaggatcagtaaatgcttgctggctgtcttgctggtattgcatccttttttgcttatacaactcaacaagatcaattaggtgtagccttgttcaaatagaagcaattaaactagaaccctgtaatatgcaaagggcattcaacatattatcaacaaaatccagttttggaatagggaggatattgttattttattgcatcgagcctaaaatttcttgaagctgagccatagcaagtggactggctatagcaaaaaagagccacgtagtcaagagcttgtcaggcccatattcagatatggatcccgtgaggtttctctttataatagagatgctgtatttgcatcccattatcctcagccactttgtccaatctggtttgtgtctgggccttctaggccgtggccttgcaccgcctgagtgtagcaatggcagttcttgaaaaggtaaggctggtggtggggatagtaaggttgtatgtttcgtgcctgatacaggttctgattgagtggtctcaaaagtcgtgctatcaccctcttgagaagttcctgtcttcggagagaatcctagttgttgaatgtccgatttgcaaagtttgagttccttaaatctggtaagctaaaagaagagttgatgcaatagttacaactcagcttatattatacaatttgtctataaggccttctatctggtgatatcagtttaaaagagttattttaatatcattttggctcatggtgtgctttggttggagatcagttctgaattattcacctagtggctatttatataggaaaaatggaaaataatctttttctgtgacaacagtagcctgatatataggagcaaattcagttgtcctctactattactgtagcaaatagagaaaaacttggtttagggagcatgcagaacagataagtcgataataagtagttataacagtgacgagcgcaaaggggctccatgaactaggaatgctgaaagtatatgagcaaataaatagtacttatctcgtcgcagaagatatatatgatcgtgggctcaataggtggggtcctacttcagtctacttatctgcttttgtcagcctgaagcattgctgaagctctgctgaagtctggcactattctgccttgctggacatttcaggctctcagccaataaatagtaacaagtcctgttctaattcaataaccattatgcctagatttgccccagaaccttggtaagatttactgttaatattgagattaccatcacaagttgagtgtaatgaagcaggttaaaatcctctgttgtagccaatcagacatgcgaggttggcccagatgaacatgattct

SEQ ID NO: 5902 - DNA, 7727 bp, Emericella nidulans
gtcaaataaggagctcctttctatagccacggtcctttcttgagccacctcgacgatgcatgtatctggttcttccccagctccagccgagcatgccagtgaaggttctgtcagacccgtcgacatcccgttcgattcccagtccagtccttatgccttggttgatgagaaagcttcccagatcgtcgaggcggaaaatcagaagctggatgacctgataggcaggttcaccaagggtttcgatcccgctgccttcagcaccgtcatcacggcttccattcccaagctcattaaagacctcttccccggctcttatgcacatctcttgcttatcctgtttgagacatttgaggcggttcaaactatccagctgggcctcgagacttggtttaaacgccgctacagtggcaatccgatcttctttccaagcgagaccaacatcaccgatgaaactttctttgcggcggaaattgagacccttaggaagctgctggagcccatccgtgaagggaaaaagagctcgatcttctgggtgaatactcgacgtacagatccctctcggacttgcgaacagctggaagcttctgtcagggtgatcgagtcgttcaaggaggacgtctgtgcggccctgatttcaggaaatgagaacagtatatgaccgttgttcttaagcctctttctatgctgacgtctaaccctaggaaccatctacagcccacttccagtctcggtcgaaaggacggcaatgtacagtatgaagcagttcgcatggacgcatgcagggctaccttgcactgggacaactttaatggcagcgaaattgagttcacttcgttctaccgcttttataaagcgcatatttcgacaaccgagccctcccgcgccagggcgtccggctggctgccacctatgtcacccggaactcctcgcttatctgccagagaagctagcgagggtgatttggcgaactggatctcccatggcattggcgacgacatcgttgacctcctgctcaagaccgccctgtggctcagcctggcaagaggactggcagctgttcacctgttctgtgatgttgctaggctgtttgtcctgcacccgcctccaatgataatctcaaaggaatatcgtcgcttcctgttgcatctcattcgtcttcgcgctaccaccgggggagcccaattctcaccgtcccctatcgtccctcgagataacaagggcttccccggtcgtaacaccgattacttcgaggatatctggagaacgagccatcaactttccgcgggtctctgtgatgagatctctctgtttgtcaagcacaatatccccaacttcaaactgtcgaaagccccccctgtccgccgccgttccggccatggagacatgcatttaatcacacagggtcatattcgtggaagcttcgccagtaatgcgtgcggttcggatgaggaatctgggggaaataagtgagtatatcttgcctaccacttcagcacggcgaagagagctgacctatcttccgtgctccagcacaaccgacgagtacgacttccttgatttcttatccgagaactcctccttttccggagcaagacagtttaattaccccagtctacttcatctacgcaattgtgatgcacatatctacatacgaatcattatttgatttaagcaccttcctcacgaaattctatgcaaagcgactacgacgccccaaaaaaaccaaggtatacattgaaaggattacttttcaggattggaaccgatattttcacctccggataggaaaccattccagcgttgattggttgttggtatgagagctcttctttctcgttctctctcatttcgctcttactttgctcccagctctccttttctgatccttcactcatccttcctgctctcatgccccgaatgtgacgcatgcaaggattgagcagagcagtagctcagctttgatgcatcatatttcattgcattgcagtttcattccatttagggccgtggggggaaagataaaggatttttcaaaaatgcaaagcaataatctcatatgtatccagctagtttaacagctctcctataggatcaatctgttcttccttcaagaacttctttcttcctcttgtcagttgctgtgttgtgcatccatacatctcactcaagcccttaggctattgcgccaacataccttgttacacaaggtgaaagacaggctgatgttcttatgcagtttatgactcatctttctccgcaagtcacctcttttggccatcgtctggtgttggattggtgataggcgcagttctgcctgcctcgaagccggagccacagctgctggggcatgtgccctgtactcctaccctacaatcctcagtcctgatatgggcttgaggcagggcagccaagaggtcctccaacccagaatgaacgaatgattacacgcacgaagtaactgctcataggtagccaatgacagaggtacgctgccctcacgggtccgctcccttcatagcactattggtttttcattttgatcacaacacttgcttgcacctgctcatgccagctgaggtcaaatatttgcatttacagacgattccttggcaataaacccaaattgacgagttgaacttgatttccaaatgcctcgagggagattcacgttttcactgtataggcaaacatgattctaacgtgccacgacatattggaacagccactggcattctaccttttaggggcctcctagggctcttccacacactgggtgtgccttgtgttctttctcccctctatttatcagcagaaagagtgaaatatagaaaacaagaaaaataaatttttcagaccaaaaaaaaaagaaaaaaatgtcatgggatgacccgggatcgaaccggggacttctagatacctagtcaggcttggattgaagttttggcttcagtctagcactcataccaactgagttatcaccccattttacaagaagctttttatgattagcctttataaatacgagtttgtaacaaagcaatttacggcaaactgtgcgcagtccgattgttgccatatcccaatcatggcctggatgatagcccgtgacccaggcggtcggtggtcgggcagaatgacaaaatcactagcgatagcttcaaaacacaacaatcaatcatacttcatacatcaattgaactttgcagaattgcaacaccgatcgtccgctacgccaacgccatattagaaattaaacggaagctacagaatattagagtgtgcagaccaatagccttagtgcgtcaaacagggagcagtgagtactacaacatccatcatcatcatcatcttctacaaaagtcagctccttttacttcgacagcagtataaaattgaatgtcccgaagccaatcatcctaagttattcagatttagagagcaagacaagggagagatcatccagggcctgcaaatttatacaacgaaagcggattcttgccttggaagcagagcctcgctgcgaagtccaacatccgaaaaactcctttatctcctaacagccctctcgggtgtcactgactgtcattcgtcttgccatatcagtgtctcctctagtatgcgccaatcaatgatacactgctgatccaagcaccggtgctcaacatatattcaaaacagtctactcaacctccacgatcttccccgactctacctcatagatatcccgtgattggtacgtctagcaccagcgggctctccttcaacagccgaatgacctccagcacgctctgcctgagatccgcgaacggggggagggcgatatgatccgcgttctcgtgttatgggtcctttgcctatacaaggaccttagaccttagtgactcggccaaggcctgcgctgtcctgaaggcggtgagccacctacaagacttccttgcaacaacaatccttctttctcatttcttctttagcgattccttcttgtacgtacggcacgtctagataggaagatccatctaaatacgtcccttaacattaggaatcgctgaccaatctcaataatagtatgaggagaccttttactatgacaatggaagaagaaagcgtcgcattgttgctacagcagctccaggagctccgtacagagatgcggactcagaaacaacagctccaagaagagaataacagcttacgggcggaactacaggccgtacggaactcgcaactgagaaaccatccaccagttaccactacagttacatccgcaacgcccaccccctacgaacgaagctatccccgtcctcgtcacccggatgtcgaaccctttactggagaagaccctaaggactaccctcctttccagatgaaccttcgtacgaagtttgcaatcgacgccgcctgctaccctacagaggaggaacaagtttactatgcctacagccgcctgagaggaaaagccagccagcgtgtactaccatggctcttggctcgccagaaatctgagactcccgtgctatgggcagaattctccgcggtactagacaaggcctttggtgaccctgaccgacagagaaaggctcttgtacgagtgaatacaatgaagcaagggaaacgtgactttgaagagttcttgaatgaatttgacgaagaacttcttaatgctggagggattaattgggatgataaccagaagaaggccttgttggacacggcaattaatgttgagttgctaaaagccatggttggtattaggcaggaggattcgtacgacaactactgtaatcaactgcgcgaaatcaaccacaacctccagagagtggccaggcttacacgaaaaggatctcgcgctgctgtccccacgcatgtcgctcgtacaagaccagcaggaggctctgaccggaccgggacccctgatcaaatggactgggaagccacccatgctcaaattgcagccctacaaaaggaagtcgcggccctccgtacgaaagggaccaggaccccaagaaaagctagtcaggcgcctgcagaggagaagcaaaagaggttgtctgagggcaaatgcctacgctgcggtgatcctgaccactttatacaagagtgccctacaaaacctaccaggcgccctaggcaggtggccacagttcaggaagaacaagaccaaatggatgactacagcgagagcgagtcggaaaacgaataacctctgtgcaaagtcgcgtacagaggggttatacagctagagaaatactacttgattggcaagatttcaacagctcgcgcatgaatacccccccattcttggtggaggcactagtcaaccatacctataatgctcgtacaatgatagatacaggctgcctgacctatggggtaatcagtgacaagtttgtcaagatacatcaaatacccaccatacctatccacccgaaacctttcaagggagtgaccgggaatatagaggagattaataagattgtacgggttcagctagacatcggggcgcatacagaaaaaggagcctacttctatgtgatacccgataacctgggctatgacttgatcttgggactcccctggctggagcaacatgatggaaggttagaggctaagaggggcaggctgtacctctgtactactggagtccgtctatggagtactacaaagaggcccttaccaaagctgaacatagcacagatatccgccgcaaccatgggaggatttatacaaaggaaaaggtgccgtggccaagatattgagatatttgcggtctcattggcagatatacagaaggcactggccccaaagagacatattgacccccgtacaaagctaccaaggcaatactggaaatacctaaggctcttcgaacaagacaaagcagaagaactaccaccgcaccggggagatgggattgatcacaaaatcgagctcgtacaggaggagagtgggaaggatcctgaagtcccctggggccccctttacaacatgacccaggaagaactaatagtcctccggaaaacactctctgaactattacagaaaggctttatccgcgtgagccattccccagctgcagccccagtactctttgtacgaaaaccaggaggaggactgcggttctgcgtcgactaccgtgctctaaatgccattaccaagaaggaccgctatccattgcccctgatccatgagacactgaaccaaattggacaagccagatggtttactaagctggatgtgtctgctgccttccataagatccgcatagccaaaggccaggaatggatgactgccttccgtacgagatacgggctctttgaatggctagtcaccccttttgggttggctaatgcaccgagcaccttccaaaaatacatcaactggaccctccgggaatatctagatgaattctgctcagcctatatcgacgatgtgcttgtctataccaatggggacctccgccagcaccggaagcacgtacgaatggtcttgaagaaactggaagaagcaggcctatatttggatattaagaagtgcgaatttgagtgcaaggagacaaagtacttgggctttataatacaggcagggaagggaatcaaaatggacccggagaaggtgaaagcaataaaggaatgggaaacccctactactataaagggcgtccgaggattcctgggctttgccaacttctaccgaaggttcatccctaacttctcagggatcgtacgcccactgaacaacttgacaaagaaagggacacccttcttgtggactaaggagtgccaggatagctttgatctgcttaaggaaaagtttattactggacctgtcctagcaaccttcaacccttcctactgtacggtagtagagaccgactcctcaggttataatacaggaggagttctctctcaatataataaaaaaggggaattgcacccatgtgcctacttctctaaaaggaattctccagctgaatgcaactatgagatctatgacaaggagctacttgcaattgtatgatgtcttgaagcctgggatgctgaactgcgctcatgtggagaattccaagttattacagaccacaaaaacctggagtacttcttctccccaaggaagctgacagaacgacacgtacgatggtccttatttctcagccggttcaacttcaagctagtatataggaaagggtcagccaatcagagagctgatgcactttcacggagagaccaagacatgcctgatgatgaagatgacagggtcaagtcttgtatgatgcaactttttacagaaaaacacttggggaagacggtagttgccaccctctgaccggctgaagagcaaccatgggagccgtacaaaaaaagtgatatatggaaggaggcactcaaataggatgaaagatatagtgaagcagtactgtgcctgaaagatggagcaaggagatttcctccacacctacaattgaaagtcagaatctcagaatgccagctggacacccaagaccatatcctcttctgtgggaggaggtgggtgcctgatagtgaacagctccgtacgagtataattcaggctgcacatgactctatattgacaggacatcctggccgagagcaaacatatttgctggttagccgtgaatacttctggcctaacatgtcccgggatatcagaagattcgtccggaactgtgatatatgtgggaggacaagtcttggagagccagagaaggg

SEQ ID NO: 5903 - DNA, 7375 bp, Emericella nidulans
ttctcagtccgaaaatacccggaaacgcgtttgagggacggttgaccatggattggtaatcttgtatgaattgtgtggatgaaccccactgccaaaagcacagcagccgattcggtgaaaattccccaaagagtctggcagagacactggtttactccgagattgagctctaattccggttatcgacgaacgcccgtggagtcgtggtaaaatagaactcatcatccaggtcaggggtaggtgggttccacccaagattcacgattcgaaggggtcgacgcattcgatgtggcaaagtctccgcctggtgcagcaattcagccgcgtgcatcaacaatgcaacgatggacgctgaatatggatgcctaatcttgcctgatccggtgcattctttttcctggcttggtcattgcttgcgtggctgcgatccagccgatccccggtgattggctgtagatccacggctaagcctcgctgcgctgcattagtcgaagcttggcaaaatccaaccaacagaacgctgcggtgtctttcaatcctattccggccgcgtcagttgacaaattggcctccaaatgcagacactcgagctttgtcgcgagcagaaagaagcttcaaagcatttatatcgccggtatgatgcaccgcggtgaaggcctggtcaacacgccagaccctgtttgacagcatgccgcgctctctcgcatcctccagctcaagccagagcgacaagaccaagacctcgcagacctcgctttcgggcaagtcggatgagttaggtacgcggcatccctaaaacaaggaatacatctaactgtcctagccccgggtgaagctccggtctcgctcagtgggatgcagcatcttgatcgacatggcaaggtgatcagtacgtttagcatcgaatactgacatcctccgaaattaacattgagctgcagccgacccagaccggtccaacccaactcgcccacgtctggagcgaccccttgacacaatccgcggcttcgaggccgctatcagagcacggcgggggcaacactgaacaatggatctatgatggacctcgacctgtagccgatgtggggatttttgaagtctgattctgcgctcttattttggctggccgctagaatgctcccttatacttggtcttagtcggaactgtccaatagattgtttacactgtttactacgttgcctgcttgagttctagaaatagagctcggaaataacagatccactcgggccaatttgcgcttgcagcgggacgcgtcagcggcacttttatatatccattcgtgcaccatttgcttctggtcaatcgtctacagacctgtcgctcgttaccatgaagtttgctttagctgccgccgcggcctcagccctctttggccaggtgatggcggacgttgatcctataattatcaaggtaccatcgtttattggtgccaatagctgggactgacgaattagggctcgaaattcttttactctagcaacaacacccagttgtatgttttcccatccatacaaccaagtctatgctaacgaccacagctacatccgcggagttgcctaccagcgtaccgctcgtcctaaagtctaagaattcgctaacagaagcagaggactacaccaccaacagcacctttagcttcgacagcagctacaaggaccccctctctaatgagacagcgtgcaagcccgatattcccatcctgcaggacgtcaacaccaacacgatccgtgtttacgccatcgacccaccgaagaaccacacaacatgcatgaacatgctcgccgatgccggcatttacgttatagccgacctctctgacccctccgagtccatcgaccgcaacgatccccgctgggagcctgcactgtacacccggtacacgcacgtcattcacgccatggccgggttcagcaaaaccctcgggttctttgctggcaacgaggtctccaattccgtgcagaccactgacgcaagggcatttgtcaaagcagctgtccgggacatgaaagcttacatcaaagcccagaactacaggtctggtcttggtgttggatatgctaccaacgaagtagagagtatccgtgtgcagctggcggtctacttcagctgtgagtccgaggaggacagtatcgacttctggggatacaatatttactcctggtgtggagattcgacgtataccgaatccgggtacaaggaccgcaccgaggagtttgcgaattactccgtccccgtcttcttcgccgaatacggttgcaacgaagttactccgcgcaagttcactgagatcgaggcgctcttcggtgacaagatgaatggtgtttggtctggtggtatcgtctatatgtacttccaggaggctaatgactacggtgcgttccactccactatatccaatcctctgaaaataaaggaatatgctaacgagcgagcgtgaaaaggcctcgtctctgtcgttgacagcaccagcgtctccacaatggctgactacaagtactactccagccagatcaacgctgtctccccctccggtaccaacaaggcctcctacacccccaccaacacggcactccaatcctgccccgccgtgacatccggctcctggctggcaaaggcgacgcccttacccccgactccgaacactgatctctgctcctgcatggataagacaaacgcccgggctgtgatgtcctcggcactatgacgactacggtgaccttttaacaacaagtgcgggctaactgaaagcgcagctgtaatggcaaattggacgaccgggtcctacggtgcctatggaatgtgccagtcgaagcagcagctcaactgggctctgaataagtattactcggagcagggcagtgtggcttcggcttgcgactttgacggctcggccacaacgactgcgactacggctgctacgggaagttgttcgtcaatgatgagccaggctgggacggacggcacgggcaccgttactgctacggctacggggagtggctcttcggcgacagagacagaatcctccggtgcaaacgctttgaatgtcggtgtgagcgctggggctggtgagtttgtcgttgctgttctcgggtatttgctgtgaatgacgtggctggcacctgtggtagagcctgggacatgcttggttattttgtctaaactttcgttcatggaattagagtcttccgctcattgatattgcccattgtgcatttatttgaccccaattgatgtaccttcctttacaccttccgtttgttcgttgtacattgagcttggcaaaatgtagatagtgtaccataccaaagcaatgtaaagccatgcggaccccttatctcgatcgaataccaggatcctgccacggcaacagttgggcccaagcctacaaacccgcgagacactcctgttgtcgaatcatccaagtcgcctactaatctacctacaggcgatgagagcgcaacaccccatattgatttgaatcatccttccggtatacctcgttaacgcaccctttaatcctttgggaaagtagataaagccgcatgaaggacgacgctatgccaaggctgttatcgtgtgaccagtccgtcctattaatcaattttagaaaactaggtatattaatatatcttaaatgtttcctttaacagcaatccgatgtggtgtaatggttaacatcgccgtctctcacacggcagctcggggttcgattccccgcatcggaagtggtttctttttggtcttttttcttgccacctagacaggtcggggagaggttggttgtgtgggtggggtgcaccgccgatgccgaatgcggaatacatgtacgggatctagtgctcaaccacattatttcgtggttttgcccacaaagctctgtttccggccttcttgagtttctcgtcaactctcccttgggactcttctggttgttcacgattggaagtacatgcaagccttatcaattctgcacttccaagcctaggtgcatatctcaaaagccgaaagaatgcatctaacgggactgggacgctgccctggcattcgctatggcccaggccccagtaaaggtagagttgtcggccgccagcatttatcgttcagctctgaccggtcttgggactggtggccagacgcaagagagcaaggtcgttagatagtttaggtcgtttcttaataggttggaaattgcgtcctaagagacgtcgacactagatatctgatactttaatgtcaatcttggcttcgggtaaatccccagtcaacggatttatgttgccttgatccaaagcttggataaattcgaaagtatgctatttcaggcatagctacggagccacttttcgaccgcatgacagcatgatttatatgctaaactcctcaaatatttgattgcttagacgagaggtggttgccaagctgtcaatatggggttgctgccgtcggattctctacccgtggagttggtgcattttgaagttcacataagacagttttatagttctgcttttttacaaggggttaatcaatgagactggcaagtaaatatgcctgtcagcatgaatattccttaatcctagaaggagatcatgacaaggcgcatgcactgaacttcaatacgttaatgtctttatggctatctctagaccaaacttctcgggcttcactttccggtaattcgtctgaaatcttatgtatattacacagagctattcgcatactgactcggagctacgatctgggaaggttgttgatgagatggggacactgggaattgcctgagcctgagctatggtggacctcttacttccacaccattgagatatctgcactataatgtagatgaacaaatttaatcatatttcttgttagtgctagtcttctaatacagccatcatcagtacacgggcaacatatcgatacatctattgctgtagaacagacggtgagacttattagatactccttctcttcgcgtcctagtcacctaaacaggggattactgccatcatgcccaatcaccagatacgatattaaagccgggaatgccaatacagcgtattcccagggaatcccctggggaatgggacttctaggaacgggacttatgggacctcagggtggtcccggtccacttggcttctcgcaagtcagatagcacatatttcctaaagagtacgaaaatttgcactatttgcaacttttcctcaaccccaatgatgcgctcgaccctgaaaacactcttccgaagttgtcccggcgcccggacgtatcgcttccggtttcccgtggttgtatggtggggaaaagataggcgattcagtgggtgctgattgctgaatgaaaccagatgatgcaaattggtactctagtccagcacatcgatcgttcaatgggaggctcttggaatctttggggctattgacacctcagaaaagccgataactctggcggctagcaacaggcccagtcactatatctggtccactatgtcaaagggcctacttggccggccacaatttttgtccctggcagccgcaaagagagactttttcttacactgttagcaaattttcctccggggataatgttcccttgatgttcgtgagtttcatgtctgtctagagtagagtgtccttccatccaaaagatatcccgccttctcaagatacgcctgccatcaaacctgtcgctctagctgaggcgtgggcttctatgcaagactattgacaactaaactagtaaacaagcctcctcagagcttgccagttccaaggctgaggaattactcttgcaccacgcggcgaacggacaactcgcttgatagggttagcatatcgtcctgcggatgagtctgaagatcgtgatcctggttcgtcactggcttgtacctgactcaggcgtcatccatccgatccatcggcttcactagacgccatccgggctcgcccggcccaaaacagggccctgttgccgagtaaaacctgcagcgtttggcccgatatcgacacccggtctccagccccttggaatggggaactctcctgtggtctggcacctttctggctgggccgggtgtgcgcaggcaggttttcttgcgtgcaactttggcgagacgacgccctataaatcaatgccaatgttcacaagcactgggcaggtctgtcggtctttcgttcatcatccttgccccagtcgttcgtttaccgcttgtcatgcatcttgatttggcccctgttatagcggcagcctctgtcggcctcgcgaccgctggcgctgtcccgcgtcgtgccgagtctataaagacatgcgccgatgagctctggacaggcgaggtcctgcacctctcgctcaatatcattgagcgtcccatcatcgtcgacgtcgagctgcagcacaacgccgtcgttacggttgacaagactatccttattgaatgtaccaatgcccccgctcgtttgtataccaccgtttacgccactaccacatccaccatcactaagaccatttataccgctacaatcattagcaccacggggcttcctgcccaaactcaagctcagtctacgaccgccgacgtggacaccacccacaatggtggcgtcccaacggaggtcaacacgcggtctatgacctctgtcaacccttcgtccagtaactgctttcggcacatccggcgcccacgccgacggccccgtcgccggtggctctgcggtcggtatcggggtcaatacagatctctacaccatcaagccacttacacttccggtcccctgtgaccagcacgctgtacgcctccggcacaaacacagcagtcacatacaccgcggtcaccccttcatccacacccaaatcgtcgcacaagttcggggacttcactgactggaccaccttcaaagccaacggcgtcaacctcggcggttggctcgagcaagaaaaggtcttcaaccagtactggtggaaccagtacgctccagaagccgaagatgaatggaccttctgtgagaccctgggctcagaatgcgggcctgtcctcgaagagcgatatgcgaacttcgtcaccacagcggacatcgaccgtctcgctgccgtcggcgtcaacatcctccgcatccccaccacctacgcggcctagattaaggtccctggctcgcagcttcacagcggaaaccaaaaggagtacctgcgcaagattgccgtctacgcgattgagcgttacaacatgcgcatcattgtcggcctacactccctcccaggtggcgtgacagccttgacattggcgagaacgtcggcaacgacggctggttctttaacagcaaaaaccctgctcactcgattaaagccgccaaaaaa

SEQ ID NO: 5904 - DNA, 9938 bp, Emericella nidulans
cttctgatgttgtctctgagctcgacctcatagtcaaatttctcctcaagttcgtgatctagattaagcatctggagatatttattgattgcgccaattgtctctgcgcccgcccgcccagcaacgggcgcattgaggctgtgctccacaaatccattgttggcaccattggcaactcctaaggcccttggttattatactgggttgaaatcggaccgccaatgcactataatccatatcattgactcggcacgctttcccttgtcaggcgagcgatgccatgagtcataatctttactgtgaatgcctgtcgtgttagcgttgccatggcattgccttcgaggattcatgaggccatggatgacatagataagctgattacggtggggacaggagtattgatctcagtttaatctggttttgtttggacgtggtaatcgtttcgctaccttcatctcggtttcgatttccaaactaggagatacacgcattattgcaatcgctgtggcttattgctggggaatatttgtgcagtttgctctttgtattctgcatctttgcgccacctttgcttagctctgtggtgaaccccagcctatatagttcatctgaaatttggagtgcttgttgcgttgctgacagtacctactaatatgtacgtattgaggggttggtctaaacgcctgttcagattcctctcattacacagcaggaatcattcgtcctaagggttccagatcatcgacctcaatctaaatgccccaaagccggaataggaaggtgcccactgtgcgagatccatctctaccgacttggtttcttcaaagcccatctcggtaaagaatgcgtaggcttgcggctctgaggatacggcgacaggtacaccagcagcctttgctttggcaaagacatgccgaaccaaatctcggcctatacctcgacgacggaaggcatgatccacggcaatgtataccacctctgcttcataatcagcaccagtccaaatatacacaggcattggacaaactaccataatgctccctcgtctctagaccggtaaaggaaagttcgcgcactgcgttcatcacagcattgtagacctctggattgaaatgatctggaatattcatctgcttctcggggccatcaacactgggactggcggcctgcgtatgaagttcaggttgtctgcgacaaagggcgataaagccgataagctttccagaggcgttgtcgattacacctaacctttctcggtcgtcgctttcgaaatcctgattctctagagcagcccgatagttgcgtctttgtgctgcttcattgggccagtccttgaacaagagtctgttgattgtcaatgaaagcttggaggtgaaaaggagttcttccagtgcatctaggtcagagcgttccacttggcggaatgtatagaggggacttggagtgggagccattggtgctgttgttcctcgtgttgcgtgctgttaatcacttccagatcccagctagtataacttgcgtgcaaaggtggtttcagtatgctcaggctacagtacttatgcttcggcacttatgccgctgccttcgtgcaggttccgaaattcgcactaggtagatattttgatacctactacacgccagacgatgggtcggatgcagccgctccttgggctaaaatgacgccttcccggtcaacaatgagagacgatatgattacgagggtgagttatgttgaatgttttggtcatcaagtgcggagcatatcgcaggaacgtaaaatgctgcgaatagcccgatggggagcgcctgggtgcaggaatagatttagtggctacaggtgaccggccccgttatactgactctatttgcgctttcattgaacctttgatgcaaaactaccaaaaactactttgaaacccgatgggcatcggcaagcccaacttgagttgaatgtagtagataatttgttaacttttacaataagaagcatcattggtctagtggtagaattcatcgttgccatcgatgaggcccgtgttcgattcacggatgatgcacttacattttcatcttgatatgctttggccaattgcactaatgacacccgataattaccttttgcttgtgtggatgcagtgtgacgcgaggtgtaatacagttgatattggatatggtactgtttctgtttcccaaacttcttttcttttttgttctctttcagcttacctttttagttgaatgtgccctacggcccgggtctgagagccaggagaagtgcccgagatatatatattcaggagtcgcctcatggaacctactcagaacacatctgttgaatccatgttagcacattcattcatctaggtgaacagccattatacctcttacatgctcggatatgctggaatatgcatcaacgcataccagtatcctgaatctatcgttgggagagcccatgataggagccccgtagaagccttggacattgtcacctgcaagcgggccttcagttcgcactgaacgtaggcttgaacccatccatagggaaagagcgatgggccaaacctggaatgccgatattccttcaggtcctagaagcagacagcgattgtgcgtgctcaatgttgtcacaagttaaaatggcatgttcagtaggtagccagtgcctgagattcttcacctcgccatctccacgccagcaactgaaacgaactccgtccgcacaggaacggaaggaaccttggatgtacgttcacattggcgtggtttacttgaggctataacgaaaatgggcagatgtagtgacaaacttgcattagggtagtcatgagaatgttgcattagattcagaaatagctaatctgggcgtcactttcatcaaattatcatccctgctggcggtttggctacactatgccaataggtagccgctgtatccgtacagaggaatggattggcaaaggcgtggcgtattcaaaccgttcaccaaggcagttgtagcggagtaggcaagtcactacctagcacaggctccgcagttccgatatccctgctatagttagcgagactgctctggaaaatatatatttggagatgtttaccaggaccccgtggtgcccaatattcgccagttttgctaatgtcgaacttgtcaacgaacccggccagtgaccttgcagcctcatctggggtgacagctgggtagagttttagcactgtcgatatcgtgattaaacatgtcgcgggctcacctccaccagcatcccagtacttgtcgtacccaacacccttcgtcatctccgtccgcataaatcctggatgtaccaaacccacggctatgccattcggcttcaaatccaagctcagcagcttcccaaccatattaagcgccgccttgctggcatggtggccatagttgccgccgccctctttttcatggcgtagcgtgatgctgccactctcactgctcacgagaatgaccttgcttcctttacccaaaatcccacacttaaccagtttctggacaacgaagactggtgcgattgcggaagtagtgtacatctgtatctgcttgtcccaatcgggggtgtcgaacgtctcgaggccaaagtagccggcggtgatgatcactgctgcgagcttggttgacgaagggagttgcgagaccaatctctccccaacatctggcttcgtgaggtcgatatttggtagccaggaaacgtgaggatgggagtaggactcgggtgcgttgtcggatcgggttgttgcgaagactcgagtcgatggctcggttgcgtagaggttgcggagggaggcgcccaaacccctcgtggccccgacaataaggatgttcctgctcatgttgattacgtccgtttttataccactaacagattggttattgagagggatgcggaagggtggtgtttatgaatggatagaggttgacgcaagtgcaatgacgtatgctagtttatcccgcaatctttggtaactgcgatcgcgatcgcctgtggctgaatcggtaccttgatgcaagagcctttccctgttgaagcacaaatagataagctatctgaaaagacagcaaacttactatcgagatcactgcatactaatggcgtcgcttctactttcgagaggttacgacagcggcgtcgggtcattgttccctgggtttccagcgaagtgccaaccatgagataggcaactgtgcctagccactatgaaaggatatcaattctaacaaccagccaattaccgcttcatctgagacccatctcgaagtgaaccgaatgggcgaaatgaccggcactggcagcctcgggcagccatttcctaaccgtctttggcatagcttataagcatctacgttcactgtttccatatcatcccaccatgcataccgggtgataaaaaatttgataggagcccgatctctcggaaggcccacagtcagcgcttcacacggcagcagaaaaaaagtgtcttgccgggtcctctcatcccatacaggcactcggtagccgtgcgcgagtttccaagcagttacggatccactgcccgctaccagctgcccagagcaccgggtacggcgtgagtgttgaacgtgaacacgaggaaaaatacagggtgtcgcctgcgagatcattactgtaattcacaaaccagatgcaatcattcgaaacagggctgtgattttgtagattatccttgcccatccttggtttctttttttaccctccatccggcaaacgctcttaccgcggctgttcaacgcctctaccttcatggatcgagtcaactccaccgcttcatctttcaaggctgatcaagagcgcttcttgggacgaacctaagagaagagtcataagatcttgttcggcccaaaagtctcccaggacgggaaacacatcgtccattcactgttcagagcacaaaactcaagattatctgataagattatcagattgacaagcgtgctcgggcagatccactttggcgactatatgaaattcgacgacattttgttacggcatctttaaagatcattggtcgatacctgattcaagacaaatatgatacatgcgcactcggacgcccacgcgaccagtctcgcactctcatcccacgcggcacgatcggacagttgaaccagcacgagaaacaagcatccgacttcggggcctgtgcactatcgacctacgcccactttatctggctttaactttcgcgatgacttggtctctgtctttttccatgccttcaaccacaatcagacgctatgggtgttcatcctctaatccgtaggactcgtacggtccttcgtcgcatgtcagcggataagaccgaagggacagagagtgatatcatcgagcagagctcaagctacggcagcgctggaccgcaagagaagacaccaacccctaacacccagcatggtgttcaagatgctgaggccgtgactctcagttggtcgaagggcactctgatcgcagttttcatcaagtatgtttctctttttctttccctgtcatttttgcggtgatcgattttggtctaataatatattcccatagcatctggttcttatactttgtaaatgcgttccagatctctgtgaccagcagcttgaatccatacgtgaccagttcattcaatgcacactcgctatctgcactaccgacagccattggcgatgcatttgccgctgcgacatatcttcccatggcgaaactgatggatgtatggggacgtgcagaaggctttttattcatggtcatttgcctgactattgggctggtacttatggcgtcctgcaatgcctttgagacctactgcgccgccaatgtaagtcgccgcaaacaatccttgaggaaagcaagtcctaattgcttaggtgttctactacgttggcttttatggtatggaatatgccgtcgatgtcgtgacggccgatgcttcgagtttgaggaatcgtgcttttgcgtatgcattcacgtcctctccttacattattacagcctttgcagggccaaaagtggcaaaggacttttattatcaagtttcttggcgatggggctttggtgcttgggcaattgctactcccataattgcactgcctctatacggtatgctaaagtataacttgcataaggctcagcaagaagggtactgtatcagaagaccgagtggccgcacggtactcgaaagcatccgacactggtctgttgagtttgactgtgcgtatcatccttttgccgaaatatccttgtctgaagcataaggctaatttgatgctttccagtgttgggagtgtgcatatttactgcaggccttgtattgttccagctaccttttgacattgccgattatgcacctgaaggctgggcctcagactacatcatcgccatgctagttgttggcttctcaatgctgttcttttttgcaatctgggaaaagtggcttgcgccagttcctctcttcgagtggcgtctgcttaccaaccgcaccatcataggtgctgtactcctggacgcaacttaccagctctcaaactactgctggagctactacttcacttcctggctgcaagtcaacaataacctaactatcgcgacagcaaactacatcaacaacatctttgatgttgtctctggcgtactactgctgttcctcggctgggtgatccgccgagttggcaagtacaagtggactttatacatctccatcccactttatatcttcacccaagggctcatgattcatttccgcaaacccaatatgagcgtcggttatcaagtgatgtgccagattttccttgcaattgctggctcagttttcatcctcgttgaacagattgctattcttgctgccgtagatcaccagcatgttgccaccgtattggccattctgaacgttgttgggactattgggaattctgctgggttgaccatcagcacatctatctggcaacacacataccggaacgctcttattcggtatcttcctgagtcggccatgtctaacttcagcagcatctacgatgatctcagaacgcagatagggtacccagtaggcagccccatcaggacggccatccagatggcctacgcctatgctgaactcagactacttgctgttggctgcggcattatgatgcttgcgattccttggtgtatccttattagggatatcgatttaaagaggaagatgcaggtcaagggcactgtgctttgagctgcagggatagtgctgttctctggtagaattattcgtacttatggtggtttagcgtaaataaacgcggcttatatgtcatccatcgtatatatagtttcaaccatttttcagcatctgaaataggaagatgccggggtattatgaacggtacacgagaaagaaccgtcagtattattgccccgcctagagtctgagtacacaagatccgaaatcggacaaagcatggtccttaaatggaataagggccgccctaaacagacatgccatgcgagctcgagtgggttcttgaccagaaccgtgccccactgtctgggtacctactaacatccatgaacggtgcatcatcctcttccttcattgtccttgctcgcgcttacgtcggccccgcggaaccctacatacgtagctacctataactcacggctttcgttcacctctcttgatcatccccgcagacctccaatacctagcttgatggcccctaccgcagagctgcaacaacacaaccatggacgaccccgaacaagacaagatcgctgactcgaacctcgttgagcaccccgctggactcatctacgacgataacgagagtgttagagctggatctcttgcagcactggtggaacatcttactcatccaaacaagctagatgcatctttcaacagaatatttctcacgacatatacatacttcacttcagggacggaacttgtccagctgctcattaggaggtatgattgcgccccgcctgtcaatctaaacccaatgaaagcagcagaatggtcaagtcaggcaaagcccttgattcaggtacgggtgttggataccctaaatcaatggctcgaaaatttctggacatggaatgagccgaaaggccctgaaacgcatgagaatctcctaaatctccagtcattcgttagggccctcgcgtcaagtacacagcagcagaagcttcatgaaatgacccattgccgacttgtgggcctcgagccagagggcatgaggaggccgcgttcccagccatcatctatcgcaacgtccagctcaagctcaaccgcccccaagccaatcctgccacggaagatgaaaccgaataagcttcaatttctcaaaattgatgccagagagatcgcgcgccaactaaccctaatggaatcatgcatctttggtaaagtacagcctaatgaactcatgcataaaaactggcaaaggagggagagccaagacgtggctcccaatgtcagagccctaattcaattcttcaatcagctctctggttgggttggagccctagtacttgcagaatcggacttgaaaccgcggacgcaggttatagggcacttcattaatgtcgccaatgtatgatcgttcctacaaaagttggatcttagactgacacggtacctaacaggcatgtcatgaccttcagaactactcagctgttgtctccatattgtcaggtctgcagagtgcacctgtgtaccggcttggtcgaacttgggcaatggtcacacagcgtgactgcgacaaacttgaaccattacaagctatgatgtcgagcgaacaaaaccatcagacttatcggaatatcctgcggcgcgcaataccgccatgtatccttttcttggttagtattattcactagttccgggtcttgcaattttacgaaccgcccaagtagtaggtactgatcgtgatctcgtcttgcaggcatattcctaaaagacctagtcttcatcgaagatggaaatccggaactaacgccagatgaacgactgatcaatttctccagatactccatggatggcatccaccatcgataccgttcagcactttcaagaagcgatgtactgtttacagcccgtaccagagctgcaggaatacctcgcgacggagctgcaacgcgcggttaattcggagaggctgtgggacagaagctgtgagctggagccgaggggtcggtgggataggaaaagagagcgagatacgtatactgccacaggggggatgacaactgccatggttgttgcttgcatggtatttgattgatagccgtagattccggcaggatttatctaaggtttttgagatatgtgacctcttgaattggaccagaaagagaaaaagaactagcagtcaaatatgtacacactgatatttagagagaacttgtgataagcaaaaaaagtttgaccgacgcagggctcgaacctgcaatctcctgattcgtagtcagacgccttgccaattgggccagccggcctgttatctatgctctagaatagaaaaatgatactataagccactaatcaataaatattaatcttttacaaattgagatcaaaaaagctagccgtaagcaggcggtcggcagatgaagggggccagcatgacgaaaacaggattatgaggcgtcggcaaggcccagcctttagttttggaatttgacgtattaatccatccatctccatctcaatgttcgctcgctagcagctggggctgtctacggagtccctatgcctgcctgcacaagtcgatgatgagttcacttctgcacgctctctcatcccatgtgaaaagagcccgcgcttccaaaataagccagcaggcagatcataatgtcaataatgctgaaacctatccatgggaagcgtgcaaccaccattaggcatagggtgtttccggcttcttcccg

SEQ ID NO: 5905 - DNA, 12718 bp, Emericella nidulans
accttaggtatcttcaatcaaaccagactgtaaagatgccttcttctctcacttcttaaagactcaaccgaccatcaggttaaacatcccacttccctccctcgcttcgactgcccactctactccttcgccttcactctccctcctagccaccttgacccaaaactctcccttcaccgggcacatcccagaagcaatagccattgagtttttctccggtgctttccaggccccgtcatccacaggagtcagatcaatcctcaagatcaccatggccacaagagccaaaatctccgaagaggcaaaatgtcgtcctggacagatagtcggtgagacgccgaagctcataaagccgcctgtccggcggggactcgtgctgccatggggggtggtttgcctcatataccgtctcggattgaactcactcgctgattcagggccccaaacggattcagtcgcaccaattgctgaggcaggaatgctcaccaccccgctcttcttgaggaaatatctgttgtcaagcactgtgtcctccgtgaccacgcgcgtaacagccgagacagaccgagtccgcaggatctcttgatacgctgacactaagagagggcatgagtcgcggagcgccgagatatcgattatacgcttcctccccataggcgtctgcgtattctcaacgcgaaccgcatgtttcatcacctcccttctgatctcacacagcaaactcggcctggaatacagatcaaagagaacccagaatgcggcggggacggtgtttgagagcaggcccagtcccatagagacttcggcgcgcgcgatatctgtatctgaaaggcctccagcgtgcatgacacgataccgggtctttgtgagttccgagccttgctcatggccttttgtttggaagtacgtcagaactgcggcgaaagttgtttcgcgcgccctgtacgcctttcgcgccatgatggagggaaagacccctgttatcagcggggcgatgttcgtttcgaaggtccagaatgcatccgcgattgccgagtccttgtacgggttcttcgggccgtatgaggcatttgtgcttgcggccgtgattgcacgtgtacaccacgcatacagatcaactgtttgagggctcgctacaagctcatccacgagcgggctcagcattctcgccatctcctcattcatgcgatctaatgacggcccgataagcgtcttttccattgcgtgcactgtccctgcacttagtcccgcaccaccggcttccctgtcgcggagaagactcatcccagactcagggattccggcaaaacgctctgcagtgaagttgacgagaggcgcgaatttgagtgttcttttgttgcgctggactgcctgcatcagggacggggaggtgacaatgtattgcttgttggtgaggaggttgatcgtgaagatcgggtgggaggagttttccgccctgtttcctcaggttagtacgaagtacgtagagaggaacgagaggaagcagaaggacgtagggtggtcgcaggtgcatacgcaattcgactgaaatatcccataccatggcgcatcaaaccgaggatgtgaccgatgatgggaatcttgctgtgcacttccggtggctcacgaggatcgaggccgcgttgacttaggatgtatcctatagccgttatcgcaccgagaatgaggagatggaatggctcgagcatgctgatgaagacagagctgggactctgtatggggtccactcccagtgaaaataggtagccggttgggcctgagcgatgcaggctaatcgaaccaaaagtctcgcgatatggtcggctaaggatttaacgagacttaagatatgatagtgatgagaaaaaaaagaaaagtaaatgcaaaattcagggacagtcaagtcaatgcaagatcttcgatttagcctaggtttgttctagccctacttccgtgaggctgggattccttcagctgggccccttctgtggggggcgcgagtctcgatttgtcaatggcgcctctaacccgtaacatttggctcaatgaaaatgtgacatgtggagtgctgaaggtatttctccagagttcgcattgaagttcatttgcgaggctatctgcagtgctgatagccagcatctacccaggattttgggggttggggtgggggtgcctaaataaaagtaggaaaaaaataagtaaaataaaaagccgccaccgcagcagtttggtctccctgtgcggcttcagcaagttgggcaatcctctgaaacagcgatatttcagtacaatataccggcaacttggtagatccaccaagagtttgctagtaggaagattggtaagaactatggtagaaataatggaggatgaagatcgacagatgcctttgtatgtgccgcacagcttggcttctgctcattgcatttttattccttcaccgacaggtcaagtatggttcttgctcgcggtgagcattgccgactccatgggcggcaaatatggaatgggaatatttttttttttgattttctttttggatatgcttgcagcctggttgggatgatgacggtctggagcctgagggaaaaccagaattgatatggtctagggcttgttgcgcgcgggcatggtaaagaatgcttagactagtagcagatccaagaaggacatcgcttgtcgaggtgtaagacctataaggttgtctcgagcgatgaaggaggagcatagataatatccatttcgttggctcgtgacatctcatgtttgttttctctctgacagtgcgcaaacttttgacaatatgtgagaagggatctcaaacctcgatagggagaccatatcttttgactcttccccgctcacgacttggtcctgcgtagtacaactcttgaccaacttgctacgctgaccgaagcgtatcgaggctcaagaactggtcaaagtccagctcttgcagttctgacatatcggcaaccaacccttccagcagcggcatttcacccagatttggactcggccgcggcagagcgggctgcatcccatcgctcgctgccctgccaggttcgagctcggtcccgggctgcccattcgcatcaagcacgctggtcagtagccggacatcgcgggaccgccgctgctgatagacgaagaccaggaacctcgccgtcgtataggcctcacgcatggtgggtgtgttgtatatcgaagcgaccattttcacagtctgtacggcctcgggaaggagttcgagtgatgagcgggtatccatttccagaaggatggtgatgatgtggaaggggacgttggcgatgtgctgccacggacaggcaggctgtgagcatgctgcgtgccgactggagcgctcgttggaagagggagaggatgcggtccggcagggcaggagatgtactgatgttgaggaggttgaggcgccgcaagatacagaggaccaggttcgtctgggcgaggatagagggcggctgtgtgtgggtccggtcgagggtctcgaggagggactggtgtaggtggacgtcgctgtctccgtccgcatcggtttcctccggatcaaggcgggctgatataggcagcaggccaaggagttcggccgtgtagtctcctggcttggatcggacgtctgtgaactgcatcaagtcggccttgacctgcactctggacagcccaatgtcgtaggaaggccacatgttctggtgcagggcaacacccaccaagcgccggcggatgtctggatcataggcagtgctgggattctcatgctggagacctgcggcctcgatgagatgcattatcgtcgaactagcgagccatgttgagtacggcgctgcagtcatccgcatatagacaacatgcagtacccagccagtgatcagatcaagagagggcggtgcatatccatcgtagctttccaggatagactttgcattctcgattagctgtagctctgtcgcactggcggaccgttcagagaacaacagccccagcgccgccacgcctgcaaggacactatcgtagataccacttcggccactaccactagacgaccaccgtgcatcgagacgctgtaagaacacctgccggtcaataaacccatagcacgggtcgaccttggaaaagtaaatctcagccaactgtctcatgctgcccagcgggacaaggtcgacaaggggcagcccagcaggagcaggcaccagcccagacgacaggcggcgcgcaccgacattccaggcgaaaagattcacgcgcggcgcattggcgggatcgaccttgaggcccatcttgcgcacgaagacggcgctcgagttggccgtgagaccgcgcgccacccgctgcggatcaacggccagacgatggctgtctccgccgagcccagagccgccacgcggcatcgcctaggagacgccccggcattgtgcttagagctccggccggctgcgtagtagcagtcgtagccccagtccctgcatgtctcgcagggggcggcgccatcgcatttcctcttccgactacggcagggctcgcaggcaacgcgggcgcgcttgcgtttaagcgggactgaggtcatcctaacctatccacaggaggactgaaggccgcagttggtaacggatgctgcggcagatgagccgacagatcccctaccatgcagttatgcagtcatgcaatcagccagccagtggttacgtgtcagcatgcgctgactacagggcccacaggacccgcaagtcccgcaatacccgccatatccgctactatgtgagaacgaaatataaatcaccgtgacccggaatcatatagcatctgctttatccttaacttttgatattctgctaattcaagaagacaggttgtaagagctggtacgatgactctttctgatgcgcagcaagaatgggctccaactgagaaatgctcaatcggggcaggaaagccatttcctccagcactttcagttaaaaagcgctacactggtcgactttgaaggaccggatgatcccatgcatcctcaaaatgggccgttgacattcaagtacgttacctgaggggccaacgggggtgcccgctaacttgatgttgctggataactagacttatatcctcgataatggcctgctcaggtacattgatcgcctccttgaacagcgccatcttctcgaccgcagccgaccaggccagccgtgacttcgatgtaggaagggaagtgattagtctcgggaccgctctctttgtcttgggcttcgccacaggtccagtattctgggcgcccatgtccgagcttacaggcaggaaactgccgctggtgatcgccattctcagtgaagggatcttcactgtcggctgtgcagctgcacaggaggtccagaccctgatcatctgccgcttttttgctggggtatgcggcgcgagccaactgaccgtggtcccgggcgtgctcgccgatctttacaacaacgcccaccgtggcgtcgcaatcgggctgtatgcgttgacggtattcgggggcccatttattgcccctattgctggcgggttcatggcgtcaggtcatctcggctggagatggacactgtacatcccagccattctggccctagccattggcgcgctttccattctcttcttaaaggagacgtaccctccctgtatccttgctgtcaaggcatctggcattcgaaagaagagaccagaaaactgggccattcatgcagaacaggaaacggtcgagctggatatcgccgttctggtcgaaaagtacttcaatcgcccgctgcgcctgctcgtcaccgagcccatgttgcttcttatatcgttgtacatgtcctttatctacggtttggtctatgccttactccaggcctttccgtacgtattcgagcacatccatggtctacacccggggctggctgggctcatgttcgtcgggctaataatcggcgtcgtcctggccctctgctttatcctttcccagcaagcccagtatgcaaaagcactggcggagaatggaaatgtgcccgttcccgaatggcgactgcgtccagccatgctgggggctccgatatttgcccttggtctgttctggtaagcttttttgactgtccatctatgcctccacccacgcattcctatatccctaatcgactttggcattaaggttcggctggactggcttcacccctcgaatccactgggccgcaccagcagccgctgggatccctattggcttcggcattctttgcatatttttcccgtgcttcaactaccttgttgatgcctatttaccggtgtaggtcttcccccaacgctcaaaaaacaaacagccatctgatattactacagggccgcctctgccgtcgctgcgaacatcatcctccggtcagcctttgcatccggctttcctctctttactcggcagatgttcgagactatgggggtgcagtgggcagccaccctgcttggctgcttagctacagtactcgtcccaattccgttcgtctttaaggcccttgggccgcgactaaggcggactgcaggctgaagcttccatggataggttgtgccatcatacttatctaatcgggactgcctcaatagtatacgcgaggtacaagtaatatagggggcgttatgtgcttggtcacttgtatataactgtccgcatggaatagttccacacgtacttgtttcgagatacatatctgtatttaacagtgtggtattcctggatacagaggtatgcctcgggctagggagtaaacatcaagaagtggcagagggtggacactaaacagaaactacatggggcacaggtcccaagcactatacgcaaacatggatacgctttttgcaatgtttggatagcggtcctggaaaattactgccttctattcttgaagcactgttcttctgaggtaactttgtctctagtgttctgccgcgggtagactacaggtttttcctttgctatatacgctcagctcctccattggcaatcagatacaagggcagaaactctaacggtcctgcgtgatcgaaaatgtatagcttggtggaatcttagtaaggctaaatccaagctatttattctttggcacctaatacggagtagaaaggcacctgcatacctaagtatgttgaacgcttttgatgaacggcgatagtgcccagagtagagctcgtttaaggctttaaggaataacttcacaaagtataactagctatgggcatgaagactcagctctgtctcataaagctcgcatttgacaagccgcatacctacgctattcataagatactatgtacaatacagttgaaaatctttatattatacaaatcaactataaagagtggataactagggatgctgaatacaagttcaaagaagtaagaagtaaaaatttataatagattcccaggtttagaagctggaattgttcaaggcaaacctgatatcaaaattgcattgactgatcactatagtatatgagatgaaaagtacccagccaatcataaacatccaaattgattatatacttggtagagttatgtactactgaccgtgtaaggtctattctagaatggctcattagaagtccactattagaaattgaagctccgaaatctaccggcttcttgaccagataccccgtcccggaagacctacgtggcgttagcccgaagaaaatcattccttacaatccctctactttcaagacgagatccgtctcgatcgacagggcttttggggcaagacatatgtcgctgttcgtcctggcgctattaagaacttaccttgaacgcaggccggtgttgccaccggcgggtgaagatatccgcccaatcaagatagattgcatcaacctggcagacagtagttatggaaccgacagtttattggtataggatctgcaagtgagacagtggaggtgtattacatgggaccgcaaataatcttgaaacgtcattgagataagtagatatgtcttcggaaacaacagaaaaatccaagatcacgatatccaacaagcaggagggtttgtatcagttcttacacctggcgaaccaaatactgtgacggagtatatcgtgcaaaaatcccgagcaaataggcaaaatatgattgggcacattatgagatgggcattgccagcctagctatacacacggaatcctctacggcgtttaaacagtgagtggggaatcagttggccaagcacctgagatgtctctcagttaaatacgttgaaatagatttacggagctaatagttggttcggtatggcaatttttatctctaagctattataaaacaatagagtccttaaagtcgccgaccaccagccgaccaaatccgttcaacagctgtcacagagcgctgcttggctagccttgtttctgacgttactgagccgaccggcaattctggaaaagagtcctggttaaggcgctgaaaaaggcgacaaggctgtaattataagcactactttcagatggtgtacggaaagggatacaaagcggatttcatgcaggccagctgaaataaacagttacgtagatcaagcctgaacaggagattaaggacaccatttgttggattttcagtaactagaactgtaactagcacatgtgtatacttcgtttctgtcaggctattactttatctgtaagctgcacttcagcttgcaattatcttagcatagatggaaaaattcgctcctttcgtagtcaatatttgtcaagatactttctaccgtacgttacagcatatgcacataaaacaaaaaattatggctcgcttatttttaacagtattcctactctttctacatgatacaacttccgttgattattcccttgcgctaaatagaattgaattagaagtggcgaaaacagtatctccaaatttcctgacataccccgcgcttcttaaaaggactggtatcacattcttttttgtgccatttcttagaagccatgactagggcttaaggaaacagagaatgcttaactagcaggtgcaaagcgtggtaagtctcgttcaatcataagttttcactacagcccattatgagaattattgtaatatagcgtaagaccatggtcgcagaataagacagatcataagttacttgacttatcctgtaaaagtaatactttcaatatcagtaaggagaacaaaatgctggcaggttattgcgccagtataacgcccttaaacaccaagtttcgcctaatctgtaaaccgaaccatcttcttcacgccctccctgatctctcacaatgtctcctgcatccttaacttcatgaatcaacccaactgatgccccagcatacgtcgccagcctcccattgggcccccatccggcatcccccaactgcaaatgctcgtcgtggcgcttcttcaattcctcaaaggccgtgccagcccgatactcaacaaacgattgattgatgatcgtccgcggactatattcctccggccacgtggtgatcccacgcagatgattatacagcagcgtccgcgtggtgctgacagcgccatcgtcagcgcgcagaatctcatgttggtagccagaactgatgcgcgcttcggtagcagcgagaaatcttgtccccagcacgatcccagatgcacccagacagagcgcggcagatgcgccccgggtatctgcaatgcccccggccgccaggagcgggatttctggtgtctggcttgcggccactgcatcggctgcctcagggagcaacgaaaccagaccgaggccgtcacttgcccggccatgcccgccggcctcgctgccttgcacgacaatggcgtctggcccatcgcgtgtgcttgtgcttgtccccatggtaaggagacgtttgacctcgctcaatgtcccaacctggatccagatctgcgagttgggcgatacatcccgcagcgtgttcgaccagatggttaagtctgtgaattccttcggagcgaacagccacacaacgcagggcttgaactctctgactgcatgcgtcgcggtgtccagatcgtcgctccaaacctggaaaccaacaccaacgggcaaagtctttagggttggtcctagcgaggcgagccttgaattcttgatcagcgtcgaggcttcttcaaggtcgcttagcatgtttgctgttttgacgcccgggccgatgaagcctagccctccggccgtggaggctgcaacagcgagcttggggcctgccatgacccgcatcggggcgctgactattagcggaacagcggcccaggggaattgagcagcaagtttgctgagggatgtggacattatgtgtccaatgtttcgagagttaagaaaaggtgagttttaccccttagacgatgaaaaaagtgtggctaccgagattatccaagatgcgggaactgttagagggcgagaggaaggcaacctatgcatgcgatatgaatgccaccatttatcatctaacctgagtcgtgagtcacgtcggcccgtgagcggttgttgcggaaattgcgggactacgaaagaagggttgtgcattggtttaagaaatctgtctgcccagagctctgggttctgggttctgaagggctgagtcgatgttgaatacgagatcaataggaaggccatcagtatggattgttcggtacgctacaacaagccatatgaatgataggtgatatgcaggaagggattatcacatgcaaggtttacacaatgaatcatatgcggatgagcttccatcagactatttacaatactttacaactctatgacaaaacttacgtgagaaccatgctgtgagtatagaggtaaattcgcatgtatagccgcttattatatcgtcttttcgaaagttaaacttggtcaaattcatgagtattaatttacaacaaggcgactttagaggtgatatacacctacatacacggtctaggcctaaatcacataggccgaaggtgtattgcatgtctttttttgtaatttacgcaacaggtatttgctctgagttaacatcgcagaccgggatggagcagaaatcgatgtgtatagtagtgtaaataccgcgctgtataactttattacttagaatcatagcctgaatatgctgaaagcgatatagtttatgccagagttgtagggcaggaaatgctggaattaagatacaatatatatgttgtgcgcattatgtacagcataacttccaatttgcacataaatatttctcttaattaattctcattaacagtaacattcaacccagctccgcggaaactcatccactctaaggtgatttgagcctcaaatggataataatctaactgattgatctcagaccctaaaagaaaagaaagaaaaaaggagcggatgcagctccaatagtcagcagaagatcttgcttaaagacagacgcagatccagtgaactctgcagcagcgggggtggtcctagaaattgtcatcgttgttgatccaatggccgagacagataccaatgtgcttggctcaggcaggacggggctttaggggaaggagaacgggaacacgctgaatgagtgggttgggtagtatgcggagccggaaactggaggagatggacgaattgcgccggggccagatgcgacttcggagtcctgcttaggtgcggttagaagcttagttcctgagggagaacctgggatagacgcaaagccagaggccaacccagagctggaggtgagggcagactcggcgccagcgggtgatgcggatgactcggccctgcgttggaaccgccggggtacggaacagagccgtaacttcctgtcagaagcgcggtggcagttgcaggagcattgggaatcaccgtcaccaccgtagttgacgcgacgagtgtctcggttgagacaaaggtgctccgtgcgggacggtctgtcactgtttgcggacaagcggtgattgtgacgatacgcgtggtcagaacagtcgatgtgctcatggaggggctgagggagtctcctaaattggagccgctattggcattaccactgccattgctatcaccgaggggaaaagatatggtgcgagctgcgtcggtcacgggacagatcgtcgttgagatatagacggttttggtggtgacataggtacgtgaattgtgacagtcggtgactgatgctgggcacgcggtgatggtagccgtgcgcgtactgaagaccgtggaagtggtgaggaatgggaaggacgaggggtcggagaagatccgtgcccagcggtgatcgtggggagagttgcaatcgtcgaggctccgtcctcagtaggcggattgagagtgggaagtgatgttgtagtagaaagcgagccacccactgaactgcactgaactggaggtagaaccaatcgaggtggaaatgacggtggtcgctgccggaatagggcgcgaggatgagcgggcactgcagggaccgagctagggctcctgactggcgacagagacggtaccctgactggagtaggacggaaactgggatctgagtgaaggtgttcgccgggttcgaggactgaggaggcataacaggaatagaggaggaccgtgtgacagggcttttcgatggtgtaggggagggagtcgctgacgagcttgtcgttgcagaagatagactgataatcagaggagcagatgacgggcgtcttgtcgtgaggacaatggtctaagccaaaggggac

SEQ ID NO: 5906 - DNA, 11350 bp, Emericella nidulans
ctccccgatccaagctgggaacggttgaagttgaacttgcatgagtaaagcctgatagacggaccgcaaactaacttcgcgactactggcagccgtccatggttctggcccaaccaaccagaataggcagtcagcttgctgctgatccgtggatgcttactaaacccctattgtttctcggccacgcgactcgaggtcgaaaacatcccatgactgcagccacagccaaccagcagccaaagggcccctccacgagatcaactctgtgacatctgacgcccatgtccttcttactctcacaaagcgcaagactgttgacgcctccgctggtatcggaatgtgtgatcacgtctagggttgataacatctcatctaggcgtcgctaagcgccccactactgaccagccctacgtacaaagaacgccttttgcaatctggtgtatgatgatgggagaccgtgccattactgaggtagtcatcacccatggtacttgtctcagttatttacgtgcgaacgaatcttttgtccaaataacctcgacccgacctgctacgcgagaggctgggttaacaggaagacaattccagtccgatagaagtcaaaaacctgccattctaaatggcgagttgccttggatccacagcccctaatttattattattatcatctttattgttcagtgtccgccattttcaccgtcgtttctcgctcttgttttttttttttttatggcgatgggcgccagccaatgaagcccccgtcgatctgatgatccctcttaagccgtgtccaactgttgccgactccagttcccttggacctttcaggctcatccctctcgccgacgcgccgtcggaaattttcgccatcgttgtctggcccttcgccgaatcatgcacgttctccggtcctctatccgtttggactctggacctgtatgttgacgcccgctccacctacctactcggaagatgaaacactcaatgagcgactgagaccgtccaataatcctcgtgcgcgacgagcgactcgcggcgcacaaagctgttctgccgccagcgcgcacaaagcacggagtgcatgaagatcatgtagataaccggccgtctgtgcagctgacggagcacagagtctgatagtacgaacagctcattttcccaagtatgacggtgccccgctcgctcgagccattgaatcctgatatcggcattccgtttgcgacaaataataatatgactgtgacatgtcgtttcagacgcagaagctccagtatcatgccatagtaatatggcagaattcctgcagaattgccttcgacggcccttcgctcaccaacccgtcctgcagcctgcagcctgcaccgcattgactgcccctcagtcagaatactaattaactgcattaactaagatccgtctttaggttctctgccgctgtccttaactaaatcgccgaattaagtacagtgcgaaacgaacatcacggctcagccctcggctaatcaaagctggtctagcctccgagtccatcggaaacggcaaacaggtccctgaccattatgatatcaagcgcgcgcgtcatatatatgaagatggtgttaatgagcatgttgaagatctcgccattgctggtgtcgaacgtgtaggcagagaactggagggtgcgggaagctggcccaatgcgtagatcgtggtattccatcattgtgcagattcctttgtgtagaacgacgatgccttttggctcgccggtactgcccgaagtgaagttgatcatggcggcgttggctggggagacatgggggagcactagaccgtcgggcaaggggagtaagcttgccagtaaagaggaatcgaccacgatcgtccggtccacgaacagtcggatcatgtcgccgtatgtagtggaacctgcgaggacaatacgggctttggtctggacgataatattggctaggtgctggaccggatgagacgggctcatggagacataggcgccacctgccttcaacacggccagcatggagaccacggcccacgaagacttgtcgaagcacagtgggacagcgtcctcaaggcgcacgccgagactgatgaggtacgtcgctaaccgggtggacaactggtccagctccctgtaggtcatggttgcatcgcacgaatcgatcgccagggcatcaggatgcatgatagctcgcttctggaacttggtgtggatgcagtcactcatggcctcagggacttggccctggtgagtcacgtcaaggatatactgcatgtgcttgtcgcccagaaaatcgatgtcccttatatctgaagtcggttcctccacaagccttgaaagtatcgtcgagaaggttgaggccagcatttgagcctgctccttgctcataaatgtgctccagtagttaatagcgacatcaatatcagtctcaccagcggtgatactaattcctaggtcgtactctgtgggatcactaccgcccaggtactcgatctcgatgctatgcctatcagcagcctccaccatcggctgctgcagagacaagacgctgttaaacagtctctcaccggagagctctagcgcatgctgtacctgcgccagcgacgtctgctggtgcggaagcgagttgacatagtcctcgtacaatttgcgcgtcagatcgaggagtgtgcagtcgtcatcgacctgcactcggcaaggcagcatggtaatgaacgcgcccaccgcgctgtccatatccatatcgagaccgtcaacatcgcgtccggaagagaggtatccgaagacaacatccgacccttttgtgtatacgcggagagccaatgcccaacaagcctggaaaatattcgccagtgtgacttcgttcttcttggtgaaggactgcaggtctagaacagtcgcggggccaacgtggacattgacgaactgcagcttacgctcgccggatgctgcaattgctgtgtgctcttcgagtagggccgggaaaaacacgggcttcacatcttggaggtaggctgtccagaatgctagcgttttctccgttgatcgcgcctgtattgccgcgatatagtggcggtatagcggtcccgtgggaaggtcgtcgtcatacgccttgacgaggtcacctaggatgatcgccatcgagcttccgtcaattaatgtatgactgatttcgagattgatgaagactacgccgtccccgccttgcgagatggtgagacggtgaggcggcgcgccgtcccggtagtcaagggggtggtcctcggggtacttgaagaggctgtccagatccgccgcatgctggatctggggctcatgatctataagcacgatttgcgtgtaaagcccatcttgggacagaccctctacgaagaatgttctcaacgctgggtgtctggcaactaggcgacgccaagctagctgaacacggtcgatattgacggggtctgcagaattccttgcccgaagagagcatacagcaaagaacttgtacatctctggcgctgtggcttgactgatcagaatgtcctcctgcatgggagaacaagggtaggcgtcttccacggcatcggcgccagagtagcccagcttcatgaccagggcatctatttcttcctccaattcgccggctgatagaagagaaaatcgttgactcgtgctcgtgcccatacaaatgcacttagtcttgtgcgacgcttgtgtagcagccccacggataatcttgctcctcagaatgtgcttgactgcgagctggaggccgcgcgagcgagagccggaggacacctgcatggttgtaatggagtctcctccaagagcgaggaaactctggtccgtgtcaacatgagcggcctgaatattggagacttcgctgacgagcaagtcgtcgattaagtcctgggtaaggatgacgacatgttcgaccaagccctgaaacagggcttccttaccctcccctaccaccgcaaccccggctttgcactgccgaatcatctcttctcgacggttcaagggatgttcggggtcgaagacgccaaccgcgtcgctgatgttcaacaccggaacgtctcgaccggcggtcagatagccaaaacagatgtcgtcttgaccagtgtaagccttgaggacgagggcccatgccatttggaaaacaatcgccggcgtgacattatgtctggcgcagaaggcatggatgccctttgcgtctttcaggtccacggtcaatgcatgtaacttgttctccccttgtatgtcgtcgttgagcacgggaaagtggcatggagaggcagcctctaggtagctcccccaataatctattgacatccccgcagggagagtctgcacgtagcggatatatggactgtatcgtacaacctccccgatctctaacaaccctgcatatgcccgactaagatcacggaacatgattagaatagagaccccatcgatgagggcacggctaatatcgacagtgcagaaggttttgccatccaccgtggtcgaaataatggaagtaactggcggctggtcgggattgtcttgtcgagtgaagtctttgagtgccttccaaacggcatcctcatcctgccgttcccacagtaggaatgctgcctcggctggtttatacaccagttgatcgtacagcccgtcttcagcggcggacttgacaaatatggtgcgtagggctggatggcgagctgccacttgctgccacgccatatggagccgggatcgatcgacctgctcgcctgggacgggaatgacccggcaagtgatccgtagttgatattgctctggcgactgctgctgggtaagtaggataccccttagaacgggcgagataggatataagtcttcgacctgctcaaaatcgaatccaagctccgaaattcgcttcttatctagtgcaactggggctgactcctcatggggcaatggagtctcctcgctctccgtcaaatgcagtgccagttctatcaaagtgggactcgtgaagatatcctcgatcttgactcccagaccccttcgtcgcaagtgatccagcagttgcatggcctggatagagtttcccccgttctgaatgaaggacttactcaaccagatctcttcctgactatccaagcccaaaactgcgctgcagaggctctgcagttggcgctgcttagccgttgagggctgaactcgttcctcgccggctctctcttgtcgcccagtgagcaggtggaacatatcagaggatagcgctgccacccaccggttggctatgactctgttctgcttccctggggaggtaagtgggatgcatcccaccgggacccaaacagtcggctgcatgtacccgggaagctgctgcgatagtgcttctgcgacagctgttaactcgtctgttgcagcctcaaagctctcctcatcaaccagttccacggaatctatagccttgcggagattcttcagcgagacaacagctgtcagtttccccttacagggtccttgctgcgccaacacgacaactgcctgttctactaatggatgggcgacgatgcgatgttcaatctctcccagttcgttttgcagtccacgcagtttgacttgactgtctttgcggccaatgaaatgtagactaccgtctgcattgaagcgagctatatcgcctgtcttgtataacctagaagtactcgtcggctcgctctccatccacctcattgtctccaaaaagactgcctgtgttttttccggttcattcaggtaccccctcgccacaatggggccctgaatcaccagctctccaggcgccccaataggcatcaagcggttgtggtcgtctatgctgacaatccagcaacacccaccaagcggatacccgatattggcaggacttgtggtaggagatagctggggattcgccgttgccgcgattgagcattcagtgggaccatatccgttcgcgagccggacgtgagaagcccagacctggatattctccttctggactgcctcgcctcccaaaaacagaaatcgcagcgttggcaccatgtctggactcatgaggctgacgagtgacggtgtcaggaaggcccatgttatgctgaactgctggatacatgctgccggtccccgggcgcgctcctggtcgttcgggatgcaaacgcacgcaccagatatcaggggagtgaagatctccagaatactgacatcgaaggtgaaagatgccagttgcagcacgcgatctgcgtgcgtcatcttggacactttctgctgggccaaggctcccgtcaggaactgtcggtgctccacgacgcagccttttggcttgctggtgcttcctgaggtgaagataacatacagcgcgcttgaaggggacacgccgcaagttacatgttgtacttcttctttttccgatgctggtggcagcaagtccgcaaactcacggttaacaagcagcacttccccggtaaaccactcccacaacgggccatattctggtgcagtcaggatcaagtctgcatcaacctggccgataatctcctgatggcggactgttggatgggaagggttcaggaacagaatggcaccgcctgcgcgaataacggccatcatggccacgaccgcccacgcggacttggggaaacataacacgataatcgattccggcttgacccccttggcttgcaggttgacggcaagcctcacactcaggagatcgaggtcacggtagctcagcgttagttcggatgtgtttaccgctgtatctagtggtcgctcccggacttttctttcaaacatggggccgacgcagtcgtccacagacgggggtgggatactgctccatgaccgtaggtcctcttcgacctcgggatggagcagatgcatctcacctagggtgagacagggttctgtctgcacctggctgaaaatatggctgatggtagcagccacaatagaggcatatgctggggccatatggctgggattatagagtaggtctagcaacaattgagcctccccttccgaaacgaggaggagaacattgaactaccgaaactgattagttgcgctgcggtaacctgtcacatggagcaatgcgacttgcatgttttaggatctcgtcctcgacgctctcgttttcttcgagcatacagaggcctgaatcgcacggcagctcatgctccaggtttagtggccctatcctccaattctcaccgtgaatcgcgcctgacagctgagaaaagggcatttcgtcaccgatttctgcgctgaacagatagtattgccatgctgtcccccttcgacgcagcgacgccgcacagatgctctcatcgccggtgaatattttcaatgtgattgcccagatcgtctgaaatataccttgaagggaagtttcttcttgggagagcagatcctgtacccggccctttgatagaacttgaatgtttgtccgttcatgcgtgagcttttcaaaggcatcatcctccttgtagcggagaactggaaacctgcaagcagtttttagcggttgtcccatctcaacgctcacggccatgttgactgtaagattaggacaacagacttgtgtataatagtacggtataaaaaagtattcaagtgtagcagccgatgctaacgtacggaccactaccgagtttataattctcccttcgttctcacaccccgggatcgaaaccataagaatattctgtcaggcgctcctgctcagccgctgcaggctaaggaactcaccagcaaaatctaccggagacgttcctcctacccactcgaccagactcactagcttctacgcgacaccgatccatgcgctcgcagagctctgtggcagtccacaggtaccgatttacatgtaattttgtcacttctgggaccctctttgttcagctcaatagtgctcggccacgccgctagtatcccaagtgggctggcaatgtgtagcaagttcagtaatatttctggtccagatcgaatactgtgtgggtgcgtattttgcttttcgtcctgcttgtattgaaaagtataataccgtacgccaactgatacgaatactctcttttgcaaaacagtaatatgcagtacatgagacccacatcatgttttcccacacgtcgtagcgatactaccatgcaaggagccataggctatacagtccccatccctggccctccattacgtaccgatgtctctttgcggctgcattgttggtctaccggctactcgtagtctcagccgcagaccctgtgagccccaggcgggctgttgacccggaccaaggtctccggaatgtaacagggctgaaaggagaatgatatgtcccgtgcgagttcatatctagcccaatgatccttccctagaaattacgaatccaggcgccctgccttactattaatagggtccgtggcttttcaagtatcatttggagccgcctgatcactgcaagctgggcgaacccggctaaagctggtggagcggtttccttcatccgcaaccgcacatacagatgctgccaacctaatctaactgtagatgtgctcaactgttaggctgcgttggttttaggccgctgcggacagagtccgcctactctttcaggtacatccggccattgaacacgttgtcaacacgttttcgtcaccgattctgcatggctgagccgggattcactctcgtttgggtatagggtgtgcgagcgctggatgcacgcaggggtcattttcttagcggcaaatatctagaaaaaaaaaataggcatcggtatggagccgtggcagactcagctcgcttagggtgactttttttctcatcggtcaaacgcgggtggaattgtacgatgctcacccatccttggaggcttactgcaggcgcaggtgtccttggttggttaagctgtttagcataagttgccgcaggcgggcttacagagatgaattcttttcattctatctccaagtgttgccttgtctatcctccgcgtttccagaggtagagagaacgtcaacaagatgattcacgctcacttggtttcaatattcactttcaaatggctcttactggggcttgttacgatcagttgtactgtacgtgtctttatatccacctttggtgccgtagcgttgcttatgtcgcacaacaggtagcagtgttctgctagcatggggtgttctttcacccgttagcaaagtaccccggaccgcggttggcaaagatcaccaacttgtatgccgggtaccattcatggcggggagatctgcatcttgacatgtggaggcatacggccagttctcgctcgaaggagccattgaaatggcctggctcatgggttatatccgccactttggcggaacaatagacgggactccatactcggggtgggtggactcgaagaccaagaagccagtggctgatgtggatatcaaaacagtatatgaaaagaggattttgacccatagtggtatccagctggtccagccggatcaattcgaagatccaaggtttctgtacgagattatactgcaggaagacttgaaaccgctgcatgtaccccaggcgctcgcggagcagatgaaagcggagcatggacagttcgcagatatatcgtaatcaacaacaccagatctcttccaggtccggcttctcaagggcgcaagactttacatacctcgcgccatgaacagcaaccgcacggtggcaggtctcattccatcaggctgggacccgcgaacatacggcgatcccgaggacgtcgtgacgcaggttgatcccgtaactctatacacgctcgtcagtacggtcgaggcacttctctcgtccggcatcacagatccatatgagctctatcaatatatccacgtctcagaggtaggagcatgcatcggttcagggctaggtggggtatcctctctccaaaaatgtttagcggacgccaaacaaacccggacatcttaaaggacgtcctccaagagacattcatcaacacaactggtgcctgggtcaacatgcttctcctctcagcagccgggcccctccgcactccggtgggtgcatgcgcaacagcaatcgagtccttggaactaggctacgagactaatgcaaccggcaaagcccagttctgccttgtcggcagctgcgacgttcttatccccgagacctcgcgcgagttcgcgaatatgaaggcgactgtcaacaccgaggaggaactggccaggggccgaccccccacgagatgtctcgtccgacaaccagcacccgtaagggttttgtcgagtcggaggggcaggcatacaggttctgactactgcagcgttagcattgcagatggggttgcctatccgtggcattgtggcatttgtcaatacctccagcgataaagccggccgctcagttccggcacctggtaggggcgtcctcatcgaacgccaacaagtctcattcagagtcccatcgcctcacttgagtatcccggaatcgcccaaagcgattagaatttcgactccgtcaaatcactgaagctagagagatggcattgcaaaacctcgacgttgaggtttcagcagtggccgcccaggatccaacagtcaatgtcgacgcctacgtccacgaacgccgtcagcaactcctcactgacttcacccgtgaagaaagcgaagcccgcttcaaaataggcgacaatttctggtgtaatgacccccatattgctcccctatctggcgccctggcgacctggggcctaacaataaacgacctgacggcagcctcattccacgacacatcaacagtactaaacgacaagaatgagtctagcgtcatccaaacgcaactccgctccctcggtcggcggtcgggaaatctcctgctgtgtgtgtttcaaatgtacctaacaggccattccaagggcgcggcgggggcgtggatgctcaacggcgcgctgcagatgcttgaatctggcctggtccaagggaacagaaatgccgacaatattgcgtatatccaacgacctattcgcgttggcgatatgcaggccgtttgtttgacttcgttcgggtttgggaagaaggggcgcaggctatcgtggttcacccgcggtatctgttcgctactttggctgaagaagacttccaggcttacacggatcggtgttatgtccgtcagaagaagccgatatgtattcctatgaggggatgaacgggaactcggctaaagctgcgctaccctgggaattaacaaacgagacggcgacatatcttgacccgacggctcgctttcctaatacttaagtttgttgatattgcttaagagacgacgcgataactcgagttatggtattagagctcagacggataccgt

SEQ ID NO: 5907 - DNA, 12742 bp, Emericella nidulans
gctttctaaaagcaatttttgtccagaaagtaactatgttagttagactggccttagggttttgaaatagggatttggtagataatagaggtatagaggtagtatttaatagttcttgcaggggtatacctgaagtctgaataattacttactctaattactagcatagtagctttatctcttcttaatattatttacattgctgctgcagttattctatctattattagtttagtatctctgcttgttattatagttactattagatttattattgcatagtgttataggtcctttgcctatacaaggaccttagaccttagtgactcggccaaggcctgcgctgtcctgaaggcggtgagccacctacaagacttcctcacaacaacaatccttctttctcatttcttctttagcgattccttcttgtacatacggcacgtctagataggaagatccatctaaatgcgtcccttaacattattatcggtccaaagttgcctttttcgaaaagggccatgcatgcattgatcaactcccaacatgcaaagcagttcttaaaagatataactagatagtatatctcaagtacttgctaagtacttaagaagcagctaataaatatacaggattttcatagagaatatgcaccatttattggctgtataaataagtcctatagaggtttaacaaaacatcataggggcgtaattcaaggacatacagcaatagacttacagtttctagaggatctctttaataaagagattctgccagctactaaagaatatggtgtttttgaacctctgtcaagtcgccgaaaatactgtggtaagtacttcccaaccaatctgcaaccagtcattaagcaattatcagattaaaatcatcctcaggggtccagtcagttaaagcacaccacctgtaatatggtcttcaatgctctagtacctatgattacaggagtgtatatatttgaagctaattagacagtgataccttggcagtacatacgacaatgatctacataatatttatagttatagaaacatttatagttcagtttacagaattgtttttgtttattcttgcctttccactccagtgttccgctcccagagaaccatgaaaacctggctcaatgtgtgctttctttcctacacccaccctaagttatgcacttcaagcaccataagtgatacctcatgaaacccgctatcgctgtaattaaaaactatctacatgagttcggcgtcgactgatttgagtccccgaggatcatgaattatacaaatgctggtatagctagtcagatcctcgaactcgtatggtactaataggagtcttcaagtctgaagctcttgtcggggtatcccgcgcggtcaggacaaatcttgcagtcagggctggagttagccgtggacatttaaaggacaatacacgaaatgaagtatcagatcccctccatgctgccggtcctcagtccactttcctcgccctcgaaagctaagcttaattagttcgatctcctcgctggaatggcgccgtccatatcgggaactgggtgggtgtggctgtggcattttttttttcgcctttagcaggcttcgaagctcagtaccatcgagaaatccgatacacgagccagggccaatcccggtgggtggtgggataatatactcgactccagtttcgagcatcttgtcgtcaattcgaatactttcgtgtacatcatacccgtaccatcttgcgcggttgatatactgactgaagaccgactcgtccagctatttataatgatcttagaatacattctccaaataagtaaggcatcgcgtggtgcacttggaactcacagactggaatcgaacaaacagatcccgcttccccaatgtcgggtcttcatcaccacagccggggaagagatactcgacaccgagctggactagtttaccgaacatcaactcttgggcgacggtctgagtttgggtttgggtttggtgttgggcgctagagccgcgcccatacacccgctgctcaacaaagatcgtcgggttctcataaatctcatccgcgtgcgaaatcaggataaccagcttcacacatcgctgcctctcatatatggcagtcgggttcaaaatctcggtttcgtctgattcgccaagaacccccgctcagctcagctccggttgggtgggggaagagggtcaaaccagtcagaaagatcttgcgaaagcaggtgccttcaatttcattgctttggtcggtctggtccttgctagtactgaagatggttaggggggctttccctttgtacgtagtaaccaacgtcttgatgggtccatggcagcgtgattttccgattatcaagcttggttgagcctccgccttggcttttcggtctccctgagacttgtgatcgtttccgcacttcaagcttgctaatctgggccctggatcggagtgccttggtctcttcgaaacccgggtggcagagcgtttggtgtgcagaattgggtcgtcatgttcgttgacgtcgtggacggaggcgggctgtggggagactttcattattacctagtgaagtttagtcgagagtcggagtagagagttggagtagacaggctaaggtggattcatcgctgttggggtcgaggattgtttaagtactaaccagcagggctgtgcaaggactaacacaggcgccgtggcagcaatagactatgataaagtaccaacaagctcgtacccaccgtcaatcacgaatcaaaagatagaaacggcaccggcgctaagtcctatcaagttactctgcgggtctgtctgttctgaaacttaacctgccgtgaactaaagctattccattaataacaagttatgatgatgactgctgctcgtaaacccatcaacctgctgtctattgaccagcagtaaattgcatcaagaggatgtatgtttttcagcatctgttgagagccctgaaatggaagttgcgggttatgactgcgaagtcacttgctgaagaggttatgactgtggagtcagagatattagccggatcgcaacttaaaagggtatagttgttaggcatgtcatgtttgcaggggtaataactgctggaggacatggccgaaggttagggcgctaggcaggccagaaataagtctccatggctgctggatgtgagtactaaggtttccatgactcttcaaatctaaccacgcaaatttaaaagtcccagatttgggatttaggatggcttatgccttctggccagccccaatccagtgagcgaccaaaggaggaagaaaaccctacccaatccgcggttataacaagtcaaagggttagaatcatcgataacttcactttttctcttcatgatgagcttacacagctcagttggcatgtccttcggggatatcgctcgctggagcataccttgtcgcctctccggaaactgccacccctgggactacagaaaactccacactataagtcgaatactcctctggtttgacctgcgcgtggatcgagactctattcagcatgacgtaggctgagtttaatcatggggaggatgaaaatagcacctaatccctcttattcgaactctgctggccacagctacactgccaaacccctatcgttactgggcgacagctgtaccctcatgttaggcctaaacgtctgcgtgcaggtcaactttcacaagagtatccgtgagctcgataaatccaaatcttaccacaattcaacatggtcattgacatatacggacataatctctacccaaactcaaacaccagtggcaacgccaatgccgatcgggccaggaatggtagagtgttgcacggccttccacctagtcgaaagcagagatgcgtgtaccgctatgacgggggacgcaggagtcttgctggcagactttgtaaccatgaaccctgatgtggactttgctgctcttgtctttgctggattattacgcgtgtattgctacaaactcgagtgctgatagcagtacacctgcgcccactgcgacatcaacagcctcaactagtacttcagccgggcatggtgtgtcgataccaacgccctacgagtccgggcggtggacgacagcgatggcttccatattgcgattaacacatgtccctctgttgcggctgatgcgggatttactcctgacaattcccacagttggaactctacggttagatctgagtgttcggggttgtgctttgggtgttatgtccgtgattgcattctctagactatgctttcattggtaatcatttcaatattgcctgactcgggtcgccgaatataactggtttggttataaaaagacaggttgccaagtttcttacaaggtaccaccaaaacgataataagaacaatgcaaaacaggagctccatgtccgcctgtacagccgagctcagtgaacaaattttccaatataaatttctttgggggacataagaattgcttgtagggggagtaccccatctacaaccgccttttttgcttatttcgaaataactggcccttgaggcttgagccgggagacaggataatcttagttaatagaaccttatacagtaaaggaaacctgtaagcgcatctggtagcagttaaaggcagcgagaattagacttgttaaaccaccggttggggcgagttttcagggctagcagatccgcccgcgggggtcttgggtgggttacctggacagtaaaccgcccatgggttaagcaaataattttaacccaacccaaagaacccaaatatgcatatcaactgcctatttttgaataaaatactgtattaaaatatagtattatatcttatttagtatacatatgtaatataaatacagtaccacacctattgggatgtcttggcaacccagcgggtcggcccgccgcgcttgggtcagccaaaaatatctatggagcgtcggattagacgtaattaccagcatcagccgtcaaataatataaaagaaatgaaggtctgcttcttccaatctagctctataggtcggtttaaatacataagaaataataagcaacctagcctaatacggcagttggaagagacataacttttgaaccgtggaaatagctgaagtctctgcataagcatcggcgagccggagcttgcagttccgatatcccaaataggaaagttccatatatgactagctgtcacatacggtcgacaatatccaaaccccaatggattatagatggatggtccaactcaacccaattcctggcgggttaggacgggtttgacaaatctagcgagaatgcccagtctatcatatcttgctttgtaaagtagatgttatcctgattcctacaagagaaacaatataatctggttatctgtataccattattattgttttgttttagcatgacatggcgactatgagtaatgagctctggtttacttcaaaaatatatttcgcggattgcgcttgggacgcacgcgctactgtgcataattaaatctattaaacctgccccaaccgccatgaccttccaagacattgattaaggacggaattgtattccttgcccgagttggcttacttggtccgtttggaccattccatacagtccgtgactttcacaactagtttacatttcttcatcgaggaccgatgcaagatccgcactcagttccagtggaaccatttcgccatgacctccccgatgactgcgcaatcaaattcactcatggcgatctccatcgcagaaacatatcgtcacacccacaaccccgtattgtactttggcggtcgtcgactgggaacaatctggttggctgcctgaatactgggagtcccgcaaggcgcaatatactcctgatagagctgaagacggtccactacctacctgccgatggttctggatgggtttgctagtatttgagatccataggactactacatgttagcgatgggatgttgagccattacatactgctggttgggtgtttactgcggcttgtcgctactatggttcgtcagcgagatttctggctagtatgagagatatccaagattacgatatcatcatacagttagaaagaatggatttgatacctcatatagtagccttcggctgcagagacgtaaagggcaatcatctatattattatattaggagcatcaacctgagccgtgaagcctactagaacttgcatcatatctatctgccgatagatcttcaattactcattacttccctgaaagcgctcatgctgccaatgcaagcttgatatctctagacgccaacgcagacgtagtaatcaacccagaggttgctacaagaggcatcaatcgtagggttccacttgcggaactggtccagggtgatgttgtaggcagaattaatagcccagcagccctcgccgctctgaaccttgtggtatgtcatacagtcgctggtgataccaggcatctggggcttaggcgcgacgtgaacgcagacgtagtagtcgagccagaggttcgagcagtctgtttatcggagagacttgtgttagcgttgtacaagccctaggaagactgagaagaggaaaggacatactgtcatcgatataagggttccaggaagagaattggacattggtgataccataactggcttctatggtatcgcactggtcttccgatgccactttgtgaaacttatcacagttcgaggctaggccgggctgagtcggggagggtgagccaccggtggtcgtgccggttgtcgagattgtagtggtagttggcttctcagtagtggcggtaagggtgacagtggtagtgcttgtggtcgccgtggaagcctcctttgtggtgatggtggtggcggtggtagaggaagggctgggttcgtcgacggtgacatccctcatgacgcagtaatcagcgaagtcgtcaaatttcgtgcagtccaagccagggttcagcaagttgaggtcgtcaacagagataccccataaggccgcgaaggactcgcagctgtcacccgagcttgctgcgatggagaaggaacagtccacgccgcgcttaacgagagggatgctacgagcagcgagcagctcgggaaggaggctcagggcaacggcagacttgagagaaggcattgtgatagaaggataaatgcagaaatgtgtctgccaaatcgagttcgtccttctgggcgtggtttatatgtccgtcctccagtagcccacagtcatgtccaacttctcatgctcaaaattcactcttgtctggatccaactttgaatgcggctacccaaaagcggcgtacatagtaggtatctaggtagcatcatcgcatagcttacccccaagtgctggtactattctgatgggtccctatcctcgtctaatgctaagggctcggtggcaatggaagatgccggattgccgtgcaaggctgtcctgagaagttatttgcggctgacagttcctcagagcagtctaacagcagcaaaacccaccagggtccggagccctagatcacgttagtgtcacagatacctctctagcggcccccacaccccttacaaggctgcaacgctggccaaggagtggtcctcagctcttctggcaatgagagctcagattcgggtgggcttgcagagaatcggcgcaaattttaaataatctacaccatccggtgcctgtattcctgcattttgccctcttctcttccacctctccagtcagcagtcgctccttctcttctccactgggtccttgttttctgtctttccgcccccacagcttgagtctccagcactaacatggttcgtgtgtcctggctcttgctcggcctgctggcatgttgggcgacggccgagtccaacaaaactgagatcaatttaattttcccgcgcgaaggcacgttcgccccaatgcactcgatgccagtggtgttcgccatccagaacccatctgtcgccaaggaactccatgcaaccatccagtatggggtgcgcccaaagggcggtggttctaacgagacggtgtggagctattcagacgagctggccaacgtcccagccaacgcgacaacctacttcagttccaccagccttggcaatatgctgaacaccaccggtagctgggagttcttctggaacttgtattggctcaactgttctcagtcaaatgatccggcgtactatgactccaaatacccgtgggtccttggagccgacggcctcaatcaggatgccgttctagatggcttccacttgtcaagctacttggtcaccgccaaatatctcttcttcgacaccaaagaaggtggcactgcggtaaacctgaccaccctcaccagtgacaaccaatgcagtgaagcctcggggtttgttgtcccggccttggtaaacacgctcgacattcccagggactttcctgatcacaatagcctgccgtccacgtgcgctcagctcgccaattcgacctcgacttcagccacgaaagcgagcccttgcagggttagcatcagtcccgaggctgaggcgagcattttggccgacgccgagtgccacaatacactcttccccacttcgggttgtccggacaagacaccaggagacgacgtcgcggcaggccttgaccatggccgggcagtatgggctgccattacactagcttttgccctggctgtcggcctcgtggggtgctagttggacgctgctctagcgtggattgacgattggtggtatatcatatcatgccgtggggtagtgcaggagctagtcaattataaatgaacatgcgaacattggaaattgtacctatcatcaagttggcacctgagacttagggttgctggacggcaacaatgttctgacggtatacttctcttgtaatgaatatttcacgcctatgaatccaaatttgtgaatggttaggtatctatgattgcccaatgtaacctcaccatctgaatgtatatccacatttatgaaggagtgaagcctcatcccctcccactagtttatttacaggaatatttataatatataatattattcctgtgcactatatgagccggtgtattggcaaggacctgtgatacaatgtcggcgcctgaactgccctgccaagcctgtaatggaattgtggattctctagtggctccaatggctacgcagaacagaaaattgggccacagtagtgtatgctctggagaatcttgtctcagttcttgagcgctaagccttcctcctcaggggtcctacaaggcttgtcaaagcttgcccgcccagtgaattcatggaactatgaaacaattagatgcatatgacattactatttgtgagaactatttttcatatgcttctgatctttcaaggtataaacgttcgtattgaaggatactgtgaggtgcatgtgttcctggccgtgtccacagctgagatctcagacattagtagtagtgcgcgcactctgtgcaagaggagatctgagcccgttgctcaggctatgggtcaggtacaccatagaacagtctcaatcaagaaacatggccgaaggtggaatgggtccagatgcctccggcgtctccggttggcgggtcaagccgacagtgatcgaggaaggtcaagcgcttcgggccgtggtccctcaaagcctcgggggcatcaatgcgcttacttgttgaggcaggagtattacacattgaggttcattaaattatcgtatcttcttcgaactaaatcgctgtcagcatttcgaactcggccccagtgggctcgcactccaaggtactcacagccagacctatcccagcgctggcgcctacccaagcgtgggctattctggactttctgcgggccgggctgagcagcgaaatctgtaattccgggttggtttgcttacggtatgcttcgtgtcttcgtccctagccgaataggatgaggctgtcaagctcgcttggcaccataggtgcaatcttagagtataccacagtgcacagagagcgtcggtagctagactgagagcaatgtgattctcgagcaatcataaataacccagcccgacgctcctgttgagccttgtgtcaatggtattccttccatagcattgctggtaactcggcgtctgttcttttgtccagttactcattttttgcctttgtactctatactctcttttctttccgttttcctttgataccatatttttcggtacgcagcccatggctccttcctggcgcattgtggcggtcagcgcccttgctctctcccttcctggagggaacatctttgtctctgcccagacaggatcgaggcaaccggccgcccctggttaccgcggcatgaacaccatctgcccttctgcctgctttaagactggccctgacccccttgactggtctgtctaccccagtgttgaccggacatctgcgtgcaagcaggttgttctctacagcttctctttgtatgacaaagtcgacgacaaggacagcaatcatcgcatttatgcctgcactgcttatggccatgactgggaagacaacactaaggccgaagcggctgctgctcgccctgctaagagtgtcaatgtcacctacgaaatcggatggacaaccagtgagcccggcacagaggccgactacagcttgttgatggagcagatgcgcgagtacgtggtcaatggccacgctcctacaaacagaacattcatgctgtattcgcggttcggtcagtccgttgctggtctgtacatcggccaggggctgcgagcttccgacgttgcgaatactgccatcaaaactttggactctaacaccgccgattttgatgggaaacgcgatgtcctggcaatccagctctgtggacctggctatgactctgaccatatcctggggttcatggctctcaaacatgggaccatgggcgacatccagcagacattcatgtcctggtctgatgccaagtgtcttgactttgccaactctacgagcttcaccaccacggcgccttttacgctgccccaactgtcctcgatcaaaggcaaccatactgtctcccaaaggaacgccactgtgacaacagggcaccactctaggcaatccctggcccacttggcacttcacgctcgggcatttgaatgccggactgaggtggtgggcgatggagacagctgcgccgccctggccgagcgctgcggcatctccggcgccgacttcacgaaatacaacccggacaagggactctgctctagtctcacgcctggtaagcatgtctgttgttcgtctggcgacctccccgacttccgccccaggcccaacgacgacggctcttgcgccaccaccgtagtgaatgacggccagagctgcgctacagtcgtggcggccaacagtctgacaaatgacgacattgaagagtttaacaaagatacctggggctggaatggatgcaaaaatatattggccggtagtgtgatttgtataagcaagggcacaccacccatgcccgctcccatggagaatgccatctgcggacctcaagtacccggcactgaggcacctgatgacatgagcaaactcgccgacttgaacccttgcccgctcaacgcctgctgtgacgtctggggtcagtgcggtattacccccgagttctgtaccgacacgaacaccggcgctccgggcacggccaagcccaacaccaacggctgtatttccaactgcggcaccgacatcgtcaagggctcccccccatctgaattccgcagtatcgcctactacgagggatacctcttcacacgggagtgcctgtatcaggatgccctgcaaatagacacctctaagtacacccacctgcacttcggatttgcatccatcacggagaactacgaagtctctatcggtgacgaattgatatcctacgagttcaacaacttcaagtacctcaccggcccaaagaaggttctctcctttggcggttgggatttctcaaccaacccaaggacatacaacatcttcagacagggtacacaaccagcgaaccgtctcaagctagcaacaaatatcgccaagttcgtcaaggatcacggtctggacggcgttgacattgattgggagtatcccggtgtaagttactccctcttctccaagagtagccttttcaagatgtattctgacatataacaggctccggatatccctggcattcccgccggcagtgaagatgagggagataactacttgaagttcctggttgttctcaagaacttgttgaaagacaaatctgtctcaatcgctgctcccgcgtcatactggtatcttaggggtttccctatcaattcgatcagcaaagttgttgactacattgttttcatgacctatgaccttcatgggcagtgggatgccgccaaccccaactctcaggacggctgcccgagtggaaactgtctgcgcagtcaggtcaatcttacggagaccatgacttctttggccatggtcagtcaccaaccccctacaataaatctacaatcactaatttgtgctgctgtaagattaccaaagccggagttccgtctgaccgcgtggttgtgggagttgccagctacggccgctccttcgccatggccgaggttggttgctacggccctgagtgcctgtacacgggctcacgcgccaactccgacgctaccaaaggaccatgcacgggtacaacaggctatctggctaacgccgagattaacaa

SEQ ID NO: 5908 - DNA, 7775 bp, Emericella nidulans
  unsure (1)..(7775): unsure at all n locations
aagggacaaaggatgatgactaagactggctgataagacgaaagacagcgaaacagccgtggcagaggtgaagagcaatagaagcccgagtatgaagtataaaatataaaagtataacgtacagcagcgatgagatagatgacagaggctgagacttgcagacgcagagtcccgtatagtatagtcctggcagtgggttcctgtgacaggtaatgcgatgcgacgcgcgggagataagcgaacgcaacagcagcgatggcggtaatcctcgatgtgaacggagtagaacaatctgaaagcgagaacaatagtgacagagcagctgttattgttatagagaagaggagggaagagaggggaggaaggagaagggggggaaagtaaggagaggtgcaggcactactggcagtagacagaccctccgcagtcaatcatcgtcatgtcgagaacgcactgtcaggctgtcagcgttagtcagtggtgtcagtatctggtcagctggataaattactgtattacgaatatttctgggcgtccttatcagcataatgagggataattatgaggattatctcacgcgtggccgggtcgattggccaggaacagcacatcctgcgggaggactcggagcgactgtatggagcagactctgtacgctctgtacagatacaggacagagacaagtgtacgaggtattgacttccaaggaaagacaaggaaagaccgatgatgtcgtcgcacaatgacagaacagtcaatcggccctattctctgagcccgtgctggggacgaatcttggtatgcgacaacctcccgctgtgcccgcacgtgggtctcgttcttccctctccagccctccagcatcctccggtacctcttcagctcgacgaatctcaggtcgcatatctgcaggtgcctcatgccgaatttcaaactgacgtggaagatggatggcaagtttagccaccggtcaaccaatttagaccaggccaatcaagccctgtcgttgttgcacactggactcctacttgacttgccacctaaggtactgtgcggagtacattgtctcttaacgtttctaacctttctcatgtctctcatgtcactgattgtactctgtactgaaccgcggggtaacggatcacggcaattcaggcctgctcagcatcgtcccaaggccgtcgcccgaggaagcccccgctttttggatcctctcgtgttccttgcctcgttttatcgctgcctcagcctgcgccggggcccttaatcgtggaggcaggacgtttccgttgataacggcgacgcgctctatgcgtgggggcggggcacgcactgacagcaatatatattcgtatattcagttcttgttggggtgtttatacagaatacggcgtattgaaatactcgagagttcctgtgaaatccctttcacttttggtctttcaaaatctagagcgatcatcagccgtacccaggcactttcgtctgcgtgtcatgcgagatcgaccaattggtatcggcttatgctttgctgttaagtcggatcaacggacgatgaggggtagcatcaatatggagaggccctgaagaagtggatatccatactactagacgctaataggaccagggcagcaaacatactttccactgagagataaccacattttacgtcctaggcctggcatggacctgccgagatcggatataccagttcatactggctttcctgaggccacgtccaagtcttcaccgggtccccgtttctgttacacgatgacaaccgtgcctgatgggccaagaccacgacgaactcgtggtctccaaatcaatagctgttccgagtaaatgtacgaacaggccagcgttcaatgcgacggcactctttgaatgggcaccgggggtccccattatgattgaccacataattggaatccggagtgctgcgctctcgcttgagaatagacggcattttccagcggtccaaaggaccatgctatgtgttcgattagttcaagtgatggaagtccggctgatacttaggccgggccaccaaggtagatatttctggtccaagagcaaggaattcccaattaaagactcccaattactttttgtagtctgcttatggcataagcacaaaggtcaactttcacaatcttaatcctcgtcattgttgatgcttaatcgtagttacatagttcgatgaactacgcatcatctacccgagttcagccaccacgctcctgccgttggtatatttcggcggtcctttgattagctagaatgtgagtgtagaggttagaattgctgaagcaaagcacattgcatgttgccttgcatactgttcaaagtcgtcaacctttgggctatacaagaggtatagtctacagcaaaataaatatctgtcggcatactgattggcacagtgccagtctctcgagaggctaagtgactggaagaatggagatccgtcgactatcatttatgcagtatacctatgggaatttgacttctgccacacacaacacccttcactgtccagctgacagacggcacggtcctcccctcacaatacgattttgtcatcctagcaacaggccagacgcccaataacgatctcctctctggcctgcccgcttcatcgccttcttcaggacttctcaacccctccaacgggtttgtccgcatccgcccaacaatgcagttcgtcgacgagaaatacccacacctcttcgcagtgggcgacatcgcagacaccgggcttcgcaaggccgcaaggcctggtgccgcacaggcagcgacagtggtcaagaacattctggccatgattgagagaaggcaaccgatgtaggagtacccgcgggcgccagcgggcatacatttgacgttgggattggtatgttccccgtctgtaagaagctttatgtgatgtgcatattaacggaggtagaaatacaacgtcgtcttccgaaatcctttggaggcggaggggcagactgaaccgacgattattaagcgagatgagtatgtgaattttgaccctgccgtcttgattttttgtttgcgaactaaccaattcagtggccgagaggatatgggtgtcgaggcgtggtgggaaaggctcggagtggccgtgaacgagcgccagcagtatcacctttagagcattgtagacgtacatgccattatgttgcaagataagatgcctacttagcatgcaaatatttgaacttttgtggcacgatattacgatgcaacggccctggtaatttctgtttcgaccgcgaatacccggttgtgtttgacattgagcgctatatgctgcagaagaactgctcttatcgagaacaatggtgagctagcaacttgctagctagacagatgaataaaacacagccaatgccagtttaacccaaacttgctggctctaggcatgagctggattgggtccctgacgtcttccttggactgttagtgttagaatcggctatgagtagtctcagccctaactccatccctactctcctcatttgactgacagtagaagtctcataacagacactatatactctagcccattgtagaatccatcacctatctatcaaaataacgtctactaaacagtaaaagcttcttttcaattatttatccataaaggtctatcccaatcgcgccatttctctttctttctctctacccaacaacattctcctcaataagcctaccctccttatccagataaaaccactgctcgaagcgctccggctttgcctcagccggacgctcatctgacaccgctggtagatcaaaatgcgcggtagcattggacctcgacacgaagctgaccgcaatatctgggcgggaggtctggttgtaattgatctcgttcgagtcgacggtcccgctgaccaggtctagccagtagccgtggctttgctgcacgacggatgccgcaaaggtcgcgttgacgtaggtgttgttgacgatagggataagagagtcgccgcgcgcgaccttgtaggtggtgaaccagttgcggtacgaagcgatcaggccggggcggtacttttcgacatctttgaagtctgctcggaaacatgtcagcatcagtttcgttgttcttggtagtggaggtatataaaaaaggaatcccctcaccatccaccagtcctgcaatcgggtccctcacatcaatccctagaaccttccagtccgtctcgccgccatcattcagcgccagcgcgcccagaatcttaacctgcttcacctgccccgtaaagccctgatcctggccgatatcaaacagatcgacggggtcattatctcccggctctttggtaaagtcatgcttgaagttagggctctcccaggtctgcgggatcgacccgtacaagaacgggtaggacttgtgcggccagacgctctctacgtagcgcggggagccatcgcgttcgtcgtgaaaaattggattgagcggctccgaccggcggatctcgatcttcccgtctgtattacgagggatctcaacgacgaagttgatgatttgcctgcttggtgggtgtgggtagagcgggacgtcgtgccagaaggagatgggttgcttgttgtgttcgagccagatgcgccagtcctgggttgtgtcagagttattctatttcagttttctttattttttattgattttcccgagaattgttggagactacacgtaccagcgtgttgcgggcgccaacggttcttaggctgagggcgttgtagtcgaaaggtaaggtcgcattggcagatgtcaaggcaggcagtatagccaatatggaggcgcaaaggggaagcttgctgagcatgaccatgacggcggtggacttacactgtaagtagggatgaggtaaatatgcagttttgggaggatagacgtgttgtttataccttactcactcgccctacgaatggcgcaaggatcgtccatgacgccacgccaaggtccctccatcgaggtcgtatattctggaagctcgcaaattgttcgacattccttcaggttggatcccaggtcatagcagccacggtatagactcgctgcttggcgtctacaagccaagccgctacgccggcaatttaaagatggcgcacaaatcagagtgctgcactttacaacgtggccaggatcagccggccgtgccatactcagtactcatagtcaggtcattgctgtgagactgatccccactaaaagcactaacattatctctcgctctgcatcctgggggctgtttggatggttgggcgggatgactgacagcaatatgatctatttaggatggatcatgcattatatcctaggcatgggatgaattagggctatcgtgccaatgatgagtctctgtaaagtgtggctggaactcgacatgtggctggaacccgagagcctagacagctattatacttaggtacttcttcggagtagtactccgtatggagacatcttcagcagtcgaatctttggatacgcattcaggaacgggtttgatgagtacattatgatacgcctactatttaccgccgttcaaggtctagtcgtcctattaatcctcgcgcaacatcaaactgtgcttgacagctggaaagtatgctaagttaagggtcaagtgcttgaaaggattagttgctgctgtgggcggcgtctaggcgtctacgtagtctcgtctggttccaactgggtcagatgggcgacggggacggaaggcggagaaaaatcaaacgtagaaaagaagaagaaacaagacagggagttagatgagggcaaaaagaaagacaatggctaagaaaaggggttatatggaaacatgcatccactagacttttctttacacaatgcccaggttccccatcgcaaggcagggacagggcgggctggaaatgagaatgcagaaagggaagagcaagtacaagacaagacgagatcatggataacaggtcactgccgttcttcagacttgatgccgctcatctcctcatctccgtcatcactctcactgccactctcatcgtcctgttcgtattcctgcgcggcggtctgtccttgaggacggcctctcaggcaggggttattcgaagtctcatagaagaagagcctccctttcaacgcatggttctcgctccgcaggctctcgatatagctcagggcgctgtctatgattgtcgctttcggcgaggtatactggcggcgtgcagaagacgacgacgaggaagaaaaggtagtattccctttcctcgaccccgacgacgacggcgatgaccgcggcgaggagcaaggcgagcacgagtacggctcggtccccttgttgacgatggtctccagcagatgaaactttctgttgaggttctcgcggtaccgcttttcaacaacattatgggatgcccgtcggttctggtgcttcagcttctgggtgcgttcgcgctcgagatcacgcacgttgagggacggggctgagcttcgacggggacctaggtccgcccgtggaggaaataagttgctctctagccctggcttttcaaacgggacggtgccgaagggatataagagtggcgggcgcggttggggcccgatctggaggggattggtatcaaacttgaggtccgacacggcggtcgaggcctctggctcttcggtggaggtgtcggggtagggtcgaaagtggaaattaaggaggtcattgttcggtaatgaggactggcctagcattagtaaagggtactctttcatacccgagataccgcgaaggggaaagaggagggagaggagggggacagcttacatcggggaatgtcccgtcaaagccaaggagctcataagggctctcgatagcatctgctggcggtgcactgcccacaaaagaaaacaacgacatggcgccctgtgaagacggcggccagcagtcaacagtccctgggaaggccgagacggccggtttggtgatgggttgcggagggcccctggggacctgctggaggggataggctgtaggatcggcgttggcaggtaatggagcagggaaggacgaggtcgtagcctgagtcatctcgggtttagtctagaaaatcatggagaggcgagtgtggccacggtgaaaacaggctatagaaggagaatgctcgttgatcgctgcctgtgctagcatcttcatagctgtcccggcccagatataagtacgccataaaacaccaaaaccaggaaacatgacctaaattgagagcatattattgaaataatcactggctggatatttcggaggttgccgaatgggttatagttcggccaatatagcggtcatagtgttttaatagcaatcgacggggcgctgcggtggactgggcggttgtaggggaggaagggcggtctctttgcgtaagccgcggtctatgaaaagcttaacagagcttttaagactggaatgtaccatcagtggtgggaaggataagccggtcagtgaagatgttgcatcctcatctatggcaacgggctcggagccggccaggtccagaactaataggctggaagccatcagagtttggcaatgacctccgagtcaagccttgaggagatgacttgtcgagagctgggcaatttggctgccgtcacagctgtcaccggattgacaggccgggaaacatggaacctcgctggacggcgatggcgtttctggtacctttctagcaccttcgcggatcgagntccttcctggccaggtataagacagactacagaaggtatagtggtg

SEQ ID NO: 5909 - DNA, 5822 bp, Emericella nidulans
tcctactgctctgggaggaagggaggatagcgttgggccaactcgccccgaacgttccatttgcaaggtgaccatgcgcgacttggaagtctcacaccaccggtagagtatagataagagattaaggaagagaatcggcagtctgatgtctctatctagcatcgaatattcgggggagctaccggtagaaatagaagacaactgattcttgacgcgaggatgcctaaggaccattgggcgaaagtaccagtgattcagtccagtttctgcgtatttaacctttccagccgctgcgaggctgggattgctctttaccgactaggaaagatcttctggctcggacgatatagtgatcaggaaggctactgagagtctaagcaaagatcccagaaccgtcaaaagacgaacggcttttagagactgatggtttgataagctccaaaatatttgaccgggtcaattttttttttttttttgcgccgtttacccgcgcttggttgaatttcttcactttgacattctggaaaggtagatatcttatatcccacgtcaactcgatgacctttgaccacacaaccacgccctctagtcttactctgttatatcaattttctagataagcctgccattgtattatatcgtcatcgcaaatcaatcattgttcctgcggcgttgtggctggcgtttgcccaattaggatgtctcgccgaggcccgcttatcgttgcccagcggtacaggaggaccaatccccagggctgtcgcttgtggattggctatctggccaaatatgttatcattctctaacccggttagtttacggttttgggaagacaagtttttcttttttttttttctatttccttttttttgcttcaatgatcccgagacatttcagctttagcttgaccactaccatgacactcaatggttagtgaagataacggacccgtatgcaaaaaaacccgtaccagtaatgttgaattaaacaggtaccagtaactacactgggtatgtctcaagcgataactgagacctgttcgctgccatccactgtcatgcagtgtatctaattatggctatgaatgcactgcaatggaccacagtaatccaaggttgcggctttcaggcctgtcaacagccctaaaggtcagcttttgcggatgccgtggtttcagatctgctctatataatcgtcttgtcccttccaagggtcttcttcgccatcctagccatcgttcagatatcttgtcactcgttagaccagtcactacttgactattccgctcgcttacattcgtcaaaatgcgtctcgtccttgcttcctctctgctgcctctcgcagtctccgttggaggtaaaatattatccagacttagctttcagaagcctcggctgaccttatcactccagctctgcaggttaccgagcccgagaagggcgccgagattgacccttcgagctccttcactgtgaagtgggattccgtcaggtataccttcccacccaagactatttaaccgcatacggagtgtcgaaactaatgacgagactagcactgacccctcctccttcgacctctaccttgtaaacaacgccgtgtatcccagcgtcgagaagaagatcgcctcggatgttgatacgtcggaaggctcttataccgttgacggcgtttctggtcttgaaaacgggtgagcgtccagccctatccatctgtatttggaccatagcattgctaacgaaaacaggggcggctaccagatcaatctcttctcaactccggtcataacaccagcatccttgctgcatctgagcagttcaatgtgaccggggcagacagcacctcgttcagcaccttgagcaccaccacccctacctctacctctagcaaatcgactgggactgagtctactacttccacctctaccggcacaagcacgactctctcgtccactacgcccactaccgagtcagagtctgcttccgtgactccgtcttcctccgggtcgtctactccaagttcttctaacgctactgctagcgctaccggcactccggacgatcccaatggcggtgttacaatcggtactcccttggcagtccttgctggcttggttggtggcgctgtgctgttcaccctctaagatcaatgggatctgataccgtgctaaggaccaaaaccaagcgccagcttattttgttggccgcattaagttgccgatcaagatagcacgcgaatctaagcacggtatcgtaggatatgaatggcggctttctttagatatgattgtggtattgttcaggcctggattttctttatgcaaggaggctgcacagtcgcggttggattcgtttaatgttagtacggattagaatagaatgaaggactagaataataattatcctcggattgacatatactggaaaatttatttcaataatttacatatatgtacacgtagaacgtccttgacaatctagttgctctaaatacctttaaaggctgagagctcacttacacaaggacggataagcatacatggcaacgatcaacaatgaaagtagacatcaaagtctacgccggtactaaacgtccactaaacccgttcctcacgatccgcgccccgatcagctgaaggatctgtatcggctctgtcggtaaatattggcccaccgtaccacagggcgcagtggagcaaggtattttatgacagctcgtataacaaactctgtctcagaagctccgagacatgacaatgtccctgttccttagacgttgaccaatttatgagtaatattaatgactcggcaataacctgtcagggatgccggcaagccagctgtctagagctgacccagctaaaatgggacaaaggcaggtaccatggttcccaccgaccattgagtttgcaattggcagtggatgaactggtctgaattcatgtttcagttacgttgctcattattctactaggtaatctatattaggctggtcagggttttctatttgcgtctctggcttcttagatagcgtggtaaatgttcacatcactgtcacgagacacggtcagttgctcgaaaaataggccgggtcagtcaggaatggagaacttacaaatcactgtgaatcttttcgccttcaagttcagtaacagcctgagcaggaacccaaacactgacgctcaagtcctcaacagggaacaacccatgcccacaatggtcaataatgactggtggtgcctgtgggcgcaacaaatctgtccactcctcgcctgcccgtccgggaccgacgtacatgcgcttcgaagcaggaccgtcattgctcatgacgcatgcttggccggacggacgacagccgtatccatagcggatgaatcctacccacaattggtggtgagaggacaatccaaagcagtatttttgttgttacaaacctcaacatttccttgattcacaaacatattagatgtttatcttatcttgctaagctcccttaatgtgataagtattaataatcggcagcgagagacgagatatagtgtttgaaaacggcggcagaaaatgatagacatgaccaagactctatcgctaatattctatgcgagtccaacgtagagggtaagtttggaattccgctggatagcggtatcgagatcgctgtcgctgataaggtcgacgtaggcgcccgacgcctcatccttgtattgcaccacgatctcgtcattgatcttcaaccggtccataagcttttcttttagctgctggacattgatatcgctcgggacgcggatagcaatgagatcgtcttggaaattgaccttgactttcaaagcaccaccacttgaggttgagacttgagtaagagaactttgctgtcggaccatggggggctttccgttgggaatagagctggaagtctgagatcgctggtgcgagtgggagtgtgaatgggagtgagagtgagagcttcgttccgaaggcccattctgttgttgcgacgattgccttgaggcgctgggagaaagctcatggccagacgagtgctgcgagccgcctgagaaccgggcatcttctccaaaagcactcgggtcaatctcgaagtcgcctggacgaggcgcgaagagctgacggacgagagcgcatcgggtgatgtgtggaggcatagccaagagcttcttgatatattcatccaaattatgccggcggccgtcagaaatggcatcggtaacgtgagcgacaggaccgggcatgaatggtagggttcggggtttgccccgattgcctgcctcctcctcaaactgggtcaacagagcaatctggaaatcataaaagtcgtggtagtatcgcgacagctcccagcagcgaccgtcctccatcttaacttcaatgatgtaccagtacttatcattgtcgaagcagtaccgagggatcgaggcagcaatgggtgcgactaagggttgctgactgtggggcggcggttgctgatgggtagacggggcaatagacgccttgctcgcgtttcggttatggtacgcctgtacatgttaggtcgaagatgaatcccgctagagtattgacttacattagcatggccgttttgactcatgtggctcacatggtccgcgctctgtcgcactgacatcctctccatacccgaagtgacggattgcatggagccagtcgtctcgattttacctagactgatgctgctgtttttatattcggcagtcatctttttccactcctccacttttggaacaccagcgcgcctgacagcctcgagcgggtctgcaacagcctgcccactctgcatgtcacgaagctcgataaacgaaacgggaatcaggccgggacccccaaggcgaccgatgggttttgcgacgaaccattcagggttcgattgggcgatgacgatgatggcctcgcctgctttggcgtctaactcatcgggccgttcagcctggaaatcgtactgaacgaccccatacaccatggcgcctccgccggctttgcccatcatggaagttcgggggaatgcggggtgcgactgataagacttagaggagcctgaaccaaattcagaacctgaagaagtagcgcgatcagcgaagccagagtcgtgcggttcctttttcttgcccaggtcgatggatccgctgctgtctcgctgggttttgccgataacttcgaaaaaggtcacgggaaccagccccctggcggtagggataaggggattgcacgcttcgtaccagtccgagtcgtcttccctgctgataacgtggaagaaatcgcccttgctaaatgccaattcctgggtgttccctggttcgggttgataatcgtagagagccttgatgacctgtacgcgttcgacggatggtcagcacgggatgaaggaggagatagtacagagtaaacaatgtaaaaagtgtaaatagagagggacaggcaacaaaagactggataatagaaagacggagcgaaaagagagataaagcgcacgcaccttctttggaggcagaatggcaacggcggacttgggcgtaatggacagatggtggtgctgctggtggtggtgctggtggtggtggtggggtttggaatccttctcccctttcagggagcgtcggagagcctaaaatttgtggtgttaatgttgatcgcctaatcagagcacagggccaaggcggtgatgctctgcaatttcctggagttgtgccccgacaatcgcaataaccatcagagaacaggacactctaccttcatgtttagattatctcgtatgtaaatagtaaaaagtcgtcgagtctttagtgaatgtga

SEQ ID NO: 5910 - DNA, 10319 bp, Emericella nidulans
gagtgtcccaagtatttaatgacgagataagcttttgcttgtgcttttcttatcctctctctgtttacagtcattcaattcaaattcgcctctgcatctctttcaaccctctgtctacgtcctggtgacaccacaaaaggcaaagaaagaaaaaacgaagagaaaaagacaacaagatgaagctcgcagccgccctcgctgtagtcttcctcttcggcaccgcccacgctatccccaattcaccggcaccggcacaagaactcgagcagcagcgagttcgcttcttggtccccgacaacgtgacagtcaaacaggggagctccaaatgcggcgaccaagcgcagctatcatgctgaaatgaagtggaatacgcaggtgatactaccaaggtgactagcgggccgctgagtggccttttgggcagtggatctggtgcagaagggctgggtctgttttcgcagtgctcgaagctggatatggctcgtgagtgcacactcgccatacctatcattgctgcttttaagaggtgattgtgattgtgatgttctaacattagctatcttgatgcgttttagtgcttctcgcggaacatatcctgaatcaacagtgcaagcagaatatcgtttgctgtgtagggataagcattcggcggtatgtcctgcccctacttcattgccatatccgctgcaagtaagtatgtaagaaatgaagcggactgactctgaaacaggataatgatctcatcggtgtctcactgccctgcattgcgctgggatctctgctctagtccctgctcacggaaggaagacagtccgtgtgagatatcggagtccgctatcatgagccttccggtgcaaggcgctatttgctttgtgtttaaggctcgacttgccaggaggtcagtgttgggacgagggacaaagtttgctgcaggcactgtggctttttatacagcttgggcttccgctgctgatacattactaatctttcttcttagaaacaaattttcaacctaatgtattttgatccttcgataccatggctatactattcgattatatccacaaggactaatgaacttgtattccagctgatcagtaaactggctctcttttctggcagagtgttcctcaggtcagtaggaacaacagcccttgctgatgagggttccagtcctactttggccttacattgcataactgcaatgaatgcctcagttattactttggctggaaccgccaattgtactacgcagctgccaggctatctgcggccgtgatggctccatttctcgtcttgtgaggcttcggaaattcagtgctttgagccttgcagcgattctccagaaactgaaaactatacgcagtgttagaggatatcgaggagagaccagcgtgacgattattgaagaaaaaagaatagtcactgcttttcagtttaccccgtctttcatcgtatatgggtaagctttccctctcttgccaactgcggacagctacggagtaacccagtcatgaagctgggagaagctgaatattattagaacactgcccatagactacggaaaggtgcaaaaggcaatacaggtcatctatgtattagcactgtcccccaacccctactttgctgcatcgacgagatgagcaatgccagcccctactccttcctccaggctgtcatgtgtatttcagcagtgaatgtactggtgcgtatttccgctcatttggggcagcccaagcagcggaagaagaagctcatatcgcgtctggtcatggtcatattaggtgccgcccatctctttaccgttgcaaaaaacctccacggaggttgagatcgatactgtgacatacatcatataagacaaggaagcagaactggcgaggtaagttcagagtttctatcaatgcgagataggtcagggctaggcggtgccgctactgatctatttcatgtaaatgtcaatactcgaaatccctgttacatacttgacttctcaacgggcaaaaacataaagcgtgtgtgggactgctgcttctgaagcgtgataaagagttttgcagaaccgtaatgtctttgttgtgctcgcgatctaatgcagtacgctctattggttacggtagtctcatttctggaagtctacaggctcagttgagagagatacgaaggggaatgcattcagtgagcgttcagggcccctttgtcagcctaccagttgtctatcggttgatctgctcaacacagagatttgtttagagatatgttgcagttactaccaacttaggtaggtatatgcttgcactgcattgattatgttatgttagaatggcgtatgatcatactgttccggccacctctactcccccccaagatacgagaccgacgaatcgaaaattgaggttgactgctgtactgtgctcagttctctgatattgcatctggttgggaccgacgaacagttagtacaccgtcttcaacttcaggtgaagggcggtagctcaccccatcatggaagccgttccatacgtaccaaatcaatgggcacatactacttggtcagagccttgagaaaaatcgagagggcgaagacaatggcgctggttgtaaggatcgcagtcgggcgtttcgtaccctatcgcggcccttctgccaattgttcacgctggttgtcctcaatgaaacagttacccctttcaggttctaaatatttttagggatcttcacctacataaacataacactagctgggcgtacagcaaacttatccaaaccgccaaagccctgcattacctcaagggtaaatttacgaacttgtcttgcggagtccggatttccagcccttgaagcagctcaaccagctcgcctggagctacactgagtgctatactgtccagtctcagtgcaccacagttcaggcgcaaaggcctgcgtttcactgggttgatggacttctaagattctgttgattgagcaagtgatacaggtcaagtgacttccagccctaagttacctgagtagatcctaattacaacattgatcaatctttgtccatagcatggggacatgagttattggcagctgtggagaacgatagacacgactacagactcggaatatgatgctttgtagacaagggtgtcacctcggtccagctgaagcttcttgtatccaaacgcctgtctaacctgctacttcctcttcctagactcaaatttcttttagataataaactcaggaagagcctacttcgtagccataaactcaaggtatagctaccaaaaaagcctcttgagattcgtgagttccagttcgcctggatccttagggtgactgaacggcggaaattgtcgccttaatgagattgacaccacatgccaaatcaaggagatattgattctagagataaagaacatgcaaaagaaacctcctattcttgccccgccgcctggcggcatggaatcgccttgcaggaggctgacaaaagacattcggactgccctgaagccccgagcgtgctttcaatgctatggaaaccgcaccacgggttttgacaatcggcgtcttaagcagtactcccgccacaaaggtctgttgcgacacttccaagctgagcatcgaggatcgtcactgtaactacggcaacgagtcggcagacaatgaggtgtattggcgaaggcataccgtagacaagcatcgcttgaatgtcataccttggggactgccctcatgatctttgagtatattagagaagagtttcttgcccaagagcatatttactttaataagttaaggaaaagttagctagtgcaataaagtgtgatggcagaaacgaaatccccatcaaataatatgctagttcaaccttaggcttgcttcctgttttcatgtcctcggttagagatttctgacgtctcgctggatgtatcagagcgttctgctgggaagagagtataggattttggccgacagagaaaagagccaatgatagattcgttcgcctctcaaacatagatgatatctgggatagcaactatgtcttatatttacgccgcaataagtaactgccagagatggttggtttgattacgtcatccgaaccgtgcccccgcaggcagctatagggcttgggtcccaatttggcggtcgccagcgacctcatgtagagaggtataaagatggtcatcaattttagttaactatcgtccgccgagactaacctgaacccctaagcctctaaactaataaccttggtacgaaaatatcatgtatgcgataaactcgctgaggccacgtgatatggcggcttgttcgcggtctacaacccttgaggatctgacccctcattgtgttgagagcaatgaaggattaagcatctatcagagaatacatagagagataatcgtcatagtggcatccgaatcttagcagactacgcgtgtgtagtcgatacggctatattcgcccttcttcctcctgagcctacatggagatgccacatcaaacctcgaaaaaagccactcaagcacttgatgccattcaccaagagagacacataaaatgactcgaagcttcgcggactttccggtggaaatataatccagatgatcgccagctacctccccaacagcagcatcaagacccttcgtatgacttgcaaacccctctgcaacaccgtcagccttcgccttgaccgtgcctttctctcggcaaacccactcaatattgctgtctttcgcgcaatcgcagacagtgagagattccgccatggaattgaagaaattatctgggatgatgcacgcttcatcaaagccccgctgggcgagttccacatcgctgacgagcgagaggatctctggattgatgaggagactggatgccctgagtggtttgtcaattcctgtaaagaaaacaggaaagaccttgagatgggcaactaccccgaccagggccgcatcgagcaaatcgcacttatagaggagcaagctgctgccgagccgcccttgaagatcttctggcaatattaccaaaatctgctccagcagcaagaggacacaattatctttgatatggatgctgaggccctggagtacggtctgcgccggtttccagctctcaagagggtaaccatcacgcctgcagtgcacggctggcttttcacacccctgtatgagacgccgatgatccgcgcgttcccaaagggcttcaactacccaattccccgcggctggccggacaaccccgaggggacgttcacaccagaagcaacgccgtgggaggacgaggccacacggaaagactttcggggcttcggcattgtaacgcgcgcgctgggctcctatgcggaccaccatgtctctgagctaattataactgctaacacccttcagacagggctcaactgctgcgtcttcgaaacccataatgcgcaatacactgactttgcggctatccttcgcaaaccgggcttcgcccgtctcgacctctcccttttagtctgcggccaggaacgcacgggatggcccgcctatagggatggacttctccgtcgcgctctcagtggagcccacggccttgaacatattagtctatctacaaatattgaggaggacccggcgtccgacagtaccattccttggagcgcgggcggtcgtgatcaactcgtcccgctccgcacaatcttcccagttgatgagtggaagtcccttcgccatttcagtctctctggctttcatgtcgataaggatgacatcatctccttcctcttcgcactaccgccgaccctccgctccgtgtatctggggttcctctactttgttgaccacggtggctcctaccgtgaactcctcatagacatgcgtgatcaactggactggcggaagcgagaccctgcagatagaccggtcgtctcgctcgccaaacctacctcttataatcggatcgggcatgcggtctggcttgataatgaggtatgtgagttcttgtacggggagggcgagaacccgttttggagtcgtggtattgctgtggatgccaaaggactgattcgggatgcgtttctgcctggagtcgagtggaagaatgaaggcgactaggggagcgggcttggggtaagacaggggctgtttcttttattttctttctacaagagcgagatagatggctgaacatgtgtatatacctggccactatatgcagaggggttatatgcagctagtacatgatgttatccattaccactttttcttactattcttttttttgggagcttcaaattcgaagagagtgtacacaccattaaggagaactatctttctccttaacccactcattttttaacttttttttagaaaagacgaaaaataaggaactatgctagcccagcacatacatacacatccgcctgcaaccccgaggacctgcacgttctgatccctcgagtcgatggccaggcgaccatgggtaccaagaaggtgacagcatgcgggaacagtcactggctgactggcgactggcgttatccggcatttcccagccgtcctgactacgactgggaaggaatcgagaatggcgcgcgggactctatctcatgctactggggcaatacctcggacagctgctccaactgggcagtaggaggcctgaccagccacgataccagatgggccagggacacgaatggcagcccaacgaggataagaacgaattatcagagtacgaatattccctttccttggggctatctggtagaactgacacattgctccagccgaacatgtctttgaaggccagctcattggcgacttctttgattggtggctggagcagggcaagataaagaaccagaggccaatacctgccagcgcaagcagcaagttcccttgttcgagttcagaagactatttcctgagaccgcgcgcctactacccatggacacttgacggaaaacaaactgcatttatcaacgttctcctgtccgagctaggtagcaaaaaccgcttggaccgactgacgatcatgcttgcaagaccgaatgggaaaaaaaggcagcatgaggcaccttgagcaccttgagcactacctttgtattgaatctaactttgcccttgctccagatgtttacgggcaacgagccaacagaccgagacaaatacaagcgcatggacaaagacgctcaattgcagcctgtttaaagaggtgggtaagccttactgagtccactactattatccccatgtgccatcgctcaccatgtcgttcgctcaggcttgatcgtcagctacctcaataaccaggaagtatgggacaagttctgctccacatatgaagcaatctacggccactttggctcgtgggacaactggcacagacaggccgggtacctgccggcccgctcccctcaatgcaagacgagtggaaggaatatattcgcgtggtcctagattcattcgtcctacgggcacgggatacttttgatttcatgcttcgagaacgcaagtaagttcttttccccttgcggcctgctatatagcctgtatatatgcatactaacgtaagcgtagaactactcatctcctcgccactgatccgcccttcgacggtcactggttgtctaaccggtttgtcattagaatgtttctaaggttgtccttggggtgcaacaatatggatgcttccagggtataaagacgtgcatataacacatattcgaagtgtatagtctcaacttctatcactcatagttgctgcctttctaaccgttcaccccttcatccctgctctggcacaccacaggtgcctgtcctgctgttattgcagatctacagatctgccttcacaacatgcccacgccatcccactgccctgtctgtggatgcctgttaggaaatgagacggttaggtcttgcatattcgttgatctcctatattgagctgctgctttaccgaagcgacttcaagcagacctgcaatggtaccgcagtcaagtatatatcaacattgcgtggaggatttgtctttggcgcaaggcaaaaccgcatatttcaagaagcttctagttagatctgtcaagcatcatgcttcgattatgccagaatagccccccgttttccaaggcattaggccaagatcttgaatgtcgcacccgcatattgagtatgtccttattcaacgatagtaacgttaatagcatgcccatatacctctggtgaccctctctttccttaccttgctattgaatccagacgtacctacaccacgctgttccctcaaacatccaagaggcccaggaattgcatgataattcagccaagactaccctcctggaaatgcaaactggcagactaagcagataatgtgaaacatccaaagtatggcaatatttcagggtgaatcaggacctgggagtgatggtatccaagttggccatttcttttgaccagaacacccacatcaacccattattagagtcaactgtttcgatttttgtgagaaatctacagaagtgtcacggaggtgttgctcagttgaagcaactaaacgcgtattagcagcagatcatagctggacagaaataccactttacacagcagatgcgacacttgaagacttgcgggatattgtccaggaatcctggcagcataatactacactaggaatatgtcgataaaataaaatagttctcgttaagagaaccgtactgtgagatataactctaaatatgatgactatatctggacaatcgagatccgttttaaaaagcgaacacgagtttctctgacaaaggtaggggccgagatcttatatgatcattagaccgttggctgcgtggtaatcctcaactagagatggaacgattgtcgatggacaagagtcaatctgggtccaactatccagagatcaagacaacttcgacaatccgttgttctattctaatcggagctgatctttcagcatcttcttttcttaatgtgtcgttgaaacttaatggctctgctctgcgtgtaaaatctgggcttcggttgtgctcctgaaagcgcaagctatcaacgaggcgaatatccttcagacacagggcgtttgcgtttcttttggtgcagccctggagaccactatttttaccgtgaatagtgaatagagaaacgtataactccgtctttctgtggatgatattgttgcaaaaactgccctaacccgctattcataagtaccaataaaaaaggacagcgcctgaaaagaaaacatgcggccgaacacggccctttccccgtgagtatatttcttgcttctttagaccgcatgtcagcttgagggacttgagatgttggggtaaagaggaaaggcacctttgaggtgggagaagagattcctgatgagccgccgataacaggcaagctgtagttggcagctataatgaatttcagcttgttaagagatgcgatatccaataagcacgtactaatgctttatgtcgatatcgattaaaggcaatgaaatcaaaagccgcaggaggtgggtgatctgctggcaccttgggaaaaaagaactgctcgatggatactgcttcttgataacaagaatatatgtgcagattgtgacctgcgcaacaacgtggacttaagaggctttaaactacaagaattacaatcagcgggagaagtggtgagtgagggttagagaggtagttcgtctcctttgtggcagaagttcaggcatggccagtctatatagaagatatcgaaactcggttttggcatggggtagctaatgaagatgaacctaaacacagtttttatcacataagccttataggaaatcccattcttgggattttttctcttccgcgagcttcatatcctggccgctgaaagtgttgcactgggggctctgagagagcctaaaacgataattcatgcttcgctagaatttggctattggcgccaacgtgccatgataggttacaagaatctcgaccggcaccaaaggtcctttacgtgaagtttttgccaattacaacggagcaatgaagagagtgcatggagcaacgggtaagcatacgggcaaggataaggtcaaggggagtgtgcgatacgtttctctagacagccctcccataaaaagagaatagactagtgctgcctttgttccggtggaagagaaaggcatagacagtaaaagttgcataggcagtaaaagttgcgtctaagctgattatagcgttgtatgcttgcgctagagtgatctgaagtgtatagaacgtactctaagctttctcggccggctaccttgcgcagacatctatactcgtcaataaactcgctgctgtt

SEQ ID NO: 5911 - DNA, 6838 bp, Emericella nidulans
gcctctcatcttacggcctcctggcccagctctccacggctattgcctaacctcacagcctgtcttttccttccgcgttgttagccactcgctctgatattacccagccaagtaacccacctatccgacttatccaaccacccataaagataaacacccacaatagttaaggccttgaacatgatcagcagctggtatccgtaattaaagtgcggcgcatcatacgtaggaaacgtcaggagcgggacccacgccatgaagttataggtgaagatattgccagtcgccacgagcatctgccgcaactcggcgttcttttgggtaccttcctggccccatgcctgtatttcatcagcctgttgcctatataccggctctgatcgcatgaggaagtggaaaagtgaacctatgatgatcaacagctgcgcagccgcactaacaaagctgaggaaaaacgcgaacaacagggcggctctcgaaatatccccgatggagagtatgatatttgcggatataccaatgacacacacgatagcgcaacactccttgcgtctgccggtgcggtcggcaattgtttcaaataccaaggatgatatgacgctgatgacattcccgaatgtgggaatggtgttaattgtgcggtactgtatcattagtctttgaaccacaggttgaaaaatccgctgccttgaccggcttgggcaaccatgcttagcttgacggagaatagaggagacatcaaggataggagacgtacaggtcaggaaagataaacgcccacagctgccaacctgtatatatcttccgcagtttcttccagggtaatctgtctgatggagcgaggcccatgctcgcctgtctttggacagcatattctcggtcctaagtagcagttgtcaatcacaattcctgcgcatatgactagaggaacttggagcactcacctttttcgtcacccaaacgctctcgtcctactgggactgtctggtataacgaaatagggcctaacatccaaatgacatctcatagaaggaagcccaccatgaagagtccaggatctaccggcatcaatgagatccaacacttcgtccaaactccgtattgtatctctggcaatggcattaccggtaactagtttcaaacccatttcaggatactgcgctccctggcccgggaagacccagacaaggtctgcgggacctgcctttcgcacgggtgaaacgtcccaggagtccaggcagcccacagcaaatgcccgattggggagtatacggcggcggcatgctagagtgtagcttgcattcgcaaccttagcagggtttttggctagaaaatccaaactgagtgtgttgttgcgcttcactgtttctgggtgggttcctgaaaagactagcagctggggagtgcagccactgggggcttcattcacaaatgttcccagaaaagacctagcggactctaggagaacctaatagcagattagttggaagcctcttaatgccatcaatacacccacatgtccattagctcccccgattccgaatccgttgagtccaacacgctccgctttgtctttcggccacggctcacattccacgggaacacgaaggcaagcaggtccaaatggaactatattaaattagcagatacttttaaatcagcaagagggagtttactcttcggatttggtgttgaaaaattgatgttcggggggatcgtttggttctccaaggccaacgtcattttgatgatgctggttagggctgatgctccctcgctatgcccaaggttaggttttacctggagtggttagccagaatgcagcctcaagcgcgtattcctcttactgatcctattagaactcccccaatatcaccgaacacgttcgcgacggcccttccttcctggacgtcacccaccttcgtcccagtcccgtgacactcgatcatggccgtttgcgagaggtctgaaataccagccagctggtgacaacgacggatgagaagctcatggctctccgggctgggtataaacacaggagatctcggtccatccgagttaatgcagacagagcgaatgacagatcggatcggatcgccgtcccggagcgcgtgggagagacgcttgatgtggatggcgttaactgcttcaccacgcgcgtagccatcagctcgtgcatcaaaagaccgacagtctccagttggcgacatcacaccgagttcggacatagttgttgtcatgcgcggtgagaggatgagattacagccgccaacgacggcggatgagcactcccctgtatagagcgcctgacaggccgcatgtaaagccatcattgaagaagagcaagcagtccggatagtcatgcttgggccagtgagaccaagctcctttgatagtcggttcgagagcgcaaagtcgctatagcccgcgacacagtgcattcctagcccttgtggatctctggtttgaatgtccatccagtcctcgccaagtgcacctatatatagaccaatgtctctgcctctgtaagcagcagtgccgctactttctaggcactcataaactacctccatcagcaaccgctgctgagggtcaagaaggagcagctcctttggcgggattgaccagaaagagctgtcaacagccgccaggtcgacgtcaaggaagtgcccgtactctgtacagacatgaccaagctttcccttcggaccatggaaagcgtccacattgtaacggtccgcaggcactcgacaacgaccgctccttttgttgaccagaaactgccagaactgctggggcgttctaatagagcctggcagacgcagcccgacgccgactatggcaatcgggtcgtcagcccaagaggctgatgtagtacgaccagtttgaggggtggttttcagacatgataatgtttacttaaagtgcagaatacgcggaggacaaagaataagataaaaactgaggcaagaaagcttctgatgaacattcatgaaaagcgtactagtgcatccttatatgctatggcaatccgagcagctccgagaacattcataccagccaagctgatcttcatgatgattatgctagcctactgacgactgtattcatctgcacgggagaacctgttctcagagccttgatttctgatagaatcccaaaagggaaggcagtcttacgcaggacattaactaaaatcaatagaatagatcgccttgacgcttgggaatcgatacggctggatcgaaaacgtgcgcggtcgccaaaatcctacgtagcatggctgcttgatcaatagtgcgagcgatcgaaagtacgaagcagaaagcttacacctaaatttaatgtcagtcaggcacccagcgaagaaccatgtctgttcctgataaggagacggacataccaagctgcacttcccaaaacgtattaagccatgcatgcaccgataatccgcatatgcactgacaatctaccaagagcgcagatcgatcagaggacggttagtggcctagcctcaactatatctggccacatgccgagcagatcgtgtttcaggctaaaagtccagcatgaaacccaggtaccaggcaaccttagaatcactatgccaggggtattccatatttcttcgaaccgcgtctgcctggcagatgaaatgctgtctatgggacagctccccgtcagcttgtcagcggcaagacaagcgatacaggacaaaaggctacagcccacgatctgaggccggtcagatcaatactctgccagtgctggaagatcgtcgcgctaatcaaggataaagcatccgctgggccacccgcagtggcaggagcaacttcgccacatcggcgttgttcgggggcggggttgtgcccgtgcacagtcttatccactttctgaatcaatagttcgatttatagtgaatgagttagctacccattcatcgttgccatagttaaagtttgtggaataagaacgggatgatggcgggaaattgacttggtgaggccgccgagatttctgggggcagaaagctggcagcacgtgacgattaaacgaagcaccgaataatatatacacaggccggttaatataaaacatgtattaaactccttatcttccgtatatcgcaggctgtacgcctaaatccgctgcctggtagactagcttttttaccctgggtaattttacccaagcttcgctctcagagaaggctatcaggattcattggtgaatatcattggccgaggtattttaaaaataataagcaacaacaatcacgatgcggatggaacgagcagatctggtataggttaaaatgctgacaaattcgcaggaaacttccttaggttgttcaagctgactgactggacgaactgagctcggtgatcgcgttcgatcatctgaggagctcatacgccgaagtcctccggctctctatggacggacggatgttcaagccatggtgggttaaccattctgggcgcattatattggctcttcttacccaccctcgaacatcatattccagttttcggaggtctgatccggcttggtcgactgattagccttcgaagctcaaatcaatcctttgggccacttccaacctagagaccggcctggtacctctgcaatatactgaggcgtaggggatcgaccctattgggagtttgaaggactgtgtgccgatgataccatagctgctaacttcttttgtttttccaggcttttctttttgagagctgtcgtttaaacgaggaaacccaatgcgaggtatattgagaattgatctcctggatctacaggaaggtagctagctcaagttaagcttgagcacggcctatgcatatctgtccgctgcgtagtccgtcttgggcggggctactttcagtgaagcagacggctctaaacgacaataggtacgggcgatgcggtcatgaagtcaatcggcaatggctgcagatgaaagctggattgttcggcagaaaggaatctgtatatgtccagagcaacgtgctggagtatcgctggcacgcagatgccgtaataagagacagtttgcctaaggagacttcggttataacattagatagtcagctgaatcacttcactaggagtgaacagtggtggtctccggcctaagagggtagtgggggagtttgagtcccctagggctagtagagtctttcaaactgttagttctattcttactgtatggacaagatcctggttgtgcgagactattgcataatgacgttgctagcgagtatgtactgtaatctccgcaagggccgctaacggattaatggattgaggagcaatcttggagcgctgcttgtgatgagaagccgtctcttcggttattggtctgcgcggatgcgttcccaatgaatcaaatgtttagatgcgtgacttgatttgttttgccgtctcaatgtgccggcgtttatcttaaactgtccacagagaatgatgacggtatacttccttgtgcggtttagatcgaggctccccaattcttagaattgtatacttccttgtccgtctacaaacaccggcagcgatggcttttcgctttctaaatttaaagtgtcgcttctcggcgtctcaagttcacatactatggtgacactttctcgatgcgggtaatctcccaagggaaaggggcgtctatgttatgattgcctttgaatgaccctatctaagaaatacctatgaaaaatctgtaatttccagcagccgcgtggttgcctatgctcatactggacgctgacacgccaaatgtcgaaaataacaatagtcacctgcacatagaggcgttattgtaagaaactctaaggcagacgcgaataggggtcttgactgtgccatacagtatggcgacatctccaaaccgaaaagaatttgtcaaatctccccagacttgctgagatcgtagtagcaatgttcacgctggagtcgatgccaccacctgccatatacagcggcagaccctagtgttttccgggaaacgcatcaggtgctagtcaaagacatccgtcgacaaaaaggtgcacggacgaactgctccccctgccgagatagacaatggaaagaattaagacgtaacctctggggaatcaacagtgatggcgagatccgacgaggaccgcgagattagctgccgtcatgcgaccgacgtcgatgtcaccaatgcctatcatattaatatcctctcatccctgaatggcaaagcggcgggacggcctgcctaggaggtacttggacaatatcagaggctagactgcagccaactattcgatcccaagtgtatgcgctggtcctcacaccacttgtaatgaaccacccatgtgctagtccaagaccttactagctatgacaatgctaagggatacccccggtcattgagactgatcttggcacaatctcccgtcgcaattcacatacatggccgggtctggatccgagtgattgcccggaaaatgagtctcaagcggcgttgcctgccaagtgggcagcctgccagtagtatgccacgaaattatcactgattcaagccaagcagtctccctcaccctttcttattccgatcaagcagccaagtcatcggacgagtttgtggtcggagatgtcgacaccttgcattatcccatccgtcgccatgccggccataaactcattcaaccataacccgatcgagtatcacgagttcgctttgatcgtaaattcgatatgcaggtagccgttgaaatatatccttaaatgtatccatcccatgtttttgacacgccaagatggcgattgtatgtcggtagctgctagttggtgggcagggacgaaa

SEQ ID NO: 5912 - DNA, 10788 bp, Emericella nidulans
tgctttaccgtgagcagacctcatccgagatgtggaattcgtgatttttgacgaggtccactacgtgaacgattttgaacgcggtgtcgtatgggaggaggttatcatcatgcttcctgagcacgtcactctcatccttctttctgctacagtacccaatacccaggaattcgcctcgtgggtgggcaggacgaaaaaaaaggatatttatgtcatctcgaccgcgaagagacctgtacctcttgaacactatctttgggctggaaaggacaagttcaagattgttgactccaacaaaaggttcctcgaaagcggctggaaacaagcagatgatataatatccggcaaggacaagatcaaagctcagaaagcagcagaagctcaagcgcagtctcaagcaagcagaggtggttcacagggacggggacggggacaagcgcccgccaggggtggcccgaggggagggggaggaggacaacgtggaggaggacaacgaggccgaggccagccggcaaaccgaggaacaggcaacattgctcgtacagggagaggcggcggacgtacaactgccgcacaggacaagactgtctgggtccaggttgtgcaacatctgcgcaaggagaatctgttgccagcctgtatcttcgtattttctaagaaaagatgtgaacagaacgccgactcattgtccaaccaggacttttgcaatgcgtccgagaaaagccttattcatataacgatcgaaaagtcccttactcgactcaaacaggaagacaggacgctgccgcagattcttcgacttcgcgaactgctaagtcgcggtattgctgttcaccatggtgggcttctaccgataatgaaagaaatcgtcgagatcctgtttgccaagactcttgttaaagttctcttcgccactgagacatttgccatgggcctgaacctgcctacacgtacagtggtcttctcgggatttcgcaagcatgatggcaaaggtttcagagatctactgcccggcgaatatacccaaatggcggggcgtgccggtcgaagaggtctcgacaacgtcggctatgtgattgttgttaactctggcaaggacgaggcaccgcctgctggagcgttgagaaagatgatcctcggggacccaacgaaacttcgatcccagttcaggctgacttataacatgatcctgaatctactgcgtgtggaagctctgaagattgaagaaatgatcaagagaagtttcagcgaaaatgccacccaggccctgctcccagagcacgagaaacaggtacaaatttctgaagccagcttagaaaagatcaagcgagagccctgcgagatctgcgatgttgatctcgctgcctgtcatgatgcatcgatcgagtatggaaaattgacgagcgagctacacctcaacctactttcatcgcctgtcggcaaacgccttcttatgccgaagcgcttagttgtataccggaaggtgattaatggatctccataattagccgcagcttaagctgacactttgcaggatggataccgaaccgcaggtgtcattgtgcgagaagtcggagggggccccaaccccgtcatacagattctcgagataggtaaactgaacagcaagcgtcacccaagcgagattctcccattccttccagcgttcaggggatttctgaatcctctaccgacccgtgccgccgatatgactctgaaagtttttaagatcccaattgcggatatcgagtgcgtcacaaacactatagtcaaactgagtggcccaacgtggtacctcaatatcaagaaaggttggtctcaatgcatttggtacaagggtcttgctgacattagtttaaagaggcaatcagattcgcagacaaggagctatccaagctatgctcctcgtggactactccggtctgggatgagctagattgggctcgaatcaaggagctccaattaagggacatcctagataaacgacgagagcaggcaaatatcgcccagtcatgcgactgcctgaaatgccccaaattcttgaaacacgtatgttcatattctaccctttgacgattcctgccatactcacgaccttttagtttgagatgcaacgtgatgagtggcaaattaaggagaatatctcgcagttgaagcaactcatgtcggatcagaacctccatctactcccagactacgagcagcgtattcaagtactaaaagacttgggcttcgttgacgaacaatcccgtgtgcagctgaaaggaaaggtagcttgcgaggtaagacttcaaaataaggtattctccataaatgtgctgagacatgtgttagattcattctgcggatgagctcgttttgacggagcttatattggaaaacgttctcgcggaatacgaacccgaagagatagtcgctttactatccgcttttgtgttccaagaaaagacagaaaatgtgccgaccttgaacccccgtctggagaagggcaaggaagcaattattcgcatttccgagaaggtgaacgatgtgcagatacagcaccaggtccttcagtcgaccgaggatatcaacgattttgccagccaaccgcgatttggactggcagaggtggtttacgagtgggccaaggggatgtcgttcaaccggattacggatctcacggatgtgatggagggaaccattgtcaggactattactcggctcgacgagacctgtcgcgaggtgaagaatgcagccaaattggttggagatccaacgctgtacgcaaagatgcaagaagcgcaggagaagatcaagagggatgtgatcttcgcggcgtctctgtatatgtaggtagtctaggcgtcaaaagactgtaattatttagtacggggtgtaggtatggttccctgtctcggaaaaccacgtgggcaccgccgggtctttgtttttttttttttttctgccagaagaattcacaaacgcaagacgcagggatcaggtacagccacgccagcagggcacagaacagtgtaagcatagattctattaggcacataactgtgctaattaactgggaccagattcagctttattgtaataatatccagtgacctgaactcttttggcgtaaccctttcacgaaaattctcttaccgcgcggggcggcaggcggtctgattcgctgccctagacgcggggccaacaccgcctgaaatgaaaatccacgagagaagaaaaccagaagtgctgaggcctcctaaatcttattgatccctctttttatctccccctccttgtctcctctgaccgccgtctgtctcatttatttgtaccggggtttccctcagttcctttcagtcttgatttttgcaaccagggggtcgttgccggagcgagatggatgttgcagccctgcggaaccgcatccagtccacgctagatgccaatgctgatatcagacggcaggcggaacttgatctgaaatatgttagtcctgggctacgggcatgcagatggtggttttgctaaccaaacctcttccattccgcaggccgagacgcaaccgggtttcataaatgctctgttggatattctgcagggggagcaggtcaacgccgtccaactgtcgggtacgttttgtcgactcctcatctccttgctgatgttgaatcggagcccatcggccctgtgaaattatccgccagacccgtgccttgaaccgcctttactgactggaagggatcgatagcgggtgtttacctgaagaaccgtatcaaccgagggtggtcaactattgaggatagtccgttgcgcgcacctattgcagaggaggagaaaccaggtttccgcgagcggctgattcccgccttggtttccaccccccccaacgtccgcgctcagctcgttcctctacttcagaagattcttcaacatgacttccccgaacaatggcctgggttcctggacatcacaatgcagctgctcggcactaacgatgccggttcggtctatgcgggtctgcagtgcctgttagccatctgccgtgtgtaccgatttaaagcgggggataaacgggaggagtttgacaagattattgagcactcattccctcagttgctcagcataggatcgaggctcgtggatgaggagagtgtagaggcggccgtagatgctccgcatcgtggtgaaatcatacaagcatgctatttacgtgggtgatgcaggaagccaagaagcatatgggtggttagaactgacgggtgaatagttcgagctctcacctcatcttcaatcgcaccaggcgacagtcgactggtgcactttgttcctacggatcattgccaaagaacctccggcaaattctatgatggaatccaaggaggagagagaacttgcccattggtggaagtgcaagaaatgggcatatgccaatctgaaccgtctattcatcaggtgcgtaggcctttcgcatcagtggtgcttctcacctaacatggatgtttagatacggaaaccccacgaccattcccaagtccagtaccccggactactctcagtttgccaagtcgttcattacaacattcgccccggaaattcttaaggggtacctacaggagattgtcaaatacgtttccaagggtcaatggctgagcaacccagcactttcctacactttgatctttttcgaagagtgcgtcaagccgaagtcaatgtgggatcacctaaagccgcacatggagaacctcattgctcacttcgtcttcccgattctgtgccagagtgacgaggacatcgagttgttcgagacggacccgtctgaatatctccaccgaaagttgaactactacgaggaggtctcggcgcccgatgttgctgctacaaacttcctgattactctcaccaagaaccggaagaagcagactttctctatccttacattcgtcaacggtattgttagtaagtatgaggctgctccggatgaccagaaattgccaagggagaaggagggcgccctgcgcatgattggatctctggcttctgtcattctggggaagaagagccccatcgcggaccaggttgaatactttttcgtacgccatgttttccctgagttccgcagtccccatggtttccttcgtgcgcgtgcctgtgacacgttggagaaatttgagcagctcgatttccaggaccccaacaatctgatgatcatttaccggaatatcctcgaatccatgactgattcagaactgcctgttcgtgtcgaggccgcccttgctcttcagcctctcattcgtcacgacgtgatccgcacctctatgcagcagaatatcccgcagatcatgcagcaacttctcaagcttgccaatgaggttgatgttgatgctttggctaatgttatggaagatttcgtcgaggttttctctgcggagctgactcctttcgccgttgctctgagtgagcagttgcgtgacacatacatgcgtatcgttggtgagctcctggagagaaacgcagccaagggcgaggaggacacgtacggcgatttcctggacgacaagagtatcaccgctcttggtgttttgcagacaattggcacattgattcttactctagagagcacgcccgacgtgcttttgcacctcgaaacagtccttatgcctgtcattagcatcacccttgagaacaagctttacgacctctacaatgaagtatttgagatcatcgacagctgcacattcgcctcgaagtctatttctccgaccatgtggcaggcttttgagctcatccacaagaccttcaaggcgggagctgagctgtacctggaggacatgctgcccgcgctcgacaactacgtggcgtacggttctcagacgcttgttcaaaatcctgcctacctcgcagccatcgtgggtatggtcgaagatattttcaatgatgagaaagtgggcggcgtagacaggatctgtggttgcaagcttgccgagactgtcatgctaaacctgcgcggctatgttgaccaatacatccctgtctttatcgagcttgcgatgcgtgtcatcgatgctggagaagcgcgtaccaaatcttaccgtctccatctgatggagatggtcatcaacgcccatatattacaacccagatctcagtctccaagtcctagaggccaaggggtggaccaacaagttcttcagcgcctggttctctagcattgacagcttcagacgtgttcacgacaagacactgtccattgtcgccatcacctcgctgctcactttgaaccctgccgacgtgccaactagcgttcaacaaggttggccaaggttgcttcagggagttaccagactgttccacacattgcccgccgctattcagagtatgtattttcatccagcccaagcgacttagactaacgttacacagatcgacaagaggcgacaaaggagtcggacttccaatacgaagaggaagacgaggatgatgaaggtaacgactgggagggcgaagtggaatggactgagggtgatgatgaggctggtcccgagggcgatattcccgacgagagtgctgcttacctggacttcctgaacaaagaggtgagtgatggcagcatgtgcttttcagcttgtggctaaatcatcaccaggcggcaaaattcggctctttcgctggggacgacgatgacgacgagcttgatgaggagagtttacttgagactcctctcgacaaggttgaaccatatgggctgttcaagcaggtgttcatgagtacgtgttactttattcctctaataggatttagctaacttgcaaccagacctccaacaacaacaacctcagctctacgaaaatctgacgaatattctaaacgacgaagagaagaagatcatcgagtctgtgttccatgaagccgacgcaaaggctctggccgcggccaatgaagaagctgccaaagcggctgccctccaagctaacgggaatcaatagttcccaacgtcaacaaaaagcaaccggtagccgacatatagtcagatcgactctggaagccaagcatagtctatgatataaaagatgcattgtcatgtcggtttggcgtcgctttttttggacacatctcttccccttgtgtcgacggccaagcagccactaaatccggcctaacgtgacctatgctcgttgtttcttttcctatttagaacgctttgtcgcaagattcttcttcccttttcgttttaccctcatgacccatactctattggttacgatttctgccaaaagtcccactacccttccctgcacacattcttaccctccctccttcctgaaatccccgagttaatgaacatgaatacacttttcttctactgtccaccaaggatgagcaagagcaatttaatctgtcatttcccatcgaggaacaagacaaccgtgaacaatcacaagagcaaggaagtaaccaccatagggactggattccagatgttaaatattagcacgtgacgtatatagttgagacacttgagcaccgtttcctgtaacattcaatcccacccaacaaatactctaagcttctgtcagacaccaagattatgttgtggagtgaatcagggtgattggccatatacagcatcttagccttcatgcacgtgaacaatcacgacaaagctcttggtcttctatctgcgatatgatgctctagacccgcaacgtcattatgatgctactaaaaacgtacatagtaacttgatacgacgatatcaccttatataaatctctcttctcacaagttttctctaatctgaatcgcatttatgaagaattaatagtattctcacgctcactgtttcgaggtaagctaccatcatctgtcaatcttctactacgagcattcatttaacgactccagcccaccaccacaacttgattgaacaacctcacctcaccttacaaacctttctacaaccaaggaacaagaatcaaaatgtctgctcagttctccggccgccaatctccaccccccgagagtcaaacaggcgcacaagagaactcccccccgggttccggccgcacagaccccaagttcgcccctccgccagagtacgcacccaagtcaagctctgagggcgagggtcaaagccagacggcgggcttgagcagtaacccgaagcatatcctggaggatattgaggcagcaaagtataagaaggggacaggaaattgacttaaggatcgtgttctgaggatgaatgcatgacttgactctaattatacatgaatatcaccacttaagatggaattgagacatctttcttagtactctgttattttgcatggatcttctcttaaagagtagtttattaaaacattgtagcgtagaatttggatgaacatgctgcgatttttctgccaaaacacagagtccagctagatgacggcttcgactttccagaaaatctctctgtaatgttgatgtctgtttacgggtgtcttatgatctagaatgacgagtgcgccagttatgaccgcggtactttgccgaggtctataaatgaagaaacgttactgagatacgtcacgagactgtgccattaggctcaatttgaaagcttcttttccagacaataaacaaaggggaatagagtatgaacgtggagaaaattgaaaggatgtcatgctaaaaacacatccgcgaaagtcattaggacgttaaaagtcatcgtcgaatacaataattgacaaagggtgactccactacgccttctcggtcgtagcaggagccgcctgggcagcctcgggctcaacaccaggagcaggggcaggggcagggttagactccgtcgcaggagagctgctttcaccctcagctttcttctcctcagtctttccagccttcagatccgccagtcttcgagcctcagcgtgaatatcgcgaacttgcttatcggtctgagagtaaaagtcacgcagcttccggcccgagggggtgttgatagccttctcaaagtagctgtgcaagccgcgccagctgttggcggccttgtcgctgatcttatagctctcatcaagacccttggcgcgctcgctggcaccagttttcttgtcgaagttgctcaggacgctggtgaagcgagacgtgaagccatgctttttgtcgatggcaatagccttctggatagcctggtcgctaatcgtgtatccatgggcaaggtattctgcaataatgcgggagcgaggcttgtcttcctgctcgaggtcgttttggttctcgtctttagcttcagcggcggtagcactatgctctcctgcgatctcatcaagggtttgcgcggccttaacggtgactacagaggggccgagctgggtctggtcgaggagaagggcggttttagcagccctgttccgtgttaaatggtaaataatgacgatatggagggtgcggtgggtggtttagacttacgcatccttttcgaatgtcacggtcgccgacttaagagagcctggctcgccggaggtgggagtaactgagatactgacgatcttgccactgttggactcgttagataaataattttccttacggaagaggctgcataccagaagctgaagaagtcctggacctccttctccgaggtggaggggtcgatgttggaaacgtggacggtggtgcggtcggacattttggcgatgaagagttggttcggaatgcaaatacagatgagaaagtcgtagagcaattgctaggatgttgacctaggaacaggaacagagtggccgcggggtatttattctagacgatgacgaacgcagccacaccgtacgttatgacgtttgcggcacagccacggtggggtggcccatggtcatagcttgctttcatgtgcaaacgtcaggttgatacattattttagtttaaatctaaacgagctggaaggcagtagaattcgacaaaaatagagttgattaaattcagagaagaggacagataatgagagaacaaactatctatctaaatctcgtgccataagggccacctttaggcgacttttaccagatatcgaaatggtgtccgttacctctatgaactatggccaaatatacagagtcgccaggcggtaacaagagctctatcgactcggaatgttttagactcttgaatgtgcgtgctttttctggacgttaagctcgtgctcaagggcccgaatgcgctgccgcagcacctcgttctcatgaacgagggtttctatatctcgtgatgttatatcatctgagtgaactgtgttttttgacctcgatggagttcgttgctgtgagaaagagctcctccgcgtatacaagtgcgagccatgtggagtattggtcgatacgtcatgctttcgttcctgaggctgggatatgactgatataaggccctgggaaggaggagacgcagcagatggccgccggctccgcccgctagtccttggcccctgtactactggaaagtatgaagcactcaagctcgaggaggagcgattccgccgtgatactgtggggtatgtaggtccggctatgtatgctgacttatgtagtgtatcgagcggttcattgagcgtggttgaggtggatgatgtcgttgacgcgacagaggaagtttggttccgcaggagagagagctcccttgacaaacggttgacctagcaggcaacggattaggccagggatctaaggggatgcaggtggtatctaaccattgcctcttgctcctgctcgaggatcaaatgtatatctgagggcgagaggggcttcggttgccgtaggggtccttcca

SEQ ID NO: 5913 - DNA, 7207 bp, Emericella nidulans
cgaatcaaggatgattcggttccttttagcatagctcgccctcccataaccggcctcgcaaaagctcaaccgactccaatgacctcttcgcatacggtccgcccgacgctctccggtcagtccagaagctggagcatatctgaccgtagtgtctcggtatcgatcgagtctggtgtcccgggtaagcaagagattgagcgcactagggctcttcttctgtcatcgggtataaaagctcgagagattcgccgtcgggccgaagaagcacgcaggcggccccctgaatttcttcaacgctcattcggtgcggactctgccacacctcccgttccccgaatatatgagcatgaagtggcaagtcagagacttctcagacgaattgaagcgtctcacaattcctttgacagctcgatggatcagataccgaaggctgcatttttacctctgaagtcaaaactctccactctcgaagacttggtcgaaaaatcactcaatactcgcgttcgcgttgcggccgaggaagccgaaaatcttagtatgcagctcaacactaccagcactctcgccgtgaagcagttgagtgacacgctcgaccatggtctccgaaaacggcaccgtcggctgcgctggctgcggcgcacgggcttcgtaatgctcgagtgggcgctgattgggctattgtggtgggtgtggttgattgtcgtggcttttaaactccttcgcaagcttttccatggtttggcctctggcgtgaggtggattctgtggctatgattgctgttctcattccagctatatacccctttccacgtttagtatttttaatgattcacattattgatgtccttggcatggcttctgttgcatttagatcctatctctgcataaactacgaggtcagaattaatgattcctaacttgattctgttgactgtccttacgctcactgcaggcacatagaaaccagttgtgcagagccttgtatttatgatagctaagacttttcattcagtctcgtcgattgatggcgacaaattccagagcataaccattcattaggtatccatcacgtcttggtccaacttacacggtgccgctacttacatactaattcgtcctctgaaatcttgatatggaacaggtccagatctgtcaacgacacgcctacgtcttggcaggttggctgaggtcaagacttgccttcacaacgccaatgacgcttttccagccagggtaagcccgtcgtaagtcgtctactcaagaacatgaagcattcgcgtgcaaatctggcgatacggggtgttcatcgcgtcaagcgtatgcacaagactagattagaaagacttcgtcccaaacagagcttgaacaactgttgacagatctctgcgtaggtcgacgtcatcgtccaccttcgcaggtcgtctcggagtctcagatcctcctcgcgcgtttcctcgtcttggatcggtctaggcaatgatgagatgctggtcgcttaccatgtccccttcccgccacggccgcgtctgatcgacgaagccgttagcgacgaaaacgacaaacgctcgctacttaccggctctttttgagttcattgcggaaggcgctcggacatcgcatgccggttttaatgtctggctttctcataacattcagctgctcaactttgttagcggcctaaaccgttggaaatggagaggctgttgagatttttgctcagctgcgtgacgtcttcctggagaatgtcgaggggactgcgtaactgctgctgctcggaagtcttccaacgcgttagtgggttgtggccgtgtttgacagcactggaccgttcaagactggtactgacatgcagggcctgttgtgaataaaaggtctgttcctctagagcctgtttcttagttagcgggttggtttggtactttaccgcgctggagcgtctgatgccgcccttctgtgggcattttatgctctggacttgggagtcactcttagacgacatgttcaatttcttctatggacggagaaccggtgttctagtggtgatggaagttgtctgtgatgttggtatgaaactgatatctggataatcctgatgcggaaagtcatacttgaacagagcgtatttaatcatttataccccctagcaagaaagaggtctttcatgatctgtctacgttgttaagaaaacaaaagtgtaggtcaatgggcttttatcgcctccgtctggctatctgttattcgtcgatacgcaacaatggcctttccttgaaagttcagatgggaatctttgctaggtatgttttcaatgggcgagtcttagacgagtagcacagaaaaagaaacatgtttcaaccgaaattgcggtttgattgtccgttttctgatggtgtgcaatgtgtctttggtggttgttggctgcgcctctggcgcctctctgccgattattgattggtataagcatcatagacagaactgccagtcaacaactagttaacaaagatcaggtgaagtaagctgtaataacgggactaacgttgcccggaaattcgacgcttgttgatgaagtgagcaggaatctgcgctcctatagtcaagtaggagccagcaatctccaaaggacaagaattttctcccatatgctatgaatccttgccagatgagcggtcaaactaggataccgcgttcctggtacttggccaatatattaacgagataagcaggctttttatatctcatgacatgtgaactgcggtgatgtacctcaaatatatattttcatatacacaaaaagcgagtggtggcttccttcccgccttgtggaaaggggcactaaagatccttaattacatggttgaaactcaccatatgaactgatttcagttagtccctcaatcatatcttagagtaaggtcctcggtgtctataataaagctgatatagttcggcagaccgctgagtacgagtggccgtgacgcaagatctgcactgactcacaggcacggcactgtatggcgtatgcaggagctggagctctgacggtccgttaccgtgcggaataatacccggacagcttatttataggacaattacgcggattgctatttgcagggcagccgagtacgatgacgggaccaaaccctgacatacccagaccgagtgtaccgcatgtgtaaattacggtattttattatctcaaggtggccatgggcgtatggaccggtcagactgtcacacgagggacgggtcggaagattgcgtcgaacatccaaaacttcagctcctcgaacctctccctcctccgccactatcttcgttctttcatcgcgtcaaaggaaaggtccgtttgcgttttcccccttccctcgatcaggtttgctaccccctgccgtgtcttgtttcccgttcttgttctgggcctctcctttccggtttggcctggcggcgttgtgccctctgccctaagtttcgtcagggccaggccgccgttcgttaaaaatctgcacccactgcaccagcggaggtcattgctcctcccccagcccctcgacccgagattcataaatctctcatacaccaacttgatcttctggagctgaccgccgattcttcaatcagatcgcagcagcataaatctcgcgggagtccaccgattccctttttttgagaccttcttcgtcatctctacccctcatccagccagcctttgggattctccgggtccaaaggcaccagtcaccacggcttacgaagccggcttcctgctccctcgtcacattgtatcgcctcgacgccttagagacactcttaacaacatcccgcctcctgctactgcttccacgagtctcctccccgatcggcgcgttattttcgtccaccttgacgcccactgagctttttccctcccccattgagctgccgcataggacttctctggcggttcttcctcttaagaagaaagggtctaggaggcttggtccagtcaactacggttgcgaaacttttcgccctccctagcacgcagtcgcgtataaatctcccaacctttccctctctttacttgtccagtcgtattccgtgctacgtcgccgcgcatggttatggcaccgactgcttgtgtacctgctgaagtgtgcatgcctaaactttatgacaaacccgacttttatgtcaataatatccaccagttcagcaatcatgccccggatgatctgtcgcaatctcggttggctgccaggacctggtcttgaatgtgctgaagaagcgagctgctgaggtcgacaccgaccgatgcgctcctggagaagaagatgctttctatgtggcagacatgggtgaggtttatcgccagcacttgcgctggaaaatgaacctaagccgtgtgcgccctttttatggtatgtcttccatgctttcttataacaggacttgatgctaacagaactagcggtcaagtgcaaccccgatcccgaggtcctccgcctcatggccaagcttggaaacggtttcgactgtgcttccaaggcggagatcgacatggctctttcgactgcgttgatcctagccgcatcatttatgcgcagccctgcaagacaagtcgtacctgcgtcacgccgccaaggttggcgtcaagcagatgaccttcgatacgccgatgagctgtataagatcaaagcctgctatctgaagcagagctctacctgcgcattctaaccgacgacttaaacagcttgggcaattcataatgaagttcggcgcctctttgatgtggctcgtcagcttcttgagctggcccaccaacttgagctcaagatcgttggcgtgagcttccacgttggctctggtgcagaggaccccaaggctttcctcaaggccgttcaggatgctcgcctggtctttgatcaagccgccgagatcggccacgagctgcacactctcgatgttggtggcgggttcaccggggagactttcgagaaatttgccgccgtccttgacagcgctctcgaaacgtactttccgccgaacatccgcataattgcagagccgggccgctactacgttggtggagcgttcaccctagcggcgaacatcattgcgcgccgcggtgtgcaggaccccgagaaccccagcaaggacgcttacatgatttatctcaacgatggtgtttatggaaacttttcgaacatcatctttgatcaccaacacccagaagcacgcattctttcctgcgcgtccgagattaatggtcgccctgtctccgaagaatgtgacctattccatttggggaccccacttgcgatggtcatgatcgtcatcagccagcgcagcgtgcttcctggtttgttggacgttggcgactggctttactttgaggaaatgggtgcctatacccgatgcagcgcaacacgtttcaacggcttctccgataaccatgaggtgatctacatctctagcgaggcggacgcctctgctctccttgaatattagcttagatttggtttgcttttgttgtgcgtttaccagccgttgtcagtccttaccgcaataataccaccttggtgaaaagaggctctctgatatggagtagacctgaggtttgattgaactatcgctgttttaaaagtcttctctatggttagtatatatcatttaggtatccgacggtgtctcgctcgcatctatctctaatcacgtctatatcggtcatgccgagccagctcaacacgaaaaaaaccctccgatctatacaaggcgctcaacattcaactccgccccatcgctttgcaccaacgccccaccatccaacttcttcttccacttcgccgattcataccttgccaggataaatgtaatccgcgcaactgtagccggatcagcagcatccgccacaacttccgagctcgtgcacgtccatcgcccaaaggcccagttgagaatgtagtacgctgagtcgctagagtttgaaggcgatggccgcacatccaagtcatccgacgaactcgccagcggcgtctgcgtcgaacagcgcaggatccccttaatccggtaaacctcttccttgggagctgaggagaggagcttttccaacgcgggtacgtcaattgtcgatgctcctgttccttcggtctgccgtagcgtaacagacaaaacttctacctcggactgatgcccatgctcgtgtccatgcccatctgcatgctcatgtccatgttcatgtccgttctcgataacctgctttgcaaacagcgccccatcaatcccaagcagcacatccttctccaccctccccttgtcactttttacccacggggtttgaacctccagatcaccaacccgatcaaggacctcatcaaaccgtcgctctgacacatgttcccacttattaaacacgataagatccgtatacctagcctgtatcttcgcagtgtagctcgtgtcctcgtagcccgcccaattctccacgtcgatgacagacacaactccatccagtgtatacttgctgcttccgtcttcattgtgtggtgattctcgagaaagtcgattcacttccatcgccaacgtagcggggaatgcgctcccgcttgtctcgatgatgatccggtctggatccacagttgattcgagttcggagagagcgtcagagagttgccctaccaggttgcagcaaatacagccattgaggagttcgcggacgcctgagatggcggaagtggaggcgagttgggagtcaatggctacgtcgccaaattcatttttcagcaaggcgagtttgtatgatttcgggagttgtggaagaaggttcaataataatgttgttttgccggaaccgaggaagccggtcaggattgttattggaattgaaggcattctgttttccgtttccgtcactttttcgactttcgcggggagaggaaggttaggcgctgctgagttcgagagtgagatggatggaggggaagaggggaaagacatcggggctcgataagaggttgtatgcgcgctatgcctgttcgggacgggccctatacccgttgccactgatgtacaccgggattctcgatttcgtattccacttaataactagctaatacatatatactattactaaaaagagactgacgcgaagaagcatctgtggtctttacttgccatgcatactgcgcatcgccgcagccaactttcaaacaaactccggcgcttctgaacggtc

SEQ ID NO: 5914 - DNA, 8397 bp, Emericella nidulans
tgtggcagtctcgatagtgagactacagtagctcagtcgtcaatcatcgggtgccgcatggaacgggcatcgggaacatgaacggacggccttggacccggagtatccaatgatctgaatgcgccagagccgtagaatgcgcaaatccattcagaaaaagtagcgcttcctactgactgcgcaaccgaaacaagcatcaagtgaagctccgaggtcactgggttcaggcagtggcacgtaacgcgtttaatgacgaccggaattcatacctcgcaagcatacagagccaccacttcatacagatcacaagtaaacgcgtagatcgacagcgcaacagtcgtctgaaggggtttctttatccattcaaagcgctcggcgacggccattgtcgacccccttcgcctttgagaggttgaaaggctacagtaacacgtgacgtacactaaaccgctttaggtccccccccgagcgggaacgacgccgactcatcattattgcggcggtttcactgcgacgctggacaacactgatcgattgctctcgattccaattatcgtcgtctcatactcaatacctcacagctcgtcatgggtgttccatttgaggccctgattccttatggaatcgtcgttgttgtacgtacccccgccgaccgtctggtgccgtaacgccgtgaagaaccctggtcgtccaggtaccagaggccattgggctatttgtgtcatggagattccgttcttgcgctggaaccattttctgtcaatttgttctaacaaattcagatgttcggtgtgaccggagtcggtctctcggttgtgaagacttatgcgaatgacggcaagaaagcgcggtggaacagggatctgtgggatagagtaaggataccccgagaccccgtcagctcagctcatctatggctcctatggctattgtaggcgcgagttgcattggacgaaaattggctaatgaccctccagcaaagtatgtgactacacaatccaacaaccaacccgcaatcgcttcattaccattcgcaatgactaacctaaggctcatataaagtgatggaaagagacttgagacttacaggctctctacgaggtcaatcgacaaacccggaggcgccgaagggtttcgaaatcaacaacccatggaaggtcgagaaacgcctctactagatttgcgttcactcccaatcgtccctcttcacctacatccttaaaacaatcccctgtcataaatttggtccacgcggtacaatttctattggtattcacctcatgctgtaccagcgatgcgagccattcccccttgatccggcaacttctccagagatcggactgggcaacacgtcatacatgtatgtgctttggtggaaatatctctagatctgtttgtatcataccatcaatgccgatgacgttctctcaggttcagtatatggctgcatattggagacaggaaccgccaatgacaccagtacatgttctaatgtggaaccgtgtcgatgtatgagcgcggcaccctctcaaggtataaactgaattatcaatagatgactcagtagatctcattcaataacgtccacgttatggtagtcgcgtatcccaatccgcgttcagcccgcttctatacgagaacccaacaagcagaagccttgggaagcccaagcaagctttctctcatacattgtcaaccaatggaccaagcaaaattacgctccatgtaaatgcaaccatatcacttaacatctcctttctatgccccttcgactaacacatatatacttcactcccttgtatggtttcacgccctcgccgaggccacggcttcggcgtggatcgatgttgaggctctcaaccttaatgccggacggaagccagcctcgcacggagaacgagacagacgcggaatttggcataaggctggagttgagctggatgcgagttttgcgcggcgcagtatggaatattgagaacggcgatccagggcggggcggcggaggggtggacgaagatagttgtttcggtgttggtgtcaaggaaggtacttcagggtgcgatgaaggctgagaaggtgaaggttctgaggatcggtcgggattcaagtctgaggccgggagtgtctcccctccacgattggcgtcgatatcaggcgtagatactgaggtgtcgcggcgggaagatgctggtttttttactttctttaccttcttcttcttcttcttcggcttcccccttaaccggtctgtttctgtgttctgctgataagatactgccgctgagtcgtcgtagtaaccttgtaacagggtagcttctgcatcagcctcaggatcatcctcctcgatctcgtcagtggaatggccgacagccgtacagcgaagcgtagctgttccggagatgctccccgcatccttagtcgggactctccactctagtacgccccgtccagagttaaaaagagcctcgccgcggcttgctttcatgtccgttatgtttcgtacggacgggggaatgggcactgtcaccactacatcctccagaaccggaccggcattattgctgttgccaccgagaaaagacggggttgaagtgccagaccctccccggcccgctccaggtcgacttccagacgggtatccaggaaagtctgggttaagtgttaaccgcacctcgaaatcggcgcccacagaaccgagcgacttttgaatgtcaacaattgttggaagaaaaagcttctccatatgacttggcggttgatcaagactggggtcgagaggcagcaagtccacctcatatccggcaagaataaaccgtccatctgggggaatgaagctcagttccccaggccgttcgcgccactttgcaagccgcacgcagggatggaaaacaggtagttccatcttccgagcgatggcatgttgccctccgggtgctgtgagagataaaatcaagtcggggacaccggataccttggccgtaaaggcgatcgtgcccgagactaacgcagatatgaggcgtcctgatggagccattgttactgtgagagattcgacgatatcgacgtaaagctcatttgaagtatgccgtacaccaggacgtctccagggaatagccggccccagggctgcgtttccggacgttaatgattgtcgcttgagcccgggttgtcctaaaatcggcgttgatgatctatatcaacaggccagcatattagtgaccatgaagccgagtaaacataagcgagcacctacccaggtaatccaacgttgcccaacagcttacccatccaccccggcatctccaccacctcttgcagggcattcagctcggtgttgcagacgatgccagcatcgcacatctcatgtagtaactgagccaccacatcgtagttcgactgtaccttggacgaaatcaagggtgctcccacgaactcctcaaggatatcgacaacgcgatgcaggaactctaacgcgaagaggggctcggtgtcggattccgagagcgccaggaaatgcaagttcgactcgactatagagaacactgtaacgggcggggacgtatttgcgaagtagatcagcgacgggcgcggcgcaggatgagcgaaatagaggggccgaatggtcgccgcggagggtggacgagagcgatagacttgttcgaccagaggctggctagagcaccgacgctgttagcctagatgtgctgcggatggggagggcacgcacttctgctcgtcgtatatgtagacggcatcaatctcaccgctcatgatgtcgacggctctccagctcgatcctcagacacgattccattcaattgtagtagcggcgatcccaactaacgacctcatcgggatgaactcatcgctgtttctgccgcaagtcgccgccttttctttgtttctccgtcgcatgttgatgatctttccaacgtccaatatcccgtctacacttctcaagtatggcggcctctacagaagctaacgcgccgagtgcgcagccctcgaaagccaaacctccggtagcttatgacgagtttgaagactgcttcgcttgcagagccaccggtgagtacaatcaattctgggcaatcactaacccgaaccgttatgggatattgtctacaggaagctaatggtcatctctagggtctgctgcattcattggtctcggagtgtacagctattataccggcatggcgaatttacgaaaacaagaaaagacgatcatgcaaagcgcgaccaaatacaagatgggttctcgccggttggggatcgccactatctctgcagctcttattggcctaggtgtctggcgggcagttaattgaggtacactgagtgtacgggtctgtcgttgctaaagcctcctataaggtcatgtatgggcggagggatgcggataagaggaattgcttcattgggtatcaccatatagggtagactctatgaatataatgcgtataaaccaagataacgaagataggaaggatacaaaaaaagtctcaagaccccaaagggatagaaatggaaggaagcaatgaaataaccatgtgcaatactcctactatatgctccagagaatagaaatgacaaccgctgcgtgactatggcgtattgaagttcgtcccgaggcaggaggaaatcgtacctctagcaaaagcgtcctcgtttgccgcctccaaatagatctcggttattccccaacccggacaagtcaaagaagtcggggaaattattcttgcgttttgagcctatcccgaccggagaatcgcgcgttgagtttcgtgggcttggacgagtcaaattgacgtggcggctttgctggcgagagttccgtgctaagaccgagaccgtggcgggcgtgtcgctctgcggtgaggagctcgagctgtctgagttctgcatgtccatatcttgctcgtgaacttggggaaaagtcgggccgacgacgtaggtaaagagaggaggccgatcaagaatgaccggttcggatggttgagcggcaggggtggatggcggttgctgggcgggggcttgttcttcacgatggggtgacgtgggtttggactggtgtcgaggggcctccgactcagagggttctttccgtgctacagcgggcgtagtacaccgagtcctctcggcatcatcatcatcgctagaatgcgccaggccatcgctccgttctgtggcccattgtcgaactcgccagccctctccatcagtcaacccgaggttttccctgtcgaggaagtgcagcaagtcttcaatggcttcctggtatcccgcctgtctcgcctgtgattccgcataaacggcattcttgtaaaggttggtgaccgagagagcagcggttctgaactgttggaggagctgctccgaaggcgggcgaggcgtcgaactcggtaacgaggtattgagagacctcatcgagtccattacggttccagctgctgtgaaagcagctgcgaatatgcgtgggtggcttgtttgttttgcagcggagattttctcctttgtttctcggtaccgaactcgactaggaggggtgaagagtcaaccgtacttgagcaaaccaagacgcccagagcaaagaataagagagcacagcccgggcagagggaaaagaaaagatcagagtggctttaacggtggaagaatccctgtaatgcagaaaaagctctaaactgggagagaaatcgagatacagcaacctctgtcagatcttggacgttccgtctctttctgcttgtcctttgtcatggtaacgtgacccaccgagcggaagacgagtttccccgcggaatcaggtgactttaagcaatgatggcgccagccagttagcgcgtcgcgaccgctttgctcagcgaaatcattatttgccatccacagcgcgactcttgttctccgttctttattcaatcctcccgcatcgtcgttattcacgccttgtctggtttgacagcaccttattttctctttattgggctgtctgcaatagactccaattccatatctctctcaaattatccattctgtttcgtgagctacatactccgacctttatagttcagcccgaccttaaacccttcattgtaatacctctcattgcgaaaagacaatactctcaccgtttcgcgcaggtcgcgcaatctacaatcatggctcctgctgccgttccgacttccgacccgccttcccaggcagatactcccatgacagacgcaaatgaggagattacttcagtgcccgtagaccctctagatgcgaagatgacagtatgttgccgaaagctcatttcccttagccctcagcccgccctcagcccatttgatattgttactgagccctgaacactgctaagctgacgacctattaggatacgcctgactacacggtaaatatctgcgaccgccgagcagattgtttcatcttgcatcagctaacttagcattgccaggattccgatacgaacccgaacaccactgcaagcagtgttgcaggcgatgtagttccatcagacggccgaaggcgaaggtccgaggcctttcaaatgaggaagaatatgtttggcaagaaacatggctccctgaatgagaataaggttagaccagatgctctatacaaatagcgtgctgtgtatcttacacgtgttctgttataggatgatgactctatccggaggtttcgctatctacttggactcacagatctcttccgtcacttcatcgagtcaaatccaaatcccagaatcaaagagattatggcggaaatcgacaggcaagatgcagaagaagcagcaaagtccaagcggaaagtctctgcgcggtcaggaggtgcaagcggcgagcgaagacggcggacggaacaagaagaggatgccgagcttcttagcgacgagaaacgtggtggaggaaccaacacaatctttcgagaatcgccgccattcattcagggcgaaatgcgtgactatcaaattgctggactgaattggttggtttccttacacgagaatggcatttcgggaatcttggcggatgagatgggtctaggcaagactcttcagacgatctcatttattggctatcttcgacacctctgcgacatcactggtcctcatctcgtcgcggtccccaaatccaccttggacaactggaagagagagttccataaatggaccccggaagtcaatgtgttagtcctacaaggagacaaggaggagcgtcacaagttgattaacgagaggcttctggacgaggatttcgatgtctgcatcactagctacgaaatgattctccgggaaaagtcgcacctgaagaagtttgcttgggagtatatcattattgatgaagctcatcggattaagaacgaggagtcatcgctcgcccagatcatccgcgtcttcaactctcggaatcgcctcctaatcactggtactccgcttcagaacaacctccacgaattgtgggctcttctcaattttttgttgcccgatgtctttggtgattctgaagccttcgatcagtggttttcaaaccaggaagcggatcaggatactgttgtgcaacaacttcatcgtgttctgcgaccattccttcttcgccgcgtgaagagtgatgtcgaaaagagtttacttccgaagaaggaagttaatctatacgtccccatgtccagcatgcaagtaaaatggtatcaaaaaattcttgagaaagatattgatgccgttaatggagccggcggtaagaaagagtccaaaactcgcttactgaatatcgtcatgcaactgcgcaaatgctgcaaccatccctacctcttcgaaggggcagaagagggtcctccttacactaacgacgtacatatcatcaacaattctggtaaaatggtgattctcgacaaacttcttgctcgcatgcaggcgcaggggagcagagttctcattttctctcagatgagtcgtgttctggacattttggaggactactgcgcgctccgaaagtaccaatactgtcgaattgatggcactacagctcatgaggatcgaattgccgccatcgatgaatataataaaccagattcggataagtttattttcctcctaaccacaagagcgggagggttgggtatcaacttgacgactgcggatatcgttgtgctgtatgacagcgactggaatccgcaggccgatttgcaggcaatggatcgtgctcaccgcattggtcaaacgaaacaggtcgttgtataccggtttatcaccgaatcagccatagaagagagagttctggaacgtgctgcgcagaaattgcgattggatcagcttgttattcaacaaggtcgggctcagcaacaggccaagaataccgcttccaaagatgagttgctcggtatgacccgaggagc

SEQ ID NO: 5915 - DNA, 4194 bp, Emericella nidulans
gtagctgttagtcaagctgcgatgaagtgggaaagctcgaactgaaaggttcaaaggaataagggatgggaaggatggagtatggatgtagcaaagtacttacttaggggaaataaaggttcttggatgggaagatgaatatactgaagatgggaaaagaaagagaaaagaaaagagcagctggtggggagagcaggaaaatatggcaacaaatgttggactgacgcaacgaccttgtcaaccccgccgacacaccgggcggacagacggggcaaagctgcctaccagggactgagggacctcagcaggtcgagtgcagagcaccggatgggtcgactgccagcttgtgttcccggtctgcgccgctggccagctcctgagcggcctttccggtttcatacaccgggcaaagcaggagaggcacgatatttggacgccctacagatgccggatgggccaattagggagcttacgcgccgggtactcgctctacctacttcggagaaggtactatctcgtgaatcttttaccagatcggaagcaattggacttctgtacctaggttaatggcatgctatttcgccgacggctatacacccctggcttcacattctccttcgcttactgccggtgattcgatgaagctccatattctccgatgatgcaatagattcttggtcaacgaggggcacaccagcctttccacttcggggcggaggggcggccggtcccggattaataatcatccactgcacctcagagccgccagagctgtctggcgcagtggcgcttattactcagcccttctctctgcgtccgtccgtctctccgcatgccagaaagagtcaccggtcactgtacagagctcacgagttcgtcacatttttctacaaatggtggaggcggcggattttaggctcaagtcatgaccctctgggtcactccagaatcagctaggtcaacgaataaggatgattctataggaagatccaggcaccggtcaaccatgatctggacagatttgggagctcggtataagctctccaccatcttattctgtatagtttaggcttaaagtttatccaggagatgttgctgaagtcgatttgagtccacttcctcactggtagctatacgactttgatggtcgttgtaggggctgtattaggtctcgatcaaacacaaatagaattaaatggtactcgagtccactgaaggtgggcttctccgtcttccgtagccgtgccgaaatccttacagcttgtgttgtgtgacttttggttacgccgtctgacttttgtggtgagctaactagagatcatgctatatctcctgatttaatacaatgctcatcataacattccacctggaactgctagcaacgtttgacttgcattgtgcaacgccctttgcagagctatcggatgatcaatagtgccacgttctaaattcaaccaacgcaggtgccccaagccttcgacatccggatgtatttcgaaaacctcatggcgattgcagtcctcagattcatgttcattccaatgctcattggtgaataaaaggttcacgggaataagttcaaactcgagatacttgagaatattgaaagccaaagggaccctctatgctccaagctagagtctcagcctggaaagcaaatccaaatgaagctatgctacctccaattcctcatcatcttatctataatacagagcgaagaatatcctcttgacaccgctccgtcctccgacttcaataaggagcttactcctccttgacaccacccctccagttcttctcggcgttctggagggaggccttgtcggtcttgggctggccctggctgagaaagctgttggcagccttaaagggacgctggaggtcaccagtcgctggcttcccgaagacgtggatcttaaccagattcgattcgaaagcgcccttcagcgggatgatcgactggatcagaagagggttggtgtacttgaagtacagatgcatgacggccatcatgccaacgcccatgaactggctcttaatgagctggcggaactggcccttatcgtactccatgttggtagttgtgacaggacgaggctcctcgccgcttccagcggagcaggctcgacgtattttaatgtcgaaagatctgcagagattacttcaagtcagccaactgcaaacagaatatcccgccaatagctttgggacgatgcaagatataaacgaaaaagacgaaccgttcttcttattgatttgagcctgtgtgtagagatacaagctcaaaataatcacgttcgacacgacgtaaaggccacgaacaagcagcagaacatcagggtcgtcgaaaggaaccttcttggcgacctgcatcatcacaacgatgatcgccaaattcgtactataagcgcatagtctatcagtaaaagatcactgagtcatgtggagatgttggcatggcttgacggttgtttcatgcttgtccaacacgatccacagacaagaatgcgtaaaaggttgacgtacacttgaggggacaccattttgaaagcggcaatggaaggcaactgagcgagagagacagattgccgcggtgtaatgaactgaagggtgggcgttggttgaaagaacacgcgagcagaaacttccccaggccgtcaccatcagaagggaagtcggacaactgtcctaacgtgcaacaatcacgtgcctaggtacctccagaacacgcggagataggccggcgatagttttagagcctcaggcattataaaaatggctgcttatgtaacaaggctagcacactcttcgactcatgcttgctcctacaacttctgtgctgcgatgttgagctgtgcaaagtcgcccacttcgtgatatcatgcggccagacacctgatcaggaattacctaaggtctcatgacccgcattaggtacacaatttatctttttcgtctaggacatgctcgaaatgcctgccaatagcaagcaacctgcaacctagaagcgggcgttggaaggtcagcgtcgacctacaacctttcaatgctaggttgtcccttgaaacaaagcttctggactatcattgcgtgttattgagcatatacacctttcttgcgcttccccggcacgccgatgccctggcattcatcatctcgagtcatggccatagctgggcttcggttgggatggtgaggtggttccctaatctggactagcggcgtttgaggctcgatgccgtctttagcgaccaggatggctctcacatttctgactccttcatccatcaacaacgcgcgtgccgttactgtgtcgaatccttccaacgtccaccatcccgctctatcgactaataaccttgatcggcgcgaaactttatcgtccgcgaccccgaatctcaacgcttttccaaaatgcctggcggaaagggaaagtctatcggtggaaaggcaggctccaaggactctgcggggaaggctcaaaagtcccacagcgcgaaagccggtttgcaggtcagtattttcacttcttttctgctaaatctttccatagctgtttcttattatcacgatttcccgtgcgtgcgacaactctaaactcctgctacacctttcgccctctcactccttcaagatgtccatggttcttgatagcttctagcttttcgctccgacctacattccttcgatcgcatcctttcagcatcgtcgttgacagcactgtggtcttatgtctctctaactcattcacagttcccatgcggtcgtgttaagcgtttcctcaagaacaatacgcaaaacaaaatgcgtgttggcgcgaaaggtaagaaaacccagcgtctctcgctcgagcaacacttgaaacctcactaacacctttatttagccgctgtctacgtcactgcagtccttgaatacttaaccgctgaagtgctggaacttgccggaaatgctgccaaggacctcaaagtcaagcgtatcacgccgcgtcacctacagcttgccatccgtggagacgaagagctcgacacgcttattcgtgcaaccattgcttttggtggtgttctgccacgcatcaaccgcgccctgctgcttaaggtggaacagaagaagaagaaggacgcataagcactgcgggatcccaacacatacggcgtttaatgatgattgaatggaaacacccagcgtacagtg

SEQ ID NO: 5916 - DNA, 9354 bp, Emericella nidulans
ttccaaaatcctacatagttattactttgtattgcctatttagaatacttaaaaggctatgtcactatagaggaaatgagggaaaacctagaatctaactaggttaaattgtaataatagattgtggagtatgtatacagatttttagaaagtcaaggtagattctctatatattaatcaaaagttataaatttgttatataaagtaatatatatttattaagcttagacttgttaaaccacgggttggggcgggttttcaggcctagctgatccgcccatgcggtttttggggtgggttacctgaacagtaaaccgcccatgggtttagcaaataattctaacccaacctaaataacccaaaataacccagttttgcatatcattactttaataagcagtgatctacatagttaataaaatactgtatttaaatactgtattataaactatctaagtaagaaaatgtaatctaaatacagtaatatacctatttagatatcttggcaacccagcgggttgctccgccgggctttggggcagccaaaaatatccaaaacccaatggataattagaaggtctaacccaacccatttcttggcgggtcggggcgggttggggcgggtttcgtgggttgggtttaacaagtctaaaccatggttaattacagctactgcttccaacctatggttgcaaaataggtaaagattgttaagggacgtatttagatggatcttcctatctagacgtgccgtacgtacaagaaggaatcgctaaagaagaaatgagaaagaaggattgttgttgcaaggaagtcttgtaggtggctcaccgccttcaggacagcgcaggccttggccgagtcactaaggtctaaggtccttgtataggcaaaggacccataacacctgcctgtattataaagcccaagtactttatctccttatacttaaatttgcacttcttaatatctaaatataggcctgcttcttccagtttcttcaagactatttatatatacttccagtgctggcagaggtccctattagtatagacaagtatattatcaatataggctgagcagaatttatctagatattcccagagggtccagttaatatatttttagaaggtgcttagtacattagccaacctaaaaggggtgactagctattcaaagagcctgtatcttgtatagaagatagtcatctattcctggcctttagctatacagatcttatagaaggcagcagatatatccagcttagtaaactatctagcttgtctaatttagtttagtatctcatagatcaggggcaatagatagtagtccttcttagtaatagtatttagagtatagtagttaatacagaactgcagtcctcctcctagtttttatataaagaatactaggactgcagctggggaatagcttatatagataaagcctttctatagtagttcagagagtattttccagaggactattagttcttcctgggttatattataaagggggccctaggggacttcaggatccttcctactctcctcctatacaagcttaattttgtaattaatcccctctccctggtatggtagtagttcttcagctttatcttatttaaagagccttaggtatttctagtattaccttagtagctttgtatgggggttaatatatctctttggggccagtgccttctgtatatctgctaataagactataaatatcttgatatcttggccatggtactttttcctttatataaatcctcctatggttgtagctgatatctgtgctatgtccagctttggtaagggcctctttgtagtactctatagacagactccagtagtacagaggtacagcctgcccctcttagcctctaaccttctattatattactccagccaggagagtcctaagatcaggtcatagcccaggttatcaggtattatatagaagtaggcttctttttctgtatataccctgatatctagctgaacctatataatcttattaatctcctctatattcccagttactcccttgaaaggttttgggtggataggtatagtaggtatttaatatatcttaataaacttgttactaattaccccataggtcaggcagcctgtatctattattatacaagtattataggtatagttgactagtgcttctaccaagaataagggggtatttatatacaagctgctaaaatcttgctaattaagtagtatttctctagctgtataacccctctatatataactttgtatagaggttattcattttctgacttactcttgttatagtcattgatttggtcttgttcttcctaaaccatggccacctgcctagggcgtctggtaggttttatagggtactcttatataaagtggtcaggattgctgcagcataggtatttgcccttagacaacctcttttgcttctcctctgcaggcacctgactagcttttcttggggtcctggtcccttttatatagagggccacaacttccttttatagggctgcaatttgagcatgggtggcttcctagtctatttaatcagaggttctggtccagtcagagcctcctgctggtcttatacaagcaatatatatagggacagcagtgtaagatcctttttatataagcctggctattctctagaggttgtggttgatttcacgcagttaattacagtagttatcatacaaatcctcctgcctaataccaaccatggcttttagcaactcaatattaattaccatgtctaacaaggtcttcttctggttattatcccaattaatccctccagtattaagaagttctttgtcaaatttattcaagaactcttcaaagtcgcgtctcccttgccttattatatttacttatataagagcctttctctgttggtcaggattaccaaaggccttgtctagtactacagagaattctgcctatagcacaggagtctcagatttctagcaagccaagagctatggtagcatatgctggctggcttttcctctcaggcagctgtaggcatagtaaacttgttcctcctctatagggtagcaggcagtgtcaattataaactttgtacaaagattcatctagaaaggagggtagtccttagggtcttctctagtaaagggttcaatatccaggtgacaaggacagggatagctttgtttgtaaggtatgggcattacagatataactatagtagtaactggtggatggtttcttagctgcaagttctgtacagcctgtagttctgcctataagctgttattctcttcttagagctgttatttctaagtctatatctctgtacagagctcctggagctgctgtagcaacaatataatactttcttcttccattgtcatagtaaaaggtctcctcatactattattgagattagtaagcgattcctaatgttaagggatgtatttagatggatcttcctatctagacgtgccgtacgtacaagaaggaatcgctaaagaagaaaggagaaagaaggattgttgttgtgaggaagtcttgtaggtggctcaccgccttcaggacagcacaggccttggccgagtcactaaggtctaaggtccttgtataggcaaaggacccataacacattgattctactagaatatatggctctaattttcagaaaaactacgagggtcaactgtcttaaggataatatttatttctttggttttctcccaacagtctgccgtaaacacacctttctgttagccgcaacccagctgctgattccacaccctgtctttcaaatattcttcagtatcaagtaaagtgattccaagccagtatccatcagatctcactacgacgacaggacgcttttccctccatcttcagtcacccggtctcttactttgatcttcatgtacccaccacccaatttggacaccgccggagttccagatccctcaaatgtcacgcggaatactgcacttggcgcgaagagtaaagcttcacccacgcgaagacgaacgattcggtcaagaaaagacagttttgaggacatgtgggcctggccttgggattcctccttctccgagaacgttttgttgttggattccactcccaaggcagccgcggcaacatgatgctgcaaagcacgaagccatgcaggggatgaaaatctgtggacaatggtgaccgagcaaagactgagaaggtcggcggagatggttggctcttgagtggaaatcactatccgggttgcaagatggcgttgcagtctcacactggatagaagagtctctgtaaagatctgcgcttcggctgagtccttcatatactgagaagccaatgagacgatgtgcgggttgaggaattgggctggcagtactacgaaccttgtgagcttcatcgagagctactactctgccaacattggtatcctgctccaggaagacctcaaagcaaaaattgaataatgcacaagctgtctcaggagaaaggcaaggacatgaaaggtcaacgatggtcagttgtgagggctactccggccagtcagttgcaggagtcgcaggtgttccatttatgggagttcggagtaattgaacatctcacctttggcgaccagctagttccggcgtcattaactgcctttttcccctttttactcgtgcttgcaatgatttgctggctgggcataaagctctcgaggatgtccaggcgttgccgtagaggctgttgctgggagggcaggagatcagaatcaaaaatccgtttcttaaagtcctgatagtcgaatctccctccagaaacctgctgtagaaggcgcatttccctcaagactcgctgcacagtatggaggtacagggggccagaactgctcccttggcctgctgtcatgagatccagcatacgttttgtgttcaggtcttgctgatttatttggagcgggtgaacacggattttgaacctgctgtatgttttctgtatggcctagtcagggaatgcggcaccggctgtggctgtgtatctcccacctgaatatttcggaaatttgttggggcacagagaaccctcacttggacatttgggctggtggcgaggaaggcagcctcgcacggtgaaccgccctggtcgccgatgaatgtgtcgtaatggaatacaactgctgtcagaggattatgaagttggccagccgcagacggaatcaagcacccctcgagtaaacaggaaagggtgtggctcttgccggaaccctgagagccacagatgaagatactcgatggtgagctaacattgaagaaaagacgggggtcttctccataagcctggctatccaggtccggagatcctaacgcacggagctctaagacaccggccaacaaaccatattgcgacggtaccaagttgggctgtgtatagagcacggggccagtaaacaccggcgcaagagagacgtctttagcctcatcacctgaaaaacccagcttcaggagactgagctgatatgccgttcttgagtctgtatgccgtgtcagttcccgcatggcacgtgatataaagcagcttgcatttgacctgagctgtggggggaatgtgagaacgtacggtcatcagcattgttgcacagtgagctatccatcgtgcggcggtgattcgagtcagcaatcgatctagcgctaggattgactttatgtggtgaaaatttaagccaaccgctaaattctcgtcgcagaagcatatatgtaccacgattgaatacgccatcattgttatagacggtctactgtgggccatgtaagatcttccttgccaaaagcttactaaaacggaagtcatttcccgttgtgcctcgtgcagcaatggctcccggagtggtggcctcctgaagtagtctcctgttgcagcctcttgcagtggtggcctcctggagtagtctcctgttgcagcctcctgcagtggtggcctcctaggttggagtcttgaagtggtggcctcctgtacctaacacctacagtagtgtgtccttctggcggcctcttgcaatactaacaatttatacgagtaattttgtggtgctggatatagcagtggtacgcactggtggccgtaggcagaactgtcacatgcactgatgccctgaacagcgagctaaatgtctcattgggcttcaatacgattaccactaatgtgagcttcaggtgcgaccggagtcataaatatctaacattcctgcttgccctctgtgtttctagccttaagtgtacttacccttgtcccactacaaacttttcgtctttcaaacgcgataaacatgaagcaggggaacagtctaacgcttgttccaaagcaaatcgggcctccacgccttgatccatatggacgactcctcgcccgtttctacgagtcattatttttcttgacgtctctcgggcgaacacaaggagaacacacccccgaaccacctgttctggacatccaccaggaatgcagacggagattcttgaagaacctttcctatatctgcgacttcaggaaaggaggccaggcatgcactgcgatagcagttgaagatcgtgtggactgctaccggttctgggttgcttcaaacatgaacgtgaacaaagcagtggcttttattcgagaaattcttgcaatgttgcacgacagacatttagatgcttcgaataatgagtcaatgattgaggccagtcttattcagcgttgcgtggaattcgctgccaagcgcatcgatagtgaggggaggtttctccgcattatggcaaatcgatgcattctcatgcttgaggacgaagagtcggaagcaggtatgacctttttcctgagcaatcttctagagcgggtaagtgctgactgtaattaaagcccaagctttatccgaatggttacatcaggccctcagctgctcccgcaacattaccctctgccgctttctctacgaccaacgtcactcggccgccatgaaagagctttctgcgcgggctatatccgacaaaggaagaccgggccgcgccgaagaagactcgtgctttagctctgccaggcatcatattggtagacttatccatcatatacgtgcgccgatagagctcgctcaagacagtcgtcatctgatgtatctcaccgacgcctataccgtctgtcctgtcagcccatgttccgctgtgtcatgcccggtgtctgacatgcataccaacctgcaggggatcctgaactggatgttcatggccgacgacgaagacagggtagccgttggggatggtcttgtttacatcaataagacgcggccaatcttcgacacattcttggccgaatacaacggtcgggatcggcaggttcacgctgagattcaagttctcgagcatttctaccagcagcgactctccttcctggatggcgatcgctatatagcctgcagcaaaccggcgtgtctctgctgccaattgtatttcaagcaccatccggctcgtatggtcgtacctgcctcccaccagaatgtttatacttcctggagccccccactactgcctcggtttgccaaaggtgacaaggacacgcagctgcagaaacaggttctgagctacatggcacaagacatgcgagagcagattattcagcaggttttgcagcgctctcgctcgatgataaggcatcctgattcgagaacctcattgaccgatctaccagctgaggcggcttttggctttctggagtagcaacggaatacgggagcacatatcagcgtattaaaatgagggaccggtggagtaattgggtttatttggttgaaaaaaggttcgatcacctagtgtttagtcttttcatagtcaatagatcttgaaacttttctacaattcgacgcgacgcattcactttcttcttagtttcgccattccctcatgactctactcgcggatctgaactagcaccgtggattttgctgtcagaaattgaggtcttcatacttcgctaacaggtaaactaagcagcgcatgattcggaggactatggggattgcatatcgtcaagccatgacaaccatcgctcgtacctacacagccttgggcgaatgtatttggcaattacggggcgtgaacaaggactgccgaaagcataacattccctagctatgaagagtcttcaatgtctcctccgctgatgtcgcagtagactatctgatcgcgagaacgagtcgccacatacatcgcaagaccatgataccacctcccaatactgcttggcccattccttatggtttgcttccacatggcggcgcatgctgcgttgtgtgccagccttatgagggcacaggctgcacaagacaggtttgatatgttctctcaggtgcttcctgtttgattcagtcaaagacatgtataaaatattttccaatagaactcaccggagcatccatttttgagagtagctctttttgctgcggcatccagattccggacagtgataaagtccgtcaggacccggctccaagctagtcggtgaatatattttggtttcctggaatcctgcaaacgggttcaaaactctttcagacggtttcacgcgtcgaccagtgtctcttgatgagtctgcgttgctcaatggagcgctcttgtcaaagggtatattcaattctgttgataggatattcgactcggcactctaaagaggctcttgggagtcgacaaacccgcaacgattgagttctccaagggcgctactttgtgcaatagctagttcgctgatttgcataaattgctgttgatggtcgaacaataatccagtccaccagaaggggttgctctcttctgaagtagggaataatgcccgatgtggctctattggtggagtcgggtttgatgttccacgatatgaggtcagcacacagcggcggttcgaggttgacttccagtgacatccagtccccagcctgactattcgcaagagttttggatcctagtcagtctatttaacatgtcgggtgtgcaatgccagcggcttctataatggggacatagctgggtagggccaacctacatgcaataggcggtgcggccctgaggggtaaacctggcagggtctcaacccatttatcctttcccccgttagcaaccgaggaattacactttcccttttttgagaggggcctaaaacccatgggtttccaaccttggcctaaaaataaaaataatgttcacaggtactaattgcttgttccggataacatatttttgggtattatggccatttgagtgttgcctcaccaactaaatttggtgatccccctctctctagtgtgaccccgaaaattagctctttttttaac

SEQ ID NO: 5917 - DNA, 1725 bp, Emericella nidulans
tagtcgactaaaaaaattgaagttagattaaattttcaaattgatcaaaaaaaagaatatattttactattaattaaagaatttttaggtggtaatattggctatagaaaaagtcaagatacatattactatggatctactagttttggttcagctaaaaatgttattaattattttgattactttcatttattatctagtaaacatgttaactatttaaaatgaagaaaagcatatttaataattcaaaataaagaccatttaaacaatgatggacttgaaaaaattataaaattaaaaagtacaatgaacagagtaaatgatactacaatttaagataaagtcctaacaaggatgtttaattcttgagtattaattagaatagattattattattattattaactattcgattaatcaaaatttttgttatattttaattataccaggttttggtataattagtacagttattgctgctggatcaggaaaaaatgtattcggatatttaggtatggtttatgccatgatgtctattggtgtgttaggtttcttagtttgaagtcaccacatgtatactgttggtttagacgttgatacaagagcatatttcacagctgctactttaattattgctgttcctactggaattaaaatatttagttgattagctacatgttatggtggttcattacatttaacacctactatgttatttgcattaggttttgtagttctattcactattggaggatcaagtggtgtagttttagctaatgcatctattgatgtagcattccatgatacatattacgttgtagctcattgccactacgtattatctatgggagctgtatttgctttatttagtggatgatatttctgaatacctacattattagggttatcttatgatcaatttgcagctaaagtccactggtgaatcttgtttattggtgttaatttaactttcttcctttttcatttcttaggtctacaaggaatgcctaggggaataattgattatcctgatgctttctatggttgaaacttactaagtagtataggttcaattattagtgttgtagcaacatgatacttcttaacaattatatacaaacaattaacagaaggtaaagcagtttcaagatatccttgattaacacctcaattattcagtgatacattccaagtgttattcactagaaataatagttcattagaatgatgtttaacaagtccacctaaacctcatgcttttgctagtttacctttacaatcgtaaagtctaagtttttggtaatagagtgttaggcaactgtagttatttttttttttactctagctagttatataacatatttatataaaatatatactgggacagtaactgtcctattaggttatatgcatttacaaataaatttaaagaatctattgaatcatttttatgatcaacgttatttactatttgatgcaactgctatcaaaaaatctgtggatatatttttgtaaaacattacctaattttagtaacttttggtatataaggttacgattattcatcaactttatacgctttagcaataaaaagtgtaaagtttgatctttaagatgttgtaaagatagatagtagttctaattatgattactaattaaaatacttttacctgagaatataaaataatctataaaataaagtggatacagtaaagccctatcgta

SEQ ID NO: 5918 - DNA, 12195 bp, Emericella nidulans
tcgctatctgctcgggcgatatccttgcagacttcctctccagcaatcaatgcgccatccgctaacattttctcagaccaatacaggaattggtttgacgaagatcctagacttgtgctgttcaaccaggggacgagagaattgaacacttgcagtgcctcttgaggccccaaaacctgatgctgtgcagctcctttgatatagcagcctttgagaaagcaagctctggtccatggcgacagttcatcacctgtagccgtcagggcgtccaactcctctttgaagtctttgggaagacgtgccgcagccagacccggctcattcagcgtgtagtgaacccatcctaagcaaacctgcgcctggaatatctcctgtttcgacccatctgccttgtcaatcgtggaaaggagcgatggtattaattctgataaatcggtaggggacgaggacggagggcttgcggttgacggagttttgtggaagtgagagacgatctgatactctgctctagctacatcaaggaagcctatcctcgccagcgttagaatgcgaactcggccaaaagggatgacaggtatttacaagtcttgtgaggtgcatgtttgttgaccttccggattaattcaggaacctcatcccatttattttgacttcgagcattatccagggcaaccacatagcgatggcccttttcagactctcgcgccttgaacatttgttaacagagttgaggattagaccggtgacgtagcggggctgcaaagagcacaggggttgtgagtgagcgaggtacaacacttacactcattgtgaaggaggatcggagttgtaggaggcacggcaacggaatctagggggaggtccagttggcaaaccgctgtccatcacgagcgccgtccccgaggctcgaagtttgctaggtagttaactggaatactggggagagatccttgcacaagtacaaccacgtcgaggacgacgacgacagccccaggaacaggcagatcgctattattcggccaggggagatccgctgtactaacttgtatcacggctgtattattacgttccgaggcttcatgtggtggtccgagctttgttatctcaaccgtatcaaatttatttttcagcgacttttcgcgggttaggttaagagctatcacaagcttaggaccacactcgccggcatttagggtgtctctagaccttcctcttcagaatggcacacttatatttaagtttacgcgctgtcaatcaccgattgaccactctaccggtccaaaaactgcctgctatcgcggcttcgctcgcagcctctataacagaatgtggagagttgctctcggcgcctcagtcccagaaggctggcaagtcagactcagatcattcggttcaggtacacaagctggtaaccaggatttcgagtcttctgcaggatagatcgtttgagggccggtgggctgctgtcgtgctcgtcaaggccttagtggaagctggacaatgggaaattattcgtggaagtgagccgtttgttcgcgggcttatgagcattttgagtgtgagaatatcaaatcatacacctgcgttcaagtagattgctaattgttgttcaaacagaaatctgaccctgcctctactaagaccatggccgtcatcaccttgacgcggatcttccatcttacgtaccaatatcctacccttgttcgcgaaataacgacgccatcgcttcccggattcattacaactaccttaaacctcatctctgtcaagccgacatctgagcctacccgaagcttgaaacccaataccccattcttggaggttgttcttcgctcctatgcggaactcattgcccggcaccctaccatcttccgcccgttcactgcacagatccacagtctgcttcaaaccatagttggctcaacctcagcattatattcccggtcagtggtagatgtcgcggagcaactctttattgctcttcaccattgtgccccgaagaatactggaggggaagagtggaagagtgcttgccgcatgacaatcaattcaatacatgctactgggaatcatgtgttgagggcaattgtggaacagtgggaatctgtggatccggcattacgacagcaattaagccatcccattgactatgcactcgaggtggaagtcacaaaactgacgcactaggacttaccggctggcaagggctggatgcgggggtcgaaagacttcttgccctattgaggatgctttccactttcctagccactgccaccgcttctaccgtatcgattccagtgggttctatactcgatttgactgcgcgcttcatgtctgtggtcgtcccatcagacgcaggtgatgtacaagccaaccgtcaagtcagtcggacggaaagggaagctcttttagcggaacttcctcgtatacacgttgcttgtatcaggattcttcgtgccttggtcggcacgctggaaaccgccggtctttccgtcgctcagacggtcttggaacaaactctttgggtcttccgcgcggaaaaattcaacaagaagatcaggacttcggtatacgatattcttggtgcattgatcaaacatgttggcccgtctatgaacaagaagaacgtggcctctttgactgacatgattcgaacctgttgctttgacattctgcctcaagtcggagaatatggcacaaaagacacctcaccagctgcaaatggaaagtctaaggcgaactcagctgctgtcaatgcagacttcttcttgaaccccagcctcaagcaaggtcgcggaacgaacgcgacgactagaccaccaaggctcgttcgaaccgcctccaagctccttcaaattgttctcagccacatcgcactggaattcctcgcgcccccaatccgcgcagagatcgaccgcaccatcataatgacctccgacaaggacgccatgtacgccagcgttctcaacccccacccagccgtgaaaggacgcggacaactattagcatcattcctttcctagccaggagctacgcatctgacatgaacatggaagcactcattcgaccccggctgcctgttttggcgccttcaagttataccggccactacgtcaatattgaggaagacgatgacgaagaaatggaacatgttgccatgccggagcccatccaagcagaagaccccgccgttttcctgaaaccagccgccacccctaatctccgagacctcgtggactctaatgcgccgcagagcttcactgcatcggtaaataagcgcacttacactgaggaaacgtcccagaattccacaccttccgccagtttcccggtaatggtagacaaccttcaacccaagaaggcaaggtttgacagcagtgtatcaacgccgccagctacaaccctatctcaaccgtcttctttcacaggaacccttacccctgcagctgcaccattatcctcagttcaacctgccacaaccctggcaggtacaaccatggaaacgtcaacagtcggcgatagcgtcactactagcacaacttccgtcatggtggagcagtcaactacagttcctagagtcgaagcggtagcactgccggaggaggcagatagtgacgaagagatgccaactttgaacatcgagccggatacagacgaagaggatgaggagtaattaaagagaccaagacgctaaatttgattcaagatatacacagaccaacatagtctggagtggacaccatataaaagcgcattagtgatctgaatggtaattgcgagaatatatatcttggttgccagcttgcatcttgaattcggttattaccagaagccaacttatataagtccggcctcatatccaacaacgatgtctatacaagagtggcttttcctgcgcaggtgctctgtttattctactctatttctaattggctgaatgcccggctttatcatgcaaaagagaggcgaaaagtccaactaccctacataacccgcacgccactcccccaaaatgtcccgtcatcatggtacttaaaccaaggcgccctccaacaaagccaaccctggcccatcagcccccgaagtagactaaatggcaatggctccgttaaccacatcccgccatttgcaaaatcatccgcaatccgatatcccgagaagaaaagccaccctagcacaaaagctacattgccggttcgtcgcagccagcgcggcggtgcaaggccagaccgcgtcagttgtgctaccacagcacgagcccataaatcttggacaaagacacccacggcttgcaggatgaagaagaggaaggttccggtaacgggacgggtgttctcgccgagttgcgtgtagcttccggagccatgaatgagtccgctaattccaaaagcgacaagggtggtaattatgcgtcttacaatccgctgtgaggatactgatgctgggagaaatgagataaaccatttcgccgttgacacgaagccgaagcggaagatttgatgccaccatttaccccaggcacctgcaagcccgtcgtctagaatagcggtgatcgggccgaactggtcggtgtagagccagggcgcgtccagaggcgttgcagttagtgcacgagatgccttgggaaaggctgtggataagcccagaaaacatattggattcagggccgtcacgaatagaagagcgaagtaaacggcggcaccagtgacgaaagaacggtatgcccggatcaaccctgggaagattgaaagatattcgaggggaaatggaggtgttgcggatacactgcccaggaagtacggatcccaaatcactaccagcttgaggatgtccagggctagataagccacgaagaaacaagtgaacgcggcccgtatacggctctttgattgaggcccagcgcgtacagcgtctgctgggctatttttgggatcgagttgagaaggcaacgggtccaatgatgagattcggaagctgaaatctgggccacgcatattcagcaccagagcgagtacccaaccgagtcggtgcttgaacgatcgagggtatggctgccacactaaagtgtacgcatccctctgtacctcgtcctgtccgtacttcttgctgctcgtgtgcccattctgctttccgacaggactcttttctttgatagaccgtactctttcaatccttcggaaatcacgctcggcattgttaaagaaaagaagggtggagctccaaacaagcaaccataccatgatcaatccaaccatatacccatttccccccagtagcacacgacgatatcgtatagtctcagcgcttatgccaaggctaatgacatagagaatctggcgtaagatactgccccctcctctgcgactgggtatcaggagcgcacatatgagcaaaatgacagggagaagcgcatgccaaagtagtagcggcttagcatctccatttcgaatgaaggtctcatatcgctcgcgcgtatcgagaacgatgcgctcgtagcgagagaaggcggaatcaggatcgaccattgaccgcagctaagagatagcgagtgaaagaaaactagccaacgctgaagagcagatatgacaatgcgatggtgcaaatgagtgaaaaaccgtcagtgtaagcacccaagttcaattggacccctccttgacgccaccgacgatattgaagggggcaaggaggaaaatcgagatcgataatgccccataatcatgcttcataatcaccccgccacaacagcgttgctgctccagggtgtccacgcattcaaatgacttgggcaggcctagttccagctgttagcgtccatatcagaaatcaaatatagacgctttgtaccttcgttcgcattttgggagcatacagactgctggaggtatatttgtgagcaatcgccggccaacctcaacacaccgacgctgttgtccaaacaagtcaatggccacgctagtgatgaaccagagagaaaatcatcgtgaagactgtccaccattcctaaatatgtgctgctcttaaagtttgacaagaaatctatttcgcggacagtcaggattgttcctttatagaactatgcttaaaacctatctttcaataatatggcaagatggccgagcggtctaaggcgccagactcaagaaagcgattttcttacctgaacaaggtttctggtcttcgaaagagggcgtgggttcaaatcccactcttgtcaaaactttttttttttttttactctctctccagacccggctggtatattttgataagattgcagttaacgcgctccccaaccaagctggaggttcctcttcaaccaaagattatggaatcccgatcgacaaaaagatctatacacctcgtcgactacgctcccggcgaagttcacgaaggggctccggctccgccgccgaagtacccgcgtatagctgggcagcgttttggccaggacaccacatttattcccctcagccaggcatcgcaagtctcgctccaggaagacgaggacgatgctgccgccgcagatctcctccaagacaatcaagtagtcgatgatttttcagatactacacagcttcattacggagacttgaatactaagatagttggggtccgctattacaggggaacagccaccattggggaacatgttgctctgaagagagagccgcgtaatcaatacgatgggaatgcagtttcgcgtagataacgctatgggaactcaaattggtcatattcctcggaatatggctgcaaagctagcaacttacatggtaagctcgatagtctctcgagcttatccgtctttaagctgacctactataggataacaggctgttggttgttgagggtgtcctgactggagtcattggcgcttttgattgcccaattgtcctgaagctgtatggcccaagtgacctagaacgaagagaagcgttgaaacagagaatggtgcaggataagctgccactcaaccatctcaaaaaggccgagcgtgatgaaaagaaagtacagaaagagcgggaaaaagctgtgaaagaagctgccaagagagcgcgtaaggggcaattgctggaagctgcgactaatctgggctattccaatctttcccaaccgttcggggaagggatcattacggaagagagcctggatgagctcatcaaccaaagcagtacattcaatccccgcgagatcaatcgtgtgactgagagttttgggttgaaggagtcggacttggagaacatgcccatggttgaaagtccctcttctctctccaccactcttcttccctaccagcgtcaaggcctggcatggatgattagcaaggagaacccgggactaccgacgagcgacaacgatgtggtacagctatggaaaaaagaaggcaacaagttcaccaatatcgcgacgaatttctctacgactgctccaccatcgcttgctagcggtggtatcctggctgacgatatgggcttgggcaagacaattcagattatttctctgatactatcgaactcgcagccaaagacgaaagaatcttccaaggctactttgatcatatcgcccgtaggtataatgagcaactggagaaaccagatccaagaacataccaacccggagcaagcaccgcgtgtgctaatctaccacggtcctggaaggaaggaggatgcgaatctagaccactacgacgttgtggtcactagctacggcacccttgcgacggaatacaagacggagagcaaagccacgccccaaaagggtttattctcagtcaagtggcggcgtgtcgtgctcgatgaagggcatacaatccgcaacccacgatcaaaaggtttctccgcggcctgtgctttgcgagctgactcccgctgggcattgacagggacgcctatagtaaacactttgaaagacctttactcccagattcgcttcctaggactcactgggggcctcgaagattttgctgtcttcaacagcgtccttattcgacccctcatgtctgacgatcccgactcccgtctactgctccaggccctcatgagcaccatatgcctgcgtcgcagaaaggacatgggattcgtgaacttacgtctgccaactctaacgtctcgtgttctgcgcataaagttccatcctcatgagaaagagaaatacgacatgttccagtatgcatccacacaggcatatccatgctcaactatactaacaccaaactagatcagaagccaaaggcatgctcctcgacttcaaatccaataataaaaccggcaccacctactcccacctcctcgaagtcatcctccgtctccgccaggtttgcaaccactgggccctagccaaaaaccgcctcgacaagcttgctgctattttagacaaacatcagaccgttccactcacccctgacaatattaaagccctccaggacatgctccagattcgtattgagagccaggaaatctgtcccatctgcctggatattctcgaaacacctgtcataaccgcctgcgctcacgccttcgaccacgactgcatcgaacaggtcattgtccgccaacataagtgtcccatttgccgcgccgaaatcgaaaataaatcaagtcttgtcgcgccagccgcagacttgggcgagaatacagacgacgtgtcagcagacccggacaaccccagcagcaagattgaagccctgatcaagatcttaacggcgcatggccaggtagaggccacaaagaccgttatatttagccaatggacatccttcctgactctcgttgagccgcaccttcaaaatgccgggatccagttcgcccgcatcgacggtaaaatgacatcgatagcccgcgaccgctcaatgcgccgcttctccacagaccccaagtgcactgtgctcctcgctagtttgagcgtctgcagcgttggtctgaacctggttgccgctaatcaggctatccttgcggatagctggtgggcccctgcaatcgaggaccaggctgttgatcgtgtttaccggcttgggcagacacgcgagactacagtatggaggcttgtcatggaagacagtatcgaggatcgagtgctggcgatccaggagcagaagagaaagttgatgctcgctgccttccgggagaaggcgagcaagaaggttgatgatcgagcgacacgtgtggcagatctggagaagctcttaacgtgaagcgcaaatacgcagcttctttattctttttttatttccttcctactcctgtgtgtttacgcttcttctgtgagtggatttattatgtagaacccctgttgtctgcgttcgtctatggacacatattctacttgtttcaacacgtctacttatgggctacataccttatcttctacgttcatcagtctcgggctattttggagaagatggaatcaacaaggttcaatcagtttgtattatactcaacctcgcataagcattggtattttgtgcaaccgagttcatataatccatcagtttcatgtctgggtatcttgtccaatgtagaaaacgccggcgcaatgccagtagggtaaattacatcgattccccgctagaaccgggcagaaaaaatgatcaaaaagcgaaaaaaaaatttgcagcggcacagctttgtgacatcgtacatcataagacgcatgtaaaatattttacagggttgaatagttcaatagctggaacagagtagaatgtattaagagaataaccgagaacctcctgtcagcttgcagtttttaggatcagtttgactgctgcttgcatgggcctgctggtcgtttgcctcccaaatctgaagcggtctggggataggtcatggctgctcagatgcaggagcttggggtgtagactctttaggttgaagcggcattgattgacttcttggtgaaaatccctgctcggcgcctggtttaggggggttaaatataggagagattcgtcttagcggttcagacccgaccttatccgaaaatgtctgcctacggtgaatcgcagtccgaagcactgcttgagcacccgcaaggcctggagttctcgtcgcggacgacgctgactggtgtgtcgctttaatggaaggttttctcgtggaggccatgataagctgttgacatttttggactttaccatttggcgactgactatgcgacggttgcgagagggtttgaggcttcccttgcccattaaccagggttgtttcatcaggcgcagggctacagagaccagacacctgcatgtttgctaaaaagggggatgccctgccgaaatttgaatccgcgactgcgacatgtgcggaaattatatcaggcgcgagagcaggtggaccggtattatgcgcactttgcgggactgccggttggagggattgctggactgcatgatttacgctagcagtgggtggtgcgccgttaggtggattctgccgttgtgattgataagcattagggccgactgggactgggattagagaagcgggttgagctcgataaggctcttcttgcatctgcttgagttgtctttcagccactcttttggcatacgcagctgggtcagttcggcggagggtttcgtcgtcgaacgcctcctgcacagtcctcttttcttcttcagtaagcttgtcatcatcctcaacaaggaatgtctgcgtaagcttgatatcgcggattaacttattttctgcgcctttcttctcgtcctcccgaaggatcttgtccagaacagctttgtctttgccgatatgctctgaaacatcctgttgagcgacaggtctcgcagggaagatataatcgccgggtttcttgtgcgcagatcgaatagggtttctcttatccacaacgcgaacagcgagctgcgtcttgtaagtcgccttttcgtggatgatctcttgaaaagtcccgccggctatgaatctgtagacaaacacaggcttttgctgccctaggcggtacgcacgtccaattgcctgctcttcccagattggactgaaggagaagtcaaagatgataacgcgattcgcgcccgtaatattcaggccgagtcctcctgctctagtcgaaataaggtatacctgcttttcgccctgattgaacttttttgtagctgcttgcctggtagcagccggcgtctgaccatctagtcgtgagtactgtcgattggtgaccttcaataaacgttctaagtagtcaagtgtgtgtagactttgtgaaaagacaagaactttatcaccagccctgatagattcatcaatgatcctcttcgttattaccgcgcgaactgaaagctccacagccttcagatcatggacgttagcaaaaatacggagctgttcggctacaagctcctccaggtttcggattccagcattttcaatgaatccatcgcctaaccgatctggagatattgcctggtcaacgtcgctcgtctttctggtatcattcgttttttttgaggaaccctgggcctgactgactagtttatcctggaaacatgctgggtgattgcagcataatcccagaatagatagccacgaccataactgtgtctgtgtgacctcatccattcgtccttgtagaataaacgctgcgtacatatcatatgcctctttctgtattttggtgagaggtacagtcagaacaaactcgactttcggcggaagatctccctcaagggctgtgatgtccgcacggttgatctttggctccaagatctgcttgagaacctggagcttcattaaagatttccgcttctctccataggtactgtcggcataaaggccttcctttataggttcgatatagtttgccttgaattcaaggaaacttccgaggtaatcataagaaatccagttgaccatagtatagtagtcgccaagattgttcgccagaggagatccagtcaacgcaatccggcttttggaacgaaattgcattgccgcctgagacgtcgcggagtctggattcttcattttatgagcttcgtcagcgatgatgatgctggggccctctaaaagccaatgcttgaggtcttgatgcttagaatctgacagtggcgggcttttcttagctgtcgcctggttgaggacccaattccggaagatatcgatagaaatgagaagaactccgcccttctcattccacagtagattactcaaccaggcgcaaatccatattgtcttctgatgacacctgtct

SEQ ID NO: 5919 - DNA, 6308 bp, Emericella nidulans
tcatgacatgtacaattcgcggccgcataatacgactcactatagggatcacccaagcactatacgcgtttcattatatctatatatttaaatctggaagtaatctaagtagcataaaagagtaatccataaatacccaagtagactcaatcgacgtgcgtcaaattggtggcggcggttgtccgaacaggcctcggagcagcgggtgcagccctccgctctctgtctggttttcttcaccccagcatcctagtttccggtgcccttcctccatttccccgttcctctgctctaccccaacctcttgccctgatcattctcgagaagctctttcactagagttatcgctcctcttccccttccagagtactccttcgcaatggctcccatcacagatgacgtggtcgctggactcaagtccacgatcggtaagctcgaagctcgcattgaggacttggaaagccgcctcggcggtgaacccaagcccaagtctatcgcggagcacatgcgaatcattcttatgggacctcctggtgccggtatgttggaatatacggaattgttctaatcgatctctaacccggagctaggcaagggtacgcaggcacctaagatcaaggagaagtactgcgtgtgccacctggtaagtagtcgcggccggatgtacagggtaatatgacgctaattattccttccttaggctactggtgacatgctgcgatcccaggtcgcgaagaagaccgacctcggaagggaggctaagaagatcatggatcagggtggtctggtcagcgatgagatcatggttaacatgatcaagagtgaattggagaacaacgcagagtgcaagaacgggtgtgtattaccatactcatttgacctacaagccctgacgccggttcgcctacagtttcattctggacggtttccctcgcactgtcgcccaggctgagcgcctcgacgagatgctggttgctcgcaaccagaagcttcagcatgccatcgagcttaagattgacgatgccctcctggttgcccgtatcaccggtcgtctcgtccacccggcttccggccgttcataccacaagatctttaaccctcccaaggaggccatgaaggatgacatcaccggcgagccccttgtccagcgctccgatgacaatgctgaggctctcaagaagcgtctggtcacatatcacgcccagactgcccctgtttgcgattattacaagaagactggtatctggaggggtatcgacgccagccaagagcctggtcaggtctggaagagccttctcggtgtcttcaacaataagaactaagctatttatttgcttgcgtacgcagtttgctgaaataatgtgcgtctgtattcttgatataagtgatatgagcgattgtcaggagaatcgtaaatggctttgccctgcctttaaaaaaagcaggtttgggaatagagctgtctcaggggctgggtcgagatatagacaactggggctcgctatgtacaatagttcaaagatcgtgctgtatgagattcaactcgtccatgatccgtagctttcacagctgagtagggtaaacagtcgactcgatcttctcaggataagtcaacccattctgccttctcgcctcatccattacatccataatcacaatactctcctctagagacatagtctcactctccaatttcccgtccctcagacatcttgctacctcatctgcctcccagtacatgccccttccgttggcagggaagtcgaacttcttctccttgaactcacccataccctggcctttcacagggattatgcgatacacctctggccggaacgctggcccatcgacttggatctccccctttgtgccctggatacggatcgctggacgagcggtgttggtctcaatcggatcggtcgcaacacgaatagacgtggatgccacggcttgggattcacctggatgctcggaattggagggcgttgttgtcgggaacgacaggaggatcgtggttgcctcgtcagcaccggtgaggtggtagggcgttatatgcgcagagacgcgcgagggaggctttctcgcctccctggggagggtgtggtaaagagtctggaagacccaggtcagagagtagataccgactgtacactgttagcatgcagtgttataataaaaacgcatgagaggctaatgacatacggtcaagcaacgcttcgccagccaaatccttatttaccatccgatgctctgtgctaaacttttcttcaggcgtacccccaaagctattatccgccgtaacccttaacacctccccaatggcgccgttcttgatcaactctcgaatctcaatacttagcgggaagtacctcgtccacacagcttccattaggaatagattcttcttccgtgccgtctcaaccaaaatccgcgtctgctgcgcattcactgtaaacgccttctcgcagagaacgtgctttcccgcttccagacagagcatgacattctggaagtggtgcgagtgtggggttgcgacgtagacgacgtcgacgttgggatcggccaccagagcttcgtaggatccataggcggtgcagggggagggaatcccggtatttgcaataaatttctcggcgcgggacgctgaggacgaggaggagactgccacaactgtgtgggagatgtcggaggctgagcgggtagacgggtcgaggaggaggtcgcggacgaatgctgcccttatcatcaatatggctcgatcgtgaatgggagctctagtgcttaccatctgcaattccgccggtagctgtagttcaatttatgccgttgttagttgcttgtatctggtagagcaaagaggggtcatacccaagataccccaccggatgttgtaaggagccatgttagaatagtctacgttcgtaacctgacaaggaagggcaagcaagaagaagagggttagtcaggaggtaacagttgaataggagaaacggatgcagtatttataatgtttgagacaggttagactttatccattcctaccacggagttacgccgtgcgggtcgcggtccatttttcgacgtcatttaatgagagaccatgcggggtagacagcgtagtacaacagtacacataagtcagagacttgctaatagatgacgctggcatagttaagactacctctatatacaaaagcaccagatagtcagatgctatataagagaatcagaacaccttgtaggtagatcgcgccatgaagtatgtaaatccccgcaatgcaaaacaaccaccgggtaaatgcacgcttagtatccggcaaaataggaaatggtgacggtctgtggactagtaggaaaagcataaagcagatgcgataacttttcaagtgctttcgccagctaagactcgtgctgtttagaccggctcggtcttgatccgcacgttctggctaggagagtcagttccctgaggacgttagcatacagctcatggatattgaaggtcctacctaactcacctcagcttttcgcttgcccagaacagagtcaggggttccagtacgccctgatggcgtttctcgaccacgaggtggcccgtctttagtcacttccgcatagcagctggcatggtacacacgattgccgacctttattgcgtcctgccagatccagtcttgaacatcttccgaccaggtagactcaaacttctcttgacagatgggacacggtgtgttgcgcaacgtggcatcgttgggtgcccgaatccattgtttagccggtcctttctttgactcgctgtcgttgccagcggtattctcgctcgtagcttccgcgtctgtgataacttggtcgtctcccagctctcgtgattttatccaatcctgcttgaggttagtgagaactagagagatgtattggcgttacatacccgttcatcaacgtaccaactgcggttctgagcgcgccgagcggcatcagccatccgttggtttgtccgaaagtgccaatcgagatgtcgggccttcttctgtttcccttcttcagttgcgaagaaccgacggccacaagtgccgcatctattagatcgtgcttcgtagagactggcaatcaacatgctacgaggtctacgaaatgattagagcttgtacgcgaacctactaggtacaacttacattttgatggacgcggtgttcatttgaacattaacttgtacttctgcagtactcaccgcttgcggtgtgggcacgggtggcgtatatcgcacctgtcctggcactatgaatgggaacgcacctgcggtaggtgatggaactgaaccaaatggtggtgcggaggacgcaggtaagagcccctttgctcttagagctgcaataagtggattctctggtgctgaagaaggtatttgtggagtgctactgacgggtagttgtggaacagagggaacttggggtggagtaggctgctgccgcgcacgcgtggctttgatgagttccgccagtgtccctgggttcaagagctgctgaagtggctgcgagaatgactgtgcgactggcggagtggctatggtcggggctgatgtgacaggaatatgggaaggagcgggctgggctgcctgtatggagggcttgggagcgagcgctgacacttgatcacggacaagtttgagctgctcttgggtaagttgctggcgttgcataatgccttgcaagtctagaagcgctttaagtcgttgttgaacagatgggtcaagaggattattggcgaattcagttcgagcagcagcaatcaagacttcaacatcccgattcaaagatgaaaggtcaacttcttgtacctggagatggggcgtgggagttgacgaacaggcaagggatcgccctgttgacattagagactttgatcacgaataggacacacaatgctgtccgttggatatccatttgatgcaggcctatggccttgcaggagagattgcggccggaaggaatcgaccgggcatttggggtgatgtgagagtgtttcgccagccagaggagtcccaactcggctgcggttgaaaacatcctgctggcctctagcttgctgttgctgaagggcagcagtcctcgctttaatcaaagcgttttcgatgctgcgagtgatatccggcggaaaaaccggcctcgtatccaaagaccctggaactggttctttccaagtcttcagcatctcgtccagcttcctgcgggtttgtgagtcgaccagcgtgtatgcgttcatgaaagtctgatacatgttcctcccgaggaacagagtgtagggagtgcctacattcttcacaatcgagtcgactacatacaacgcaggtagtttctgagccggcggtgtctacaaagcgaggttagagcttgttcatcccatcaaactacaataaacggcagacgcagagggaatctaagagatgtcacctactgttcggatatgattctccagaacgcgggagatggccatcgcatgttcagtgttttcctttgcaatgacggttaagttgctgatctgaaacctgtcattggtggttaggtcttccaaggagttcttgtagtcctcggcaacttcatcagaggccagcgcggctgacatgatggtgaatacaggagtgagaagtcgataacaggggcaggtacagagacagtgacagccagagcggtatctcaagaactctcccaagtctttctccttctctgttcttatttctttcttcccctctctttttctctgttttttttttttttctttttcttttcttttccctggtctttttttcttttcttttgcaaatgcagattcttttggtttccccttgactaagtggaaatatggttctattctcacgtcctttgtcttcctggaaacagagttggagaaagttccgaacttgtaaatggttgctagctatcttggtccaatctgagaaaacaactagaccatggacgtagacgccaatcctgcacaagtataaccgaagacacgatacccgcccctgaaatgtgaggttaccgcaagtgtaattatttcccctccaatggccacaactagcaaataaaccctgatggtgcaaagaacgcaaggacgatatgccgcccgacggacagggaaaagtcacacgcgcttggtcctaaaaggagcagatcaattcaagaagaggaaaataatcgaataagaagaagacgaggcaaaggaatgaggtcaaatcagggtatagtgaacgaggatgagcgacaagggagaggttgaattagccgcggataaaggttcggaaagagataggt

SEQ ID NO: 5920 - DNA, 5818 bp, Emericella nidulans
accgaaaaggcagtcttcgagacttccgtcggatttgtcatatagcagctccgcgtccatccccggcagcattgctgatgtagaagaggatacgggtgatgctcaacatgcccttcgcaaggttttacaagacaagggccgcataccaagatcgcagacaatcgcaagctttggctcccggtcaaatcgctccctgcagtctctggcacagctacagtcgtcgcctccacgctttggtacggagcgagagtcagatgctcgcgaagcgaatacatctcccacgacagtgactgaccccgacctcgcaactccttgcacagaccgatacagcaatccaagtaatggcaccaggtgcatctgcaattccatggataacggtggccatctaatgattcaatggtacgattcatccttccgaccttatatcaagtactaactactgtacagcgaatcgtgcagccactggttgcacaccaaatgtgtcggtctagaacggtccaacctcccttctgtctacgtttgcgttttctgtgcgcaaacccctactcggaagaatcgagtccgcgttccggtcaatggtgttggccatgcaccgacttcaccactcgcccataagtcgtatcgtctccgataatcaacatgtacctttacgttagagatatgctttgactcgcgtccacacccaaccacaaccctttcctatgcatttataatgagtcgttctgtcctaaagagaggaccggctttcactatcctgctaggtctcctttgttccatatgcagcatgttagatctcataccgttatcataccaatacctatacccatacccttttctttgcggcatcatacagagacaaacatatgcaccacactttgtttctttgttcgctactaattgttaacaatagtcggctaaggaggataggatagcatacctgtatctaagtctgacagaatgaatcaattataacaggacaacccattttatttactaaagagattgcatatttcattagagcactgttgtttaattggccctaaaacggctaactgacggccgaaccatgtgattcaagatgagtcacccatctgaaatgactagccactataaactcgtaaactaaggatatatataccctaagaaccgtctaccctaccaatctcttcccccagaccttacagcccagttccgtacacgagagctgcctcgacgacccaacaaccgactatcttacctatccatttgaccacctaggcaaactatatggcatccacaacaatgtccccaaaagcaagatcaacatccaccgattctagtttaaatttaagctttcaaaccgcccgcctatccttcatgcgtctatgtcttgccgacaccctcgcactccacgaactccgcaccgagcccgaggtcatgaagtggactgtccaaaaaatcccggacgcgggtctccagcagacggagaattggatcagggccacgatgactacggacacttacccctttacatctagttcagatcgggagtatgcagaggaggggagtcctgtaatggaccagaccgagaggcaaagccaaagcaataccaaaagcagaagcaaggagaaatggttctgcttcgcggtgcgggaacttgcgtacattcagtcgcttgaaaataaggatgacccccggcaagaccgcatcgtcggtatagtcgggatcaaagaagcggggtctccaattacaaagagactccaacacgagctcgggtatatgtttgtccctcgggtttgggggaaggggtatgcaagtgaggcggtgaagggtattgtgaggtggtggttcggttatcttgattctctgaatttttcagggttagaggattcgagggcgaagggtgggaaggaggatggaggggaaggtgaggctgtcgataacgaaagggtttatgccattatctcaaagaagaatggggctagtcggagagtgctggagaagtgtgaatttcaggtcgttgggagaagagaaaccgatgatgttgggagtggtgatggggaggaactaatagagttttatatttcccgagctgatgtgatgacggagagaacttgatatagaaccgacggtgaaaaaaaatcgtatagagggtataacaaaagggtatataaatatatatacatgaaacctgtctacagcagtcacgaagaacaatcagtcagtaaaacgtcaagaggagcatctaccatgatggctatgcagaagaagaagaccggtaccatatcgacgccgaaaaggtgaatctgtcgtgcaagcctgatccacatctgtaggtgatgcaaaatatcacgaaaggagtaaacatgcccatatccgtaaatccaggcaaaccctgtgcgatgtaatcgatagaatgaccatgtcaatatccatctccgtaaaaataaccatccttggcctttgatgaattcagtggccaaactccagagctaccagtagccgatatacttgggcggctcgcggtgccccatacatattatcccaaaaatgccatcctaactcgaactgtacccatacacaatagagcgccggtatccgtgggtaccggcgatatttccaatgcaaaataagaagaaaagaaaacaaaagctccgaaactaacgccttttcgatccgaattacgcctggccggagacggactcaggctagaatgctcaacgctgttgaccgttgttccgctgctgcaactgttgcccgattcgcaaagcttcagtcccgtcatctgtaatgggctccttgaaccacgggtgtttcagggcatccttggcagtaatgcgttgttttgggtcataaacgaagatgcgttgtaataggtccaggaagagtcggtagaacttggtattcgttggcatgaacgactgggatgattagcaactggcctaaaaatgctttgtttgagagaagacatacagtcagtcgacgcattgcctgcacgtatttctttgaggctcgtgttgtctcttcatttgggtagtcaagacggtttcggacgaagtacctggaaaattagccgtgatcatgttgcagaaccgaaaacacttacttggccgcctgattttggttaccattccgcccaccttgcatcacttgacggaccagcttcgggtctatccgctcaccaataacggcttccatcatagcgaggtgctcgagattgtcgtgagtctggaaaagagcatcgcccgtaaagaactcgacaaggatgcagccaatactccaaatatcacatgggaagctccagccaagattgagaatgatctcgggggctctgtagtgtcgagtggaaacgacagaagaatggtattcatcatcgaaggtagcagagccgaagtcgatgaggcggatctcactgtcaagcaagacacgtctctgacgagcattccgcgatattgcagtggatgaggaaggaatagtgcgattgtaagtaaaggtttggtacgcgttcttgacaaggagaatattttcaggctttaaatctgtatgtatgagattgaggtcgtgaaggactgtaccaagttaactgaaatccagaggaaacatgatgcgaacaacttacaggccacgctggtgaaaagctgccgagcaaagctctgaatctgactgcttgggaacgggacaaacccgttacccttgaggaaatcaaagacactctgtcctaataagtctgtgacgatacatatatggtttcggaaatcgaagcagtctcttaagtgaatgcatttgtttcggttgtgcttgtcattggacgccaaagtcgaaagtacgcggagttcgatccgtgatgcgtcacgatacttttggatggaacgtataattttgatagcacagcgagctttgcgttgtttgtcatatgcttcgacgaccttgccgaatgttccttgccctagaagcttgattatcgagtctgacgaggtttagcaattgcgaccatacatttgcgatttagagggtactcacatcgatcagtgataggggtattgggattgacaatgtaatgaccatcgtcatcatcgtatttttcgcccctattcgcatactgagccgacagttagtgacattcacttgctagcaatgacaatactcacggaacggacaaccggcacaggcacatccttggccttgataggtggcttgggaggaggtatataactcaagaaggcatcggttgccgtctcctgctctaattttttttgttgatcccgcacagactttcgcgtcgccacccgctttcgtttctggccgacgttggcgtcttcataataagcaccattgctcgcaccggaactgccctgtgaaagagatgtgggagcagtggtgtgcaacgatgcggtgcggtctgtggagagggacccggcagacgactcctcgccgtaatgctgagggttcgtggagaatgagggacgatcaaagtatcctagatcgtatgcggtctcgatcccggtgcgtcgtctcttacccgcaggatgggcagtattgccattcgcgacctgagcggtagatgcggtcgggtaagtgcgcgatgcggcggcagactggtcaggaggaggtgtatcatcaatcacaatgacctcctttggtataccattcttgtaaaactcgccccagtctggttttttccgcctcccgttctgggtcgaaacccccgtactagcgggtttcggaggctgtggcatggctgcggtacttgtagcggtcgaagccgcggcggccgaatgaggggactgggtgtatgggagtgcagctgttgttgaaggaacggcgtaaggatagacagtcgagttcaggtgcggagaagacgtggtcggatacgaagggttcggtaggtatgtttgatgatggggaaatccgtaatgctggtgatgatgcgtaacgggatgtgtggcggtggcagttgagggtgtagacatgatggtttagagaaaccgtccggtcgtacgagcggcggatggggggaggaagaggaagggtaccagtgaaggagagaaagaaagagaggaggccgttcagcgtcactggtagtccgctgtcgccctcaatgaacacggaggcgtggacacgccaggccgataaacccgggggattctcgcgagaatcacagtctcgctgagtaaagaacttggatagtgagttgagtgaagcagctaaactgcgagaaggcagcaggaaggttgagactcgaaagatgtgacgagcaaggagcgagaaagtgagagaggcgtggggagtgatgcgaggcggtcggtcggggcaagaaagcgtgcggtccgtccggtaaaagggctctacaggacaatttcgatccagttattttttcttttgaggaatggtcgagggcatcctgaagaataaaagaaaacagacgacaacttctaattcagggtctgtcagagtggtggttgaaagaattgttcatcatttaatcttggatactaattgagttgacgaggcgacgggatccctataccagaacagcagaaggcagagtcgtaatgctagggtggctcggttacgcctttggggcacgtccactcaaaagccacggattgcagggtgtttacagtcagcccgaaccagcctgtccaagagggctcagactctgtggaatgtatgatatattctttcatttttaaatcatttccctttctcatggtttcggccggcaaacacccgaaagtaacattatcaatgtcagaaataggatgacacgccgctaaatcttgtctccgtgacagtaggcaatgttttcgactacaattggacctgcgacaagtgggaa

SEQ ID NO: 5921 - DNA, 7495 bp, Emericella nidulans
  unsure (1)..(7495): unsure at all n locations
tcacttgttcagacgctctcattgcgccacagcctgaacgatgcttgctcaaaagggcccccaaagacgggaaagaaatgcgcttatgcaaaccagctgcgcactctaacgtggcttagtaaagccaatctccagcccgtcgatcagacccggttgacgccagcggcccgcctaactctggcccttgcgcatgcacgttggttatcatctttcatctcgtaatgacagttctggactcgtccgtccgagggcggaccggtactcaccttcggggctgttcggcggctgccgatcaaagcggaggtgatgtcgagagcagaaaatggtgtcttgatactgcagatgcggtcgcaattgaactaccatctgcggcagactgcgtgtcgcatatctaagtgcgactgccggctgcccgtttcttcgactgtgcatccgccagcacgagggcacgagtcgcacctatctaggaactcgaggacacggccttggaagtggccaatgctggctcagctgtagtcgcacatgagataatcggtttttccaccggtctaaatataccctggaatcttataggattgggccaatcgcggtcgaccgcttggagtagccaatatggatcctgctttcaaggaacaaataacaggcgagcggggttatcctagtcattcgaagctagtctctttaaggcggaaggagagaaagaggcccagnccccacagagccatctgcgacagacaggcccccggccaacaaaaacgagcactgcagaagcgtggggatcacagccacctggtggttacgcatgtttcgacactcgagtcagcttacgtgcgtaccatcaggttgggtctggagggaaggtagtgcatgatgatgtcgcgcagtaccggtacaagagctgtcgggtataaaacaaagtcaaaattgcataccttacttggtccacggagaccgacagagacggttcatgcaagattgacgaagctggagctgcacaccgaaagcgagagacgcagcagaaccaagccattgggccctttggtcagccggaatgtgaacgacaagcgggcttgcttaaggcaggtataaacctttgtcgttgacgtcttctctctaccgacctcgagaatcaagtagagactacatgcaatcccggcttgcctaggccaggaggtgacattccctgcgtttcggactgagcactcggcgttgtacaaggcgcactattcctggactgtctgctagagggcccgagtagccgatattaaagcaatagtaatatattgctcagcggagacgggtttacagcgctctcacagcgagttaacaggtcagttaatcagtcagtcagctctttctccggcagtcagtatgtatctgctgctgcgaatcctcccaaaaccagtcagcagaaatcggagcatttgtcgttcaaccagcagcagaccgtctagcccgagtctcgagtcgcagcaaggagtaagggggtcccttgggtcttgtcatcgagtaacctcagcttcccctgcaatctataatagggctctgggatctttgattcttcttgttgatcaagtagtgcaggctttggtcaccttattctgctaccaccagcaagacatcctgagaagtgagattagtttcggtcagcattggactcgctttcgctttggtttcggtttgcttaattcggtcatgttcaacgaaactcggctctcatccgcctccgtctagcaacatgatatggagtgcagggcaggttcagaggccagaatcttgctctactaattgaaaatttgtttccactcgtccagcagctaatctacctgccgagcagaaattacgagagccagaactaacccccttctcgttctagcaggggagcaatgctgccctgaagctgcgcgttttgtcagagcactaaatcatatggtaatcattatactaacgagaaatttatacatacgtatcaaataaacgataaatctcactttcagaaggcttaactatagtattgcaatgattaataagaattatattgatatataaataggtggcttatagctagacaagattattgataaagatatagcctaacaggataatgcctgcgctaggtaatgttttttcccccagaatcatcggcaagagtccccactacagcgtatatatcatttattctaccgaagcgtggtttaatatcatagatatgtgagtattcatgagcttaacaggcagccgtttcctgaagggatcggcaccactggcctgacagcattgctggaggatacaatccagcagcactggtggctttatacaggcctccctggttctcatgtagtccttctagtacagatggaagacttctgttgatcagttattggcgggatctttacagtatctttgaattgcagatggttgactctggcaatattgtgcatagagcgcatacatgggaactgatggcagcctggacataggaaggcgactcccatttcaacttctatcacgaagccccattttggaacttgataggagtgccctccttttgtctcttcacgcccacatattaagtccaagtcgtggatggacagacctgctcgtcaaacgatgtctatcagtgcggccagttgatctctgcgaaggcgaccctctgtcttttgatcaaacttaacttgactatgcattggctttcgacatcccagcttatattgcgtctcacgaacagtttcagaggcagccttccgcacagccagaggacgacatggtcaatacacagctatcatcagaaagctttcggatcattgagatgcaaacacttgttaacctccttgaactttctcatggacccgcgctacacagtggcaaccccgggacttgtaaagaattggtacaagaaaataccggcccattggctgctccggagcaaactgagataggcgagcaaagtttggtgcagccagttcctgagtatcggaccattatggacccttcagccagtttatctcaggctcaggataataatctcagcagagatgctggaaattccgatattgaactgggcagacagaatgatatggaggagacgcttcgtcaagaactctagagaaagagaaggatctagggactagtcacaaatacacctttgacactgtctctaaactaggcagtttctaccagaattagggccggctgagtaaagccgaggccatgtaccagcgagcacttgcaggctataacacgacgctatcccaaaatcatctttctgttctaaaagcgaagaataacctcggaagggtctaccataaccaggggaagctccaccaagcgggggaattgcttcaagaagcactgactggcaagaccatgatccttggtcttgcgcacatctccaccctcagaactctcaacaatctaggatccctgttccaagaccagggcaaactgccagaagcagagagacgttgaagcaagcactggtaggcaaagcggtgcttctgggctccgacaatccatccactctcagagccaagaacgatctcatgaaattataccgtgaccagagtaggacggagaaggcaagagatctcctcaatcagcattgaatatcccgaaggcggaggattaaaaaccatgctagaaaggagacgctgttatcaaatgggataatgctgagttcatgcaacaacagaggttagccacgaattgggtgcttcttgaaagcaagtaagtgagcccttccagtcctatgcgtcccagggaaacgggtacaccaggccaacaatttgatggactaaatttccctctggggcattgcctatggaccctttctgcctgatattaccatgttgacggactctcaaagtattgtttaaataacctttaatgcggacagcttacattaattagagcctactgacccttctctggtagcgattcctccaaacacctaaaaagcccattacttgcttcctctccgatagccctagccattatgtactgttcactgctttctagtttcatctccttcctcaagttacaggtggggcaaagctccatgcaaaagaacatgttctcagacccagctttatatatattcgatctttcttaaagaaccgtagaagcccgcaagataatcagctgccagttcagagtggaaagtttccgctgtgcgtcatcaaaacaggcgccagccaagccaaataaatgaggtgcagcccgtgggatcatgctctgatgaaaagtatattgcgttgcaacggcaatatctgcagttcgtcgcgtacctgtggtggaaattagtcaaggtccggataaggcactaaacagtttttgtggtacgagtcttgcccaggcgagcctgatattgattccatctgtggctcccattccgagttatgctacctcatgcagtctcccagtgcgagatattgctggctttacaagcaatcagcaaggcaagtaggaaatacttaaagctgttcggtggcacaggatgtcctccgaaatagatggactcttcgtggtccgggacatgggatgacgtacgcaatccatagtggtcaagcaccagctcgtcccagctccaagaactcttatttttctaccatgctgtcctccaacagtgaagtcagagtcataagctactatgtctttgacaacattctcaaagtagcagcaatgtcctcaattcactctgcggcagcctgttgcactctattgggactttgtgcctgctcctgccgagtttcttggatatgtgggcgacatcttctccgcgaaagtcaccgcaaaattgactatctcactacacaggatgtcgagagcaatactagggcagaggaggttcgtgaggactttctcgccgtggtaagtatactcgcggaatacatcaaccatcccaatgcgcaaaacctgcatgtttctcggaagcatactgctgagtacgctatcaggccagaatacagagctttagctatctgactactagaacgagatatcaatatagcgcaaggaatacgagtcgcttgtgcaagattaatcagccaccctatcgcttcgtagacagcccattgacatattgtgtataaagtaatccagcggtcatatcctgaaggtatcagtctgaattggtaaactgacattacctcaagtatatggcgtggcatggtcggttggatctatagcaattattaatcaatgcacacgaacggcgcagagacagtgatttatccctgggcggagtaaagtggctactgctggtgatagccagacacgaaccctggagaaaggtgaaaagagcccagttatcgaaatgaggattgctaagggtaacgaaggttcagacatggatattgcaggcttttcagccggagctatagaaacctaactaccagagaagctctaacgctggctacagaccctcacgttcagttcgtatgtcagaatctatctcttctatcatcccgagacttttgtcaagttatattgggcattgctggtcttatgttgaggttagctggctaacgtccgttaggcagccagcgccgttaacaattcgtaatctgtcagttgcgtttgtttgaggtgtaattccagcagctagcttgtccaaattccatttttcttttctggctcagcataatgtgggcaattgtatacccgtcgttatttcccactctgacctttccgtcatcaccgtacctcaccctgacccccacagaaaacggcgtgacgacaccgacgccatacgacctagcattcgaacatatacctgtgcagttgggaggctttttgcatgctgcccttatccgctgccgccacccacaaccctttggagctacgatagcggtagcggtggtcatgcttgcagtggccgaacactagcgttgtcatgcccttggccgtagagaggagttatactaacagggcattgttgtggacacatcctgcacagcgcccagcttcgtcgacttgtatatacctgtttagtcttttacttctatgtggataatccggatacgagtctcactgtactctgagtacgcattcgcttttcaagtacttgacaacagcagacgtctttcaatcagcaggcagtcgatgaatattgtcctttaggcccccaccggcaagatcttcctccaccgtcgtccgtcatcattccgaaacgcactagcataacccagcagcaacctcggcactaccagattggaggaagacctgaacaatggtattgttttttatggctgcctattcacaggctggaacaatcatccggtggtccaagaaagaaaaaacagtcctagtgtcttttctagagggtttgtaatttgaccgtagcttctgcggctacaaggacagtgtgggaagggctcctgtacatccattggccggccttgctattagacccggtgctcaagggagcgcaagtctacatttggcatagtactcctcgctactggttattctcggccgacgcggaacagcatttgttatactagccaaggcgcagtatacggagcagaggagcactgtgatattagacggcgacaaccatcaatatatattaattgcgtattaagtacgatggactccccatcggtctagatcccgctgtcattattactgacaaagtgtcaggatcgaatctagaccagtctccgagctcgccataaatagtggatatagggcagacgccactatgggaccatgtcatggccgtgcccacgacttgacaaaactagcggcgaggctagctatgtggatagaggcctgaaatagcaccgtttgtaataattcagtatagaggaactggattagtttgttattgatatcggttttggtctcggtcctcgatttggtgtttcttgtcgagggagcatgccaatatgcttactgctcttgggttctctttctttctcattttattttctgtatgtatggtttgaatgacctgtaaacaccggggtatactagccaacggaaacagcaatgcaaaggaaatagaataatacagctcgcccagagtaagacagccatccgcgtagtcccacgacctatattcgatcctcgatcgtccttcttggcccaatagacgacgccccatggtcatccgtcccatcctccgtatgtacaatcacttctgttgtctgcacgatccgcgtattgatattgatggggcttttccgcctcgtcgccgtgctcgcgaggttctcttcgctcccgccatcagactcggatattgacgggtggtttgcatggatctggacgtggtatttctgctcctcgggatccattcgactttgaagcatgctgccgagaacgtggctgttcgggccgtaataagcgttgccggtccctgtcactccggtgcgtttccgcgaacgcgatccgtacccggtcaggctgcaggtgccaccgataatgctcttgactaaaggcttgattgtggggaaaccaggcggcatgataccgacgttgaattccactgaat

SEQ ID NO: 5922 - DNA, 5392 bp, Emericella nidulans
gaattgagggtttggaagtagggtcagacataactagtcaaactcgaggagttgcggagagaaaccaggtgtggttcacgaaataagggatatacgtgaggttgaagtcgactcaatggacaagcagcaccggttaagatccatgtgaggttgatattcaacctcggctctctgtgttcggttcggacgctaaggtctttgcattatgagtacatcagctgctatagcaactcaatagttagtctccgtggcgcaactggttagcgcgtctgactgttaggagagatccttggttatcaggaggttgacagttcgagcctgtccggggacgatactttttcttttttcttaacagattctaccggttgataattctggaattcctgtaacaaggtcgagaaccgtagatatcgatcatgtcgaccgttagttagttacctcaagcaattacggccattccgcaaaccatccggtagcattttctatgcaaggcgtggttgtatggtttgcacgggacttgttttatgccggcaacccacgcaaatatggttgagcaatgctttttccacactgaccccatcaatacatgcagctcgttttcggaagactagcaatctgaccgttctgcatagagcaaaaatacgtcctcggacaggctcgaactgtcaacctcctgataatcaaggatctctcctaacagtcagacgcgctaaccagttgcgccacgaagacggacattttaacatcgacatttttactagtgtaccagtaatgaaactctgtctgatactttgtatgtgataagcaatgtgatggctagttagttaatttcactgtatgagctcatagttggcgtgcagtatataggagattatgccggccctgctatagctttaggtaaatgggtatcaagccctaacaaactctaccaaaggtctatgctccataaagcctcgccccggtgtcagccacttggaatatatagtgcgtatatggtctgatttgggctggtgagcttcagcatgtgcgcttattgtaccacgacagtccgcgataccagaggcagtccccaggcttccgcttggacggtgtgggccctatcgaacgccagttgatccaactccgggatgattctgtaacttcgaatggagggcaaagttatcgcttgacgcagcggggctagagtctggatatcagaatgcgagtgccttgcaaggctgaaacagcctggaaatcaatacgtatggcagagtcccgtgttctaaccaacacagaagtccaagcctgaaatgcgagctttagttcgactggccgcagggctatgataaattggtcaattggcacatgaacccgcctttgatgtggtccttttatctttcatagatgatttatatacctttcgtgcgaccgcctgctcagcattgtctggctcatacaatgctatatgttgcatataggagacacctacgaacaagccataaaaaggaaagcatgccaccgtcaaatgcaacgcaaaacagccaaccgggcaaacttgcaagccccgtcaaacattaccacgagagacgcagctcattcgctgtaggaatctggattctttctatcctagttctcggcctggctgctgcagtggttgcgaaagctcctgctagccctctgcgatcttcagcttcctacaatgtcgcagtggtatgtcctcattcatcgcatcgtgctaaccacccgatgttattatatccgcgcaatgctgaaatatagcaggcatcgctccaatttttcctcttcttcctcgccggctcaaagccggtatcgacaaccgatgcacggccacccaaggcagggactatcacgctagtgatttccacactcatctgggccgccgccttccccatcatgttcatcttcgctagcgaggatgatcgctatgcggtggtggatttccacgaacatgttctggctctagatataggtacgggcgttgtcagtggactggagaacattaccttggcatgcggagcttttggagcttcgatattgtaggttattcccacggtatatcgtgatatcggcatgtcggtatcccagtgaggagtgtactgacataacgactctcagcttatgtatcatatttcagtggtattatactgcccagctataccgaggccacttcactcgcgaccatattgaagcggcgtataacgactaggcgagaagaacaaaagctgttgagcagttctcaaactagaactggacaagacaagtgcccaatgtctagtctagtgggttgctgattcacctcgctggctcctggcctgcacttttttaccgttgagagacatacgacaactaatcagaatcctcaaaacaagggccgctcaatttgtagaagacgcaaaaaagctacctgcgcagcgattgcgcatcagacataacccaagtatgtcatactgagcgtaccgctccggccgtagtattgttcttatgtcaaacaccatcctcttcaacctagcacagagccctcattccacaagctagtattccatcaaatccatctatttccggtgaatgcgatcatcagcatccctaagtaacgcaccactggaagacgtagagatttaaacccccttcttgaccatgccattaccacccttccagagtgggaagacaggttaaatccatactatactagtaacgattgggtaacgcccgcgacatccccaaggccagtacttgggttcctacgcgtacctgccttgtcttgacggaagttacatcagactataccctgccccctctgagtcaggtcttgattggcaaatatatgtgatgactggaagacctatatatatacttgcggactcctcatccaaggaaaaaagtcccaccaacttgtcgcgacagaatcctcaaatgcagggaataataaacgtccccggacaggctcgaactgtcaacctcctgatacccgaagttattacttcttaacagtcagacgcgctaaccagttgcgccacggagacgaatcgttaaaagcaataaatgttgcctaacctatgtttcttaccaaatctgtcttctgataaaacagcaattgccacaggacatacccgtggtttcatcagacagccaccgatggcttggttttgtgtaaacttcggctcgatccttacttgcagccgctcatgcatgtatagagcgtgtattctctccttagggagaggaccggcacctctcttcaaaaaaatatgaccgctttagctaagttgagttttcttatagggaaaaaaagaaaaccgtcctcggacaggctcgaactgtcaacctcctgatgactaaggactggatttgacttttcaaatctagcttcctaacagtcagacgcgctaaccagttgcgccacgaagaccgcttattggttgtcggcggaagcgaatatctatataaatcttgatgcttttttgtttccaaatctttctctctgatatacggatgatggcccgcgaaggatgtgccgtcaagtcagcagtttggtagtaacataggtgggatatgaatgttttgaccttatcgtggtatgggatgagtgtagctgaaacccactggaagtctgggcttcttccgtgaagcagccctcctttgatactactattccttaggctatatagaaatttatatttttgctcaatctaatacggtgaacgtcacctgtcatggttcacgcaccaatcatcaattttgtaaccactaacctccgccaactgcccatccaccgctagtatacccatccacctcatatggaaggcaagtgaggttccaaccattcgtacccaatgcaaaaagccccaacttaggtcagtcgccagcactataaccaacaaaagtcccaggccccactggctgccctgtggtaggtgtctgatccctgtggtagacatctatattgttttcaagcaaattaaaacagtagcccgtgccgttttatccagggcgagaccatttacctgccgcatcgagccgacaaaaaccatacaatagccgcatgtacgcagcaaacacaaccctcgatggtctgcactacgccacagaagacaaacggcaaacacacagcctattgcactaccgagtgcaagtatgaatccttcgctggccgcaggcagccacatggactcgagcaagaaagcaccatcaaccatggcaccagagaccctcgaccatagagcgcacctcaaactgacgccccaagtggctcctaaacgctgcgcttctcccaagcctccatattccccgatttagttgttatggcgcgacctggtccatgaccggaaggattgttgccattgtctttgccatgacaagcacgagaaagtgtgcctgcaagaagatgcccatcgcgaaaccgctcgcacgccggtttaagaggcttcactcaccctagcagaattctgccatacactctcttgcccggggaagcttgggtggcttcctactagggaaagagtgatccagatgtacgccaacacaccgtatctgctcagcatagaacccaatcatccatgagccctctcctagatttgattacaccgacgaaacctcgtggggcggaggacaattgaatagccagccgagcctggaagtaccgtatctgttatcgaggaatggcggcaatattgtcgcattagcacgctgcgcctgccaggatgctacctctcccctatggcacgagtagtgtaaaagcccaactgggaacaagaggatgctggtgtagtgcaattcaaggatatagcaccatggtcatggtgagcctactcacagaggtgagcatcttttcgctcgctggttaaagtcatggtcgtagcaggtaaagcgctgtcggcgaattcccaacaattcataccgagttcgtctcgcttcctcctttctcggtcacacaggctttccgtggcctccaaacccacaaatatcccacaaactccataccatcaattatggctctataaaaaactgacttcgaggctacgcatgcgataccgcaataggaccaacttcccaccaaggtatgcaccccacccatccttgtcttactgagtctgttatcctacaaacaatgctgccatagaacactaaagctcaaagcagcccataacagaaaagagagagactgtcagctccagaatatccgctccaaacgataacagaatctcaaatacctcaccccagccttcaagttccacccaggtctaaaaaaaccactcattaccaccacttattgacctttaagctgagatttacgagagacgccagacggcttccaagataaaacaagggaacgatgcggagagaactgttcacgtaaggctctgcctacagagtacagtttacccaagtccccggg

SEQ ID NO: 5923 - DNA, 9840 bp, Emericella nidulans
cgtcatttgagattagcatcgttatgacacctactggccgtaagttagtctttgcatagacgttatttatgaacatagtactcgaagaatacaggaaattcaggtcttttatgacgcgcttgcaggaatatttcgtctaaataaaatgatactttgccacgctttgtctctagataggagtgcccgccgtccaaactcatgttttcgtgatattcttcccaaagacagaaaagccacaaacgagctgtccaacttgtcatcatctcagccgttaagtatgtacgatggtgacatccggaagcttgagcgcatttactgctgtcctgagcggaggaagcgcatcgaggacggtgactttgctatggattcacagtaggatacgtggagcgtctgctgtgaagagggtctttggattggcgaatgctatgggcaggaccatatataacagtgtcgttgggtctcagctactgggcggtggctgaagttatatggatgaacagcaaccgcgataataaggattgttgtgagaacttatgctctagtagtctatgatcatgctggtgttcttggagtatcctcctcccttttgcataaaacggaaacaaagatccatggaatgtcattctaatacagcagactcaggcaggcagagcttggcttgcagcagactgccgtctgctgcctgcactgcgctggtatcttctgctctcatgcctacccccactcttctaacctcgccgagcttcagctcccccgagcactaaagggcgcgaacctagtactctactccgtcttcaaatccctcaacctcgacgtcgaagtccttcccatctagagaaggatggactgaactgcgacgaaaatccccagctgggtatcacaggcagagtccctcacaatgaataggacagccaaggacgcggatatcaccggcgtcaccgtttttatatggaagaatacgagtatggccatgaaggggcgctccagaagtttctcgagaacggccgaaaacctcaaccgacctacgtggaacttctaccgccagcgtcagctgctgagcatgcagatctggaccgacgctggaagctcctcatgctgtcgcgtcgcgtgagcggcatgcaagacctcttggaatccaccgcgggcgcgaatctagccatcaaggaggatagattgcttaagcggacgggtgcccaggttggaatatcacgtcatacttacgggatatctgattgcgattctgaagatggcattgacagggtacactctatcaagtcttgcagtcggacttcttttcaaatatatatgcaactaacttgtcctcttagtttacccaaactatctggcccgtgcactatctccctaatatcacctggataacggagccaaagcatgagaaaatggcatttagttagattgcgtacgggaatgaggcctctattggcacgaggtactcatgtgcggccatacttgctgtggttccgccggctgggcaaaggattgggactattcgcgagaactatcccttgttggtttgcctcaggctggtggaatgggactgattgttatctaggggaataacacaagcaaggtggtggggtcctgggctttttagacacaagaggcctgtcatcttgcttggaatgcaagctatagtaaagttgctcctgctgatgcctgaggccggaatcgccaccacaacaatgacgaaatatatcctctagttcattttcggctatgtcccgcttcgaataaccagtactacacaatgcatccatgatctagctagatcatagatctttggcatgttagaaaaaaaaaagtaagaaacaacgaaaactagtgagatcgtatatttatattttcgctggacctgcaaattcctgcgcatatacgtaagacaaattacactagttgagctctacttagatgggtggcttattagttggactccaacaagtttccatggtctagtggttaggacggcggtctcatactatgtatgacagctcctatctaaaggagttggaaatccgcaagcacgagttcgattctcgttggaagcacttcaattttttttcctatctttcattccctttcggttgtgcgtgcgtggaatggtggtggggtggtggtggagcgggtggggatgccatggcaaagggtgctaatgaaccacatagtggcagaatagggctgcatgaatatttatatgagtcgaatgtctaagtttatctattaggagggttaaacgtgctagtcaactggatctttatagtactcagccatacacgtaccttccaaggtttcgacattagtatgccagtatgccttatggtcatataagagcgacagtatcatgcgtggcgacacagcgtattatgtgtaaggggtactttcatgtcatgtccctagaagtgggcgccaaatagatgatatatgctggcattggcaatgcttaatttacttccctgggtttatggctttactagaaggtatacatctttcaccgtttctaccaggagctcatgaacgattatagtagagtcctgtatgaatgcatacaagttcaaatggcaaatgccatccggtctcccaaaacagggtatcattgcaggaagccaagttccgtcaatactacagtctatagtacaatacagtagccatccaaaaacggaaatattgtatacaaaagagtagaaaggagtaaatcgtaacctcgtaacgtgttatttatgccgccgttggctcgggactgttgtgtccttccttatcgaccacaatactgccgtcttcctgactacggccgtacttcgacattggaccgtacttgtcgtcgtgcttctgggacatgaagaggacgattgtactaaaaaaaagtatcagtcacatacccgcatggcagcgagaatttaaaggaatagatatacctaataacgcaaaatacccacccaggccaggcaagaacaacagcggcaattactttggggttatctcggtatgctggtctgcgtcagaatatggcaggaagggcacgggcatgataacgcactgtaagagggtttcttcgagaactccaatctatacgtctgcgcagtgtcgcgatctgttcctgtaacgacggcatcatgtagagcgccgatacactaagaattgcggtgattatcagtaccatcgcgcgcggtagatcaataattaaacaacggctcaccgtgatagtcagcgccgagctcagcatcataacagtaacgactactgccgaaatcttccaactgattcgtacatgtttgcactcgtgcctctccggccagaagaggtcaaaaaagaacgctgcaccaaatataaacgcctatgcaacccccacaaagatcgttggacgagaactcgccaatataagttgttgttgtggaatttttacacccgggtgctgagcctgaacgtagcttggttgatcgaggtagtctgcacgaaagcgcccagagaagtcaggactgtctaggcaaagcgattgtggaaaggataggtgtttgcggagagaaacctgtacctgataaagcatccgtcccgactgattctgagcagacgcataggatcattgcaagctgatagacaaccatctttgttcgacggagatggtacgcccggatgagcatgttggcagaactaatcttgctgaacaaatcccatggaaatcgggccccagatgacgtcatcttggccggtcaaagaatatgggatgtactgaaaagccggagacgagtgaaaggagagatgaggagaagattggttgaatagatctataagagaggtgatggaggcgataaaggcgatggagacggtcatcatatagaagtacaaataggggaccgacgtccagcgtttggactcagcatgacggatggacaactgatagcgacgtagtagtgcagaaaagagggggcttgcactgtgatttggcaaaaaaaaggaaccatgatgaattcgtcccagggattctgctcagggcaactgttttgcaagatctgagatgaggtcatggtgggtaatcccggtgatgtcatcgcgtaaggagtatagaatacgagacgatcaacaacggatgtatcatcaccatcttaaatttagtgtcttacagggactcatgatattgcagagaatgccgatattgggtgggatagctctgcttaaataaagtggtgactatagcgactggcacaacagcagatattatacctacccggttgggcgacagtggatatatgggcagatctccagagctttcaagctcatgccaagctccttaccacgaggcttcaatgattggacgccatcatcctctatttcatacggtgaagtcactgcccagccatcgccagcttagctaactgctcccaactagaccagatcagagctctcccttcaacgccgcaacaaccgcatcgccaaactctctagttcccgtcgaacctccaagatcagatgttcgaattcccttatcgagaacagtgcgtactgcagcctcaatctgccgcgcctcggcctccatgttgaacgagtaccggaacatcagcgcaacgcagaggatcatcgctgtcgggttggcgatgttcttaccggcaattctatcatacattatggtgagcaacgagtgaagggatagtagtgggttgggaatgacctacgtcggggcagacccatgcgtcggctcatagagcccatgtaccttcctctgctctcccggcttgggtaaaccatccaagctcgcgctaggcaggacacccagcgttccgaccagagagcctgcctggtcggataccatatcgccaaaggtattgtccgccaagatgacgccgttcagagcgcgcgggttcgtggccatgattaaggacgccgaatcagcaagctggtggacaagcttcacctgcgggtattcctcgctcatggtcttttcgacaacccggcgccagagacgcgacgaggccagcacgttggctttgtcgagagagatcacaggccagggaggatcgtgtcgcagcgcgagctccgccgagagttcaagtaatccgctgtttttcgaaggctgagtagccccattcgtccattgcggtattcatcaatatataaaccactcaagtcaccgtaagtataggtaagaacgaaccataatggtcttcttcacccttcttcccaaagtatgcgcctccacaattttccctcacgaccacgaagtcgaccccctctataacatcctgcctgaaggggctgaagtctctggcgatctccctgcttgggctatcaacggaacacggtctcagatttgcataaatgtccatagccttccgtacctggagcagccctccctcgggtccgtcgagtccgcgtcggatatggtcccactttgggcctccaacggcagcgaagaggactgcatcagaggatacggcagcatcgaggacagcctgcgtcaccgatttgccgtgggtgtcgatgctacagccaccgataagttccgtctgggtcctgaatctgacggtggatgtgttgaaaagggagaggatcttggtggcttcggccataacttcaggcccaatcccgtcgccggggaggacgaggatgttgtatgacttctctgacatgatgtttctagagctaccgtgtaggggtactggcagaaagtgacttgagacttgagacgaacgacaatccgtatctttatacaacaggccggagtcggagagtaggccgaaatgcggggaagtacacccacggattatccccgatatcgctatctcggtcgtattccctatgttctctacctccataggctctcaggctcaggtcacggataaatactgatctgagtcttcggagaacagcggggtggcatatagtcttgatggaaggctcatggcaaagtaatgcaagcgtgtgctggtcaagctggtaaaactggcaggagattttggaacaagggcaagattgcacaatatttatggctagattttacataaacagtgaactgaatccatgtatgtctcttatgtcattggacatgccaatagggatgtcgagaatgaaaaaggaaataaatgacaaggacgagattcgatcccgagttagttaggtagccttaatatcaaggcttcaatatgcctctaacttaagttaccacgactctcctagatggagagatgattttgtctcttttctctgtccaattcacgctcaccactactactccgataattctgaagaaaaaaccatctaagggtcagtcggggacgactttcgccaacagctagaggttgtaagatataccaacgtcctgctgagaatttaatgtgactatgtgaaccaccatgtcccttcaaccagcgtaatgcgcttattgcagaccgtcatcctgtgctgttgtcaataagtttcctacgcggagaatctgcagctgtcaatcgcaacgtctaatcgcagtgcttaacatggtaccgcacatcccacttgaagcgaaagcgggctggcctgggcatggacgccacctacgtaccaactagtctccaatgagtcttgtcccgtctccaaaccaagaaatcacgcgcccatcacacttcccttggctcccgacttggccaggcacgggccgcgaaagcttggtgacaccgcgataccatcccaacactcggcgagccgatgaaaccgggttgagctggatgcatactcatgctacctagctagccggttgatgttggttgtcctgggtggggcatcccctgctctatttagaatacggcgttaaagctgagaaggctttgtggtggtggtggtgatgatgatgatgatgatgatgatgatgatgatgatgatgatgatgatgatgatgatgatgatgatgatgatgatgatgatgatgatgatgatgtaacttgccttaccactcttcttgaagtctaacagagtaggatagcaacgtagttgaccgggtgatcggagttagcagcggtgggccggccaagcagcgaaaagttttcgggtgagttccctagccccccggccacagccaggttgtcgccatcgcttcaacctccagcctcttcccgcggtcttcaatttcttttctcccatcctacgcaaggcctctcaactgcctacgctcaattcgtctccactcttctctttctcatccctcgtttcgtttttctcttttcttccttctctcttgtgtgtcacccatcacatatcacatacatccttcacaatggccgctaagatcgatgctcccgctgctgcccctgctccccagctgtctgggcttcagctctattccagattcgccttcgctggtgctgtctgctgctccatcacccacggtgctctcactcccgtcgatgtgtaagtcgctctcattgcgctatctgtcacaattttgcgaacgcgcgcctttccggtcgatccgccgcctatattgaattgtgcgctgacatgctgcttcttcgcgccctacagcgtcaagaccagaatccagcttgaccccgtcacatacaaccgtggtatgatcggtggcttccgccaggtcattgccaacgagggtgctggcgctctccttaccggtttcggtcccaccgctgccggttacttcctccagggtgctttcaagttcggcggttacgagttcttcaagcagcagtggattaaccagctcggttacgagtctgcctccaagaaccgcactgccatctacctcgcctcttccgctaccgctgaattcttcgccgacattgccctctgccctctggaagctactcgtatccgtcttgtctctcagcctgagttcgccagcggtcttttgagcggtttctccaagatcctcaagaacgagggtgtcggtgctttctactctggtttcggtcccatcctcttcaagcagtaagtacccgagcagcgcagtagtaactttggcctctgctaactcaaattctccagggtcccctacaccatggccaagttcgtcgctttcgagaagttctctgaggctatctacggcgttgtcgacaagaacaccctctctgatggtggcaagactgttgtcaaccttggttctggtctccttgctggtttcgccgctgccatcgtctcccagcccgctgacaccatgctgagcaagatcaacaagacccagggtctccctggtgagggtaccaccacccgcctcatcaagatcgccaaggaacttggtctcaagggttccttctctggtatcggtgctcgtctcttcatggtaagaacgattccataaaatgcgcgtcttattctgctaacacgattcccagattggtaccatcactgccggtcagtttgccatctacggagacatcaagcgtttgctcggtgccaccggtggtgttgagattgctccctccaaatagacgtgagtgggattgtgattgttttggtgtattatatcgcgcactagatttgccttatacattgttctagtagatttttcactgaaaagtctttttaacgaccattctattttagaatatattactttgccagatgacttcgtctctcaagatccaagtatcaccaattctccaatggtataatttatattattcttaagtttcgggccaagaaataaggaaccagactctgcatgcttaatcgctcgagttcgtaagatttgtgtggtttatattataatattgcttaccggcattggtggattaaaaatgactgaatgctgccttggcaagggtcttccagtgaccagccaagacgcatagaaaagtccaaatactaagatagcttcggcctgcaacaaccatagaattgcaagtgagggaggaacacataccggcggagcaggtgactacaccttacacattgtcagcacgagaaatttggcagacgccgaaatacaaacagccgcattttctgagcaaggacagtttccttttaccttatcatcctatcatgactgatggcatgtaagcttgctcaacatattattgcatatacaaattcctgggttggcgaatagagttgcccaacagtgagtgactttggaagctcaatatcccggagaaggtcgaggagcgccaacagcgaaaggacgacgtaacggatatatgtactggcagcattcaaatttgccacaggaataatgagtatctgtgagtcgtgaattttatgtgctaaagatacagagatgtttttgtttatgtccgaacgtgtagatttgacgtttgtgctttgttgaccgattctgctgcagacggggaagtaaaagagccagtttgagtttggccatcaatgccatattatggtagatgcggtattggaagcctttcaagaatgggataatccaactggtggaaagaactcacgtgtctccagaacgagaagtacttaggtgtaagtcagtcatgagccctaatcacctctagggttcactctccgactgtggggtaactgtctctcatctgatggttcttccatcattgtgctattctcgagatcgagaaaagctacaaactgaggcgttcgattcttgataacagatgtatcacgagccttggtgaaggaagggggtgtcaccgtcatacgaggagctcgtcgccccagagggaatattgcacgcagcttggacgcttggaaatgctacttggtcgtctcctcatctttaaatcaacctgcttcgttgtattattttagtttcgctattggaagttttgacagccttcgaaagaccctgaaacataccatgaagactcgaaggcagggaacaatccgcctgcctctttcaatctgtgccagtactatcaagcataaggaagcaag

SEQ ID NO: 5924 - DNA, 12794 bp, Emericella nidulans
gattttatccatcatataagctccagaatgccacccatttatctgggcgggctcccaatcctctttccatattaaagaccccataggcaaagtgaatttttttcgtcaaattttctttcagcacggggttagaacgccagcttcccatgtgcaaaagccaaacaatcgactcttgtcgagacatacgcaccctttttatcttacctagatgtcttccggcggtctccgagacggaaagtttgggcatctcctgagttgagatgattgttctcgtcccatatgcagtgcgtcgagactacgaagtggttgcccttgcgtgtccgggtgtgtgctaaaaggttcaggtcagccatcgcgccggtgcaatgtcgccatgcttttgccgctatgcttgcccgaagcaattggattagtagccataatttccatgcaaatagtcgcatgcttccaagataggagtaagcccgcttgcatctatcaggaattctactgttctcttcttgccgtcttggtcgtcatgtagatcaatgtgaatcaattgtcagccgcatggaatggtctgtacaattgatcgcagttggcccaaaggtcgaaatcagtctcgggaatgagatcagtttccctttcaattttagacagaatcctcagcaagtacgtgaagatttgcacctagcccactgtcgtcagcaatctacaatagaacaccggcagagtgtgatcacctcggctgagtctagcgatgcagccgttggatgggatttgagtagagagcgcatgggccttgcgatgctttgtactatctcctcagaccttacgaaatccgctttccggtgtaaggctgcaaagcttcaataagctgcaggttttatttcgtacaaatataaggattgttcccgatctgccgagcttggatttgcccagaggtgttgactaagaatgtcgtgatgagggcgaaggaactcaactaactcttgatatgcaccttgttccacaaacatatccgcgtactcgatagtgaccaagacactatccgcgtagtctcgtaagctctcctcaaaataccgggcggctacacggcagtctcctaacctctttaggcgtgagaactcctccagtaaggcaccgaggtcatcagtaatgtccatcggtatctggattaaaaacagtctgagcagtgagggcttcaggcaggatcccttttcgttgtagctccttgacttgctgagggagtatgccttgcacccggcttgaagcggctccgcgttcgcttcgactgcgtgtatattcctgactgacagcattcgatctcaccgggttgaggaggcttctatcggacgccgaatctgtggcatcatcacgactgagcagctcgtccagcgcttctatttgtctgcggcgggcgaccattctgctttttctaaactaccgtggtatttcaaacccgaatctgagaaacagtactcgaacaaacggcctgcgagatggcgaaggaattgaagaataaaataaaacgctagtatgtcgtgagaggggttataagagcacccaatgtgcggcttcgtggaagcgatccgtccgcttgcaaacgccccggtaaatttggcacgacatgctcagcctcgcagtgacctagagggacaatctctccactgccagcctctgctcgcgcaatgtaggaaaggtacgagcggactgccgcctgcaggtctcgaagtcacaatggggaacactcggtgtccgtgaatatcctgcagcaatcatttacatggacattgcaatcgaccagccaacgaactgtcagctggagagcgcgagggtgctaattacattggatgatcccgccgagacgagaaccagacgagagggaggaaaaccgcttcagatgacggactactacggaccaaaacagctcagcagagaagtgactaaagtcaccgtcgctcgcagtgtacatttagtgccacaggtcaacgtaatgggcagtggcggaggcggcatcggcgtagaaaaggagcgatcagccagttacctaacccgatggtcatttactagtggcctcctaacacgcgagcacttgagtcaatgttaccgcactctgaagtgggagtgacgtgagaataaatcaggccggtcgaatcgcaaccccgtcatccacactgcattcgttctacaacacagtaatcggccttttataatgcgaattgagatacaaggacgcctgcaaaccccgaaagatcgcattcgccacaagatgcggcacatgcggtttctgaatccaaatcaccctgagcaggggagaagctacactttggtttatccaaatagtgtcgctgaacgacaccgtccgcttgatatgctcgccatcggcctatcgagtgcgatggaacgtgagcaccatttgaatgtacccgtcgagataccagatgtactgccagtttctttcgctgtcaagacagatggcgcgacgagcacgtcgcagccaaatgcaccgctgttccctcaaagaactccaggtctccacttgcggtgccagccacaaccaagagacattgctccggactcaactcctgcaaaattactctcccagacgatgcggctactgtttcaggcagccgacgcgggctgtcaatctcgaattcttctgcgccagcagaccttggttggtacccctagggattgaggcagccatctgcctcgcgagctgcgctctctgatgctaatgccaacaggagccaagcctccgacatctgacgccaggatgtgactctacaggtgaatgacataaaaaaatggcagaaatgagtacattctcgagtggcatgcatctggctaatacatgacaaggaatatgacgggacatcaaagaaatgaggatcttctgcatccaaccgtttcataaagtctgatagcaaaggttggtcaccctatactaccggctgaacattgaatcaagatctccagagttctttgaagtggtgacaccaaagggcacttgaatttaattagaacaaaggcatacgacattgaatgcaaaataaactcctagcaacatgcttccagcctcgattgctgtataagtactctgtaatgtggcatcatgtattgtgattataacgtttctcataaattaactaactgcattctaagtcttattgcggcacaacaaccacgactacaaaatgcgatttcttacattcactgttttgttggctatttcttcgctagtagcatctgcggttcgtatattatacttccttctctgcgaataacaaatttcggactaattatttagcaggtctccactgacaaacatgatagcgaaggccacagcaagggctacaggcacattcaggatgctagcacaggacggattaatcacaccgtcagccccgcctccaaccctcacatcgaacctcgagaaaatcacgacatcaagtgtgacctcggcagctctggcaacaggatcggcagtcaaaagaacctcaagaaagccatgaagtggctccggaagaagcgaaccaaggaagttgtcccaagtctcgatgcacacaagtgtgagacagctgtctgcgcgtatgggacaaggattacctggtgtaacgatgtaagcggataggcagatgaagaaaaaagttgggtatcatatactaacttcagtgattggctaatacagaactcgaatgaaaaaatgctgccctcatggatcaatgtcgctgagggagcacaggtgattttggacctgtgcaagaagaagaataacggggtccaaggcgagctaaaccacaacgatcactggagggttattgttacaggtggtcacgagtgttatctgcaagccgggcctgagcagcctgtctagcatgattaagagtgagtttgcagttgtcatagcttgctagttattctccacatagatgaaatttgcaacgaccgagctgtagatacgtccaggcagtcctggcctaagtgagtcatcttatgtcaaagacatcctctagcatttacgtgggatccagaacacatttacactaagacagcaataggcccatatagagaaaaaccacgtgttctttgtgccaagtaaaactgtactcgctcagcttggatcagtgcaatgccatactcagattatattcttccagcatctcctgatgacggatgaggcgttgaggacgaggctacgagttgcacattccttgaaatattacactgtgcttatcttacctttcctgtataccgaactttgttccagcaattgcatcggagtacagtgaaggctcttcactcaagtcttatcgtcggtagcaattataacgtggttggtaagcgagctgcgcatgtaagcgagctgcgcacctgcatacagatttcccatattttgaccttttaatcaacacaacgccttcatattaattattaagcatttcttctatgcccaattctattacaggtactacatgtaggtaatgcccgtgcctttggtgtttgtgcaccttctgctggtggcccacatggaccaggtattgttgcaattctgcgaagttcaattgatgtatgaagtatgattgattgttgtgttgttttgaagctatcgctagtgataccgtttcttattctgcccgacgaccgaccgcctgggtcacggactatcatccaggccacaggccatcaacctgcgagccaggctttgggatatggcaacaggtattgcctgaaaagacgcattatgagcttcctcgagctctgtagcctcttgtacagaaagaccattatcatgagctatccatctatgcgtacgagctcgctttcccctttgtatagcattttcagcacgtagtgccctattctcttgctccaatagtatgcccttttgcattgcaatttgacagcctttaattagctggtttagggcattatggggcggtgatggtggactttttgagtgctgtttgagaaaatctctgagtaaagaagcttgctttagaagctcaccaacatttgctggtgtatgtaggcaaaaagtacttgcctggctgcacggcttccagggggtgtaggtgtacaagcctgaatactaagctttgaaagtactggttcaggattcaatggcactagtcctgctgctcgaaaactatttctgattgtatccagcttaaatatgctgattcgagcttgtagataggctgcaaggaaatcaagtttgttaatatagctgataccaagctatattttctgaaaaccaagctggcatacaagtacttcaaaactgcaaaatatccaatatcaagtagttgtacaagataggaggaatatgctggcatgcagagtagtataatattatgatctgtatagatttgattaaattctggtgtataatggcttccatggctatcaagaactagaagttgatatcttctatatatacaatgctctgttgacaggataaactgcttctaaagccagcaaaggctagttttattagttgtagacttgttaaacccaacccacaaaacccgccccaacccgccccaacctgccaagaaatgggttgggttagaccttctaattatctattgggttttggatatttttggctgccccaaagcccggcggagcaacccgctgggttgccaagatatctgaataggtatattactatatttagattatattttcttacttagatagttataatacagtatttaaatacagtattttattaactatgtagatcactgcttattagagtaatgatatgcataactaggttattttgggttatttaggttgggttagaattatttgctaaacccatgggcggtttactgtgaaggtaacccaccccaaaacccacataggcggatcagctaggcctgaaaacccgccccaacccgtggtttaacaagtctaattagttgtctatctatttgtactaatttcaaatcaccagtcaggcagaaggcctgtaaaccatgcttggttatactacttgcccttaaagataagtattagtagaagtacctatctagaagtactgattgacttaattgcagtaacctattcacagtttcctggctgtagaactggtctttggccacataattctgacttggtaatcactttctgatgtgcacaaaggcccattgcaaagccagtcttatcaaagttgtagatatcatctggtaggatcctgtattgttcaattgtggcttgtatagtattaaaccatgcttaaataacctttgggttctcttgctttgcttgctggcagttgtattgccttaacaagcaagactcaagctccaggtggcgttgagtttaattatatacctatttctggccgacagtctggattggggtggaaccatgctttgcaagcagaatattagccatttcttatacatgagcttttgtaggagctgctctgcatagatctaaagaaagaatctactgcttaagtacttcctctttaatctcagtcaatttatggctatttgcgcgagattccgcgcgatttgtagtcccgcgttgtcgcgtatgtagtatagattcaggcatattaaagtgatgtgctgcctcgcgtattaatataatctccttttttttatagcctgtacagctagtaggagccgaccttccttctcatggcaattttggcttgaactaacgcgaactcggggcatggtggctgttggaagatagatgaccgcgtcacgatgtaaaaaagtggttgggtgcgcactcgcttacatgcgcactcgcttaccaaccacgttaaggattctagatccatggatgatataatcgactgagccacgcggaaatgtaagccgactccacatcacggactattgcttgattgcacagttgatctcaaactgtctggcggctgcaaaccatggcgcttcggaatttccgaccatggagcaccgcaaggtatcctttttgtctcgtcttcatggcctatccattctgggctttatcaactgatcaatggcaaatttgagtaatggcaattgctcgagatcgagaaacgacttcagttgaaggaagcgtttctggatagaggtggggtttgggtagtgggagaggctactgagagcagtcgaggcagcccagcagaccaatgacaacagtgcgttcacccatgggatgacgtctatccggtccatgtatgacctcttcaatctgtgtcctgtcgcacggtcacgaaatgcctactccagtatatcgtattgattcagtctcagctctaaccgcaatgacttgactcaggaggctgcggagcgagctcgctatatttctttttttgaatgacggtcgagtcttgggagatctcaatcgactattcttcacggtctcccaatagtatgtccgtcacaggtccccgctagaggcccagtctctttttaccgaagtgcggccgaaacctgtcacagtacgtagtgtccctgatcgcatcacctgggccttgatacagatattggtcgcccatcccttcaacctgtcgtcgaaaatagctctaatgggattgtcgcgtattttcaccgaaatcaggaatggagggttgtcagctggattaccgatactcgatgaatctcaagaagccgatatatagcttggggagtcggtacgttgccctatacatacttcgaatacgtagcggtagtatgacagttagatgacgggagaaaacctaatgctcaacgagcggacgatcgacgctgcgagaatacactgggtctgttctcctgaaggtgctgactatctataccaatattgccatggatagcagtagtgattgcgatgagaggaccatttaattccacaattgaactcaatccaactcaattcaacccataaacccataaacccctaagcccgaaaatccagtagagcccaactgaatcaatggacgctttggcgtccgtccatgcttgttggatatctaatcgacccgacaggcaataaacacgcacctcgactagtcgtggtcgtacccatggcaagactccaagtctcaacgggagtcgcgaagtaccaggaatacacgtggcgttcgtatagaatagcatgctccagagcgctggatcgttagctccacgtgttcagcaggcaagagggctcgatacgcggtcctgaactaaaacgggcatcgtgacgagtttcccggcttcaattctggtcccgttggataccatactattagctgcttatcgtaccagacaatcaatgaccgacgcctagaaccacgcttgctggctcgatcgagctcacgggagcgccagtaatagtcttcttcccagttgggaatcatgtccgacatacgaactggcgatctaaaaaggctgggaaagacgcaagcttccagaacagtcctgagtccctttaaggttctttgtctgcgttgcggagtggctggcaaacctcataggctgtctgctgctcgccgatcttgatctggccaaggtcgtcatggtcaagcctcagaagagccatgcaatcgcagcgtcctaggctcgatggaagttgttggtctcgatcgctagacacgaatctcacgaactcagctgcaacaggacgagaacgaaagtgttgtacagagtatactaacagtaataagattacggtaatcagacagcttctttatggcagttgcagtatttatgcgtaacagacttacataatgcgggaaggccagatggtcagcgtcactggccgagttgaacaacaactgtcaatatcctcaattctgcagctcgatcaacaatgaccccttaacgacggtctgactgcgtttattgacgttgtacgagcttgtcaatatggatcctgactataaatcccgcaaggaggcatttgtgtccaatctgaccgggggaagcattctagaaatcaatgcagtgacgctcgttgcccctgttagtataggattccactgttgacgcctcgcctgcgtttcttcgacatgctgacgcatttgaactgaacaggcctcggtcttcctttggtcggtcctacaatcccggctctccttcttcacaccctacgggcccgccgctctcataaccgactttctgctcaatgttttagccatcctcttcgcgacgaccttctactcttccgcaccatggctcctgaatctcctcctggtctcgccagcttttctcatcttaatgaactcgcggtctcgccgcacgcaaacgaaagcgaagcctcctcagaccgcaaccgcgcaacatgggccaggcgcatctttacccatccacccattcctcaccacctaccgtgcagctatgatgataatcacctgcattgctatattggcggttgacttccgtgtctttcctcgtcggttcgccaaagctgagaactggggtacgtcgctgatggacctgggcgtcggctccttcgtgttctcgggaggggtggtctccgcgcgctctgttctcaagagccgagagcgcggtgcattgcccgaagaaaacgctgacacagcgctttacctcgtcggtacgacactcggtcccgcttctcgttttgggactggtccgactctatagcgtcaaaaacctggactacgcagaacatgtcacagaatacggcgtgcactggaattttttctttacgctggggtttctacctccatttgtggaactttttgagggcatcgccacgctaatcccatcgtatgaagtcctctcgcttgccgtcgcggtgctttaccaggtagcgcttgaatcgaccgacttgaagagttacatccttgtctctccacgagggcctgacctgctttcaaagaaccgcgaaggagtcttctccttcctgggatatctggccatcttccttgcgggacgtgctactggaatgcgaatcataccgggcggaatctccccgtcaaataccccacaacaggccaggaaacgcgtgcttactagtatagggttgcaagcaataggatacacggcgctatttgcattgaactctacatattttctagggtatggagccaacatccccgtctcgcgacgtctcgccaatatgccgtacgtcctctgggttgcagccttcaacaacgcccagctgtttctcttctgtctgattgaaaccatacttttcccttctgttcaccgagcgtcgggatcaggcaagaatgacgaagcgaagcgaacagattttgcgacgagcccgatattgacggccttcaaccgcgaaggacttgccgtgtttttagtcgccaatctacttactggcgcggtcaacttaactgttccaaccctggatgtggataaaacacgagccatggctattttggtcgggtatgccgccttgatcaccggggttgctctggggctcaacaaggctaatatcaagatatcgctctgagcgtatggcttttaagccattctgtagcataatatcgaagtacgtttagatcttaataagaccttgtacaaagtggagattattggatcttttatggccaaccatctacagaccgacagtcgtcatttaccttctagccgtaaatacagccatatataagcctcaatggtagtactctgcaatactacttctggagttgcggctcgttcagcaattgtgctacaagggtcttcggttacacagttaaggttcctcgagaacgaatgcggtaacggcattgaaattcatactttacatctgagaccatgataatcgcatgctgattacccagaaagaagagatggcgcagaatagactcatcgatgccgatggcggagaacaagaacgaagagtgaccaagaatcacatgcaaaaagattgggcagcctgagctcggtacgtactccaagcttcagccttcagctccatctgactctccgcttctttatctctttccaacctctatcgcaatccataacttacaatggcgtccagcaagagtgatgcttccttcatcaactacccagaaatccgcgaaggaccctccgtgccttacaagaatgaagaccagtccatccccgttttccggggaacacccttggtcatcggggcttctttgtaaggaaacaaggctctttcttcctctcttccttttttggtgcttcagacttatactaacacttcatcgtacgcaggatctcgaatattagcttcgtccagagcttcttctggcgcggcgcaggcttcggcgttatccgcgaaatccccaatttggaccagtggcccgcccgctacgatccgaccgtcattcctgtccacatcgatgaacagtccacgtcaagcgtcgcaaacctacccgttccggaagggaggagaaaaggcaaggcgggatactacacctccgccgactatcatgccctctaccaatccggggaattgacccctacggcggttgtagactctctcctgtccgtgacccgccgcgacacgaaaccgccgggaaagcattcggttgcgttcttggaatgcgcagttgagaaagtgcgcgctgccgcggaggcgtccacgcagagatacaaggatggaaagcctctaggacctctggacggtatcccagttacggtgaaggatgaggtgcatatggacgggtaccgacggactctgggaacgaagttggacttcacgggcgagtttgcggggtctacatcctggtgcgtcaaaaagtgggaggaggcaggcgccatagtcattgggaaatccaccatgcatgagctcggcttgggtaaatctgcggttggcccttggactacagaacaactaagctgaccgcgagcagatacaacaaacaacaaccctaactttggtacaccaaagaatccacataacccgaactactactgcggtggttcctccggcggatcaggttacgccgtcggcgcaggtctagtccccatcgctctcggcgcagacggtggcggttcaatccgtatcccctcgtccttctgcggcgtctggggtctcaaaccctcccacagccgcgtcagtggttttccaaccgtcggtctcgcctcgacggtcggcgtgctgggtcccattgccgccagtattgacgacttagccctagcctatagaattatggcggcgctgctcccccgtcagaagacgccaaatcaggcgcttttcccaaccccctctccgagctgaactcgcaccctgctcactcccgccccaagaacaagacaatcggcatcatgcgtgagtggactgatagagccgagcctgctgtccgagccgtcttcgatagagccctcgacttctaccgcaaacagaactatactatcattgatatttcaattccctatatccctgaaggggcacgcgcccacgttctgactattatggccgagatagcttcaggtctctcctcgcccagccagatcaagcacctcactgcgcccaataaagttctcgtctcgatgggcatgtaccagatctctggtcaggacttcctcgccgcccagcgcctccgcggactcctcatgtcacatcttggcttcctcttccagaaacatccaggcctgctcatcttcacgcctacctccccaatcccagggtggaagatcgcaggcggagatgctgatctcgcgcgtggggtatctgatggtaagtcctccgtgaggaatatggagtatgtctggctagcaaactttactggatgtccggctgtttcttgtccggcgggctacgcagaggacaatggacaccgggttcccatcggtgttatggcaatgggtgaatggggtagcgaggaggacctcattgcatttgcccggcaaggagaaggaattctggaccttcctgaaaataag

SEQ ID NO: 5925 - DNA, 14344 bp, Emericella nidulans
gttccggagagttactggcggccgcaaatggagagggcgctgcaggagttgcgggaggaggctcggtctaccggcgcagacgagagccgggtctttctgacggagaacgatattgtcacggcgtggatactgcgctgtgtgattgggcaggcgggcatgagcccggataggacggtgagtgccgccacaagtgctgtatccccccatgttttgcagacgctgataacagcaggtcgctgcgtccatcgccatgtcgcttcgcaaagcctttgaaggcgatctcatccccccatcagcagaacatccctacgtcggcaacgcgtttggctggtccaatgtcctcattacagcaggcgaagtgacatcaaagccactcagctggctggcgcggcaggtccgcaaggcaatcaacgaacaaggaactcgcgcgcacgatgaatcatactacgagatggtgcggatgtccgggacggcttgcctatcgtgatcatgggcgacgggggcatggcgcaggtcgggttctcaactgggccaaggctggactgttcgatctccactttgcgccagcgaggatggacggcaaaggtgaagcttgtagaccgtcgtatgtccaggagaatcacgggcctgttaagccggccgacggattctttatcctcgggaaggatgggaaggggaattattggacttcggcgtataaggtgaaggggacgtgggagaggttcgagcaacagatgaagaaagatttcgaggtttcaggatgaatttccctaaacgagatcatctgctatctgattgatagcctcatcagactagtactctgcagtcttctgtacttcacacggcgcggattgagtctcgttgtctggacgaaccatacgcgcaagcgcttttccgcggctgtaaaagagcactgattcaatgaaagacgaacagaaacaaacgaagaaagaagaaaattatttttctaatgcttgagtctagggtattacttcggaacctccctcttttcaatgaactttgtctcaccaaatgcctccttgacaccctcgctgctcgtcacgtcccggaaccagtccacaacaccagggtacttggcccgcatctcctggtcgataacaaatgtaaatccccagaccaacgacgctgcaactgcgatatccgcaagactcaactgcttgggcgtggccagccacgtccgtccagcaaggtgtctttccaatgcccccaaagtccgctctagcttctccagcgcctggttatccgtctctgcattataagggactagcccgacccgcgggaggaagcacgtaacgacgtggccagcgacctccgtctccgccattgtgacccattgctgaattgttgcgcgctcggcgggtgtcgagccaagaagctgctcctttgcgggcccattctcggcgaggtactgtgcaattgcgttcgactcgaaaatgttgaccccgtcagcggacgtgaaggctggcgccttgccgagggggaacttggacaggaactcctctgatttgttgtcgacgcctaatttgaaagaaccgctctcgatagtgaggccgttcaggttcgcaacggcttggatctatacattaccattagcattgtactcttcatcctagagtctggtgggatcggcgaggggtaccttggagacccgagggttgttggggtagctgtagatcgttccgaatgccattatggtgcgtcttgatctggaagaactcgttgaggatggagagcgagattctagggacatggtttctcaggagggacaaacgccctataaataccgctaaagataatctggtcggcacatttctcagcaccgcatcccaccggcggggagctacttcacaccgtcacgcgttgtcggagctcaggccaggtggggatttggatccatggggaaagcacgaaggaaaaagatagaagactgcggaactgcccgaaccatcccaccgcagcgactgctgaggtaagccagccggtgggctttgatcgccttgctgatcactttcactcgaagcgtcgaagcgtcaatgctgagatagcaaagaggaaagaaggtaagatgatgattgatcatcagttactcgagatgacaaggccgactcagtttcagtattttgatttgtcatcagtcagtaacaagtaccccgcactacggcagactatcaatactaccacgcatactaaatagggaagagcgagcaaccaacgtaactgacatctgtctagtggtttcgttggggcttcagctttccagcccagacaaatctcagccgaagtgattagggtagcttggcgcggagaagtactactgaggggtcgaagactgcttttgagagcgattgtaaggaagtgagttagagagttaggaaatacctgtagagtatcacaaatggtctaggtagatcatttgcgggggagaggtgtatggtggtctttgacagctcaactcccgcctcgtccttaaggtacgttcactccctgttatctctccaaaatctggcgaacccggggagaatgacctgtgcaataaagcaagtcaagcctctcacaatgaggtgcattcagcctgctcacagagcgtacctttaaccggcttgattggctgaatatctgctatagaggtcccatcctctactgcggtgtactatctgctccgccgaagatatgtcctgacctgcgaagggtacggatcctgtctctgccaggggaatcaaccacacaggatagagactctcaccaagggaatcctgatggaaggtgaggagcttctgccatcaggtcctaaaatcagcaagagtcagctggagtgctcactttccattgtacacttccggctgttcaaagtgccctaagttgaccagacttctaccttaaatggtgaagtttatacaccacctgagggaataatagcagaacctgcttcagcgcagatatggaaaagtctctttctctttccccgtctttctttggctgttctccgattcgcgtaaaagcggatattatcggccgtgatccttcccttcaaagaaggacttgacagactcttggctaagcttgtacggtatcaaccaccagccctaaagatctctcgaacttcagcttccccggtcagaaagaccttgcaatctgtctgatcgtcgagaccggacggaaaaggaaacgatcttgttgacttccgcagcacctttcccgccttccatgagttcttaattagcaggataaatgtggtggcctaggtggtggatatggttgggtcttggactgccgtgaagacgacgtgataggaaatcatacagcacacggtaatgcaatagagcactcaaagggacatccggagaggctgctgcagctcttggttgagattggcttgcttgaaccggcatgagagtgatgtgactctccaggaaaattgtactgtcgaggtatgttcttccagttattttgaaaaaataaaaaaaaaaaaaaactccttatcacatatagcatgcttggtctccttgggtctgagaacgtatgtgttgattttgccttgaatggccaacaatctccatttcagtgtgacggtcttcttacggacagtattagggaacatgggaattagtttctagaagatttgtaatggatccatgatgagtgatcaagattaagctctaggtacaaccttgatgaagatgacgtcggatttgtcatcaatggcgcgatttatccctccggctccgcaaagagtcattattcagcaatttatataaatctaatatcgcagccaccacataaccgggtgagctttcaactaagcacggctaaccagtaatctattgttatttcatttcccccccataaacaacacatcatgtctcccagcggccctattgacgtcgaaatccggttcctcgaccccccaaaagacggttcaataccccacgccgtcgtccccgcatccggccctccgcaggagaactacagcgccgtcgcccacaaagtgtccttgacagatctccggggtcacgagtcagaatataaccttgataaagatgccttcgctgtctttcaaaatgttccctccgcgatgacctacgagtcgtgggactccgacgagaccgtgaagactacatactatcgcgaagtcgaggacctgctcttcaagaccgtgcccggcacgcataaagtggtcatattcgatcatactattcgacggtataaccctgaagccgatagacaacctgtcgtcttcgcgcacgtcgatcaaacaccgaaagccgccgaactacgggtccgcgaacacgtcaaagaccccgaagaagtggagaggttactcgccggccgatacaggatcataaacgtctggaggccgctgaacggcaaggtcgagtcgatgcctctggcctttgcaactgcttcgtcagttgcgccagaggatctgagtacgatcgagcgccggtacccacattacactggagagacgatgggcgtgaaatataacccgaaccagaaatggctctactggtcgggcgtcgataacgatgagaggatcttaatcaagtgctcagatacaagagaagatgttgcgcgacgagtgccgcactcagcgtttgtcgatccaaggtcgacagagagctcgaggcctagggaaagtattgaggtgagggcgttggtctttggatagccatagggcagttgaccgggaggctatgaaaagagtaatacctgaatttaatgcaatcatgatatatatgtttccatgttagattctgcgtctctcgcggttacatttctgtagagctgaattctgctcatggagagttgcagaacttgaaaaacaggtgcagcctgattccattgccatctacatcttcgctctccgattcttacaacgccaaaggccaatcgctggcactctgtaccaaaaggaggaggcatagatatggacgtacctttttcagtctataaattcccatttccagacaaaatccgcaggaacgaatgtcgcgcaggacgccttcgactggtaagagtgctacagttaataatatgctttccacaatgctcaaaagttttcaaaagatagctcctttctccaacaataagcatatcgtagacgaggctcaattgttccgctgccatctagagttgatccaccctccgtaaaccggaccgccatatcgggaaacagccgaggctaacagctgtaggtattaccagcaccaaaatacagtgccttccattttaggaaagacgccgcatgtcacgggcaattctccatccatctctctacgatcagtaaatgctctatttatgcgctaatatctccaggcttcatcagatcagctagactcactcgtttctgctcagatatcggcaggactgagccaagagcggggcaaatggattacagccatgtcgacagcgatggctgataccattggacagtcgtgattgactggtcataatgcagcgaggaggctgatcaagccttttgctcccagtcatacccatctttcgtgtcgcgataagcaaaccacttccacagctttcagatgcatcccagagggcacaacatggacgtgcctccccatattcaaataagagataggctgtatctgaaagccagagacgctgacaatgattacttccctagaagccgcatcatgagtgttttcacaacggacgactgcctcaggaaggtctacttctgcgactgtcctctatgccgtcaagatttcagaaatcccgacaacagacgtcaaaccttcgactcacaagagctcttgggccagtatgcgaccgtgtatgccctgcttatttacaatctaccgcccaggcttgatacgccattttcagagatatcgaagaaccttagacgggacccatttttttactgaggactctttgaggttccttgataaagaaggggttcagttgcgatcgatcatacaagatattctaaataatcaatacaagttccatatccgcgtgattgaccggtcgcgcgagccgatcacgatgcaccgaggcgaagtgcttccgatccgccaaaatatggagcagacaggccagggctcgtttgggcaggtctatggatttgagttcgcctacgacgagtatcgcggacaggggttgcgagacataacccggttcgccaggaagatctttcaccgcgacactgccggtttggatgaatggtttaatctcctgcactttgatcggctgcaacatccgcatctgatgtccgccttggcggcattctggcatgaagacaagttctctattgtctttgaggaagccgacctgacgcttggtgcctatctggaaaacggcggccatctctacactcatgaggcgctctggaaccaggtccaaggattggccgatgggctcgcatatctacatggacgaagtggctcagttatcgcataccatggtgacctaaagccggccaatatccttatcgtcagaggagtgatgaagatcgctgattttgggttgttgcaagttcgctaccggtcaatcgcaaacaatcttgaggtatggtcgttggaaagcgataccattgcttctagtcggcgaatatatggtgggccagaccacagtaataaagcattgatggatgtatggtcttttgccgctattctatccgaaatatccgtgttcaatttagagggtatacaggggcttaagcgctaccgtcagcgtcggtttgatgatgtccaggaggcaactccttcttataagacctataactttcgacatgatacacagatgaaagcctcagtgtctcaaacaatcgatgacctgcagcaactagtccagaacagcgagcaacagcaaacccgtatttcgcggttccaacgacgtttcttcaatgctggcttctttaccctgttgcgtcagatgttttcaagagactatgcagactgcccgtcatcaactcacgtttctgaggagctgaggaggattcactggcaggctacgctgccactgcaggaggctgttcaacgtggaaacatctgggatgatgtgagcagtggggcagtgccaaatagcccccaaaggcccaactgtagactgtaagtaaagcaaccctgctggttctgtggtgactaatagtgtataaggcgcgcaaggcttttcgagcaaacctccagtttaactagaacagactgcggcatacttctttttgactggaaagagggcaaatcacttcttgtccaatgcgtcctatatgattacaacgatgtcaacatatatattctccaagaacgctgtaagggcccctgatctggttacttattcctgctaacaagctgaagttatgaggctgaaccaagagtacccaagtttcgacccggaatatacagacaggagcagtaaccgaccatcactcagggcaactttgcagcaatgggacggtcgtaggtacacatttgaattcgtcgagcttagggaacttcttattctgcaggccgccatgaccaagcaatacgtctttaatttgtatgtgtgccttgcaacctactagttacgctgattaacaaaattgcaagctcctcgttcaacttgcgctctttatctatttcagaacatagtattccgttttctggtcgacgccgacttgttctcgaactaaacagagcggtagtccagttgtggtctgagaagccacttcgggaagatcagatcttgtggcccgccactcccagagtcgtcaatcctcgaatgcacattgccgttatatgcagaaacgagaagaagttgttgctgatcaaaggtatctgggcaccgcgtctcatcaactttgctgacctgaattgccagtgagttccagaacgatagccgagccagtcgataacacgtcaggcactctcaccctcaagaacgtccaccactatgaaacatctatggagcatggcttgccgatgcagattcccgatgcagagtcaggctacactcagcacaagaaagctcatcttacctttgatgggcctgaaggtagatttgtctggcatacaagttctaatatacatggttactgacgcctggtagcggaacagaacgctaggtcgtttcaacagcagctggaagatttccagaaagagtgggaaaggaatagacgcgatctgctggagagcgcaaggggatgacagcttcggtgttccttttcagcacaggcttcaatgtctttctgcatgtgtttgatttcaatttcctcctctgctgataagccacccaaagcagtaccgtgcaccccgacatccccaatgccataactatatatatccaaaagtttgacgcgatgtgagatctccctccacatagtcaaagaagttggtaccgaatagtgtctaatgtcctgtcagcctgacttcctcggatagggcgtcggtacctacggcaagaaacatggccgggaggaagatggccgaaattagtgacacaatggacattgatctggtttcacgagcgtttttctctgccagctcacgcattctgacattgatcttggccgcggtgtctgtcgcccggatgtctaatatattttggacctaattccgtcagttttgacccccaaacaccaccaaacaccatattgtgacacctacgatcataccacatccccttgcccgacttattagcgactggatcctgcttctgtgaaccctgtgctgcaggattgatgtttgcaggatcgacgttgtttcttcaaaggctggtgctagacgcgagggtgagtgcctctgagcgcgcccgagaaacgactgtatttctccgccaatgtcaatattgcgctgaagaacctggtccaatttttccagcttgtccgtgaaaacccgtagatctcggatgtcggcaaagtccgcttcgaaatctccttccagcgttggctcggtcaaacatgaataaaagccccgcgacacctgtcactatcagtcccaaccgcactgacctaatatacattgataattaccattttcgaaaatgtcgcttctagatagacgagatactctcgccatgcctgcgtggcagtctggaatataatcccatgtatgctaatttggaactccgcctgtgactcttgtgggtgcgcgaaatactccctgtccgctcctgtagctcttgaggtggctgtataattacccattgggtatgctgcgtcgcagcatcgtaagccatgatataccccggtttcgcgcacggagaatgggtcctttggaatggatcgtccgtgggcggccacgtacttgatgttgtatccaatgtctgcagcttcagcacgtcgatccatccaggtctgggatattgggtgttctcaccatagctacaaccggactcggtggctagattttctgatgagagcggccgacagtgggagaaaaatgagctgtacgattgctcaacaggacccgacttttccgcaaaaagaaagacaatatcgaggtactccggatgcactcgaagaaaactgaacagcttctttagaaactcagccgagactcgtagctggccccacgagtcgtactggtacaggaaactgcggcagtcagtatacgctcccgtttcgttagcaggtcgacagacaacacccatgagcatcgaggtttctggaagatctctgtcaactccgatgtagaattgattgcagtatatttggcaattctcgaaccgtctgtatgaatcagtcatcgaaggtgcaagagtgttaatatacgaatgcgcaccttggcggattgacccaaagtcgaggatttgcgccacattctcgtcctcgtctgtgtccgaactctcgtcgaagtccacactctcacccgcaaaaagacgcttctctgcctgtgcgaggcgccgatcatagcctttggcgtcgacctccgcagctgataagcacagattgcgtgggtagatggaccagccttcaagattgcgagaacttcttgtcattgtggcttctaatcctagcgggtatgaataaaaagcacgctacactttgcagagacatatattatatactaccaagcgaggcgcaattcagggtgttggctgtgctcagagcgacgaatcgggatggccgtttgccttcgccttgcccaagaaaaaacaaacacatgcctcgccatcaccacccaatgagcgctttctgccttgcgtagatagcaccgatcggccgtgtccagctgaacaactggtccctgtcgtcctcgcttaagcaccggaagccggggagatgggcgaggtgggagattgcgctgacccatcggttcttgcgcgacgtcttttccggcattttcttaggacctcgatcagctcttcctatagtggcgaagcgtcaaaatttcatgttgctgtctttgcatagcaatgactcacttcggtcaactcgtggggcacttgaatcttccagttgtcgccatcttggagttcctggagacaaggccctaagcgtgcggccgataagctgatgtggaaagggaccttacaagcacttgcaccttcccggccccgaacatctcctcaagacactcatatagcaccttgccgctcaccgtgtagcgggttgggattatttggacgatcattttacttgattgggtggtttcctcgtggcgcagatacgagaaggatgatggcacccggcgcccggcatggcagaccagcctttttatgccagtccggagtattgggcggggctagtcgtctgtgcaatgctcatctattcctatctagtgactcgtgaggctcttgtgcggccagaggcccgggctagaatcctccagccttgttgaccaattgtgccatcacggttgctcaataaactcctgacttctgcctgacatccatcctttccgcatctctgcatcgccttgtcggctttgtagattccttcatcgccataatgaatggccacgtcgaacctgctgcactgccagcgcatcgcgcatccacggattccgaaaccgagcagccgccgcgattcgacgagcagcaggcgctaagcacgctggacgttgcgtgcctcattatcaacaagatgatagggggaggcatattcgtgtcgccgaggatagttgcccacttgactggcaacaagctcatcgctttgtccctctggatttttggaggagtatattcgttctgcaggtacacgttgcgccgccgtcgagttgaactatacctgacccgatatccagtatctacatatatcttgaatatggcctcgcgtggccttacaatggtggcgagtttatctacgtaaggctccctgaccttgtagcttctttggagtgccacgacgcccgctaacgattcgggctgtagatatccaagattttccccgtgcctcctctgcttttcgccagcgccttcgcatgggttttcatcgcatccgcaacacccacctccaactcagttacgtttgcgcgctatatcaacccgaccaaggatggccaacccgatgtctggttcaccaagttcttcgcgtgcgtgatcgtggtgggaatatgcgcggtacactatcgactcgtgaacatcggtatctgggcgaacgactgcctggcggtatacaaggtcctgttcttgctggtgctggtcctagccgggttcgtggaaacctgtcgccagggagctgacggcggcttgctgggactcggagactatgccacgactcacggaagcccttcgccaactaacgttgcgctggctatcctccaggttctgtacagttaccagggctgggaaaacgccagtgcgtcaagcttcttctcgccgtacttacttggtcgactaacgtggtgcacagactatgtgacatcggagatcaagggggcaggagagcataagaaacgaaggttgaagcgcggtgcgttcatcgcgatcagtattgtcatgtttctctatatctccttcaacatgtttgtggtatgttaaattgctatatggcgaagaaacatgcttattgttgccagtttttcatcatggactttgcttcagtcaccaatccccggaataatgtcgccgcagactatgccatcagcgtagggcccttctgccatccgttagtatttttaataaccgcaccaggttttccgaacaagccataccaagatggcgagccacgcgatctacgtcaacattgcattggccgccgctggaaacatcatcggagtcacctttagcaatgccaggggtaggtgaagttcactgaagaccgaatatgaaactgacatgtctagtgaaccgcgatattgcgaagcatcgcattatcccattctacaagttcttctccaaaagttccaagtatgggagtacccagtgggacaacctgggcactccgactggtggtctgatcctccaagctctggttacctgcataaccattgcatcctacgagccatacaggaccaaccttacaatgtacacgtatggccatgccgtggtgtgctgtacgtacccccaccccagcattgcatactagctctaactgaaattacctaggcgcgcttggtattggggtcttctttattcgaaagcgaatgaaccagtacgagacaagttccactgacccagcagacaagacatatggcaaccactggaagtaccaggtaatgaagtcaagccagctccgctacacagccaccatcttcttcatagtcgtcaacctgttccttgtcgttgtcccgtttataccctcggataaccccgacggaacccccagagatacaccctcgtgggtgcagccggtcatcgtcactgctctttacgctttgggagcctcagtttcgctttatattatcaccttcgtagaggatctcaaattccgcggcagcaggtacaacgttcacgatcccagcgacttgagcggttttatcaactacaatgagcgaccgtggatcgtgaggtatccgggctattcccaatggccatggggctggaaaagcgcgttcaggctgcttccaacgttgtttacacccctttcctgggaaaggatcaaagagagactcttcacaaatggtgaagcggaggcagcgaaagagctgagaaggaaggcccagcagccgctggaaccagcgtacaggcttgaacaatacctggtccttccctgattgttctatgaagtaacgcagcggttgctttctatgctattttcggttgcctctggatgttggatgaaagatgtacggtgtcaatgaagtcaagggctacttccgttgtatgtgcttcattatattttgaacaaataacgcttttagatcatggacataaataaacgaacccaatagacatggtggtgcccaatgttagactcctcgatcagatcaaatcgatcatcacaatgtcggcaagtagaaaatccttgggcgctggtccagccggcattattccccttattcccctaattcctcgccggaggccagatatctccgtttatactgaatcatgtcagccatagcttttcaaaatttgtaggaaatatacaatgtgcaatgcagccgtgctctcggcccccccccccttccggtccatcaaaccatgctaatagaggatccttgtacacatcgatatgcggttgctatagtataaacattgctgctgctgacgccgccagtttccctgcagcacaacaatcaccgaggttcttcctaagtgcaaacatgaatagcctctagtgacacatcctgagtaacaacctgatggatgttcgcatcatgagacgcataaatcggtcacgcccgggtatccctccgagaagaaactaaaagtaccttcagctttaggaatggattagtattgctgggtcggcatttttaggcctagatttgcacccatatatcgacactccacataagtatttcatgaacgaatacagtgtcaaataaatgattcggctctagaagagccttcgtaatgcattgtgttgtatcgataaagggcagcagaccggtgacactgcgagaagtggcttcaatggctttttcccatgcgggctctgagaaccctttgaattatcttagaatcatatattccagcgcagctttttattccaagggtggataatggcaagagaggcgatatatatctggctctcgtagccaaggtattcgggaattgaatatggctgtttatggtaaataaaagacgaacaggacaagggaaaaagtccttttcaaatattttggttaagcgaaataaaatacatataaaaaagttgagctttttgtgaccgattcgacggcggtctattccctactaggtgaaagtcgtcaagagaggatgaagccctaagtctagtaatggctggtcccttcaaaaatatatttcaagtagaaacctc

SEQ ID NO: 5926 - DNA, 10072 bp, Emericella nidulans
gaaagatgatcgagttgacaaggccgacgatccattcatctcgcccttcaccggcaatgttgaactcatcgtggaactgcaggttggccccgttggacccggtctgatcccagccctgtgtggcagctccaatggcacacagaccaatcgagtaccaaagcatcctgggcccgtgccatttgtggtctttctcgtactgaagcgcggtccgttcctcctcactgagttcggggatggttaagaagttgtctggatcgcgcgcgacgagcgcagctcgaccaaaaacgtcggcgtgctcgtccatcccgtgggtctgggcgaacacgcgggcgtcgtagacagcctgctctcgggaaacattctacagtgtaccatcagtatcaggcccggtctacattcagcgccccggactcacctggagagggttctggatgatgttgacggcggtcgatccacggcgtgctgagtcagcttgcaaagctttcgtagccgggaccacgtatggcacctcctcgtgagtcgccgaagcgtcagaggccacctttttgtccatggcgatggagttggccagataacaacaaggggacgataacggcgttcaggagtctgcggtttgggggggtagagggatgagggacgacggacaaggagagaacaaaaacgctccagccggcccctgggatgagcatcaaacagatattaatgccgtatcccccgcgcctggcccaattcgaaagctcgcatgcacaaagaaaagcaacgacggggctgattggggcacagcctgggacggcgccgagaattgattggtggaaatggccggttgcccaccggagcaaacgagtgaagaccactgaatggcttcacttcccagagccttaatgctcctgtgccgtgtggcgtgaggccgtcccatgggaggcgcccatagcgcatctggagcaggccggggtgagattcgggtttcagccgtgcgcatccggacggcgagacggcgaggccaggctgcctggcctgccgcgcgatcccaatgcaacagtcccgagttcccatggatgccgacattttacggtgtcttcaccttgacggccccggactccccagaaccccagactccaggccgaccccaagcccaggcttggggtggcctgcgattggctggccgccgcaagtcaaggccagagaagccgtggtaagcatcgcacaagacgagacagagtgggattctgactgccccaaggtttttgcttagtgcgtcttgggcgtcgctgggcggatccttcgtcctcatccgcttaccctcgtattgccgactgacccagcctggatatacgctggcaccggtcatcggaccggatgtccatctgggaacatcaggatagctgccttggcagtattggcgccctgatgaccgtcaaatctgtactacttcggagaatgtttatctgctgtctaccatgtggcgggacccggccaagaatgccgggtacttggccgggggccaaaagagtatggagaagcaaaataatgggcggggaatctggagagactcgggctagaccaaacaggactagttaatgtaaccctgctctgtctcttggcgtatcttcgtctctcttgtcagagtactccagagtcgtcccatcctaatgcggggaacaactgcgctgatcatgtgccttcaacctcatccttcattaaatccttcgtccttcgacgcccgccctcaacgctcgctagccgagtgccgattttacgaattacgacagattatgacagattttggtacggcttatggtacgactcatggtacgattaatgacggattactctgagtagatgcttgcggcgctctcgcccatcgctcacatgactcacatgccagagaactcggcaacgccgtcaacagtcagccttctcgtcgcatcttgatcctcgctcttggccccactggatatagtctgggccgagaaattcccgcaaacagagtttccgtaaagtttctgttaaggttgtgactcgtcgcatggccacgttgtatgcaagggtcacccaagacgcgaaagttcggaataatccgcttgtggagactgtggaagctattcgattcccagagaaccataatttaaagaaaaaaagcaataatgaaaaagaaaaacgtaatgaacctcaacttgagtaacctgaaacggacggctacgcaagaattccacatacggtatgtatggagttctctggtacactgcacgctgtcaagaaggcatggccagcaggcatggcagccacgcgagtcccgaccgcacgccagccttgattgtcccttccgtttctgtccgtctacataccgcccagtcaatccaagcgagtccaagcgagtccatgcgatccgtgtgcagtatttatccggaactgtcgagccattcggaaatctgttggaaagccgttccaagatcagtcctagatccgtccaagatcagtcgggccaagacgaaccaagattactgatgtagcactgcggtctcacctaggcaagctaatgaaccctcaacacatccgcagagaataagcatcgggcacctggtcacggtgtaggatcgtgacgccatggagtattaacgccaaactctggggaggtctcttcgttaatatgatatactccggagtaatccccttgacgccacctccgcaagcggctgactgggccgaatcccgccgacaatcgatacgccaccatttaatatattgatttaatatatggatattgaataggcagccagtttagccggtttagttgggttttgcggcggacatctacgtcattaaggttgttcggtcctacttcagtattaaatgtattaactatattcaagcgtagacgatcacaatctctgaagttgggtctcagtcgtcacgcaggatacctatacgcaggcctaaatatatgctacttttcaggacgcccggaagtatcgaagtagctgaggatctgtatatatcttggttctactttgtaggttgtaattaggatattatggccatgcatttcctccattacctcatatagatcacaccctgctcgacctggctgggcctcgcttcagcaataatgttcacaaagcgtagataatgtcgtctcgagagatgctctgcatagataggaaggcaactgttctcctggtcggctgctacaccgtccgactcaggcttttccgcaggtacagatcgaacgatgctgatggtttacatagagccaccgactcagtcaacggacttcaatgcgaagaatgcgaagaaaggttctattcccgttcctgaggtctcaacgcgctctccagccaatggctccgaggagaggtcgaggttagacagttatgtattccttatatccagcatcaacccattgaggagacacagctatggcgttaaatgtaatagacttgatattcagtcttgctgtccatagcactacctctacttggcttgccaaaaaaaatgttttattacttgacacgtgggaatctctgcaatacttgttaaccataagcgcacttggtttgacgcactggagcttacatcccttgcatatctagtgcatcagatgactatgaaacgcaaaacacatggcgttgaggtatttccattttatccagtgcaaacgtgctgtgatatggaataacctatagtccgggaaatatataaggtattatcctagacattcatactttcttccgtgctatttcaactggaactaggtagatcctttgacctagtatcttaccttccaggcctcagataagaacggtgctgggagacagcgcagcaaaatcatattaaatagcatgagctgtcacgagcaaaacatgtggcaaggagaaagacaaagactaataagctatgttatagaagaacctggtgaaagtactctagaatagtactataaggcaggaaatgaaggctgtatcaatgcaatttggaagttctacaccaggtcccactaataatgaggatacactaaagtcaatcacagaagacttaaaattttaaggcaatgatatagagattgtattaaagcacctttagataatctgaaagctgcacaactgcatagacaaccatttgggttttgcagctgatgtagactccagttgagagtccttccacgtgctggtggtacgactggcgttttttaatcactccagtcagaagtgcaaggtctagcgtctctagtgctatgctattgagcctacgcacgggattcactacccagatcattagtatccgggcttgccagcctagacttctgctctatccttttcggcctaagtgatcagaccatgagcacatgttctcgctgacctagagccgcagtcaactggccaatagagcctttaggcctcgtaaattgtgtgtcttgcaccgtactcccagcaaataaagctggaggataatatactctgagatgaatgtgccagaagtttatgattcttgattccacgcttattctaatcctaaaaatagtagtactagcatatattttcttctttagaaatgctctggtttttatcgaggatggatgaatgatagcacagattacttcgatcatcagtgctgctgagatcctggttgttgggcattcttgaatcaataaaaattctgttattgaaagcagcaacccagaactaggtgtaattgttgaccaggcagagccagacatgcgctaaaggcatcactgtcaaccatctgtatcgaatctggaagatgtgggggcttctggagcacggcgctggcacgctgaagtggccgttggttgtaaagaaacaaaccatactaagcatttaacgcacattacttaaacccgtccgctaatatcatgaagtaggtgctcactattgaccgctcgatatttgaggggcgctaaaggcgcaagttttagggtccgtaaggaattcagaattaagtctacgccgggagaatatgctctaaacaagcttgtcttgataaagagacccctgttgtaggacctaatgaaggcaacacaagcgatgtgccagccattgatcctaggctgaaggccaaccatgctactttcacatgcgtattttcggctaccacactaccctgttatcaggtctttatgacagagcaaagggacagctcatgcattttcatttaatgcttaatgtgagactttgcaaggcgctctactcagaagacgtaccaggttcggtgtacatatatcccagctattgcagggctctgttttccagaggcaacaagcggttttgatgacttgatttgggggtgcataacttcattttactagggtcaaatcctatgtgcaggaactacccatcgagacccaatgctcaactccatatattttagactagcaggctgcgctatacacgacatattaaagcatgtaaattctatgtagtttttctttcgtgcgagaatacagacatcatcggtaagtgtcaactactgtaacgggtgtaggcagtattattttcaactagctgtcctgtataaacgagtatcacaagcttagagaaagaaacaaaaaatagaagcgcagatatcttcctcctccctttatcaacctttctgacttcccggacctgtatgccgacggatcccttttccaaagttatgaggacggatctcctttcctaagcttcgaggccgcaatttccgaagctgtacactgatgttgcagaaaccttatttagaaccaggttgagggcatggccgacaaccaagatccaggccatagcctgtgacaactacgttcaaatttgctgtgttagaacagaaccctgaaataacgcaacaggccactggcagaaagatacttacctcaaagtatatattaagcttggccgcataataagaaacgaacgaacaacagcccccgagctctaaggaaaacagttaatgaacttcaagactgtcaaagtaccacagatccaattgtctgataatctctcagccaatctcggtatgccaatgtacaatcgcgacttagcgatgagcttaaacaggagaagaatacaggtcccagcttcagaaaccaccaactggtgagctatatttgtgtatcgtacggaacttggcttagaaccatacctcagtgcatgaggctctgtgtctacatccgcgggagcgtcttgaggtctaccagcgcgtgcgcagtgcagaggccctagaggtccagagagcattatgaaggagcaagtaatagtcagacagtgacaattactgcagagagtatcgtcgccagaagcttcacacggcctactacggttatcacctttctggacgacggtgacactggaaccgttctgtgaacccgtcaggacctacgatgtagtgttatatgcagttgtttttcttcgaagactgaccagaaatgcgattgcaatcatcgcggtctacttggcctctgccaacagcgggtcgtacaatcctaacatcaacccccttcctttcttgcgaactggtgttcaattaagaccgccgcactcgacatgtgagagaaagagatcgcattgatgacaccatccagcagatccatcatacgagtatatgtacgaagtagatgacctcgcccggcggaaaccctcctagtccccgacctcagctacctattcccctcggtcaccgaggacaataactgcgacatcagcggtgttacccaggggccccgctcgatctctctattcggactacgaagaatatatttacaaagccgatctggataaccgggaggatgaggcgcgcttatacgttacggaaccatgaccgatgccccgcctactttgccctaactccctgagaccgatgactactgccttttgggcggttttcccgtgagcagcgcagcacaatgaatggcatgaaagccatgtcaaagagtgccactttgttcctgagcgctaggacgttctcacatctggtatgggaaccgagcaacgaagtatggaaacattttgacccgtgtgaccaaattcagctgtaagctcctgctggtggtgcatggttgatttgacaccgattagtttgatcaagataactaaggttccgcctggaggcagcatagatcgtaaactcgcccgactgcgtttaatctcgagctgtataccttcttggccgaatcgtgccactattgacgggaagtaagagcctcttcatgacggttatgcggacatttgggattatattgaaccagcttatggatcggaagggttgactaggagacagcgcggatggatgcggtgatggatatttgaggcttccactctagaccatagaattggattcgtgtggcccattggtctgcacaagtagtgcagtttccgtgatcccgatatatagtttacgtcttagcagcaaccgtctctcacatctcacaccaatccatcaaccatgccccttgacactgccggcttgagcttaccaacatcagtatcagattctggacaaggctggtctttgtgcctttcgtctggcatgcaaggctctgcacgctaaattgcagaccacctttgcagctttcttccagcgcctcactgtctttagcaccagggaaagcctcgacggatttgaagctgtcgctcacacgccaccttccgcctctacgtaaaagaggtagctctggttgctgatgtgttccggggcctttataaccccgatttcaccaccttttccgcagccaagcgctacaagctcccctagcagagagctggaaaatggtgtgccgaatactacaagcgaactaccatgcctaccaaactgtggtggcggagcatctctccctcatcagctcggatctcctggcagagactctcgccagctgcatgagcagattcgagaatctttctgccgtggggttaaggttatacggaagtcaagtcctccgtccctgcacgatacaccagggaagccagctatctggctgggccgccgcccgcttcgagaccagttcggctacagcccgttatttccccctttccctcgggctcaggattcttatcatgcggccaagcttgatgtatactctgaagtaaatatctttctgccagtggcctattcgtgctcctgtttctcggcgcttccaaaggctaaatcagcctcatcgacgacaatccgagagccatacacttgcgccgagaatgagcggtgccgtggtttccgcctgagcaactaatattgttccaagaaggttactatgctttgcttcctggcttgtataagctagagaccctccatctctgcattcattatacggactcggttgcgcgcagacgtctgcaacacctgctcaaaagtactaccaccggtcttaagatcgtaaagctgtctcaatggaggacggtggaaaaaatgagctctgatccgtgtatctatccttcccgcatcttcattttccccgacggtcggaacttcatcttcactgggtcaaagttactcgggatggccttcaggccgccgcaatagcgccccgagccttaacaacgtcaccttggtctcaggaaacataatcgacccgatactgcattttacgacatacgcgtttaccgctatgcgtctcgcctgtggcgttgcttctgtgatcccttcccgatatctcactacatatccaatacctgtcgattaaagacctcgcctacctcggtaaaatatcattgtcatcgccgacccgcgggacggcctaaatggcggccgaaaatttcagagaagtcaggttttcctctgctagaagactattcgaacatcgctatccgcgccccaatggctcagccagctggaatagagaagctacacaggaggatctctccccaacatcactggtgtgtttttcgtccccaaagcggtcaaatatatctttattctctctgtcttttgttcccagagcttttctaaatgggtcactttactattaccaatgcaaaactgcattaaaggcgttatatcgaacgaaccgtcagcacccccgtgggacccgcgattttcaccgcttatgttggtcccggcaagggtcgaatcaaggcacccgaaccggagctgatgctctggtggttcgatgagtaggctgattcttcgagacagcgtgcatgtggattacctcgaaccctataacggatgaatatactgtatgcgcgtatagactcgttcagtaagctccaagtgtccatgggaaaatgtttagttaccaggccagacaaattcgtaatccaaattaatgatgccttactcattagtggcttccagccaagctgtaagattgtagagcttgaaaggaatataaagaatagataaaagaggcctatattgtggttgcagactgggctcgtcgaatccaagcgctcattcgacacattccagagggattaagaacgtggtgagcgctgaagagtcgtgtgaacatattaggacgttaaagtgatagctcactactctgaaggtaggggtggaatgcagtcgtctatatgggctcagggcggtcaactcagcgttgatgcagcagatcctcatattctggctgttagtaacgcaacagtccagaaccatttgaatactcagctgcctggatctgtgcccgctcagcggacctgatactctctggtagctggtcaatggcggagcaatcgttcgaggtggagtggcgcccacttgtgatagacggccacgacaaatctatattctatcataaccagttccatatcaatttccattctagtcgtgcccgtcgtctgtctgaggactcgcactggtcctcatccccgctcctccgcttcagtctgactccggtcctctacatgcccatgagcaggatcctcatttccatccttcccaaaaacaccctctttaacctcaaaccggaactgttcttcgtcctcccaaagctgctctttcaactttgcatgcgccctccaaacaggcttgatctcgaacagacggtccacagcctccagcggaatcccgctcgtctcgggtatgaggaagacgcaaagaagaaggcgcagaaaaagagtgcggcgaagaagaagtacaccccgtagtgcatggt

SEQ ID NO: 5927 - DNA, 7579 bp, Emericella nidulans
  unsure (1)..(7579): unsure at all n locations
tcttatcgctctatgagtaaaaattgggagagttgagcgcttgagaacttggagagagtgagacagcgagaccctagatacagagcaaagatacaattccgtccttgaataatgattcattgatatcggcgctacagcagaggccaagacggttgttggtatactggccatttgccgacagcttccgcgcattggccacccccctgtcactatacaaaggatcaaggccatcgcatcgccatctcttctgcaagcacgagccctagaatcaactaaacgatgcatgaacactcacaatcgcaatcgattcccaaagactttccagtacgggacgacctggacgagacgaaacggtacctagaacgcctggaaacccaggatgacgggctcgggcagatcatggaggtggctgcaacgccagaagaggagcgccgcgtggttcgcaagctggatatgatgtttgttacggcccctgttctattatgaagcgagctcgttcagtactgactgactgcttgtctcatgttagacttatacctgttatgggtttatgctacatgatgcagtacatggacaaactggccctaagtcaggcaactctgttcaaccttcgcgaagacctcgtacgtttgatttaatcagctgttgacgatctcctggccacgctaactggcgactagaacctccagggtaccgattattcctggacttccgccgtcttttactttggatatctaggatggagttggcccagcagctacctcatggtccgccttccaatcggcaaatatatcacagccagcgttctggcgtggggaggggcgttgatgtgtcatgcggcgacgaagaactttggtggtcttatgacggcgaggttttttctaggggtcggcgaggcttccatcgcccccggcttcgccctgattactgggatgttgtacaagagagaggagcagccggcacggtaaggcttccgctcccttattttacaggggctgggaagggagaagtattgttatgcatttctaacacctgcgtcgactccagacaagccgcctggttcctgggcaactgcgttgcaaccatcattggaggagtcatcgcctatgcaatcgggacagtcgaaggtgttgcagtaaacagctggcagcttctctttcttgctcttggaaccatcacgaccgggatggtcctgtggctcgtatttctactgcccgattcgcccaagaaggtgatctttttgaccaaaaaggagcaggcgatcgttgtccagcgcaccatggcaaacaagaccggtatgatggataatgagtctttcatgctcggtcaagcttggcaagcccttcgagatccccagacctggtttctagtgctgtacaccttctgcgtcaacttgtggaacggcggcgtcaccagtgtaatgtcttccctgacctcggctttctttatcgtgacagtctgtgctgatactttccggctccagttctcgtcgatcattatcaacagtttcgggtttagccagctcaggtctctccttatgcagatgcccatgggcggtgcgcaggtggtatttctggtcctcagcgctgctgttgccacctggttccctcggactcgcatacttatgatgatattcaatgttacagtatcgatggtgggcatgctgctcgtctggcagctggacccggatcaccagatcggccgcatggtcggtttagcattgggcgctgtcttcgccgtcaacattccgttgtcgctgagtgtgatcagcaccaatgtcgccgggttcacgaaacgtagtgtgacaagcgcgctgctctttgtcgcatattgtatgggaaatataatcgggccccaactcttcctgacttcagaggaaccagcataccctgtaagttgggcttgttctcactgctataatccattaaagagggtgggaactaatagagacaaattgatagacagggatgaaagcggctatttccggcctggcgctgggtgcattctttctcacttgcctgttatgctactatatctttgaaaatcgccgccgcgatgccaaatacgggccgccgactcaactgaccgaggaggaggagcggactcacgcattatcaaacaagacggacttagagattgagagcttccgatatttgatttgagggatagcttaaaccatggcgcttggaaggtgttataaagattagagcctgtggcatagggacgtccatcatggacaaccatgatagcgacgtgcttcaattaaatctcactgtagtgcactgaggcagcgccctttacccttgttcctttattatatgcgacgaagttttatgttcaacgccatacttattgtgtccttaaggatttaacagatgggctgctggacctggggaagcctcgtccggacagacaagatccagaccgcggagaatgagtaacccacagggcgattaggagggaaaaggaaatgtcgtctacttgtagcatgaagttccatggattgctagttgatcatgcgttggcttcaatgctggactttcccttctcgtacttgctcaatagtatctggtttcaaccgaccatcagtcaaggaatatatgaagcctatgaagcttagccctataagacgtaaccataaagggtgtcaagggtgtaattgaaagttctagaataattcttatcacaaatcaatccattgactgcagcttgcagcttgctggtgtaaccaggcgaggcctttggggcagcccctaacatctattcgtctcatcgttagcctctggctattcatcctgcccaattataggtctggacataatgttgtccgccgctgcccctggcttccatcacgacggctgcaatgacagaatattcttatttggagagcgaacaatgcttttaaaggcagcaagtgtagctcgccgatttgaataaggcacggcaagttcgcaactgttgcaagggccctgtatccctcgccgctctaatagagagccctggacgaccatgaggaggtcgaccgctagataatgttgagcaaaagcagcagtacgggttatgctgggaaggaagctttgattgaaatgcgcagtattctacaaaattcaaaggcttgccccgtcatcatgcgtatctttgccatacgaccttgctccagagtcgtgtagagcactaatcaatgatttaatcacacataagcgttgcaattcattatatgtccactcgttagaattatgcattaattacatgatatacattcacgcggggcagggctgaccccacagggcatggcaccgtgcgctctcgaggatattctctgtatgtcccatttcttcttcgatctcggtgcttgtctcttcaccgtccttagtattgaccagactcgaagcgccaaccttgtccgacggaatatagtggcgaaacagttccggcaggaccgagatgcaggttaggttgcgctccctgcagccattcatcagggagatatcgaaagcttcgtctttacccgctccgacatccagcagcacattcctcgctcctgtccgtgtcaaggcgtaggcaaaggtacatattggcgctcccgagtaaaagaccgctcgctggcccggtggcagtcgatcgattggcgccttgccgagtccaacataccggtcggccgggatgacggtctcgtcgacgatgaactgcgtttcaaattcttgatcccaggtctccgcgcagaggccgacccaaagcacatcccatgaaagaccgtacggagcgcccgtcgagtccgtcgtcttcgtcaagcgccgaaccgcctcggcaacagcaaccatttgttcacggatcgagaggtcccagtcaacatcgtcttccaaaattaaggcggtttcaaaatccgactgcacgacgtatttaataagatcgagatgcgcgacccaagcaacggccgagccatgattggggtgtcgagcgtcttccgggcccaggccggcaaacgcgtcgatgatttcgggaggaacggggggctgcggtgggatctggatatcgaggccggtcaactgcgcggctgcttgcagcccggtcgtgcgccaggaaggaaatggcgacagtgcgagaatcgtctcaaactagatcgaggtcggagccagcgtcagcagaggccgtccatgacaagacgatcgatcacacctcacccctagagtcgagtttccagcgccggtcaatggcggtcgggtgaaagagttttcagcagtactgttgtcggcggagagcgtatgagattgcgcaatgaccctaggccgctgatatgacgagagaagatagaccatccatagcagggtgatggtgggcgcaaggccgagataccatcgccagcggaccgcaaatgcccaagcagcagccgatcgggacatcacaaagctcacgagggaggttgggccggagggtttggacggccacacgctgggaagaggatatggtatagtagatgacgatctacactatcttcggcccccaattcgggaaatgggacagccagttagagccaaagctttgcccacatgtccaccaagacttcttggcgatgcaggctaatacggcttaggggcaaaataaggtaaagataaacatccaacgagggaagaatgcacgacggtcaagggaaaaggcttttgtcccgcctggagtgacgtatataaggctcccggtggtgccactttctctatcgaaactctgttctaacatgctgatccggactctaacgcacgcacacagaacaggccatggtagaaaaagcacctttactcgagtcgactggtgtattttcggatagacggtcagccaccttaaaaagggtgtcttataaccagcgagcaaagacgccatgtcttgtttattcgacccgcacaagaagggcactctgaaacaggtcctccagccacaatctggccgcagcctgagtggagcatgaccagctatggctggctgatgattgaacatggccaactaactagctcttgctccaccgccgactggcttctgggtggacgcatcggcagcacaaggactaccacgtcagtgacgagattgataatgcccgtgattgtgaaactcgtaacctggtcaccgcagtaaccgcctggaatggttttatcccagttataggcaaaagggcgacagatcagacagcccgctagaatcgtcgcgatcgcccacgccacaatgacagccattgttgcgtatgaagaaatcacaagccaccggacagggaagatgcggaggtacaagaagagaatgctgatcttggtgcagctaagactcagcacccacacaaattgcagcgggacgatgagtttcgacacggttattatgggctctgtaccccatctagggtctgccacgatgacgctgacgtggtcgtaaccgatacctgctcggaaaacgccagtgatactaatgcattggaggccgacagagaatgtctaaccggcccagatagtcagttaattgaaagcgagtgctgcggagtgggttgccatacgcatgccataataataagataatcgctgagagtccatttcttgcgcgcgatcttgtggccagcagccggagtagaacgncccgtattgcaaggatggagaagacgaaggagcagccgagcacggagcgctgggcgtgcgttctgatggggaagttgaccgtcatagtgacagcgcaagcccccttaacaaaggatgcaaggctgatgaactggtaatataatggcccttccctaaagtcttgacctggccgggagtgagacggttatctggtggaaaggttcaattccggggtccaaggtcagttaaatcgcggaaaggacttgcccttggacgtagtggccaaaaagcccccaaagaatcgcagctgtgggcgtcgggaagatgagatgaggcccgctttttccgtcctcagcatgtagccatgcggttggagttgacgctgaggtgtcagaagctgaaactgaaagttttgtcctgtttatacatcagaagttcgcaaaaatgatccttgttctgtttatgtagagctcctgcatcgtttctgcacggaaataagagccatcacacaagctataagcttcgaaaaagagggtttgtcaaacatgtcagattattgagcgtccggcttgggatggggggaggagagtgttggaattgcgccgttgaacttaaaaatgcagggcccactttgatacgtcttcctattggctgagacaccttcacccgagtcagtctccgacggtggcttcttgttagcggctcggttgatgtgtcagtcgggtaacttaagggcccagaagccggattccggggccgcttccccagccgttggacgggacggggctggccggcaataccagtaaatggagtccacaggtcagagtcaaatgcacccagaacagctttgttcctggctattgcctagcttgtactttggactcaacaccgtctctttgccaagactttactctccagccgagtcagcggcctgatttttagtctgcctggactagctgctaactgatataggggcgccgccgcagtggggcccttgggtatcattataaatagagcgcacgaactgacagtgcaaagatactgcgcatttccctttcttgctaatgcctggaattctaaatcagcaaaacgagcgcacggacttatacagcagactggtcttaatagtttggcctagtgtctcccggagaggattgctttttcttcgcttctgtcatctgactcaacatctagaatccctgaaatcctctgacaatctgcgtgggatgtctcctggttgactcccacgctctcaaagctcagaacggaatagaccagacaagcgcgacttctacttgaaacccttcctatgcccgatgcctggaccaattagagcgtgggccataaaactaagaaacaccgtttacacgtgttaacgcccagaatgaacctgactgcactcaggtcgctgagaacatgacctagttggtgaccccagccttggctagacaacaattggcacaatttgcaacgatcaagccccggacttacttttttggggagcaagcacgaacaaattccaaaaatcaatgattcgccaccctttttcggtacaacaccgcttttttgaaataacttgtacctgaacaaaaattgcaaaaccttggtaccttgtcccgaaggatatttatatttacctctcaaacccatgggtttcatttccctatatttctccgctgttttctcttaggtcaagattgtaacgcataacttcctgcctgtaccaaacttacccttttctccccggtctcgaaaaagaaatataatatcttgtgtgggctgaaccaagagttcaattccattctaacgtttctccgcctttagctgggtttccattgtaggctgtttcatgttctatcagttccatagtgtatagacgtattaatttccattacattcgatatacttttcaatatatttatcagtcgttttataatcataatctatcttatattacattaatctttatcatcatacttcctatctattcttat

SEQ ID NO: 5928 - DNA, 4523 bp, Emericella nidulans
gctttttacattttaagcacagttcctgtgatgtcttaagtatgaatatagtaaggttggcatccattgtgcatggacaagtcagcgtaatgttgtatattacatggtttggctgttgctgccctgaggcatcccttgcaagctatactagtagttaacacagcctaatatgcagggatttatccagcagcacatccagcaggctggtgatggccaggtgattatatatgctaatatcaagagccaggttgatgctattagctataagctgggctgtgaggtatactatagtactattctggactagataggcatgatacaacagttctagagcagccagacctgtattattgctgcgacaagcaccttagacataggcatcaacatccctaatatctggtgtatgatctatctaggtcagccatggatactgcttaactatagccaggagagtgggcatgcagggcatgatggcttggcaagtaaggctgttattatgcacccccagggctgggatgaccttgatctgtaggttgaccaggtattagatactgagtttaagcgcgtgcaggcgtacatggaggttgttgagggggtggagtgttgttggtatgtccttgaccagtacctggacaggatagttgacagatatatataccagcagtgccaggatcaggatcctgacaagctactatgcaatgcctgctggccagatgggcaggacaagcaaaccctaatactattactattactgtcgccagcagtatcagcagcagaatataatgtcaatatgagtaactagcctaataatccccccaatgcacaaaataggcctgttctgctcaattattgatcttaatctatgtctaaaacctcagctgtattgatcctgtcccaagtactgtgatctgcagcagtagcacccttattcaaggcactggtgcctcctgcagctgttttaatagtcccagcagatagcataataccagtataataccagcatactactatctagtagcagacagctactgtgcagtggggcttggatcacaagttccttaagcaagaggcccggtaatggctgtaccaatactatgtctgtatagtagccaggtatgacagtaaccacaagctgtacaactgctgtcaccctaatagccagactactaaacagtagatagtacagctgtgatcccagatcaactatatactattctactgttatttctagtataggatgccatagttagtctaccagggctggcaggccaggcaggagtatccatggcacagggtgctgatcttaactattgcggggatgctgtacaggccttacagggctcaggtgcagtccgcctggcagtgctatttagctggatggatggtcaagcagtagatagtatatatatagaaggcgcagtgccaggttaatacctatgtagtagatatacaggaggtcaccttggtagtggcctttctcaggcaggtaatagctgacagacagggcatggagatgcaggctgtattctgctggttacagcaggtttgtcaggagtacaaagcagcataatctgacagtaatatattaagaatcagttatgtggagagtcatagcagatttgttgctttattatatgtgtaggcagatagcagaatagaattataggcaagaggaacatagaccaagcttgcaagtacaggctgccagctaaaccatgagagctaattaacaccatgcatggtgctggcgatgtgttggctatgtgtccaggtcatgcaaacctggcagacgaactcaagccagcttggtctcatacaagccagttgtcagtataaacagtgtcatgactaatagatggtaccaggcttgatacaggcattgcactgcatgacctatatcatgctactagacagtcagctcaggctgtgctgtgccttaaagcttggctgtacctgcagtattaatatcagtattataccagcagtataatagtatcaagccagtacttaggagatatatatactacaagtaggcaaggatcatagttaactacattattattgcataactatataggagtattattaattattacaaacaactacccagggtgctataaagaaacaaaatctatactatattcacccaagcacagtgtcatgaccttacttattattattattactgtctctattattgttattgttattattattgttatcatcctcctctatattgtggttgtcattgttgtcctcctccaggaagtcaagattattgtcagcactggcagccagggtattgttgaacttgtccaggcccaccagcatctcagatactgggactagagtaaagttcttgagcaagcagatcttattctgcagctgaaaggtgtggtatagtactaacagctgtacctagtaccagaactggtatatttcaagcacagtaccagcactatatctaccccctgcaataacccttgccttctgtttattagccttctgcagctcggcatcgatgtcgaaacagaactcgagggtttgatgggcggcctcctttgtccggggcatctgcgccagggacaaagcctgtcggaccaggcttgtggggaggggaatatactttttattcccttcagtgcaccaagtacaatgctttgcctggtaatgcttcagcacacagacagccagaccaaccaccttgccagtggctgtgtcaaggacaaagaggttttttgcacagtggacgcaggggtgatcagtaataacagggtcagggtctcagactcaggctgcagcctggatagccttctaggtctggtcagcatgcatgccagtatacaggctgagtactcaccttccttgtcaggtatttgtttgtacaggtgtgttgctggcgtgttgacagggctgtgatattgttatccttgcttgcaacaagagattaggcataatactttcttcaagtattattgacaataatagacacaggcttgctgatggggtggaggctaatgtctatgattagggagctgggtttatcactgttactgatagtattgatatgctggtcatctacattgtaattattagtagtcttaataataggcttctgctgattctggtcactattgctgttgtggttactgtctgtgttgctgtccgcgtcctggctgttgttactgttggtgtcattgttgttgttgttgttgttgttgttgttgttgttgttgttgttgttgttgttgttgttgttgttgttgtgggagttgttggtgtctactgcgggctttgcgatcacaagcttatctatactgtccaagggagcagggcactgaggcagagctgttatcaggctggcctgcagcacatcgtcccgctcccatcactgattacagtagtgtctcctctttgactttgcattgacaatggttggtgtcaggccgggggggctcggggggctcgtgaggtcggtcgagcggcggcgaatcagggtctggggggcagaggtggccatttcggtgcaacaaggttggtgggaggatgaaggtgatggttggagaggtgatcaagcagccaaaagggaggatagtgcaaggtagatgattagagaagattaagcaagtagtgcgatcaatgggagcccatgatgcaagcaagcaacaacagtaatagaacaagtaatatataagataagagtaataggcagagggaataagtaacacagcaagagagaagagtaagaggaaaagaaaaaagcaagtatgaagggagattatacaatatatattgtagtgaattaagcaagctgtattataatgcaatactaaagctatattatagtaatacccacatccccagcaacagtattataataagcttatttactatgcaaccaacaagctgtgtacgcgccagtaaggacaagcaatatataatacttctgatcatgcaaaggtggttcctgacagtgcaagagcataatgctaacatcaatgctactgtatgacaatgcaacaacggcaaagcaatgacggcaaagcaacaacaacatgacaacaacagagctctgactccagacaaacatgctgcaaaatatagacaatattgtattgctgtcagctactggctgattgaactgcagaggttctgcttattaataatataatatattgtcatgcttgctggcatgatgtgatcacaatgctggcaatatgaagagaagattataattgtcaaggcatagcttggttggtagtattatatatatattataaatgcttgcatgaactggcatcagcagatttagaatattgtgcacaatgctgggggtgcgccggggtgacaccagcatgttgtgaacaaggcatagctgagggttgtcacagttgtaacatatagacaggaggtattggccagcagatcagcatcttatttagcttagggtataatatgtaagtagacaatgccagctcagacaagctttgtcaagtattgtaagattaggcattatgatggat

SEQ ID NO: 5929 - DNA, 2089 bp, Emericella nidulans
gccattgataaggaggattgatttttccattgtgcagagtagcaatgaaggtttacggccgattggttttggggggtagattgttatttagtccttgtctctggacttggagtataaaattgcggggaaacggataagggaaagtggtggcagaacgctctgccggctgcaacagagattgccccagtcaaaacggcataagatgaaggttgcagtatggggcggtcaaaattgaaagacatcaattgatctccaggtactgtttcttctaagtaaccttctagaagcattaggaccagtcaattccttgtcgcgccttctcaagcgctatggtataaaccgtttttttagtatattgactcggttatcagcggcctgctggatgatctccactccacctcatcatgaacctccctcttgactctttcccctctctcttccactcctcctccccttcctcctcaccataatagaatacaccgcgtgcaagaaatggactgccccatcccgcaaaccgagcttgacgagatctatgctttcgcaaccgatctcgcccgtaaagcgggccagttattgcttgagcgcgtcaacgatcgcaactctgagcaggtctacgccgagaaagagaatgcagtagacttggtgacgcagactgacgagggtatggcctcttcaaggttacagcatttttatccaagatcgaactgatgaaacgaagatgtcgagtcattaatcaaaacagccatacagaccaaatacccagcccacaaattcctcggcgaggaaagctacgctaagggacagagcagggaatacctgatcgatgagcagccgacctggtgtgttgatccattagacggtacgctcctttgctgcctccaggatgcaatgcctaacctgcttatacaggaactgtaaacttcacccacgcctttcccatgttctgcgtctctatcggctttatcgtaaaccactaccctgtaatcggagtcatctacgcgccaatgctaaaccagctcttctcgtcatgcctcaaccgcggcgcatggctgaacgaaatgcaacaactcccgctcatccgcaaaccgtctatcccacctctaccagcaactgcaccatcgaagtgtatctttgcatgcgagtggggaaaggatcggcgcgatattccagacggtactctgcaaaggaagattgagagttttgtgaatatggcggctgaacggggatctcgaggtgggaagggaggcatggtgcatggggtgcggagcctggggagtgcgacgatggacctcgcatacacggctatgggctctgtggacatctggtgggagggaggctgttgggagtggtgagtccaccatagcagtagcagttgtggttgctccagatgattaatgacagctcagggatgtggcagccggtattgcaatcctgcttgaagctggggggttggttactgcggcaaatccgccggaggacatagaggggccgattgagccggtgaagctaggcagtcggttatatctggctattcggtatgcctctagattcatccttttgcttgatactgacttgttctacagacccgccggaccctcagaaacagaaacaggtcgagagacacaagaacgaacagttcgagaagtctggcgccgcgtccgccagctagactatgaaagaccgacgagacaatcatagactaataatagaactctagacaatgcttatatgattctatctctataatgacagtctacaaatttgacttcgaccgctcagcaatcgtctgcgcaacaaacgcctgcaccttctccactaaccccggctcactaactacatctttcccggtccagagcctcgcctgctcgagaccctgccagatgagcgcctccgagccaaggataaccttccaccgcgcatcctgggcgatctgcgcaatatccgtccagggaagagggtggtagcacatctccaggataactccctggtccttctcatgcgtctgccgattcaggaacacgcgcagcgtctcgcgagctctgatcctagtattctatagtgtcacctaaatcgtatgtgtatatacata

SEQ ID NO: 5930 - DNA, 15457 bp, Emericella nidulans
gactctcgtccgtcctcagttcattggtcgtcgtagacagaatggagagaatcaagtccttccaacatggtttctgcagacggtcgttctcgacgcagtatatctgcaatcccataaacaaccttctcgtctagtttcggtccaaccgggcgcaggcgcgaagtgattagttcttgcggaagaaacgacgtcacattagtctctgcgttttctcgggcctgccgaagcggataactcaggtatagcaaggcctgcgctctagtcatagccacataaagcagccgtctctcttcgtcggagtcttctgctcgtgagtgcgggataataccctcgtaagctgcgggaataaacaccacgggccactctaggccttttgctgcatggattgtcgagatggtaactttctcttgcgcctggtcttccccttcagtctcttctttcggctggacctcggttgataaagccacattggctaggaatctggacaaggcttcttcgccaggatgcgactcttgctgagttaggccagcaatttcaggaagattctcatcctgttcactttcatcggccgcagttgcatcgtctgcctggctcattagttcctccacgtttgcccatctgttttcatcatttgacccataagtcgccgtaatgaattcgcgaaaagagagtcttttcatcacgatctccagcagccttcgaggtgccgatctgtcgacgcactggcggagcttctccctagagtattcaatgaggccaactagactggagagcccttggttagtaggcttcgacatggctttctcagtcgacctgcgaccttgcgctacatctttgatgtagtcccacagcggtttgccagctttctcggccccgtttaagagcatcttaacggtctcctctccaattttcctcgaaggaacgttgatgatacgtagaagtgcttccgagttttcgggatgacttataactcgtaaatagtctaggagaagcttgacctcgactcgatcaaagaatctttgcccaccaaccattcgatagggaacgccatgtttccccatggcggactcgatctgccgtgacagcgacgcagatctgagtagaatggcgaaatcggaatacttcaataactttcccgttagaactatgcaccttttgatctcaagtaccagccactgagcttcgtcttcggcagagggcagcttgcgcagtacaggcagcgtgccaaaggtgtgcgttggctgcaacttttttgctggcctagataaatcttgctcgatcacgtcttgcgcagacttgaggatcgagcccgatgaacggtagttatcctccaaaagtacaacctctgtatttctgtatagccgctgcatccgtttgaggttctcgatctccgcggaacgaaatccgtagatgctttgatctggatcaccaacgaccgtaatgcgcctgttccaagacgcaagaaggttcatgaggtcgtactggatctgatttgtgtcctgaaattcatccaccaagaccacctgtacgttggatacacactttgggtgttttcgcagcaattccgcgcatcgtagcaataggtcatcgtaatcgagcaaattcgatgttgcgagctcactctcgtactcccggtatacttggacgaactcgcgatgctctagaagcttgctaatcttgttctgctttgccgctacatcatcgggagatacgccgtgcgccttctgatgcgatatacgagctctcgcagtgttgggttgaattccaagctgcagccgctttacgattctctgcaggttttttagcataacatcgccaacaccccaccagagacatcagctaacccgaataatcgctagcgaatcccctgaatctgcaattccaaaccccttctgcagccctatcaaatgcccgtacctcaccaagtatcgtcgacagatcgaatgaaacgttcctaagatgagccttgactgtacgtgatcacctaccaatttggccagccgctctcgcatttcccgactggccttgatggtgaatgtgcaacagataacatcttgcgggcgatatccgtcatgagcgaggaggtacgcgacgcgcgaggtcaacgttttggtctttcccgaacctggaggagcaaggacttgtaaaatcggcgcggatgaggtgaccgcggttctctgtgcggagttcaagccatctaggatggggtcaaggggatccatgagggcatttggacgcgcagcgcgctgtggattccatgttcttttatctttccggcgacgcgctatatcacgaagtcacgtgattcatcttacactttgtgtgcaagaaatcaaagcttttatgagattatttttcaatgtcgttagtataggtatcttgataattgtataagtatataagaagttgtctctctacctaatagggtgtgactgttggataatgatcaatgaatggtcgaggctgacctgagatgtaagcacgggccagtcgttgctattataaatcggcaatcatctcaaccccaagacacttcttaccttcaggtaaatccttttcactgtttctatctgcccctcatgggctgggtaggcgttgccatagtcgtcgccactacatgtttcctcctctaccgacaccctccggcgacctggttccccgagccgcagccacctgtcgccgatcaagcccgcaagcccacctccgaaaaggaagaggggaaagcgaaggagaaaaacgaagagaactctcccacccttcagctcaaatcgcaaccaactctactaaaggatgggcccgttgaagaggtccagacaacttcgaaagcgtctgcgtcaaccgtccccgtcctagacgtcccctcttttcagtggaatgacagcgcaagcgacaaggacgagaacacccctcatatagcgcagcaagatacagcacgacagagtaagacaccgagttcatcggtgactccatcctccacacccacgtctacagaaatgatggcaaatccgagcgtagagcagccgcccgtcgtaaatgacgccgcctctctaatgccccctcccccgcctccttcacgcatccaacaatcaacaacccaaagacaaccaagaccacaagcgcagaatatgcttgctccaccacctggccgactccctcgaccgcgaccaggcagcggtgccagtctgctcagtccacccccctcgacggcatcaaccctgcgagtcccaccaggcatgcgtccgggcactacaaactccaattccaactctctctccccgaactctgtgaccctcaaacccgtcaaaaaggcgtctcaacgcgctgttctcgaacccggattctccccactcgactgggcagccctaacctcaaacccaaaccacaaactacgcggcgcgaatctcccgggaactctaataaaggtcacaccgtcgatgctgaaagcgcagaatggccggaaagggacagatgcgtggacatcatatcagggaaaagtctataatatctcaccgtatttgccgtttcatcctggcggaaagggggagctgttaagaggagccgggaaggattcaggaaagctgtttctggagattcatccgtgggtcaattgggatgcgattctgggggagtgtttggttggtattttggtttcagagaatgaagctgtggcggaaaatcgacttgatgcaatggactgagctgataatgggatgggtctcgcggaattatctctcgatagagcctttaataccagatgtgtatatagatagatagccagatatacagagctatgataccccagtgagtagcgatcttgaatatctgtggtggcttattgattgtcttgcagtcggtagcttgccctgaaggcatcgatgccgctctgcttcatatagtagtaggtaggtggctatttgcgatttgaaagcaaaattaacattgttgttaaggattttttttatttaccgtggtgcttgagatttgttgtctggataatgccaaggaagcaagaaacacacgcacatatatcatggtctgtgccttgcttcaagcaaaccggatcaccgtcttgagaagattatgattacggactacgcagtacaatagaaggatgatgataactcttatcacagttcatcatgacattcaagaagggatttttgcgaaaatgtaagcaaatgggcctggcaatctaaatatagaccatatatatatacatgttctgaccagcagggataaatggtaagactcattctaagaagtttatagacaaaaatcacgcccatttcccaagaagcgccatcaagagggcgcctaaacacagaagaccgaacgcggcaagcacattcttaagcggggctctgcgcatcgaggtgctgaacatgaactcgtgggccatcagctcgacaagagcggtgtagatcaagataccagctgagattgaatcgaacacaccattgacgaggagagtggtgtagccttcgggaggataggactggcgaacgcccaggccgatagctatggcaattggtgtggagattgcgtaacccatacctagaaagtatggggtccagcgttttgagcggggccatgggattgtggccagtcgagaacccaaacccagaccctcaaatgtttggtgaaagaccagaacgatgtaaagagtggtgaactcaggcccagacactgccagggttaagccgatgaagatcgaatggaagatgataccgaactccaggatgaagacggaggtcagctgagccatgtactcattaagatcaacgcccttctcagctagttcgaggtcacggtgttctcgagaatggccaaggtggtcctcgccaggcatgtgatggtttacgtcgttcgacgatagctcagtgcccttgagctcaccggcgtggccatgagcatgggagtggtcgctgtgagagtcattgtcgtgactgtggccttcaccgaaacgcgaaaatcgtataaccatcatctcgacaaagaatagaaccacgattgtcataaggatgattccctcagcccaggaataatcagtgattgggccgctgagacactcatttcgaagggcttcttctgcaggacccagcaggtggatgaaagcggtcgcaatgataactccagaaccaaagtatttggcaataaagaatgcccagctagggaccttggagttctggaagctgcgcgcaaagacaggaaatagggcgccaaaggcggagccgacaaggatcacgaaaatagaggagatgcgcacgcccatgcgcccatcatactcattacctgtttcgcaagttggaagagaaccatcttcggctcggcgaagaagagcatggatcggattcatcctggcaagaaagattctgatagcagattagggttgacactccgcgttgcgcaggaccgatatacggggcacaaagagccaatcgactgcctgatgcagacggaccctatcgaatggtgtcaattgtcggatacaaatgcaatgcaggccgagtcgcaaccacgtggaattgagaccaagacaaatagttcgtggcaaagggatcggttttcttggttttcttgtcgtgcgcttcttataaggtaaaaggatgaccccccacgcacggatatggctcctctaaagataatgcccgtcgaggcgctgctttcttgacgtccttaaaagtgtgttaggcctatcaagagcgttgactcgacacgaaaggtgggtgaacaggaactagcgtgaggaccttcgtggttgcaggtcgtgggatgtaacacaacccaagcacgaactgcgaaaagaaaaccacactggggaaagactgtgaagaaatgagctgctttgaagagtagttccgttagctagaaggcctgtggtagctgtaagagctccaagcaagcttatagatgcgaattgaagtgaaggcgggggagaggagaggttggctcatggtgcgggcgctgtgagagaatacttcaagcgggctattccgggtgcagtgggcattgaggaccttggaagacagatccggccctgatgtcgaagactttttgaggaccttgggggaaaactggtggggtgcaacgttactgttattcttcgtttcgttgattgagtgactacagctcaggcgaccgcgctaaaacctcaggcgaccttgagggtccgtgcgctcacctgacctcgcttaaagcgaccgcggtcgtttgaggtcaatacaacgcacgtaacttgaataccacatgctaacaccatattctaatccccgtgcccccataatggccaaagtcaagaaagaccctaattacattcgatatactaagatttcgaaagctgaattagaccttcctgacttcaaggcagatgtgagcttgcgaaccagtttaagaaaccaccatgagtgatatgattaaactagttgctaactaattcttcttagaatcacggctacctgattccacatgtcggagagatttactgccgcgcccctgcatgcaccaattccgtactgctgctattactgttcgcctacaactagttactaactagttccagactcagtttctgaacacaaacaacctcaagaagcacatcagaaaagcgcacgtggataaattcgatctcttagagaaagaaggaggtggccgtcctactgcaaaagaggaggatgatgtgattggtaattacagcaagattgttgttgccagaactagttcctaactagttcagtattttacaaagccgtgctcgaagcctatgatgcaagacaagaggatggggtagggaagcctgagatcccctgccgtcgcgacggaaaggtatgattattctacaacgctttaaaaccagttgctaactagttatagataaaccagtcagcagtcaaaaaatacgttcgtgagcagggttattcagtcccttgtgatgcatgcaaggaagcagataaggcaaaaggtatgcagcaatctaaagtaaaatacattaactggttactaactagtttagactgctgtagggaggctaatctggatgtttgtgaccactttgagctctttgagccttacgaggatgaagaggaggccgagagtaacgaggtcttttaactagttgataactagttccacgatttcttaatcagtccagacccaactctcgtcgacgaagcatattttcaagctctaatttttcagcctctgccttctcctttcgtattcgaacttgttgagcttctagttcaagttgttgtctttgcagctcaaggttttgaacctgtaaattcgctgtagctgatcgctggaggataggtgttctaaaatgtagaacctggggtcagcggaactaatccagaactagtttcaacaagtaagaatagcatactctgaagaagacctggatggtgactgatgtgctggtgtattataacgagaactttttagaagttagaatcatcatgaactagtttcggactagtttatagtacgaacctgcttccccgtgatctagatcttgaacctcgaccacgggaactagatcggcgtggaggaatgaatcctgaagaactcgccctaaaaagaatactattatcttcaactgaagatagaactagctcattatcctgagccaggcgttttcgtttccgtgtgcctggggtaactagttagtaactagtttaaataggtgaaaaataacttgccttcacgcctgatactattataaaaccgggtatccatacttgtgatccgtgataaatgactagttccatattgatttcgagcaagatattggtcaatatcacgctggtcaaggattcgggagctagagatatcagttgcaatcataactagttgacaactagttcttacctcaaggtcgctcctaataacgagtcataagttcccatataatatgacttataatggctttgctccactgcattcgtaatattcctaattttctcaaaatattctggctttatcaggctacaggctttatttaaacctgcagcaataactgaatgccgtttatgccttgcccactctgcaattttaggggtttcgtgagctgtataacagttagaactagttcccaactagttgggtaagatccttaccttctaataattcaatcaggtgaaagtattcctctcgggttgagcaagtaagaaggctttccatccgacatctagctgaagaatgataatcagatagatctccagtctgttgaactagtttagaaatagttcttagaaaatgaacccggcataaaatcagaatattcataagctgccatgtccagggacgctgaagaggatcaagctcttgcaggtaatggccaagtcctgtatactagttaataactagtctatataataactaggggctgctcttacctgacatctgctttgcacacatatctgtaataatagccttaagtcccctattatgtagataaaagaattgtgttgtacatccttggatatcagcaattaactggaagacccgtgtaaagaggagtttatagctaaatgctgactcatgatccatgaaaacccgaagtaaagttataactgtagttgttagctatgtagaactagtctataactagttcaggtacttactcttcccatgctgaggtaaaaaggttgcaaaaataacctcattaaagtcccctttaactcgtttataagacatatcaacttcaaatgaatcaagggatccaaggagctggatttgcttattaaatccacaaataatcatgacaatatcatggtctgtatagattctgcgaacatattcctaagtatgattagcagagaactagtcatgaactagtttacatactcgatattctggatgccgatccaactcgcagcgtacacctgcaaggccacggcctttaggatatagtaaagccttttcctttgctataatagctgcaaatcggtcttgatttacaaagctattatggatttgtgaaagagtctggccattatatttttggcaaaactgtttcagtgccggactccgtagaaataaacctaaactagtttagcacatgctcaactagttgtgaactagctgcacttactaggggtcaagtcaggactctgcatctttcgaataaggtccaaaatctcatctagtataagctgcggaggcttatttggaggaggaggaggatgtgaatgaataccacgtgatacaaagactgtataagggcattctgcaatatttaatggtataaagaaagtaaatgttgtactgcatctgaatttgttgatctttcccggcccttgcggatggtcaacaccttacaaggactagttagtaactagttattcaaagatagaatagacaggtccttaccacagtttgctctccgagttgtttgttgatcaatcatttcacaggcttcattagctacctctagcggccttgaaaatagatcttccaataatgaaatgtcaaggttagaagccctgtgagaaaggctataggtaaaatgctgctgaaatatatctgatgaggcattgatacaagcaatatagtaatggcttgctccggagatatcctgaactagttcagaactagtttccataggttagaagcaaggacacttacaggctcagagtgtttgcgaagaactggtttgcaactagtttgcgatgctaggcatgcaacgctattttggaaggacttgcagactgaacggtagaggctgctagtaattagttagggactagttagggactagatatagttacctataggttgtacgagtctctggccgctctcgctgtgatataatgtcccttcttttttggaaaatagtattgaacatcgcatcagtaacctcttggtgattcatatccagtaaatctggatgtaaatattcacaggctttaatgcctgtacatgtataatgatatttcttgacacagcactgcaaaaatgtagaaaagattgtacgtggagttccagcaattttatgggaatattgaatctaaactagttagtaactagtccatctgataatgacgattaggtttaatagaactagttccgaccgagcgggaactagtttacattacttactgatgtgagtgcactgcgaatcttttcaggctggctttgatgaaaattaatcacatatgcatatccttgtggatgagtttgtggatattcaggcaaatgattagtatattcaattttttgtgctgagactggcgaaggtgctcctgttgttaaaggaactggcataggatcctagaactagttagaaactggtatacccaaaatatatattcctacctccttaacctctacctcggcctggtttcgctcatgtaaaattctatcatcattttcatgatatatttcagcttcattctcattcaaagaatcactctcagatgagattgataaatttattaagtcattaatgacggtttggtcgttgaggtaattgtactcggtatccattgtaaactagttcaaaactaattgggagaatcataggttgtatcgaggctggattggtgtaaagtgattacagagtgaaatatttatttttttgagcgaggtcgtctgacctcaacgatttagcgaagtcacgtgagctagcggtccacaccaaggtcgcctgaggttttagcgcggtcgcctgagctgtaacctggcatacatactgtcctatggcatcgcctggcactcacgacgaggggaaaacagcaccccctactgctctaataactgatctctcacacttggctcattgctcatcccctcctccccatggaggtggatatctccccccaaggcggagcccgcccggcgactccgcgcctgggtgaaaactctgaccccccctcaggacctaccaccctgactcccctaccccggaactccctgaagagaagggccttatttttgctgcagaagactcctaatacagctcctgctgctataccttatataccacaagccctattaatctgtgatcaggtcagcatggtagtagataaccagctaatcctcctcaatgactggaaactagcaatgacctctctagctaaagtactagacctaactgtctcctccctacaaggctgtccaagagacctggcacagggacttgcagccagatttgttacccttacaaagcaagactccctgtagcagattcctcagatgcctgcagttacacccctacaaccacccaggcagatagaacagctaaattaacctcctactcctgaagcatctaaaggacccccaggcaggcaaaccttgcagtatacaacctgggcatatctaacagctccaagagctggccaggggaactagcaaactattacccctaaacagtatatgcaagccaaacaaactatacaacaaaagctaaagcagttaaataagactgactactatatcttcctctgcctcccagcctcctccagcctccaggctattagaccacatggcatctaggtcacccttgctaggaaggttctggacatgattatacaggtgcaagtaatattaactgggtatgtaattactataacagaatagggaaaggctttcctactattagagaaggcagcaagcctagctagggatagatactttgaaattctaacagagtactatcaggttattgtcacaggctatggcctggagcttggttgtcggccatgccctcaacctagttctagataaggtttctgcaacatcagtatacagcctcggaattgcagcctcgtagcttaggaaaagagatccgtcggcatgtaggtccggcggtatacaggtccgggaactcagaagtcctgacgtatgatcagaaaaggttgataaagggaggagggagatatctgcgcttttatctcttgtttctttttctttctctaagcttgtgatactcgtttatacaggacagccagttgaaaataatactgcctacgcccgttacactggtaactgcgcaaacatcttaacttggccggtacgaaaatcaaaagactgaaaactccactgcgaccggaagtatgataaaaatcactgcaaaaaacatacaacagtagggattcgcatgtggtcacccaccatactactaacctaccggcgtgtggcttaagtacggctgagcggacgggaagccctgttttccacaccctatggtcgtatgtgcttgttttctcaataatgaagtcaataataataggagttaaagctaccccagtagatctaagccggctatggactccggccttgagcccgctttgaggacgcaattcagacaaaaataaagatagaaacaataataaagaaatgcaaaaccagtaatctagatttatcccttatattatctctgctttaattatactttgcaatgtttgcactgcagcagcaagctccagtttctactacttaagccctactagccccaacaaacaaagttttggtacacttgaaaaacagatgccttcaatttattgtaaaggtataggtagtagcctgtaggtatacctctctgttagagagagtgtcacggctctgcatgctgtgatccccagtcaatatcacatgcactggtaaaccccatttagacatctatttgctatgatcatcttagcactgcgcataggataagccgtaatcatgatccactatgactacagagctcactcctggagcggtgcttgaaatgagcgtcgcgctgttgtccagtcttatcgtgtacaccggtgtataggaggattcatcttctgccaatcctgactgtatacctgataagttaggcttcgcttcgtaaagactcccacaaataatctcttcaaatataagagtaaatagcgtataggcatttctgtcttcagacttgagggtttgttctgaaatattctaaagcagatatgatctatagtatacgagtgaggatgtgactcgcctgttgagggaccagtactgaaggcaattcatctgtactctagcctgcttcaagcttgttcaagtatgggctgcctcagcctcttttggcttccctcaaccttcttctaacctttcgttttctccgctcctttcacgcaaatccggttaaccaagactggcgggcatgcactgggccgcagtggaagataccatccgaatcgctaccgtctacgccccatcaaagacgcctattggcaggcttggcacgggcttatgatcaaagtacttcagtgggtgcatggcgcccactttgttggaggagactctaggctccaagtgaactggattggatatatcgacggaggtttattgagtcactctagtgttcttagcgataagagaagcaaaagttcgagcgctttctgtgcaaatcccaacgaatgtccatatcagcaataccagagtaaagtgaaataacactgacgacaaatagctctactcctgaacaccatgaatcctccgcagatgctcaagcaggttatccttcctattgaatgccctgcacctcgggctgacagggcaggggtaccggcgaggcctgatatggatgagtcggatgtggcgcagcagctcggactcacggccgaaatcccttgtatatgtgcatccttcccatctgcattgcaaaattccggttggtgtagtttctctagcaagtgagaggtcagacatcgcagttgaaggggcgtgcgtgttcatcgaataatggtagtccgcctgtgtcacgttgcgctgcatgaacgatgacgtagagccagggaacccagggttctgggattggctgcttggataatgatattggacgtttgattggactagatatggcgaggctgtgagcgaaggccgccacgattggtaaattgtttcgcccgtggcttggagatagcgttgaatttcgtcatctctgtcaggttcctgttcaaacagggtattgttgggagttatggaggagttgcaaggagcgacagagttcgggacctctataggtagatggccgctggttggggcggcatctaacggttcgtggtaggccatggcggtgtctatgacaggtgctggtattcgagattgcaaagttgaacgaggctagcaaacccatggtacgggtcgagtgcaggctgatatagactgaaaagtcttgtcaactgtcgagtgctcttcgttgcgcagagtacccttggttgccgtctgtcaagactcttgccagccttgccagttgccaaatgcaatgagcggctgccaagtctcgcttgcagaatcttgtcaagcgtcaagagacaagagaaaaagtaagcaaggcagaagcggatggtgcctggcatgagtgaccaaaaaggggactctccgacctttcccaaactgccacaacgtgctcctttttattctcttgggttccttgccacagccatgagcgctaccagcccctcaagacatcgaccgatatcgtttgtggggaagtggctggatacgatagaagaaacagcggcaccacagtccactagctaccccggccgcaggtctttaccacgttcgagcaaatcaaacctcactgggtccacactcgttggcccacgccggcgacaatataccggtatctctctagatactcgtcctcgtgtggtctacgtcgagtccgcgagccctagaaagagcagaaaagacgccttccgcgccgtctttcacagctggaaagccactcttaccacgcggacaacgagccatgaagccttcccagcagcccttcgcgataaccccgagctcgccattgcagagctcagctcgcatttgtccgccaactttgcggtcttaatcgaggcggctctgcggaacagcccgtcaaaggcgctgtctgctcgccagatatgcaaggagatcatgcgagcggatcattggtaccgcgcccataagaaattcggctggcaggaatgtgtcgcgcgcgaactttcctcgaaccccgtgttccaaccggtgatcgaatgccgccagggtagggttaggaataaggggtgaagtgcaactcaccgcagttgatccttctcttgcgattacgactcgctccctggcgggcgccgcggaattcggttccctatccgctggagctatcaactgaagcggaatctactgagaggcagatggagcagtcccgccctgaaggtacagacacgccgcaagctcctcgtccgtctttagcggcgcttgccaccgcgtctgtattatcatcgacactacccctacatcctcaacctgcggaagatccaatcgcaaagaaagaggctttggtatcctttacggcacttggcccttctcgtagccccgcgataatatcatacaacgatgcgcctccaccttcgcaccagtctggtgagaatgtattcaggcctgacaaggccgacgataccgagggaggatcggagctgcctcgaggtcgcggatcgaatgatgagcaaaagcaccctggacg

SEQ ID NO: 5931 - DNA, 3780 bp, Emericella nidulans
gctcttcgcgttgcaacttgacaccgttggtacaacaccccttcttactagctgatttttttgccttgttaccctcatggcggatctgcataaagagtagctagaggttataaattagcactgatcctaggtacagggctgaatataacttgcctttcctttctcatcacacggcaagacaggcttactcaaattcctaccagtcacaggggtatgcacagcgtacggaccacttgaactagtcacagattagttagcaactagtctgcattgaatggctgtacttacaggcccttgccattgtcctgatcatttccagcttcaccctcattgctgcaaagtagttagtgactagttaaggactagttaaatgggagaagaaacttacaaattcttgatacccttagattgtggtccttggacttggtgctgctatatattagctaatatactagttagacttacagaaacttatgcagcttgcttgtgcttcttggtaggagttagggttgggagaacagtgcctttaaacaagccttcatactatgctacttgactagtcagggactagtcaccaagtaatctagataggacttgcctttggcctccatcagttccttcatagtaggaggtctattgtgcaatgtaaactccatgccgtgggagttcttgtccttcaagtacttgaccaatatgtttctgttggcagagggaacctgtcaactagttaataactagtcagaaactagtatagcagtagactcactgtatgcttaaggcatccctttacttggcagtagacttcatatggatggatatcaggcacgccattgtcgtcctgtggactagtcagtaactaggcttaaagctagtcgggtcagcttactatcttgaaatccggcagcataagctccctgtccttaactgcctcgagatagtgacagtactctggggactttcggagattgttatcacgaatgcttggcatactaattgttgactagtcttggactagtcccgagcaaaaaggattggaggaggaggaggaaggtaagagtgagacaaagagcaaaataagagcttcaaaggctatctctaagcagtatgaaggttaagtatctagttcttgactagatttaaaagagatttcgactagttatgtacctggagtttggatataggaatgtgttgtggtaacaaaatgtaagggggaggaaagaaaaagtcggtcaagaggtaactctaagtcggccattcctttttgggaggcgctaaccataaacggcatggtcaacttagagttagctcagggaatttagggagttatctgcgaccaccttttaggcgaactttgtcgggtttaaatcgcggagcaatatcggcgttacccactgatcagcatccccaaaacccgacgggccggcatcttgcggtcttcacaacaaaatgacaagagttaatgaaccaagaggtggcaactgctaacatgaataccacagactggacgtatcccttgaaatagtgctttgacagaggacgacttatttccttctagtctcagcgtgttcaggacatgaaagccacatatcggattcgatgatagggagaccatgtacgacttggttacgcacagattgcgataactcaaactggtggaacgtggcttggattatggaaactaactgaccccacagtagcctctggggccacgacccttcctgatagctaccggctcaaatctatgcttgaagctattcagacggctaaagataggcccataaatcgccctactggtcaccggtctagtcccgcttcataactagaccatgacaaaacccgtgacgggtccaaagtgtcggagcatgggttcctcccctgtccttggggtgcccaggtcttagtcagcatctcattaagtatttagcctagcttctttgtggcatccgcacccctgaataccagactccttcatgcttccacacaaagtcagaacctgaacaagtactaggcgagttgcaaccacgaacctgaacctacgggcttcgtcgacgctcaggacccgtagccaaaacccgccaaaggttacccgccaatgacccatcttgcagatgatttttatattaggcttttgaagttattcactgcacaaaaccgctgacggatcaaagtttctgggttcattcaattgctttgttttgggtggcaactcaagggttgcccaaaccccgcgccggtgcagatagtgtatctatacccgacccatcgtgggttttgggtagacgcgtgacggttaacccgcgagttttgtcaaggtctactcaaaacaatagaatttccgactcagccaacaaatgttatgagccagggaccctcatgcctctgctgcataaaacgcacatgcaatgctgggctcacatcgaaaactcgctatcagaatttctaacatgggttggagcagcagctagaataccgaagactaaagcaccgagggactgaaagaaggccagcatacatgaacatagtattccccgctgggtggctgtggcagccattctaccaagcagaaagagacaccctacggcagaggaagaatattcaagaaagtcgttaaatgcatgcatgttctgcttatagagagatctgtttgctttatatagttctagggaagtctttgagtatacccaagggagaatttgtatatatgatgttgcataataacatgcgcctgagccaccttatgttttacattctgatttttatgcggaatgtgggatgggaaaggtccatttgagagattctgtatagttgactgttgttctaatctgaagttacagctaatgatagcattgttattctgcgcgacggctaaacaccttcccatcgcggatatcacgggacatcattctgcgagccaggctcatgggtacggtatatggcaacagctattcaatatcttgcaagggggggtttgcggctcttacatatatcgatatgacttttggccgtcttgtaaagtagcgcccatccaaattagagtttcttacttgccaaaagtacatagagatcagacggattgtatctagatatacaaggtcaaagctttatctctatgtctggaatgattactcgctactgctttctctccggtattgatttactctccatctaagctgctgcctgacagtcttgaacttcactttatctgccatcctatttaaagtagctgggatctctctcatctataccatcatagaatataagtgtgcaaattacttgaatgcgtctcattttttcctggagctgccagaacccgcttgtgagggcctatattgatgacggcgaactgactagctttagtggcgaactccttcctttctgaggttgtggtaaagacagatatatctagggtttctgggtagctcaggttctgaatcttctctactgggcccttatgtatcaaaaccacgatgatcattattatgcgtcccgctaagctggcgttcacactgtatgctctttcattgtatctcaaatgataaaatcggctacactaagttatatggggactgtcatgaacaaatgccaacgctaggtgacgtttttgcgccagatcattagcgcgactcatcttcagccgagagatgtgacatatcaggaaaccggttcttcttctgactcacccgaccacagctaaaatgtaggataagccgggaagttgacgccattcggtcagtcatatcctaagggaactcgcactacatagccgatcccgacgccata

SEQ ID NO: 5932 - DNA, 7363 bp, Emericella nidulans
cgagccgcgacgatgttgcgcttctcgacaagctcgcaggaaataacaggagtactgatctccttggaggcgttgatgatttccttgatacggggaacaccctgtgtgatactcataccggcgacaccagcaaagtggaaagtcttcagtgtcatttgcgtacccggctctccaatggactgcgcaccaacggcacccacagcgtgtcctggctcaacttgagctttcttatacttcatcaaacactcagcaatgaacgtccgaagcgtcctctccgtcagctttccagtatggtttagacccttgatggtcctctcgtcagatgggtcgctgtcaccacctcgagagatcagtttgtccgccttggtttggacgtattgttgaattgaatcaaggaaatcccgagcgctctcgaactggtcaactccatggtcgcttcgatccatatagtcgagttcagcacccattagatcatatcgcgctacttggcgcgttcttttgagagcatctcctcacatacttccatgatctcggcaggggacaagcttcgttcctcgttcttatacgtcgtcgtttcagcgtggatgaaagttcgatcgaagtggaccggcttggctatgccctccatatcgacggggtctaatttatcgtcaccgtactggaattggacgatgccctgagaagaatttcgaacagtgtcatcataaccagtagaaagatcttctaaagatttcatcagacgacgcgacatgtatccggtttcagcagttttgaccgcagtatcgaccaaaccttcacgaccggacatggcgtggaagatgaattcgtaaggaaggagacccgaaaagaaactgttccgcacgaaacccttggaagggggctgtcgggcgtttttggggaaatgaggtagagtccggtcctggaaaccgtcctgcacacgctgaccaccaataatttgttgaccgacgagagcgaccatctgagacacgttgatactagaacctttcgatccggacgtagccataatcaggggggagttgtatttgctcagctgagcaatacattcgtcaccggcctgctgacggactttacttagaataccagatagttggttttccattgtctgcagttcgtcacatccaggatacttttcaagggttccagctttgtacttggcaataacttcatcacactgtgcgtacgctgcttcaacgaggtcgtttttcgattgtactagtctatcgcttggatagacatctgtgataccgatagaaaagcccatgtttgagaaccaacgggctgacagtttcgacaaacggttcattccctcagcagcagcagcagggccaaaatcacgaagcatgatatagaagacattgtccttctttccggaaccgacagtagatttgtccatcacaccacacatgacctcggaatttcgaacgacgagccacgaatcgttggggtccaggtctcttggttgattcccctttggcggcttaaactgtttgcacgcggcgtcgagattgaccaaaaccgggtcatccttattaggccgcatcagaatattgaagacctgctttcccgtccagagcatctgtggcttaaacactgcgggtggcggaagatcgaaacgcgtttgcggaccaagcatgtataagcagatctgggtaaaactacgccggtcgaagaaattatccttgctgctaagcaaataggcagcactaatgaaatcttgaatggctccaatgataggctctccgttcttgggtgtcgccaggttgtttttcacacccatcaactccatggcttcagctctcgcctcctccgtctgaggaacgtgaagattcatttcgtctccgtcgaaatccgcattgtatgggttacatacacactcatttagtcggaatgtccggtgagggcgaactttggcaaaatgggaaaggatactgagtttgtggagagaaggctgacggttgaagaggacgatatcaccgtcttcgatatgacgctcgacgatatctccttcctgcagctgatcggcaataaatttcagattaccatacttaagcatggtctttagggggttgccctttttgatgatatagttggcacccggccacttcttctgtccatttcgaacgcattgctgtagcttttctttattgtacctgttgaccacttcgggatatgtcatgttctttgccaccaattccgggacagcaacctcatcgacgcgaaggttgggatcgggcgagataacagttcgaccagagaaatcaacacgctttccagacaggttaccacggaatcgaccctgtttacccttcagacgctgcacgaaacctcgaataggcttcccgaggtctgccttgttcagaccggggacatcgctgttgatgtagacggcaatctgaagctgcatatagtcccagcactccatgatcgtctgcactggagctccttttagcaaagcatttttgaggttgatgttactctggacgatatctcccagcttagccgtcagatcatcctcagtcgatgaagcatcttgaccgacggacggacgaatacacactggcggcgcagggataaactgccagaggaacatctccggccttgcttccttagggtccagtcctaataattcacaatcactgtccgagatgcgcttgaacagattcaacacccgcagcgcattcaaatcgtcctgagcttttttgtgatgtttctcgacctccggattagaacttctagcttcctctagtgacctatcgaagacgatcttgctaggtggcgggatcttctttgccgatgtcgaggcattaaacgcacggaatttgtcatgcgtgatcttaagagagctagtacctgtcttcttcaccaccccattaacagcaccacagttttcgcaggttcgggtcttgcggcagcggtcgttgactcgtttggcgatctgcatccgtcgcaggttatccagtcgcgggcggcgcatctcacggagaaaggcgcggcgttctgcttcggggagcagaatatgggagcactccttgcaaatttcctgcagaatactaatcacacgcttgaaataacccacatgaaaagcgggcaaaacaagccgcacatgaccgaagtggccgttgcaaacctgcagtgcgccgccgcatgtctggcaggttgaagtcttattcgagataccatgcgcgcgtcgagcgggccatttggaacaatagaacggtcattttcgaggttgaagaatttcctgtcggacacttcgactacgccttggctgacaatgtcgtcgttggacctgcggagaagccgaagcgttagcctgtcgctggcggcttcggagaaaacttctgtcaagcgggcactcacagtacaccaaatttgagttccttgatcactttggggacacggtcgatgacctgggccttgcccaggtcggcatgcacaccctccagaggctgcatcgcgctatcaaggaatgaccatggcaaggcggaatgactcaacgggttggggactgaaggctcgaagtcgcttcgaagacgacgcgaacgacaagaatagtttagatctgtctacaggccagtagtgccgttgagaagccttgcgaatccctgagaacggaccgtgaatgccgaaaaggtgaaagaggggaggctgcaagtccagtttaacggccggggttggcgacgaaacttttttcgcggcaaggagagctcactccaatctagccaatcagcgacagcgtaactataccagccttcggttctaagtagattgcatggtcataatgttaaattgctatacgaaattcataattattgtatttggggtctctatatattgtacactgctaaagccgctactttgctaagaacgcttggaaagccttatgctcaatcaccacatttccgacggctcgaagcctcttgcgaccttctttttgcttctccagcaactttcttcgtctactgacatcgctggcatggagtttcgccaacacgtcttttcggtacggcttgacagtctcacgcgcaacgatttttttgcccactgcagcctggatgataatctcaaacagctgtcggtcgacgtgctctttgaacttggtcacccattgccttcccagtctgtcggtctggctgtaatgtacgagccgggcgacagcatcaaccggagctttgttgacaaggagttgcagcttgacgatgttactaggcttccagccggactcctcgtagtccagagatgcgtatcctttcgtccctcccttgagcttgccaaagaaatcgtcgactaactgcgctaaaggcagttcatacttgagaatgacttgcgtcggggtgaagtattcaaggcttttctgctctccgcggttcgttcgcaaagttcgatgactgttcccagatattcatccgggaaggtcagggtggccataacgtacggctcttgcagttccgcaaccttcatgcgcacgtcgtcctcgtcggggaagcgattggggtttgtgataatgtcttccttcccgtccttccaaacaaccttgaccggaactgacggtggggttatgataatactggccccatgctcctgacgaagacggtcctcgaacaccgagcagtgcaaagtacccaagaatcccagtctgaaaccggctccgagcgcttccgaagactctttctgcacggtgatactccggtcattgagaacaagttgattaatactgtcctccaagtgttcgaaatggtccgcatctacgggatatgcagcgacaaagaccattgccttcggctcctcgaaaccaggcagcggctgcacggccttctcggacccgactgttgtgaaagtatcaccaatcttggcctctttgcttcgtttcatacccggattaaagaagatgtatccaacttggccagcacggagaactgtttgcggcgtttcaagcggatattggataccaacttcgccaacgtagtacttaatgccagttgcgaaagaaacgacttgctggccagcccgaacctcaccgtcgaagacacggaccaaacatatcacgcctttgtaggaatcataccaagaatcaacgagtagcatacggagaggtctcttacagtcgccgatcggcctactcagttgtcagtatttcaaaacggacctctaaggaacccaagacatacgcgggaatcttctctaccaccgtaggaagcagctgttcaacattcaaaccagtcttggctgagaccagaactgcatcctctgtgtcaagttcaaaggactgttccaattgttctagagcccgttccggttcggctgacgggagatccaccttgttgatgacgggaatcaattccaggccttgcgaaaaggcgaggtagaagtttgcaacagtctgcgcttgaataccttgactagcatcgaccagaagcagcgctccaccacagcttgcataacttcgcgacacctccgcgcggaagtcgacgtggcccggggtatcaacaagatgcaggagatagtcctcccccttatggttgtatatcatggtacatgtgtgtgcctttactgtaattcctcgttcgcgttcgacatcgagcttgtccaaaacctgcttgttcatgcccggtttaatcgtgccggtgagctccaatagtcggtcggagagcgtgctctttccatgccctacgtgcgcgcctatcctgaagttgcaaaatcgttcaatcggaatcgcagatatccttgcttcaagatctgtcattggcacctttgacggcgcatataattaaaggggtttctgttgtctgacaaccgcccctgccgctcattcacctgcgtttgtttatcgctcgacattgttctaccacgcgtctcgctgccaacctcgctatcccttgcggaggaaaagaaaggagcgacaacaggctgttttgatagctacactattcgagaccgccgctgccagcctccagccgctgaaccaccgcagccgcgtctagtatcctgcgctcgaactagtcctgcacccttaacttcggcccaaatcctttgagccctgctcagtccactcttttgtacaactgccgtcgtatctgcgacaacccccgctttctgcgttaagcagtcactatggtttcccagacggctcttattgcggctgcattgtcgcttgctggcctggagttggttgctgcgcacaacccaacgctcaccatgagcacaagcaactcaagcgtcagttatttggctcttccgaccagtcgaacaacctgggttggcttgaatcgttcctgagctcaaactctgactctggaaccacctctagcactaccacctcccagaactctggtgttaccgccgcttcatccaaggactccgaccccgatgtcgttattgtgcccatcaccctctctgtcgatgagaatggcaagacacatacaataaccggcactgctaatactggtgttgctacgggtgcagcttcgactaccacaaagcagtcaactgtagccgaagttaccgcctctgcaactacggagtcgcagccaaccgcaactagcacctcgtcttctacgagagaggacactgatctctccggtattctgggaagtcttcttggtgggtcaagcagcagtgatagtagcgctagcacaacccaaaccggtatctcccgcgctgccactgattcgaccatttcggagacaaagactactgattcttccacatcaccatcgtcaacttcctcgtctggtgggctgcttgagagccttttgggtggcagcgactcttcagcttccacttccacttccagcaccacgtcttcctcaaccagtacatcagacggtctcctgggtcttaacttgaacttgaacggcgattctacatcctccaccagcacaactaccgggtcatcaccttcggcaaccagcacgagctcttctaatggtttgctggagaacctcttaggtgactctacctccacttcgacttcaacctctactgccgattcttcttcagcaaccagcactagctcgtccggtggcttgctcgacggtcttctgggaggtgactctacttcttccagtggaactaccacggctacatccccttcggcgaccagcacatcaggtggtttgcttgatggacttttcgggacggattctacatcctcgagtgcgactacctcagtgacaacttctactagcacatccggcggtttgctagggggtctttttggcactgattctagtagcagcgccttgactgctgtcataccctcgtcaacaagcactagctcccgtggctttctcgatgtcttttcgcaccgattctttgcaccaaccctttgccaggggctagc

SEQ ID NO: 5933 - DNA, 11167 bp, Emericella nidulans
catgtctctagtagtaagtgaagggcacgttctaagccttcgcgtaccgacctttaacgtccctcccggtttcccttaggtggatgggaaatctggagcagttcctggttcctaacccctttcttttcttttcctatcccccccatgctgcagctgcagcgcgcccagggtttattggtaataataggctatgctgggaaccgattgaccgattgggatctcggatcgctgcctaaagatcctcccagggtttcggaatcggaccagggtctgtatgcgagtggctgttttggtctgggaacactgccaccttctcccgctgagataaatataatgaatattgcacatttggaagcttgaacctttgtttcgtagctaccgcagctatggattaagtcaactgggttaaacagtgcagcttgagttaacaccaacgaaagatcccacattacaatagacgagttctgatatatatatatatgagctaatgctattgcaagaacacttactactagatcctatctacagtccagtaaggtacagaagactgatcatatgtgaattcattcttttaaccatcataaatataaaactccaatcgatgggtaggtatcgaatgccagaaaaaaaaaaaagaaacaaaggctcaagtccaatcaagccctagaatagaaaatggaaagtctatcccgttatccaagtaaaacaagaacacgccagatccaattgaacaaaacagagtgggtagtggtactggtagttagaataaacattcgacaacagcaagaaatgagctcactccgcctcatgtagagtgcgactgggacttttgttcaggaagagcatggccagctccatcagagccggaaacagaagtagcaccagacgaggcaatactaatactattcgacgccacagacgcagaatcggtactgatactcccccttccccgagcagccggagacattctcgtcctcgtgaaagttggcacgggcgcgagataattatccagcatatcactcaagatgttcgagcgcaccggtttgggtaggtaattgttcatgccggcctcgaggcatttctcacggtctccctcaatagcgctcgccgtcatcgcgatgacgaggacctcgttaacgttcgggtcgggatccttccggatctcacgtgtcgcgttgtatccgtctaatgtgggcatctggacatccatcaacacgacgtggaaaggatttccttcctttgaacgagcacgtagcgcgtcgacggcttgctggccgtcgctgtatgcttcgcattggagaccgagcgaggtgacgaagcgaacggcaatcttttggttgatcgggttgtcttcagcgatgcacacgcgaatctggtcgcgagggatcatggagaggtcgcgggcgacggggcgaggagcagtcttgtctgttatagcggatttggaccaaggggcatttttgtcgccactctcagacttgactttgttgaaggagaggtggaaggttacggttgtgccagcacccgggacggagtcgagccagatggcgccgccgaggacgtcttcgatgatagctttgcaaatgcttagaccgaggccactgcctccgtaggagcgagcggtggagctgtctgcttgggagaaaggtcggaagagacgtggcttttgctcgtccgggatcccaatgcccgtatcagagacagagcattcgaggcgaacgcggcctttgccttcgcgggtaactttggctgagacggtgacggatcccttgggcgtgaatttgtagctgttgctgagaaggttcatgaagatttggtggagtcggacggggtcgccgaggacgacaaggtccggtggaacctcgtctagatcttcaattgtttcgagtcctcggtctcggtgggtgtagcgaggcgctcggacaacttctgagattgtctctttgatgttcagagggacggtagagattttcatcttacctgcttcgagtttcgagaagtcaaggatgtcgttgatgagggtcagaagtgtatcggcacagacacggatcgattcaacgtattcatcctgctcccgatccaattttgttcccttgagcaactcagacaggccaataacgccattcatcggagttctcagatcatgggagatattagcaaggaagatggactttgccttggcggcatcttctttcagcttcacattgtgtttagcttctgcctctgctacctttgccttctgctccgcgtcccgagcctgggtaagggctcgtttctgggattccaccattgaagcatttgtggcgccgactttgcggatttcgcggaaaagcagcgcgttggacaacgagatcccgatttgattgcacagcaggtggagcacgacaagattccgttgagtgaatgagtttggtttcccctcaacctggatgacaccgtggaggtgctctccttgcattatgggcaacgcaatcacagatcgactcatggggtttcgtgtatgataggcttcactaacgttgctgaagcgctcgtcctcaaaaacattatggacgaggacctcctccctggtacgcatgacataatgagttatttgttgagccattttgtcatccatttcggagaagggcaggccatcaacgaatgacctctgtcctctctcaagatctccagcagcagtaatggtaaagtggttgtcaaagttcgttgcaattactgcaaagtcagaaccgttgcacgactcgagaacaatttcaatcatcttcgtcataagcttatcaatttgaagctcagaagacatcacttggctagattccaatatacttgacaagtcgatgatgtctacagatgttagcactgttatattgagcataagattcacggcttaccaagtccgacgccagatatatcaagtgaccgctcacctgctgttgtagcagtagcgccactctgctccagccagcgatgtttccgatcctcttcttgcaaagcttggtttaccccaacatgctcttgcccaacgtcctggtcgattccaagcagtgagtcgactgtttggcagccaacatctacacttcggcaagaagtagctgttctcaatagccattcgtgcttctcggtcagctgggatgccttgccaacggcacttatcgcagcccaagcagtaatagcattctgcatcacagagcgagctgcccgcttcgcgccccggcggactaggaattcccctgcatggacattagcaagagaagctgacgaatgggttattgagggggttcggtacgtaccataagctctagagcgagagcttcttccattggatattgatggacctggcaatgatcgattgccgcctcgaatgattgaagcgcagatgtgtggtcatcttggacctcatagaccaacgcctctagaatcagcgcccacattccgtagttcgcatcgcatgcgcgccgtgcaaagtcgatttcggccttgtacttcaatacaacatccaacttgccgtcaagatatgctgtcgttgggttgtcattgtgcatcgtcaagtgagaaagggcggcgtagaaatagacaacgtaggaaacccgagaggaccaaagtctggaaatactttcgtccatttccgtggccagcttaatggccttctcatgatgcccgtagagatacaacgggatcattgagagggcataatagatgtcacgtggacggtcggggttgctggcattcttctccagaaagtcgatgtattcggtggttatatggctatcatcattcagcactgtgtcggccaccctatattcagtcttcccttgtagagcccgcgcaacttgcctgtaagatgtagttagtcaagtaatcctttcgaaacaagtttgaggacaaaatcttcctacctaacagcaacaagtgtggctccgccccgagtgtcaacctcccagtcattaatttccatagggctgtcgttgcagaatacctcaaccagtaccaggtcgtgaccaagaaatagcctcgtcattgccattgctgaaatggtgatcagagttatgtacggatcacccaagacgagcgacgtctcaactgaggcttcgagggctggaagcgtggacgccagaggtccccgcagatggccaacgtagaagttatagacaatagatccgcgactgcgcgtccaaagctccgggcaccggtcaagtagagtaagagctaattcgctgagttttacagcgaaatcaagatcccggaatctgctgaaggcaatcatggcaaggtgggagcaaccgatacagatttggatgaaaccccctcgaaaaagatgatggttcatcatttcaattgccatccgatagaatgtgagcccatcatcccagaaggtaactgacatcgcttccgccatcaccgttccgattgtgaccgtgttgatatccttgctgacagacttatgagccatctcgctcaaatccgctcgttcaatgtggcccttaagcactttgtaagccgcgtcgcaattttcgtagcttgtcggttcccggagatgcacgccaagctcttccaaacatgtaagcaacgaattcatggaccgaggatggtcgcccagctgagcgaataattttgctttgataatccaagcccttgatttacaaacagccgttttagcatggtgaaatatcttgtatagcaagtcgagagcttccgaattaaatccttgagaccaagccatctccgctgtagcggtataaagacgtaatgtctcatcgtagtagacatcgatgccattgtcatcccagtggttatcttgcaggaggtcaagacagtggcggtagtaccagagtgcggttgggcgcgcccccgattgcgcggcgatctgtgctgcgtcccatagaatcttccgataatcgagtctctcaacgacacgagatttgatgattcgggaagcctgggccacatgtcgtgccattgcataacggctacgcccgtcgtggtaatattttctcattgcttgagatatgatgaaatgcattttttcaatattacgtccctcggtcaacgaggatgcggcttgcgcgagtcggtcattggcaaatctgcgttcattagaatagctggaaaagaagccaggaagcacatacctgaattcatcatcagtgctgccaggtatgataaagttcgcctgtaccgcaaactgcaatccaacaacgatatcggcctcagattgtctgatgaggttcgcgttctggggacatgtaagatcaaccacttcatcatcttcgctagagtagagaaattcgcttgtaagtagcttttgtactaaggaaaatgagaacgggcttcccaataaggcgccccatacgagaattgagcgtgccgccggcgggagctcctgtaaacgtctggtgataaaacctagtcccagtccctcaccatacctaggtgccacaaactcagtgaagatccggtcgaggtcaaactcccacattgagttcttccaagaataccagatgcaattcgtgctataacaagtctctagcatcatacggacatagaaaggatttcccacactcttctcctggatgacagctgcgagaggggtcaacgtcggatttggaggttggtgcattgtggctgccacgatctccattacctcttcttttgagagtggcttcaatattatccttgtcactgaggggttgtcattttcgaaaagtgattttatcgcatcagattcaagctccgactttcgactcgtgagtataagaacgcacggaatcttcattctgacaatgtttgtaatcaactccatggtctcatcgtctgcgtaatgtaaatcatcgatgcacacacaaatcatcttgaactgagaaagtgttctcaggatatccaaaaatgtttccatcagcctcatgttctttgacgccgcattagtgagaaagaaatccacggatgtttgtccttgactaagacgcggaagaggtgtcttcgacggttcacccctcgtcatatctttgaagatatactgggccgccgtacatttgggagacacctgcttttcattggtacctggtgacatgagttgctctggaagctccaagactctatgtaaggtcgaccacatcggtctcaacgcgcagcggacactgttatggtattctgtcgtgacatcccgttcggagaaaatctgacgaaggaggctagcaagaaccttggcgaacggctcgaaaggcacccttcttgcccgatccagccgggcgatgcctatatagcctaatttacgtatagctggctgaatacgattcagcaaatcagttttcccaatcccagccgcaccgctaatcgcgataacctcgcatttgccgtatcgacggaatttgcttgggtttttatgccggctgatcggaaccatcggactgtcgtagctttgagcaacatcttgatccgtattatcccacgtctggcgcggatccaccgggctctttggtttgctagtgacaggcttcggcgtagatagagaagattcagtgctatgaaaggactcatgcgtcgaagcgcgtccaatgttgtaggcagtgccgttagtactagttctgggattcagttggaacgagccagagtcactggagactgaaaagagaacaaaactatcaactcgtccctctgacagaatgaatttgacccaagcctgcttgaaatctgggtggccgccttggaataaaaggactgctaacgtcatgccaccttttcaaccacacttaatactttgtcgtattccccctgccgtccaaacattttggacgggagcgtgaaaaacgaagacacatcgcgctgtgcaacttggaagtctttgagcgccttgctgtcgccatcaccaagcaactgagaaatctgcgtcaggtctcttttcaccgaggatatagtatggtatcgttcattgaccgctttatgtgtcattttctgaatcaccgcagaaacagcatcgggaatatccatcctcttagctgagactggcggcaaccttttcccaagaacattttgtacgacttcgactggatcactacctgtaaacgctggctttccgactaacatagtccagaaaagcacacccagggcgtagatgtcagttcggctgtcgggctctgtgggcatccttcccgtttgttctggtgcaatgaattgcaatttgtttttgacgccaatctctctcgatattgtcagccagccctcactgagtacattatcgaaagccttggcgccattccccgtgttcatcaatttcacagacctggcttcccggttgaagtgaaaggcgtctgggcggatctcgccgtgcaccgttctcaacccgtagtggaggagctccaggcagtcacacgcgccaattgaaaagccaaggaacacagacagagaaacctgctctccagggcttggttccacgctctcatttctgccgccaatcgcaaaccatgccggcccgaacgcaaccaattcctgtaacatgttcaatcccggggattcgaagatggccaccagaagaggccctaaatcgccagggtctgagggcagacgaatgagatctagcggtcgtatggtatggttgcaatctggatccgaagtttgtacaatcgacctcatcatatggaactcacgctccaaccgaacgacatgcgacgacaccctagctaccacaggaatccacacaaactcatgctcggtacgggagagcgacagctcgctgctagattcgctcaaactgcttctccagtgatggcggaagggcggtcgtgcgtcggttcgtggagaactgcgcgttatactcgacggtccagacgaggtcgcgagcggggtcgaggcgtcggtgtcggcagcatgtcggaggccaaagacatgccagtgattatacgttgaatgaaacggttcgatagattggtcccaagtgtatccgggcagttgcgcgagcctttgaaagagccgcgctggcgggaggggcagatcctcaccaaggatatggctatcatccatctccgccaaatgggtgcacaaaatatcctcgctaatccagctacccctcacttatacagccataggtagagtcgtatgacgaatgccgtcagggagtaatcgagcgtgagtgtagcgccaaagggctgactgtcatcggcgacgaaagcagccttcgccaaggacggggtcgttggccgtgcgaggatccagggaaggcccacgttcaatctgcaggacatccgcagaacattagctttaacgtggggattcaagggcagttgcagagaggttcaaactaacgtgtcatagattcaggatgaagacccagtgaacgccgatggccaaaaaacgaggatgcgatccgaagcctccaagtcaaattcagcccaatccagggtcgttggactctggacaccgatggggtgagcttagtcagtcggggcgcacgagcttggcgggagatcagctgcgaggcaggcagcagaccacttggaggcatgggacatgagacacatcatgcaataataagaaggtaatccaaggacttggaggtgcctgagtagccaagtcgagtcggttattgttgttcgactctgaccattaaataacgcctccaagatcctgatgtctgacctagctggttacgcaacctcaggaatccgctctgaagtcgcacaagactttcataaaatgtattaggataattttataaatgcatcaccacttctcagcttacgaggaagaaccagttctaccagatgcccgtaccagatgccaataccagatgccaatacagtataggacagtggcgagcgactcaagaagattcaggactggagttcttggcacgggaactgcttttgagcccaatttctgacgttacgccctcggcgctggacactgaaacgctcaagtagatacagaaactatcagagtttgcatgaggtggatcaccgagttttacgaagatgaacccatgcacttgcattatgtccggacattacttcaaatcgacgcgggttgagaactggatccatcatgaagcgtccctggcagttgtgagaccgcgatcgcggaatatatatattggcacccgaacagaccactctgtggtggcaccccgtaatctgggctttataacccacaacggtatcaaactatgtttcacggtgctgagtccacatattctaaagattctaaaggccagggattgatttatcggactaagcgctgtttcagtcatccaaacgacgtcttcaggctccggcatgggctacgaagcgattaatggaagcctgtcaaggcggtcccgtgatcctcccaacgcgtatcatgagcaagatcaacgcgtgccttggaagtagagatttagaattggtcgagaatcttctggtgggctgatagagttcgtgcgcaagacatatttaggttcatgatgacatggttataccatggccaaggctataacagcctgaccgctctggttgctctggttgctctggttgctctggttgctctggtttaactggtacattctctctggtactcgtgcgctactcgtgcgcatcggatgtgggttgtggacagccgtggcggctgaccaacgatgggatggagtatgtggaatatgtaccaagtacaaaagacatgactggcatagccaattgtggggatcaggagtggctactttcaataattcgcaacgcactagttcgaggcagcctataccgtcacagtaggagtagtagtcttgcttcgatcagcttcactattactatccccctgcctgatctttccctgctactctcagttcggattgaatccagatagggatgtcctatacgccgtttttgacgggttcgaagtaggagacactcccatgaggagaaccagatgtgattgccgatcaggaaaccactcgcgatattgcctcttgcggtgagaggggtttacctgcaaatgagaaatgtttccagtcagacattactctaagcagaggcattgctggtcgggaggttgtacctacctaccattgatcgaagaggaagatgcagcggcaaaagcgttattacatcactcctttcatcatccccgaacgaacattggtattcgggtactggtaatggtttcgtactggttctcttcacctggactaccagccagccctgcttcagccaagctcttgaaaattatgtaggataataagaaaaatccatcttcggcagggagaaagagatccaggtcagccgccagcgagaagtcgtagagtgtcacgggtctggtgtgttatccactgttctggtaccgtacctacggagtactactgagggtcgatcccagttcccaccacgcggcctccaacagagaaattccatgaaccattgtcctcgtctcttttctgaaagttacttgaaaagctcttcggtgactcgagccgctaatcgacctcgttctccaatagtatgagtagttgagttaggtactattaacctgtctccgtaccttgcactatccaacttcccgtccgatttctcgccggcgcgccctggagttcaaccctctaacgcaactccctaagacgggtgtacatacagcctttaagccctctgagagattctcgcgcttgtcagactcaatcgtcatctgcggcatagtaactgcctttcagcttaccggcggactcagcctagccattcttctgtcgagtcgttcgtcgtttgttaccgcggtttcagaccccaggtcttgctactacgtcatactcccggccggcgccccagaggacagggcccgttttcttctatccattcctttcccaccttcaagaatcacgccgtgactggaatcgctggcgatctgtaagaaggttaactctgagcaccgctcaactcgtcgtggtgctaaactggagcagcagaaaaaggtcagtaaccagaatactatctccttgtcgcttggaaccaccgctgccgactctttcatctatacaccgctcaacggtcccttcatcgggtcacctgttcttgcctttcttgcgcttcctactctccggccctgcaaattctccaacctttctgctctccttgccttttcttctttctctgctcttttgctcttcccctcgctttggttttatgcttcgtgtcttccccacactcattcttgactcatagac

SEQ ID NO: 5934 - DNA, 10926 bp, Emericella nidulans
tcaaatgcatcgaccacatagtcgggcaactcagcttctagtcagctcccgccagcgattcagaggtatgttctcctcttgttagacggagtaatcgacattgcttatctcagatatgcgtacatcaatcggacgacaactcgttcttccagactcttcgttcggattactgccgtctccgcggatggctgaggaactatctaagcgtttggaggtattcccattgctatttctatcaggtacgcctttgtccttctataccacctgtgtaagcagctaatttaccgctagtttgaaaaattaggcgattcgcgctacgccccaaagctgaaaagacgactacccaaaatccagaatcactacgactacaacccaaaccccatggacatttttcctcccataaccgatcatgaatttaactctcgttttatgactgctactgctacaacaagcgcggattattgcatttcttccacccatgtaagaaggccagcgggcattcctgcgacgccttggaattacttcccaagaaaaagacgcggctggagaaacacagagacaagaggcagactttttgggggatatatgccgggaaattgtttgttttcggtgggttgtggcctaccacgtcgtatgcctactcccgatggtggtctttttttacctgtggatgtttccactgggatataaaggcgatttacaggatgctgccattcctttaacactagtgctcggtatgctgactttattttggagcttgtttctggggagtatacgcttcagtggtccgatatgatattatcaagtataaattttgaagtaagcagatcatctagtcactatccaagacaataacctccgcctctacttctcccacactctcaactccaagtatatcacccgcattaacaccagtaatgaacgctccgtcaccctcttcaagcagcgcatcgtccctcgagtccagtctgatcttcgccttaccccctttggtcatcggcaaatgcacataaacattcctcttcttcttcttctgcaccactccgtccttcgacccaacaatccactcaaaccgcccgttaggcgcaacaattcccgcccccatgacaaaatccgcatggatcgggattgtctccgggatagcaggaacagcttcctcctcttccttcggcgtcgcctcaacacccgccttgagcggcgagagaattgggacaaactccttccttttagcaccctcatcgaacgtcttcgtgtgatagttcggcttgagcccatacttccacggcagcgcccaaatctgcaaaaagtgcacgggcttcgaactctcattctgctcagaatgagcaatccccgttccgccagtggtgaactgcacgtctcccctcttcatacggtagaaatcctttccctgcgctccctcggcgcccttccggaccatactgtcgcggtgcgtcagctcgccggagaggatgtagctgaagatctcagcatcgcggtgcgggtgtgtcggaaagccattcctcgcggcaacgcggtcttcattcagcactcgcagactgccaaagtttgtgaagcggtggtcatagtacgacgcgaaagagaatgtgtggtagggttttcagccagccgccatgttcggcgtagccgcggtctgcggagcggcgggcgatgattttggcgtgtgtaaggggcttgctcattgttgctttcttatctcagtgatagttttgatcccgttggggatatatatatcctgttctatttcctcctgagatgggcttttcaagtcgccttcgcagtcttatactctgagacagggtgtggggcgtccgtgtttatacgcatcggctgagcatgaggcatctcctcgcgcaaggtatcctcgatcggctggcttttatttgataatgcggggtctccacgcttggcataatcaaataagactgggacatcccacatgtcgcgggtattctaggagcgtctgcagaaaagaaatagggccgatgaacgtcattgctcactttactattgggaatgtattttggtcccatcggaagctcaatgacataggaggaaaaccaagtaatatgcaccgattaaacccagaagagagcaaaggtaaagagtgaaggtgcaaacaaaatgtcaagtctcgtcttgtcacccttttgcagacattactatgatcttaagcgatcatgctcaagagcgcaaaaccctcttgagtagtcatcgacaaacctgcgacggcccgtgtgcttaggcactgagactacgccggtacgtaactagcttactagttcaaccaccatactagtctatccagagcagtagatggcctgagaaaaagtaatttcaacagtttaccgccgagacgcaagtaggcataggtgtttgaggcgtccaagttagggcagtcccaattcgcacgtgatatcacgatcgcgaggaggcgcgccagcgaacggttcaatattctagttcagagaaggatacctgtcgatcgccaagattcctcacttgggggtaagccctgtgtactggtatggtttatgggtctcgataaaggcaatgggaatggaaaatcccgacctcagggccgccatccgaacgcaacatgttgtaagacatttcgttaaataataacgctgttctattttacgcagctagcattctagctaatggtttataatgagcgttaatggcgcacaggggtgtataggcgctagaaaaatcgtctttatagacgcgtttgaaatgttatgagggctgactttgtataccctacttaagaatggccatggatatacatcagtacagctaaaacaaagcgatgcttgcagaaacctcagcaatgctgagtttgggagcagcacaacggcattacgatatccctgtcatagcagtaagcgaccactatccacgcttaccgagggattttagcgttgcgcgaacccagctagacatattgtaatctacgaccgcaagttcaggatgaccaaccctggtcattgagcaatgagagggtgactagaaaaatcgccggaaataccgtggcgtataaggatgggtctagatccctgcacacttatccagccttgaatgaaaataaacgtcggaattatgacagtgctaggtaaccgacagcctcctgaatatgccataaataccggtcttctggcagtgcgaggccgcgttatcccaaacccctgcacttggcccagttgccatgtcagacccaaataagagcttgagggaggctgatgccgtcagaccttagttcgcaccctagacggcttttcatttataatatgcgaggcgccgccggaatcaaatctggaaaggtaaaattttcttactggctacagcatactctgaacatactggccgcaggcagtgacgctctgaggcagatcgacaatccctcgttcgaggcacagcatgatttacacgcggttcgggccggatacagagaacaggagaggtaacaggtccacagcttagagtcaccgcaggactgaatgggaattaacgcctgaaacaacatgttttaggaggagcggagcgatcaaggacagagtgccacgaccagggccaagcaacggcgcaagcgccattggtcctggctggcagcgggcctaaatgatccccctaggagcgagccgtgtccacctggacccgctaggcaaaggtacgatctcggcagggcccctaagtggtcttccatctcagacggtatagttcccccaatcaatggcctgggttatgccgaacagcaccaataccttttataagggtaggtcgatgagccagagacaatatcattgttacccttgtcgtaatcttcagcatgatcttgctcattacagacggacagaatctccgtgtctgtatgcaagtaccagggatccttttctgatccctgctaggcagaggtctagcgcacaagctactgtgacctgatccgtggctgtttgggctttcgctacggagcgcgagaccttgccattcctgggtagcgctgactttccatgcctagtggaacctgctcatcgtgcgagagcaccctgtcggcatcatgaatatcttgtactctgcaaaaatacctcctcttcggccttactgtgcctactgataagatgtccgtaccggatcgtggatgggtgattctcgccgtctcgtggcccctctttagcatctgcctcgtcctcgtcggcctgcgagtctgggtgcgcacacggatcatcaagtcctggggctgggatgacccattcatccttctcgccttcctctgcgcaacaatgaactcgatctttgtgaccgtgagcgcgcactacggcaccggtcaccacgcgagtgatctatcggattaccagcgaatcgagtcgaccaagttcaacgtgctatcgcagggatttcatgtcatgtcgacgaactggggaaaagtatcagttgcgattttcgtgctgcgcatcatccacaaggttaagcatcatcgaccgatgatgtatggtggtatcgtgctcctctcggtagtgaatactgtgtgtgtctacaccatctatgggcaatgcactccgacgagaaggctgtggaattcgagggtcgaggaacactgttgggctccggctgtacagaggaactatgcgtttttccaagggtgtatgtgccaaaagcactgttgttgaaagatacattgctaacagaaccagcattctctgccttctctgacttggtccttgccgtctacccactaacaaccatctacggcctacaaatggcactcaaggtcaagatcggcctgggatgtgttttatcgctgggagtaatgtatagtcatctcctccggtacttgatctgcttttctaacagctcgaccaattatatacagtgcgatgatcgccgcgatcgtgaaaactatcaacctggcatccctcgccgcgcgagcagactacccttgggacaccgtcgacttgacgatctggatcgcggtcgagcagtacctcattatcctagcagcatgcatccccaccctgactcccctcttcaatatcgccgtgcgccaacgcacgagcaagaaatcgacctcaaacgtcaactataaggctggccatcactcgggcaggtcccacccgtacgatggactagcaagcggcggcattgggaagtgcgagccagatgggtacccacttgcgtggactagggtcgagcgagcccgcgcgggcagccacagtgacagcgaagaccccattatggcgacgacggagtcgggccggggtattctgatgacgacagagttccatgtccaaactgggtcagagaacggagacgagcacgtggagcgaagatgaagctgtagtgtattcatggcatcctttcaaattgaattcttcgcttctcccctccgtctggggcgccctcgagcgcacagagtggccgtacggagatccttccatctaagaggaaattaagcgacacgatccaccaatcctctgaggccccgagcccaaccccggcttgtgcgccgacgatcctgcaccgaaggagccaccccgtggccccttggctggatagcggcaagctagtgtcaagcgtcctcatcatctaggccggccggcaagccactcatttcacgcacagatagctatgccatgactgcacttaggaggtggttactggccacatgtatgcgtaacggctgcgccgtacagggattgggacggggtgcgcaatctatgcttatagggcggccccctaacgcccgtagcgtggccactttctcaccgaaatgaccccccaagaccgcaatgagaataatagtctgctgcagttgcacttaatcttggtccagtgctgcatatctgattaaatgtatcctttgaatgaaacgcttgtcccgtaattcgtagcgtagcctgactccgcctgaattagggttgtcggcctcgtctcgactttcaaagttaatacaatgtctccgcacaggccggcaggttcgagtcgtcgctttgccgaacgatcgttatggaatagttgatatttatccgtacttaaggacgatcgcctgccgaaaaaaattgctttttttctcctcgttttactttgctgtttgtcttgcacgtcatatccgcactccacccactcgtgttgaacacgttacaatggatgatcccaaggtccaaaccgctgaaacgcctacgaggtctatcttagacgccgaaaagggttcaggaaatgtagatctcgaggagcttggcgagcgagaaggctatgtcctcgacacctctctcgtgcagaaccagcaccaacaccagcatctaaagaccacaccagatggcaaaacagtgcttattccccagccgagcgattcacccaatgatccactaaactggtcctcattccgtaagcacttgattcttattgtggtttccgcgaccgcgttcttgcccgactatgggagtgccacgggggctgtgacgcttatcccgcaggctgcgtatgtccccgatcctttatattcttgccctcatttggatgtttccaaacttggactgactggcgatgtcggtagggcgtggaacatgactcaagaccatgtcaaccactcacaagtgggcaacgtcttcatgttgggtgccggtggaccattagtcgtcgccctgtcggcgtactttggacggttccccgtgctattctggttcgtagtgattgcgctcgcaacggcgatctggtgcacagctgcacagtcatttgagtcgttcatggtattatcgctctcccgttgccactatcttcatccttgttaacgcattaatcttcacaggctgcgcgtatcctgaatggtttcttttcaaccgtcgcccagggcgtacgtactcagcttacctgccattcttgctaggacgtcaagctaacgcagcatgcagggtggtcttatgttcataaaagacatgttattcttccatgaacacccgcgcaagatcaacatctggagcgcattcatcgtgctctcaccatacatgggcccactctttgcagcattcataacgacgacgcagatctggcaatgggcatttggcgtatactcgatcgagaccgggctgtgcctgattgcgatcgcgctctttgttgaagaaacatactacgatcggcgcaacaaaagctacgaactagtgcccaatgggccgcgctggaaacgcatgcttggaattcagcaacggcagagcgggtacattgtcaatactgtcacagacgcagcgatgagaccgatcaaggtgattgtgaagccggttgtgctcattgcgacgctttactatttgcttacctttgcatgggttgatggcatcaatacgacgctgagtatcttcttgggaccattgtatggtttcggttctaagcaaattggtattgctcctttcctctttgccaaggcagagcaattgactaatgagggcgttaggtttcttctatttcaccccaatcgttgccgccatcctcggtgaggtcaccggccactggctccacgacagtatggcagccctctcctccaaacgaaacggaggacgccttgagcctgaggcacgtctgttggcgatctacattgcaacgccatttatggtagctggcttgatcctgctgggtttcgcgctggaagaagcataccactacatgattgccgcgctcggatggggcctgtacgtatttggaatcatgatcgtgaccgtcgctatcaacgcgtatgttctcgacagctaccccgaggcgagcggggaggttgcggcgtggattaactttggccggacgacgggcgggttcgtggtatcgtactttatggttacatgggcaggcgatcagggtgctaagaggcagtttgggaccatgaccggcattgtaggctttgcgctgctgatggttgtgtttttgcagtttgctgggaagagtctgagaaaatgggcgggtccggtgaaatttaagactacttgagacgggacgtttagctttatacagatcagtgcgtatgatatcatcgagttggttgaaatagagcgatttatccagaaaactgttctcattctgtattcgtcttccattaccttaacgtggtgtttgcggatgagcgtatgtggaacttatcatgccccagggactcagcggcatcggcgtcttcgcaaagggtcctctatgaagcgggaaagtgaatctgtgagccgtggatactctcacaaacatataacatataacattctcccttcgggttccatgttaccacggttatgtacgaaaaaggtcattggcgcggtaaatttggaaaactgtggttagggacggttccctacttagaggaacgcacgttaagtactgtatattttgtttactaaaagctacaccgtaggcgtcctacatcatttgtaacttgaggcacctgtccggctgtttctaagtgcctgtcacccttctatactcaagctaaggctgaaacttcggagagataatggtgcaggttagcaatatcctgcttgctgcaaggaaggatctatttctgtaatgaacttataatcgtatgggttgataagactcgagatattttcaatgtaaaaggcttgtcaatatgtggagatatccataccgtgccttaagcggcgctcaaaagacatcttcctcgggatgtgtacggacaacgcggaactcatgtaagggttgtctgcggttattgaggaagagctaaggtattgtcacgagaaagtgatcttgtataacctgggcgctactgatactccggattgctcatgggagataaaagcaaaatatagggcttctggagttgaccggtgtgatgattggtgcagtggaataagagccgctgctagtatcagtactatactgctagatatagagtagtctggtgcagctgttgttatagtcaaagggtagggtcgcctggagacagcagagaataggacaaagctagcctcccacggttctaccaaaaaaaaaaaaaaaaaaaaaaaaaaatttctaaataaaataaaaaagtttcaatagagtatctggggtacatataattcatactagtaatcgtcgacatctctgcgcaaaagtccatgcggacactgctgtcttttcccaggaatacatgaccattctgattttcctgcgttaggttagacaacaaccaatagtctatagagcacgtcgcaatcatggtatcagtatccttggtcagggtatggccctggccgcagatgagtaatgatgcctgtgcatcatgagcaagctagcgaaacttgtgggcgacatatggatataacgtagtttcttggtccttcagtctcacacagtacgacgatctccaaccgggcttatgctccatatcctgatccttggacgagtaaagcaacgcattattatttcccaccgtaaactagaaggcttatataagtagtttatggaaaaatctaggactatccatgcttgatgtccagtgatacaacgccccatcggacggttatctgaacaaaagagaagtgatcgatatgacgcggttttccaggctatagatcgaaaggcaatagcctgagcttgatgctcagatggaccgaagttgagatgttaccgcgcgttgcgctataggagccggaatgacacacaaggtatcgcgcgaggaacagcagcttgggacaggatgttatccaccataagagctagtccagttccagccacacacccacatcttgaatctgatttacttgctgctttcactaacgatgattgacggttcagataatcatctcgtgtaggcccatctgctgacaggtgggatgcggggttaacttgctatcttcaaaggtaagccctgaaaatgcgccggctcttcttgttcattgattggacgataaagcattgccgtacctcgatgttggagtaaccaagctatgataacagcgaatgcccagaccctgtgaccgcggtttcaaagtttctcgcggggcttgagatagtcccctgcttctttaatgggttgtggttatacctgcctcatggggcgatagcgtgctttactgccaccactgatatacgctcattgccagctttgcgcatccagatgaaaatagactgatcaagtatagaggcagtaaacggcaagatatggagagtcagactctgtttcatgaaccccccggtaccgtgacaatcgaggactgtgagtatgaccaagcgttgatgaataccgttctaaccgaacagtgcatcatggcgaggaggcagtcgttgtgctcaaaccgactccatcagaggacccgaatgatcctttggtaagttcaaatataggtcctttagcacacgaggaaggcataacctgctaacggaccggtaccagaactggtcgaaactgcgaaagctcgtcaactttcgtctcgcaagcttttacactttggcaaccttcgtgctcctcgacatcggtaccgtgatctgggttcagctaaacgctgaactggacatcagctggtcgaaccttaataactcgttcgcattgaaccttgcaggcctcgctattggctgcatcctaattgtccccttcgcaatcaagtacggccgtcggagtatctatatactcagctcggtagtccagcttgcaacggcgatatggcaagcgaagatgaatacaaccgctgagctgctcgccatcaacgctcttaatgggcttgcgggagccgtcagcgaggcgatagtacagatgacgattgttgatatcttctttgttcaccagcgcgcgtccgccaatgcgttttacaactttatggtcaatacgggagcatatctcgccccggtggcggcggggtactgtgcgactgcccaggggtggcggtggatctggtggtggacgtctatcatgcttgctatcaatacgctgctcttccttctcgc

SEQ ID NO: 5935 - DNA, 10484 bp, Emericella nidulans
caacattttcaagccccccccccccttgaccgattaccgtatcttttgtatcgagcttgtcgccaaagcgggatctagggggtatcttacgaacgtcaaggccttaaagggtgaaactgatgtgccggaaggtgctcctgaattcatctcccaacgtcaattctggctgaaccgtatcgttgcccccggtatctattcgctcatgcacttaccccgtattgaataagaacggacacaacatcgtccgcatgttcttcctccatctccaaatgttgtacaactggttctcgactttcctaacttggttttctcttggtaagtcatgcagctgcctactcacttgttgcgaaattctgacattggctacagcgtcttactggcttacgacttcggtcatcatggatctggtaggaactcccagttccagcaacggttacactgctttcccattcggtaaaacggcgactccaatcatcaataccttggtgaaatacatctaccttgcgttcctgctcttgcagtttatccttgcgctcggaaaccgtcccaagggatccaagttgtcatacctcgcatctttcgtcgcctttggtattatccagctttatgtagtcgtcgatgctctgtatctcgtcgtccgcgctttcactggaggggctcccatggatttcaatactgatgatggtatcggtgcgttcctgagctcattcttcggatctagtggagctggtatcattatcattgctcttgctgcaacattcggtctttactttgttgcgtcattcatgtatcttgatccttggcacatgttcacgtctttccccgcatacatggccgtccagtcgtcttacatcaacatcttgaacgtttacgccttcagcaactggcatgatgtgtcatggggtaccaaaggttctgacaaggcggatgcccttccttctgccaagactacaggaggcaaaggagaagaagctgttatcgaggaaattgataagccgcaggctgatatcgatagtcaatttgaggcaacggtcaagcgagccctgactccgtatgtgccacccgaggagaaggaagagaagagtctggacgactcgtacaagagtttccgtacgagactggttacgctctggctcttcagtaacggtcttctcgctgtctgcattactagtgagggtttggataagttcggatttacggtatgttttcgtgcgccctatctattattcgaagtgaaactgacaggattcaacagaacacctctactgagcgtacttcacgtttcttccaagcccttttgtggtctaatgcggttgtcgctcttattcgctttatcggagccacatggttccttggaaagacaggtcttctctgctgttcgcccgtcggtaagagcatgctttgcctaatggaaagtcaagcacgggaggccttgcaattgtatgtattgcatgggtccgaggagttattcttggcacattttgttttgatattgtactctacatatgatgctcaaactctgtttcttcgttagccagtacgcccgctcaaatccttaggataggggcacaattctcgctattatgtagacttttgtagttagattcaatgggacctgaagcgtgatcgcacctgcatagcaatttagtatctccctttactctaatcccgtactgtagaggcgatggcttgtgtacaaggagtcaggctacggctccaactatttgctcagctatgtccgtatgcaaggtccagggtgcttttatatttgtggctttgcgtttcatctactttcttaaatcctgaactcactcctgccagcgaaggtcttcgttgtcaaaggtgattgttgacccagccttaagtggcaaggaaactagtaatcgcgccgaaccccacccaaccttcacttcccctcgtagagcctcagcatccaacttctcctccgcagcaaccccagttttctctcttgatttcggtcctggtggcagcaccttcgtcggtcaatattcaccatgctaaaaatctggtctatggtatgcactctccccttctgcaacctagactggatgccagtcaacccagcaaacgacgtctaaccgcttcgcctcgcaacagaaacaacagcagcagcaagctgaaaatgctgaaggcgctgcaggaaagaagaagaagaaggttacagctgctcagctgcgtgttcagcgaggtatgtctgcatctgcacctgcatgcgcttctatcctgtccaccccgcaagtgcttacacgactttaccacgcctagaccttcaagaactcaccctcggaagcacaatgaaaatggcgtttccaaaccctgacgacatcttgaatttcacactgaccattgagccggacgagggcatgtacaagggtggctcattcatcttcaccttcgccgtcaaccagaacttcccgcatgacccgccgaaagtcaagtgcacgcaaaagatttaccatccaaatattgacctggaggggaatgtttgtctgaatattctgcgtgaagactggaaacccgtgctgaatctgaatgcagtcatcgtgggcatgcaggttagttaacgtcctccatgactttcgtcttctacgcggcgcttggctgcttgggaagcttactttaatcatgatactgacatactttggatggccggcagttccttttccttgagccgaacgcttccgatccgttaaataaagaggctgctgaggacctgcgacagaaccgcgacctatttaagcgcaacgtccgcaattcaatggctggtggaaacgttcgtggtgttacatttgatagggttctacgatgatgcggcgggtgtgcggcagccatataagaaaacgctgtcttgccggctcttcctctcttctaggccggatggagataagtctgggactctgtgatgtgagaaaggattaacatcgactaagacctgcaagtcaacagcctgtggtattggcactggtggcggtgatgcagtatgattttgaagagcaacaccatgattaaaaatctaagccacgtatggaacgaacactggaagagggccgacttgattttgttttcgtgacacggactctctatgactacctgatgaactacttttagcgactggatagattccctgatgaatatgaactctttgacttctttaagttattgttttctgatccgatgatccatcacttctctattgagtatacgtttcaccctacgccatgaccatcgaactcttcttttctacgctatgggttctaagacggaagcatacaaccccttaggttcttagcacaagtatatatacaacgcgcaaacggagaacaaaagtgaaagatagatgaatagataaatagtctagcattctttctttctctcaagcccgtcatatcacaatgtatcaatctttctctctcagacggccgccctctgttggaaacatttgtgaaaagagaaaaattgaaagacaacagaggaggacggatggatccgggtatatgtcctagcatctgctccctttgctccttctgggcagggctcattgactttcagaggatgtagaaatgggatctgaaaacgtgtatggatatctgcatcggggaaagtgtcgaccggctaatcgagagattgattattgcgaaaagagccgcttacgcctggccggcggcgcgctcttgctcgaggcggttgtagtactcatcacgagcgcggacgcgagggaggtggtagcctgattcacgatattatattagtaacacattttcaaaacgctacgtaattcaactaattttaacttaccgtaccaccataggtagccaaaggtggtgccgaaacctataaacggaagagcgattagtcgcagtcaagctttgctagcaggtcgcggaggtcggaattttcgaggatgaagcaattgatcaagcacatatgatgcatggataatgcagcttggaacacgggcaatccggcatcctataatcccaatacaagatttctttcccacaggcggtgccgagtttcgtttcgagtgggctgatgcgaaggggtcgagagactcaccaaaagcggtgctcaggtcaagaacgagaccacggcggagcatctatatgcaaacaagtaagctaagtgatcaagcgacttcccctatgtcaagggtgaatgcggaagtgccgtaggaaaggaagtccagtggggagagtaacttacgccggtgataggagcgatagcggtagccattgcgacgagttctttatagaggttaggagaagattctatcctaaagaaaacagcagagaaatacctgctttggttggtggtggtgaggtaagagtggagggagaagtgagtggtgatgttggacgttgagccgagtgaagctttccgttccggcgcggtacagtaagcgaccgctctcagtggcctgatgcgctgcgactccaagaactacacccagtgatcttcatgacacttcaacaaagcattgggcaactatttagatagtgctcacgtataatatcatgaaccaaatcatcttgggtgtttatttgcctgtattgagataatatactccgagacagtcgtttcgtgatgcctcaggcatagatcacgtgctgtaaggatcctgctgctcggcttcttcatcgcaaccgccttgaaaagccactcactctttccttattagactccgctatggcgccctcttcgccggccgtcaaacggtcgctttcatcattctctgaacagcagactgttcccgacactaagcgaatcaagcgccattaccatcaccaccatcgtctacgtgaaccggttaccccatgcttgccggagcctgctatcgccgatgatgcctacgtcgaccgggccatgggacgcgttatagggcaatcgctacgaaactgcgggttcgacatcgctgacccactggcggtggagagtttccgcgatgcagcggaggagtgtatgctatacgttggatattgttaaggagccttattgacatactttgttagatcttctgcggcttgcctcatatgtgcgcacatctatgctttcaagcagacgcctccaacctatccctcacgacttcgaatatgctctgaaacgtcaccatttgcctgtcggctcccttatcccgcacctacagcctaccccaaaagtcgaacccacccctaccctactacctagccctccgccagaagaggatgacttcaagatcttaccttctctcgaaccagagttaagtggtgaggacgaccgcgccaggagcacatacatcccgaaacactttcccgagttcccgagcaaacatacctaccgtcacacaccagtctataccgagcgagaacgagatcctcgtaagatccgtgagcgagcagccgacgatggtcggcatggagaggaagcgttgcgaaagctcgctcgagcggcgttcaaagacaatcaggccggatctggtggtcgtgctaagaaacggtggggtgggaagacggagagcttcgagagcatgtttgacaagacggtcaaggggttaaccaaaaaggtgacaaataatgaagccgcaggccccacaggcagttcaaacgcgatggaaatcgattccggcatcaccccggtcactgaacgaaagcccgccgtatttaaaggcttaactagcattgaattaccacccatcataaattgcgaacggggcttttggcggcgaaccgcggcgccagggagacaaaggccggaggagaatccaagcgcaaagcataatccagaactgtcaagagttgagagttgggtaagcacataagagacgcgggcagttgtgggagcgagaagcatcgtagcggcgtcgggcgtttcgcatttgtccttttttatagcattattcgaagatacccatgtgaattatatttgtaattgccacgagaatcgctatcctgcactgtaccggcgtataatgcaaaatccaactaaactccgtaaatgcgacattgtattccgtgctcttgctgatatcaagcctttgatttattccgagcctcgctttctcgcgtcgtatctcgttccgcttgtcgcaaaggttcccacgaggtcgtctcaacggtcaacccatccgcacatctattacagagccaagtcagcttattcgcacgccattgcacatcaatccgtcaaccgcttactttctgaaaagccgcacaacttgattgcagacaacaacccccggcccaggaggttttggcggaggattgcacgagtattgtaccatttccataagcttgcatttctcaaggtccactgcgccgcccttgcgccgcttttcttgatggaagttcttggttacaatgttgacgtgttccgggagcttttccacgtcgaaaagggggacgaggggtgccattgatgccgttcgaagtttgtgaagttgatatacagtgtcagcgtggtacagagctgagtggtgtcttttgtagagaaaagcataggggaagttgatgaagtgggtgtccgggtgcggaatcaaaaccgtcggagttagatggactattacatccgccgatgctgtatcatcaaccgatcgcctctcaccttccagactacacgctccttattcgcaactgtctttgagtcaattgagtatagctatcattgaatgaattgccacatgctgctgagttgacatgtagttaatgatatctgaatactaaacttcttccaaatgtccgccagtttcggagaaaaactgctccaagaagttcatgaagaaagtttagaagaggtacttcttttctctcttgcttcaagttagtttaaagttaaagtgatggtacatcagctgtgctaaccttgactcagttgctacatgacttgaaagtgctacatcgagagcattcggggaccaccaaaacccgccttggtgtctcgcccattgatgagcttctagagctttttgggacgtattctcagccactgcatggcctacccgggacaagggaggatattgttgctgatccggatggcgataccgtcgctggagaaaaccacgagccggcacatcttgaagtgcccgttcatccggcatttcctagtcggccttataccatcctagagatatctagcacatgctctgcggctggcaagtcccaggtattatattatctagctgctctggcagtgctaccgtccagattcaacggaatcccgctcaatggatccaattccgccgtagtctttattgacactgacggccgtttcgatgctgagcgtctacgcactgtcgcccgcgggattgttctggacaaacttgaaaacacaagtgatgctgatactgaaaaccacggagctgttgaagctatgacttttgcgtctctacagcacatccacgtttttcggccgcagtcgtctttggcattactcgctacattgcaatccctggacgcatatctgcttgacctttcccgtcatgcttcaggtaaccgggcccttcgggctataatgatcgacagtgcaactgccttcctctggcaagacaagctgcaagatgagatcgcgcgcactgaggatattggccggtcagcggcggaaatagaacgcgagcgtctccagagagagaaattttacctcgcagatatatacgcggacttggtcacaagtttgaaacagctgcagagcacatttgattgcgatgtcatatatactgctacctcttttggtggtagatcaacggagaatccatctatgccgtatggctcgtataacccgctagatactgcactccagacaccgtcttttcgttctccgttaccctctccttggggattgtttcctacactccggctggtgctgcaacgaaaagtgcttcgtccgttcccacccggtgcgactgtccaagaggcggagagggatgcgcctatgcggcagaaggtggctatgcgaggggagttcttggggtttgtgaatgggtggggacgagaggattggccacgaaggagattggaagagctgaagaggcgaggagcacagttcacgttcaatgttgggcaaaacagcgtcacattgaactgagctgccgtctaccgaaaatcccatcaataagtgctattttccggttcctagagtaatcctgagaagcggaaggggttatattatgtaggcatttaatatgctgtatatctggatatttcagctacgctgctagaatgactgtatgttcaatcgtatataccgcagttcgttctcagaccaaatcaaccaaacaatttcccaatcgcctcaaccgtcgtattcccaccactaaacacaattcctacatcccagccggctggcgcctcgcgttcgacaagccgtcgaaactcctcattatacagacaaacagccaatcccacaacagcgcttggttcaacaaccaccttcattcgttccagaacaagcctcattgcagccttgatctgctcctcagtgacggaaaacacacccgccactttgctcttgtctgaaataacctcccaattcaacacgcccaccggcgttcttaacccatccgcaatcgtcagagtcttcacgctctcaaccctctgtccagcgtcaagcccacgccgacaatcgtccgcgccctcgaagctcggttccgcgccaaagactttcgtcgtcttatccgagaagaaagttgcaaccccggaattgagaccgcctcctccaatcggcgtaatcaccgcatctagaccttccctagcggacggagactcggactcatgtacactcaactcaggcttctcgcgcacagcatcaagatactgtgcatgcatctctagtcccgtcgtcccctggccgcaaataatatggtaatcgtcatacggtgggacaagaatcgcccctgtgcgcgcttggacgtccgcaactaccgcttcccgctctacactcgttgagccgctgaaaatcacttctgcgccgtgagactgcgtccctgcgatcttggagggagtgctgattttcggcatgacaatatacgcgggaatcccgagagttgaggaggcgagcgcaagggcctgtgcatgatttcctagtagaagaacagtcagctcttatccattcaccacccgtaagacggtagttagaaggggccaaaccaaaatcttggggtaattaccccctcctttgcacaatcttcttggcttcaggttcatcaagcctcacaaggggggtaaatgccccccggggctttaaccgcgccgatgcgttgaaggttctcgcatttgaagaagaagtttatcttggggtgcgctggggtcgagccttcgaaaggtgttccgcgtagcgcatcgggtgactgccgggctgaagcaatggcgttgagggtgcgatttgtaaggagcggggtgcggtggatgtacggggttatgagggtgtaagcttcttgtatagaatttggggtcgggagttgaggagccattttgggtctgtctggatatattgagtttttctgttaagtttgaacaggtaatagaggggaagtgagccctggtggggttatgcggagttggagagtgatctatttggagtcgcgagccatcccggcggaatattgcgaagtcggaatatgtgagtcatgggcgcttcgagatttgctgagtttacgattctagaacaatgacgaaagaaatcaattgaacttggtaaccagtcaatgctttagtggtattattataagaacaaaaaatgaagtcatggtacattcgtaacttttcccaacccaggtttatacatcgcattaagttatttctggttctcgggacggagggagcggacggcctttccggcgcgctcagatctcgagatcacggatctcctgcatcttcttttttgacttctcgcggtagtccttctgggagttgtagtccaaaaagcgctgggtctctgtacagtcgcgaacgctatcgtagagctcgttgaagaggggcttcaggttgtccttgaagcggctggaccagtcgatggcaccacggcgggcggtcgtggagcaagcggcgtacatccagtccataccgttggcgccgatcagagggtacagagactgggtagcctcctcgacggtctcgttgaaagcctcggaggggctgtgaccacgctcacggaggacttcgtactgagcaaggaacataccgtggataccgcccatgaggcagccacgctcaccgtagaggtcagagtagacctccttctcaaaggtagtctcgtagaggtagccggaaccgacagcaacacccatggcgatagccttctccttagcattgccagtaacatcctggaagacggcaatggaggagttgataccacggcctcacggaagagagtgcgaacggtacggccggaacccttgggggcgacgaggatgacatcgacgtcagagggaacatcgaccttggtcttctccttgaaaacgggggagaaaccatgggagaagtagagagtcttgccct

SEQ ID NO: 5936 - DNA, 10257 bp, Emericella nidulans
  unsure (1)..(10257): unsure at all n locations
acttactactgcgacagatccacgtggtctgctgcttcccagcatcgccagctgctgcactgctgtgcttttggtaagcgacaccttggcatctgggtgtcttgcttatcgcatccggtctgactccagctgattcagaagaaaagcattcaaagaccatagaagccaagactttctgtgcagctccacttaagcaccgtcccatctgggcgtgcctccagcagctcgctgagtgatgctccttttccgtttttattttctattttcataataatttttttttctctggctggcttccgtcacactactgagcctcaggccaacaccggtcaccaccgcgccgcaccactttcgcttttcaagtataatttcccttcgccctccccaccttcgatcttttttcatctctctgccttctatctttggtcataactggcccttcagccatgcgctgtaggctcccaagtcttctcgcttccagttttccatacattctcgggggagcgaatctacttgcgctgttttttctacctgggtcattactactcaccgcacatgactcctccatctgtttctcctataccctcacaagtctcttccgccgcaacgtcacagatctctagcgaccatggagaacgccaggtaacacaggctttggcgggcatgaatttgtctgccctgaatggggatgcggcgcttccccattcagtgaaaccccctaagcaaactatggcgaatcgtatctcacgcatgtttacgggcactggtcgatccaccccaaaggagccagagtcgtcgcgcgaactatcagatagtagttccgatggcggaaaacccactactaatggcagcgggaaacagtcccggccaacatcaaggccttcatcaaaacctccgtcaagggctccctcgcggcaaacttccaccaaagaagttcccaagagtgaaaagaacgaaaagaacgagaagaccgacaggaaggccaaacctgccgggaaagaccagaaggagggttcgactgtccagaagcgttttgagattcttccggacaactctcatcgccaccatctgaagagtacccgacggcaggagaagctgactgatcttcttcgtgatatgcttggtggacggaagaaggacgaccatgcggaggatcagcaactctctctcatgtcaacatggattgaccaattcaaaagcgagcgggataaattagcggccgacaagaagggtggccccaacgccactgcatcgctcgttgataagtacggcaaatgccaggagattgttggtcgtggtgctttcggtattgtgaggatatctcacaaggtagaccctaaagactccaagagcgaacaactttacgctgtcaaagaattccgccgccgtccgcaggaaacaagcaagaagtaccagaagcgactgacttctgaattctgcatttcatcgtccttgcgccaccctaacataattcacacactcgacctcctgcaggatgctaagggcgactattgcgaagttatggagtattgcgctggcggtgatctctacactcttgtgctggctgcaggaaagctagaggttgccgaggctgactgtcttttcaaacaacttatgcgcggtgttgagtatatgcacgagatgggtgttgctcatcgcgatcttaagccggagaaccttctgttgaccactcacggagcccttaagattacagacttcggaaatggcgagtgctttcgtatggcatgggaaaaagaagcccatatgactgccggactctgtggctcggctccttacattgctcctgaagagtatgtcgaaaaggagtttgacccaagagcagttgatatttgggcttgcggtgtcatctacatggccatgaggacaggacgtcatctgtggaaattggctcgcaaagaagaggacgagttttacagacggtacttggagggtcgcaagcatgaggatggttatgcaccaattgaaacgttgcatcgggtaagcataacatgtgctgagaaggcagactttatactaacttattcatcctttaggctcgttgccgcaacgttgtttattccatcctcgacccaaatccttctcgccgcatcaactcgtcccaaatcctgaaatccgaatggcttcgcgagattaaactgtgccaagcgggtgaggaaggcttctaatattcccttgcatttcagatagcaggtaccgtctccgaaaaggtccgttgggctggttttcgctttcttccagtcaatgtcccttacggttttacggtttctttgttcctgtctatctcctccgtcccagaatagaaacgggtggttatgtgtttctcccttttctttcgagtggatgaaagtcgtccttcattgtgcgttccatagacggaggacttttcatcttctctacaattatgccggcgcatgtctttcttcctgcctagtttgcgcgtttagtctggcgtcacgttctaatgttaaggcaacgaagatcatgacctttgactaaattcatggtaccagtccaactcatatacgttttattttaacgacctatacattgtttttcaagcaagcttcaaacttactttctctctctctctctctctttctcttcgattttgcttttcgtgttttctttaccccttctcttgctgcgcgtctacttccaaggtcatgggttaggtttctggttttctgacctggttcatcaagctttctttcgattcgttattctagcagttttgcacccggctggcgtttctttacaggttatgggcggattggactatgtttcattgggggaccaagaacaaactgtaacaccaatacctcacatgaatgacttttaaggaatgataatggctggcccatcaatgaaagagactttatctcttacaatactactgccaaggactacctggtcaaatccttcacgttaaatgtaccaatcatgtgactttaacgggcccattacatcatgaatgtaggcagactaatccggacgacatcattcccggctggagctggagctacctacgtagctgttcgggaaccacaggaacgaatccgtagttattggcttaacgatgacttcatttctactcaattgtgtgacaggggtagcgattcggcccaccctagctgccgctgattatgggtactctaggtacataatacttacatttgtatacgagcatgctctaggctgtatcctagattacacggcttttgaacaacggcattgaattccatcaaggttagtctgtaaggtcgccagcgccactaggtatctcgaggcaatgagtccacctggtaggagtgctatttgtacgcaaggtcgatctatgtattattgcatgtgcatgttctatgcaaaaggggtcctttgatttcgacggacgcacctaccgttactgtaccatccccactctttcttgcgtccaacttaaccatgagacccttgagttcgtatgttgctacattcgtccattcgtgccgcttagcttttacatatttgactcgcagcatatctagccataaagcgagtcccaaccaaagcaaccggacagtacatgtaggaacaaatcacgagtttgcaggtcaatgaaatcggccacatcttccgggcctctaatcgaccctgaagatatctttaacctcaaaccctctaaatatagactgagattaggttaggttacggctgatggactggcccggagttccaggtacaggaagtataaccttgccaaaggggccaggccctcttgggctctggtcctggagaagtcaatgcagatgtaacattgctggtagcccagttggccaacggtgtattatactagtgctgggtgctctgagtttgagaactcagctggaggctggcagtcgcgtagggttggatcctaacatgcaggtgcataatcagcagcatatgcgtgagtgtagaccagaaggcctggaccggcggctgggcatgttctcctgatagggcttagggaatcaagggatgatgtcggctacctgcatgccttgctttccttgcagacgggatacctctcgctccgatcttgctgcgccgccagccaagcataattgatgctaattgaaccttctgctcttaaaaactcggcattataccaaatgacacggtcaagccaagcatgcattgcccggtggagtgaaacatggtcgatggctccaaggaggcctcggccgcacataggacagccagcttgtatgactgtagcgatgagattaccaacgatcttgctgtgcttcaaaccccccacggtaaaggattcaccgactgaagggctagagctggcgattagtctatcatgactgtacaacttagtccgttctgtttgtatcacaccggccacgccgaatactttctcaagtcaatgttaccacttcaattcgagtcacattgtcggggcatcggcgaggggattgactcatctcatggtaataaggatgcctagccctgtactgtgctcgggtgctagcgtgcatagcaaatccactgggaatgttgccattgctaaaaccctgattcttgaatgggaacttccaccgactccgcaaaatcccctaggggaaatattcaatagttcaacggccagcccctaagttgtggagcatcagaacagtacaagcgcttaggcagcaaagttttctggaatctcgattttctggctggtactgcaatggcgcaggagcaggcctggcatggccgtacaacgcataggcgcgtgaattggtgggactgtatttagcaaaatgccttttcaacttcggtatagattgatccttgcatctccaaccaaaaaaaaaagtcgatttggagtagggcatttgttcctgaaaggggggacccaagttgtcgaaattagaactggcggttagcgaaggttccgctgtagaaacccagacacaagagtattaggtagtgtcatatagccactaggcgtaatgctagacaaatattgcatattcaatctttgatttcgggtgcagaaaagaacgaaattcagaaagacacatagatttcatgattgtcgatcctttcaccacgagtctggggaatggaacacagtcgtgttctttgaagatccgtcgctagccgatgccagcgtgggttagcgatcacctgttcctgctgagcgaccgaagtcttccctgcgctagggccgggttttggtttgaattgaagtcagctctccctgcgatgtatgtgtatgcataatgggacatatgaccaggtgccgagccacaagaagagaaaactagactccatctggagtagtgcgatcgaccgtagggctgtattttggtattagtcatgttttgtaaatacacaactttagatacgctctgcagtatgacattgccagcggcgtccgctgggaccggggcatttttgatgaccgggtactgaaaaccaaaaccgaaaaacggtcagtattggtaacaaaggcccctatttctaattaaggttcttagttgacaatggaaatgtagcaatggtaaacctccccgaggtagtccgcactccacagtcgtcgccgggagtggtgcacgaggcagccggggtctcgatgaactcgaagtcctcaggcgactcggaatgaatgttcgtcatggcgggcaacgaattgaccaagacgaccggaggattgggagggaggagagtgtgtcaatgggaaagttgacacggaaggttggcggaaggagtcggtggtggtctggttctctggatactgaaattacgtgtgggcactgatcatccgaggatctgccaagtcacaagctcgagtgacagacagttcctgagccctcagactaagcttaatctaataaactttggacaaacttatgtacaaagtatgtataaatattgaaatctacagaattcaggcacttatggaagtggtttaagctagaagtgtgcttacagtcacgagcttggttcctggatgtgggccagttctaagcttctcgaccatagcggtgagactcgtagtgaaaggcaagaactccatttggcagcagtgtgctaaatcatatgaaaagatatccatccctcctgtaacccatacacccagataaacaatgtgcaataaacgccccgttcaaaagagcactttaaggattcgtgactgaaatcgcctgatgcacgccgagtcgccgacctccacccagacaactagaatgaaattagatgaaagcaatggtaatgatgatagcataaccggcctggtcgaaatctcggacaactcataattcacaaagttagctgaaagttttgggtctcctcatcttcttcgtacgtgggaaacagctcttcggccaattggtcgccttcagattccagggaaggagatccgtatggctgagtataggtctccaaagacagagcaggtttctttgtaggctgcttcgtagaggtcttagccgtgccgtgcagtcgagacgacacctctcgacccttggtgtagcccacagttgttcgagagtccgtagcggctgcagtgtgtcgcattgacgaggggttggcaggagcccgaggtttcttcgagggaaatagtgacgaagcgatcctggctctcggtttcatgatgggggctactcgagttcgtggaatagtccgctcgttgccggaaagagctttggctgcgtcccgagcacggaccgtcgaaacgccactcgaatagttcgattttactgaagcagccctgggattccgcgcttggatgcggcgttgtggaagctctacaaccggaggttgcttcgactgctcatcatcgctgagtcccgcaaagtcaatgctttcgatttgcttaaggatcatttcgtcaaccatcttatcataagcggcgaaatctttctgaaatttgcgctgtcgtttcgtgaggccgtcactcccaatctcgtcgccgtaaacgctctctaaaccaagcgccaagttttcagggcgaaattgcgggaatgaagtgtcgtacgtaatctcttcagggtagtccggcaggtctatgctatgttagattttcctgctaatcgatgccggctagatgttatctcaccttttggcttgggcggcatgtactcgatatcaggcacgtcatcctgcaggggctgcactttcacttctggctgtggctgctccacaaacggggagaatttcttgacgcgctgagtagagcctttcttggtcgtcctttctggctttatattccctataggagctgccggggtttgcaagcctctcgctttggcattggtcgtcttcatccccaagggagcacgatgacgggtgtctcctacaccactagtcagccgatcccatcccatgtccataagaaacatctccaatataaagtttgtgcgtacccataggagtgacaaaagcatccttgacagagggtctggcgttctcattttgcttcccaatcgtcttcacagtcttccttccgagcgctagcgggtcgttctcatccttcagtggcactttaaagggtgtcttcggggctcggttccccggagtcttcggctgtagttgtctggcgccctggttcaatggcttcgacgctgcaacggtttggtgggtgtgaacgaggttctcctggtctcgaagggccagcatggtggcgtgttgacaagaaaacttgtcatccaagagcgagtagatgtcttattgagttgtgacgcgactcgacgagttgaatggcagagtgaggttctagatgcagggtgccctccaagtgttttctttttaccgcggttgcccgtggagacaacaaatgatccgcgggaaggctcgctaaaaggggtttagcggtgtattgcctcaaggctcaggctcccgctgaccgccgactagtgcgtattgctgtccctttagtttctcctgaactcttcctcactgatcacactctcaacttctcatctggtttatcgctgagcgaaagccttctatccgatctcaaatccttcgtcttccgttcttatatacatattcattcgctgctagccctccaccatggacagaatcaaggaggtttgtctttcccgtcccccctgctttcggcggggtagcttgagagctatgttgaggccctgcacatgcactacctccaccaccactctattcccttgcttcaccgtatctggacgaaaccagaattagcctaagatgaacatctctggagagatatagtaaactgaccgatgtcacactagaaaatgaacgctctccgcctcgaggcggatgaggcccatgagaaaaatgaggaactcaaggccagggtgaagaccttggagcaggagaacctggcgaaggagcaagagatcacatccctcacccaccgcaaccaactcctcgaggctgaggtggagaagctggagtcttccgcaaaggaggccaaggatgccgcgagccagagcgcccagcacgatacccagaacgaagcgctgcagaggcgtatacagctgctagaggaggaggctgaggaggctgaccgaaatctgcgcgagacaaacgagaagtatgctccctttctttgtcacccttttctagcggtcaaggttaaccattatctctgaaggctccgccaaacagacgtcaaggctggccactacgaacgcaaggtgcaggctctcgagacatctcgtgacgaatgggagaggaagtacgaggagatggcagcgaaacacgagagcttgaagaaggaacttgcggagctcgagctctccttgaacagtgtttaacagccaaactaaactgtgctggaaagggtgtctcaaccagtctctcagttgtttgtcgttactatttcattgcacagcccaccattttataatattgttggcccgcagaaggcagatctcataacattcctccatgtcttttgcctcccgctcttatacttctcagccatcttgccccagagtcgacctcaatggcttttcaattaattgaagttcagatcaaatagtccttccagcgccctaaagttctatgtgatggggatcctcgaatgtatggtgttgatggtcgtgtcctcgatgcgataataaatgttgcacagccgtagtctcaccgttctctccgcgccttggccttcctgtggttcgccatccgctccttcatccttgtgacttttcgttcgtccttggtttcgtatcggaacttcttctttttcttcttcagtttgttatctggctgttttttggccttgggtttctctgtcggcgtcgccccttcggaggtatcaggtcgctcttttggactttcgtctgagctatcttcatcggattgcaggagaccctctttggatggatccatttcctccacagttaccgtagtatatttgtcctcgtctatatactcggcctcgtagtctacggtcgggggctcttcgaatccgtcccattcgtcttcctcctcgttgccgcttgacgtattaccagcttcatcaccgctttcgttttcctcgttgagtctttttagctgcctcttgtgctctgcaagtgcccgttcaaactctgcttttcgctcctcgcgcatctagacatcaaaaaggatcaatatgcgtcataggagaggagcctgcagtcacgtaacgcaccctctttctttcttctctcttcgcctctcgcaccttgcgttcagcgacttcctgcgcatgtttgatacgttgttgttttcgtttgcgaaaaccagtcaggaattgatgacggtcagtatcgtcgaagttgatttcctccactcggctggtcaactttcgctttctcgagtgcgctcctttgatttgagggcccatcgcgatcgatgattataggtccagatactgaaatgaataagcgatatggcggattgaatttgtatgggaatctgtcggccagaaaaaaagtggacgaaatcttgcatccgccggagctggcaccgatctgaccgccctccgagctcgcccaatccaacagcctggcttcgatttcaacatcatcctccagcggacactcttgttgcccgacgaaactccactctatacaatgcgtctcagtcggtgttcaatgctggctctgacagccgcaacagccagcgcttttcgtgatacctctccgttcttccttgcatcaacatctgagtaagctaggaacgcccagctaggactgcngttatgagctcacaagctaggatcctatctactcctgcacaactaaaatncgctccaccctgcttgac

SEQ ID NO: 5937 - DNA, 18933 bp, Emericella nidulans
atttgatccatcactcttacagctcacttaaggcaccaagagaccagtcgaacaccaggtctaatgcgactcagaaagagcagtataccacatcgcttcacaactttgccttctctccagcctccttcctctcccaccttctcctgattccataattaacagctagattccaagccgcaaccccgactccaagcggcggcgccaaaagcagccaccacgcccaccacctcggactccttccctgaattgtagcgacagccttcctaacctcccgttccagctcctctttatccccatcattccagacgataactccgcgtgcactctctgtgccccgaaactccgccttctccactttccccttcacgtcgccctggctcttcacgcggttctccgcgtcctcggctgaaaggtgtgcgtcgcgcgcgcggagacgagccatttgtacgttcgggtcactgacgcctacgacaacaacggtgccgcaaatcaggtccatgccggactcgaaaagaagaggcacgtcgagcacgacagcccagtagccgtgaagatagtagtataggaggcttttgtagacctcccatcggacagcaggatggacgatcttgttgaggatcatgcggtctcgctttcgttcttcggacgtcccaaagacgcgccggccaagggcgggtctgttcagagggcgtggtttcggtggcactgacgcatcttgtgtgttttgcccgtctgaatgttcggcggggagaaggaggtccggtgtgctgggaccaaagtagtttacaatcgcgttatagccgggggttcctggttccacgactttgcgggcgagttggtcggcatcgattatggggagcgagtaaggcggggaggagagaagagaggagacggtggatttgccggttgcgatggagccggttaggcctattataagcatctgggcggtgttttcagtaaagagaacaaggagtagtattgggtattatgtgggagcgaggattgagagacgacgtggagatagtatacagaccgcagaagcggatatagatggggagtgctggagtagctgcaagttcccgaggtccgtggttgatgttcccgttccggtatcgcttggaatagctacatcaaatataacagctcttgtccacttcctgatttgcacttggacaccttatttcaaaattaaattcagtgcacagatgaaatatcggacttagatctatcaatatcgtacatcaggtggcccgatttcgtgccagacagcaggaagtctggacgaagcgagaaatggcgaagtttaccattctgcggggatgccctcatatggggccgcgagtgtcctgctggtccagaaatgaaataccagcatccaccggagtgggtatggcgtggacatagtttgtccttaattattattcaaccggcgaaccaagaatgtgtactatgacttcggctccggaagcccgcctttgctgggatcttgtttctgtccattccagccgatatagggccagcccttagggagggttgaatacggcggaagttggtaacggtcattgcacgcacccaggctcggacaagtcagatcacacagtccaaacaccttacagtagcactcttcggctgagggacaatggataggttcctttccaaaaatcactgcgaaagtcagctaaccctgcgacatgattctcgagcgaaaacatactatgccacgaatactccataatccgcccacttagatcgtccgttaagtccgtctctagcagccacttccgaaatcgcacgtaatcgctctttggccgctcgcgaatcttccagcttgtgacaccaaattgcgcgcaacaggacacacccacagcctcaggcacgtcgacttcaggaaacagctccatgaatccgttcttgaagtattcgccggcatgaactgcctcgcggtgggtgtcagtcagcggatggatctcgtcgggacatccgaggacccaaacgcatcggagattgacgtatccttgtttctcgaggtacgaaagctggaaattgcgcagcattggcacgccatcgtagtacgggtcgtcgttgtgccattggtacctttgggaatgaataaagaggatcgaatcggggaggttatcataattatcaatgatgtatctataggcaggcgctcagttagaccagtagttaagcagagaaagaggctgcgctcacgtcagatagaccatggactcccgccccttgttctggctcaccgtcaacggggcgttcttatcgtccacgacatagatgctcttatggtagtccgggaagaatttatgcaaccatgagacatcgtcgcttttcatactagccacgaccatgcttttccggatgggggcagactgtcgcgccggggttgcctggccggagtgcggatctttatttgggccaccgagagcttcgaagtcgtatatcgtggggtcggcatgtttatggagtgatggttttgagaagaagagcaggtacagagcgaagatgatgaaaatcgtcaggaagatcgctttctcccggttgcggcggcgcggactgttgacaccgctgaaaaagaagaacatggctgccgccagcgactaccacagaattatagcccggagcccaattcgggaatatgcaacgtcaattcgtgaatcgtcaaagctcagtactatagttcgcgttgtcaagccaaatcgactgagcagccggtcatggctgcacagtcgactagcggaaattgagcttcaggaaagtcgccgtggggtcgactatgtcacgtccttcggatgggacgtgatgtgtgacgagcgaggttggtaaggcgttttgaagttggaaattggagacagttggcagctcaaaatcggggaattgagagtcacgagtggagcggatcgccggagccgtcgctgggccattccatttgcacaactcgactttacacagtacatttcttcatatccatgctaacataaccatttctcatcatatacaaagtatagagtatataccatcatttcattactggcaggcagtgatatctatcagataccaactgtgtgcctccactgactgggcagcctcacccgcatttccgtccctcgacccaacgccttcaatcacctggatatctgtcgtcgtcggggtaacctcattgtcgctggtaatccaatactcagggctcaagtgctgaagcccaacaacatgggaggaagtctgggaacgatatcgttagtgtgcgtcactcgatagtttgccccctggtctgtgatgtattgcgccaaagcttcgttgccaacacgcgggctaccataggggtactacgctcgtcagcagacagctagccaccagctggacactggattcttacaagttcgatggcataacctgcttttcgcagctgcgctgcgcctagagtagccaatgctcctccaaagctgtggcctgtgaagacaatggcgtagccgggatatgtggcagtagcagactcaattgctgaggtcaacgagtctgcaacaacctgccatgccttccagaacccgccgtgggctttgcatccgctacagatctcctcgaccgactccaggccaaagtcgaggtttgcaatccacgtgtcaatcgtccggctcccacggaaggacaagacgagtaactcgttggttgtatctgcggcaaggaagcctgctacatccccgtattcgttctccctgtgactcgtcagactagttggatctgtttggaaccccgaatgcagggcttaacgcactgatagaattcagccagcgttgtcgtgtctgctgcctcaactgtcgggcagtttccagatgcgcaagtcagcttgtccccgactgacccaatattgggtgtgcagtacgatgccgcagaatactccgcgaacagggtcagttgatttagggcctccgtcgaaacgtctacacaacgttagtcctgtaccatatccccatgcaaggtgacataccacgacgattcagcggcgctggagcggcaacggctaacccagcaagggctacgaagatggcagaataccccaaacggatcatatcggcagtatcaccaacctatcgagaatgtacaatatgtataagaaggccgcaggaactatcagaaaagaaccgcgccgctgcactaaggcacagaaacctcttgtttgatcatcaggaacattttgctacttatatactaatcgtcttccagtctccagtcaaagggcagaccagtcaaaaatcgagaagacaccacgtactcgcataggcacattcctcacttgtctaaggtatgccaggaagctaactccactccagtcttacccactaaacccaggtccaaagcaatctaaagtgcatcctacacgcgcgatacaacgctgcgccgtccaaagaagggccaaaaacaaccggtaaaagagcaaatccaacctcttgcccgcatcctgcgacgatcttttcacttccagaaagaactccgtggccgtccccgcgtgcttagctcagacagctggtcagatggtcagatcagtcagtaaacacccccgccggacctgctttctgcgaacagagtagtcgtaggcccgtagcggtctgggataggtcgcgtaatgagacgatctgactgggccatccagcggtactttatagtagtcagccagtaaccacccacatttaattcgggaggaacggctgtgagttgtgaagaaaaagaaacgaaccacttggatcggccactccggctctgccgtgcttgccaagtatcggggcgtctggctatatggtagtcagctcggcaatgagaaatatcgacggactaattcccactaaccgtgcatgtttctgctcgaagtaaccttagggaggggctacccctgctgaagaaatcctacccttgatattgagtacgcagacattattatctataccttgatcaagctatctcctaaagcaacccacactgttatggttgagatatacagatccatacgtgtacaaattaagctccgacgttgtacgagactactgaatccatcccagtcggttcctgataagccttaacctagtgctggcctgagtttgtaatggactgtagatagtttacctggtgtcttgactcgtctgtatatttttccatgtaagatacgatagttcgacttaggatgatgctttgtgcactctctacgtcatgcatgtatgtcgtatttacgctgctgcatcgatattaggacaaggacatcctgtagtccccattccagcatctatttctgtttataggcagtgatctcattggttgtattatggtccgctcagggacgtcgaagatcggcagttttacacgacaagaatacggagtagataagcactagtcggttagaataaataaagtgatgaaggctagctagaaagcaagcaaagtgagcccgcgttaacacgtaccatgaatagcaatattgaaatactacttcataagatactaacgtgatccatggctcttatgccatggcctgcatcatgcgggcgtgcctgcatgtgccgagtaggttggagctcgacactttgtccggcggccaaagctaaggatttctccggccccgattcgtcttcaccatggtcgacggcgaacaggcaggtatcccgcagatgatagggcagaatcgaaaagtaggtacatgagagtaaatagattatcaaccatgcagatattgctcctaaacgcctgtcataagagcgagattaaatacgtacatcctcagaaagcaaaagcactggagttttaaaaaacgttgtgccgacaatgacccctcaggagtgcatgacgacggccatccataacagtcatattaactctgaaggacgtctggttagcataggtaataaacagctggtaataaacagttgggggacaagcactaaccgcccgccatcaactgctcgctcttctcttgacgaaaccgcatcaccgcgagctacgcaccccactcactgcccctgttgccctccagtttccgcgccctcggtatagtcagccatccccgagtcctcctccttggccttaccattattatcgccggcaagaacctttgtcttaggaacctgatctcctggcgaacccatcccaggcgtagcagcaacaacattatcattctcatcgacgaattcaaagttatatctcgacagcaagtgcgggatggatgagagctgcggcccgtaacgctggttgttatcgtagagctcaaagagcggtacggcgagcagcttcatgttcttcgggacggagagtacctctgcagcaacacgcaaacacatcagcatatcatgaccgacgagactcatttggtccttgctttaatgctgtatgcagacactcactcttcttcggaagctgaataaaatataatttcttacactccttcggcctcgtaacatgtcccggcagaaacgggtacatgaaagtctcaaaattcggcctccaccactgcgcaagtgtatctccaatctcccagtcctcatttactccctcgccagagaattgcgatcccacgggcgcaaggcgctcattcaaccgcctcttgaaaccctcgatttcgtcatcatcgtggaggaggtaatcaccgggtctgcacagcatccaaaaaaggtcagagtcaacgatggacgcctccgcggaggtgagttggggtgcgtacagcttaaaaaacgcattcgcaatctgcagcatcaggacatgagggtggttgtgttcatggcaaacgaggatgccttcgcaggtgcgacgcatgccgtgcttctcatagtgttcttcgagccgctttaggcgggcgagcacggacgggtcttcctctggttgtgtttcctttgtgccgaatgtgtagttggagagagggtagagacgaattgtttcgggctgttttgcggagaagtctttaggggcgatagggctgtagcaaggttatgaatttgttagctaaggctcactgtcctgataacttgctcgaacttgacttggagctggatgggacgggatcggatgggagcacacacgggaagctactttgtattgctgttattgtggttgttgacatcttggtgggtaactgtgctgatatgtgaggttctaggaatttggcagtacaagaggattgagtaagtcctgaaggactaagatttggtagttatgggtgctggtattagagagccatcatcaaagctccgggatgttttgattggtgttagagctcctatcgcaaaaacatcggcccgtttgggacgagatactgaatgcttcaggctcgatggaatatattcttcgtcgttaatctaacatagcccgagtgctaggactcaagtattatttctattagaagtgaataggactgcaagactttatttctacaactcgtaaaatccgttaccaagcccgccagccaccaccatgccacactgaccgaaccaaagcgaatgatgcataccctaataccaaatatctaaccaagaaaatctaaagtttggcctcaaaatcctcaaattcggtgagatttgtaatgggcgttgggcccagtactaacagccaggcgtgccttaaagtcggcgacgtttgtgatataagtcgggcgtgcggctttagtgcggttggtaaggctggacccctcagagccttgtttggactcaacaccaagctgcttcgacatcaaaccgaagttttgcccaatggtttcaagagcagggccgacctgctgttcagagaggttcaatgtggaagtgaggaatgttttgaggacggacaggacctgctccttgtcgccgggggagacaccctccagtgcgatgccgagactgtcgctatctgctgcaaaaccagctgcctcgagctgcttggtgacgaaggagagcaggcgtgctttttgttccttgagctcaacggcgtgtgcaccagcttgagctttcaggtggatcgagagcttgcctcgggtaggagaggcagggtcaatcatttgcttgtaaaagtcgagaatgtctgacttggtcaaggcgcggacacgagcagcgtcggtctcattctgctggaagtcatagtcttcagaaccaatgtggctccagaatcgtgatgtctcagaactcaggttcttgagcttttccagtcgcttgttgatgacgctgcgcatgtggccctcgaactcgtcctccgtcatggtctctagagtctttgcaaagttggacaggaaagagtcaattcgggattccaggtattgagcagtgcgctcgctctggataatcacgcggtaaccaatggtggttgccgagtagcgcgcgccgctccagacgacataacccagctgctccttgcttcggagttggtcaaaagcaggctcatcagtcatctgcgcgaagagtaggagttttgcgcgaaggacttcatcggcaatgcttccgataaagaggtaatactcgatgcagtggttgacattggccggatccttgagaggccgttcgtaaatgtagtcagatcccggcggaatgatcacattgcgcctgacgtaccactgggactgaggcagagttcggctgtttaggatagactccacagtatcagtcattcgcagagcgtcctccttgtagatgttaccatgcgccagaacttcgatatggttctggcgcaggatctgagggaagaaacatttgatgtcctcggcctcgatgtggtcgagctcggcggcgtactgctcattgagccaacctcgctccgcagtcagataccgagtgtagtctccaacctggtagtacggctgctgatactctgcattcttataactacgggtcagacgctccttgatgatccggaagcggtctgggtttatttcaaggtcacgcatgcttgtgaagaccttttccaggagcacagccatcttatcgttgtagcctccgacggagatatcaagcccaaagatgctggcggagagatggtaatccaagccagcgagttctgcgtcgtaggaatattcaaccagagcatctctcacgagctcacagtacagcttcgacttcacgaggttggcgggtgtagcccaaaccagagggttccgaagagtaacaaagacagtagccttgggaacccagaatcggtcgtccttcttaaaccagaggcggacgtggtcgtcgtggcggatgagcttgggcgtcttctgaggctcggacacctccttcttctccaccgagagcctagtgggaacgaactcgttcttatggggcatatgcaactccttcaggcgtgtttccggagtagtgtccagcgccgcccgaatgccggacatgaagtccttgggaacatcttcgaccttgtattcagttccgtaccatttctccttagtgtcccagtcgcctgggtagtcttgcgcaacaacaatcaacttgaagttgtcctcacgaaggtatgagagggccttcttgatcgcctccgggtcgaacttcctgaggagcgacccactaagtagccattcccgcggcagaggcttctgcatgacgctgctcaggcggctcgtgaagcggctggcaggcgacttttgcttgaacttgaactccacctcggccaggttcttcatctcctcgaaaatccatgcctcaggctcgcgttctttgatcattgcaatgtactcaaatatcacctttacaacctgctggtactgctgtagtccttcctgcgtcagccgaacagaaacagtaaagaatgcagctccagggcaaaccggcatcacaccggcagataacccattcgcccatccctttgctttgatatatgccaggatactaccggggccttcgtggccaataagatggctaatgtatcggctcggttgcgactcatacagcttttcctcgtccaagaacgggaagtagatatccaccgaccgcgtatccatcaccggtttagcgaagatctgtttgcacatgtcgtttggcagccagatcgggatgccatcccaccggttctgtggcaggtccttattactgacaccagcgaacagctctgatacccacttttccaattcatccaatgattcacggcccaataccaccagcttcatcctgttggcagaataatgtttctcatagaatttcataaactcattgcggatttcaacgccgcgtttctgcggctcctcctttaatgtttgaagatttccagttgagaaatgattgtaggggtgatcggggttggatagcgacttgttgagctgcatcaaacgccacagatcgctctgcagattcttcttgttttctgaatctactgcctgcatctcgcggtctagtgtgttctctaagaaaagtggcgaaataaagaactgtgcgaaccgatcgagcgcgccatacagtggtgaaggtccattgctcttagattccgcggaagtgccatttgtggttccattaggcgtgacttggccgctcgactcccccgtcgcacctgtagcagacacctcaaagaagtaattggtctcggtaccggcggtataggcattagatgacccggagtgagacgccaggtactggttgtatgcgttctctacgggatactagaaacggatcagagatgtctttcctgccgaaaagcaatgcataccttttcagttcccatgaacagcatgtgctccagcccgtgagcaagaccctgtaaatctgccgggtcactgaagcttcccacgtgaacgtccatcgccgcagcagccttgtccgtctccgggtcatgaaccagcagagcctcaagcttattaggcagctgaataaccctgtaagagcggtcatccagagaaggcttctccagcccctccgtcaggcgctctgccgacctcattgtcatttttctcgtggttgtgagagactgaaaggaggaggggcggatgaagggagaattatgccaaaggagggatggcgaacaaagaacaggcgcgtgcggtcgcgaggacgcggaatttgaatgacgggcgagcggcaagaaagtagaccctacgggaataaagaacgaacgatgatgagctagaaatggatacaaggaaggcgggcgtttgttccacaagcacagacggcggaccacaggagagtaccttggtgacagcatgcagtgagaggcagcgcgaagggactggcggtaatcaaccgtggaaggttgtccgggcgatcagtagacttagagagcgactagtgacgaacgctgggtcaatagaggctttcgaattgggagggattgaacgataagaaggatgaaagggagacggatgagcttgcagttggacgtacgccacaatgccgtacttgaggaacgggttacagaagaggcaaacacgcaatagagcctccaatagtatggaatagtggaatgcacccgagtaatgatatcttacaggcgcaatgatcactcaataattcaggaatccgtgtacggcatgtggatgttcccttcggcaacacccttgcgggcggtgaagctatacctcggacaaggcattccccttcagcaaggcacgttcatgaggccaaagatcaagaacgtgcaaagctggggctgagcttggtctggtgcgggatctgggcgcattgcggagaaccttgaaagggtcatgtaaggataacataaggacgaggctgggactaaacagaagaaaggcagcgatcaatatcttatacctactcatattggcgtggtctaatggtctaacccgtcattgccgcagatcaatcatgctgcagccacttactccgtagtcgtgccacctctctattatgactggcagtgcgtctatgttgtgccttacttttgaactaccggtttccttgatctaaaatgtggtgaattcaataatgttgcttttcactatgctttgcagttatgaattcgttattatccaaacaatatcaaagatactccaccaaaagcgtcaggaatagcataaagcatgactgcaactaacacaacacttcgtccatcccaggctcaccccagactcaaaatacctaagcaggacactcatccgcgcaaagcgtcaatgtctgatccgaattcggctcacaagtcttcacctggcttccagctggctgcgttccatcaggccagcaaattgtcgggcagtcctcgttattcgacgtcacagtaagcacctggccctggaagtctgtgccaaagatcgtggacagatcgtaccacacctggctagggtcaagcgtgtacgcaaagatcaactgcgggctgccgttgtatagcccgtcgctctggcgagtgattttaagagcaatgccacccgtcacagcgtcgcggtggaactgctcgctgaaggtttcgccggggttaatcttgtgcacattgctgacagagctaccaacgctccagaggtagaagggcgctgcgcagttgttgtggactttagcgttgccgacggcgctggccagaggcgctagcgcagtgatggcaacggcagcaaggctggtgaagtgcatcttgaggtgcggtataacagtatcagtggaggaggctgttgaggacttatggtattgaggacgtgattttgatatcccgttcaagggagagaagtcatccttatataggttgggtgcgcagagtgattgcatatcgagtaagctgctcggtctttgctttctgctatctctcctcggcacccatggtccgatggcagtcttgcttgagcattagcagcaataacgatgaccgcattgcacttccggcagcagcctcgaatagggctggtactatactattggtatagtctgacgtaacaagagactaccaacgacaaggcaaagctccagattggtcatgtcgcgggttatacgagcaggaatgcttgcgagacagagtcatgccgtgggactgcgtgagacagttacatcctagcaagtaaccagaggtacagcggtcttatcagaacaagtcagcccaatacattattttagggttgtgtttgtacaataccaatcatactgctttctggtctcgtgtgggatgagttgccagaggcctcgctttgcagatgtctcaggatagtgtccactagcacgggaacgactggtggctgatgtttggctttccggatggtctcgtattttgacgaatgcagagtccgccacaacccgtgggatccggggtagctcgcttagtgatatttttgtctcagccatcatctgaccgtgaagaacaaacagaacaaagagaatgaggtcaaaccacacggggcgttactgttcccgcaaccaatgcaagacgagtcttcaggattgctgccaaggtatgagaatgggaacttaactagtatactcttatcaaactagatgctccttgtattgtgctcgtcatggatacaacaggaagccttttcgtcatgtttcagtctatgagctgatcaatcaagccgttctaagccatttccgccctcccgaccatgcacaaaataagagacaattacaatcacatctcctaaccgatttaactaccaataatagagaaatttcatgatgttctctggtgatcaggccgctttgggagcggccttggtaggtgaacgcttgaccggcttctcctcctccgtctcctcgctctcaggctcaatacgatcttcgatccattggaaaacctcatctttgtggtgcataagcatgtcactaagtccttccctggatgactgaataagtttcccatagcgcttggttgccttgcggtcactcttccagacaccatgcgcctttgagacaaaaacgagtgagttctgttggagtcaggattttgtactagacgaacgacggtaagactacttacatctcggtaccatctggataaccagacttgagtatgcgaggccactgcacggactgggtctttagcaacgaatgaaatgacaccgttaactcgctggtaaagggtttctatacacggattagctgcctttctgtggttgctatgcacaatcacctacctctattgattaagaggttggcaactccatagaaagcatttccaataccaacgaggaatatctcggttgcttcatttgggctagggcgccaggtcagtctcgaggccaaacttttgggatcccgagcttactcgatgtaattatcccacaaatacccggccagttcttccgtcgctgtcggtcgattctcgtcttcttcctcgaacctgcctgatgactaatggattgtcagaatggggaatctagatcatttcgggtctagatagactcacaggttcagttgtgacatgtttaggaatatttacgtcaatcacagcgtaacccttgccaacagcccattggacataatccttcattacatcagccttgttctaagtcagctcagccgccgcagggcaagacaggatgcacttactagccagcagttgtgcgcctccaagttgttggttaatggatgtggcaatcccataatctcaggcctgtcactgtcggtatatagaacatttacgtcgagaagtaatactcacggatcatgaaaaatgactataagcggggtagcttgattgtaatttggacttccaggggttagccatggtaagatactacactcttgttgatagcgtttaccttgccaaaacctgattctcgaatgatttcgatatagcagtgcggtagatatagagagaggtgagcttatagttgtcatagagctgcttggcctggtaagctcgaatgatatctgcggcttcattagtccccatgcaatttttgatgtcttcctagcctaccgtgaagcctatcagtccagactccttcattctttattgccttgggatacatgcacttccagtagtcggactggatggacgatactcgccgtatggtagaaatggccgcttctgaagggcaggtgaaggatagtcggtcaggcggatttcccatgagtgtcttcgtaacagcgagagcagacttcgaaatcgacctaaaattatagccaccctgtatttctacaattagctcgcgaaagatagatatttcggcgcaatcgaacctccaagcaaacagcaaccttgccttgagccagcgtcatcaacatatgcgtcatatgagcatagcacgccggggtgacaaagcatcctccaagcgtatctcccgcagcagcatcaaaaccagacgcaacttcggacttgttagttcactgttcttaacgatggatagcggatctcatacttataaccaaatcagggtcaaactcctgggcaatcggcatgacgacctggtgaaaggcatatatgtagtccccatcacccattccttgactaggccagggtatgttgacattcctagctgacgatcagcacgaagccctggatgtcaggaaacgaatacatgaatcactgactttccttcacccgctccagcgccacagaaatccgcgtcgccatccttctccccgggatagaaacttccgttttggtagacatgaagcgaaatgtacaggacgttgggatcgtcataaaacgccttctgtattccgtttcctatattatgtgagcggcactgttcctcagttcttgaaagatatcactggttaccatgatggacgtccctgctatggttagtttctttcaattgcctgtaccgtcggcatgacataccaatcaaggatcatgatttttctgcagcttaatccaagtcgttgctggcagacacgcgctgccacagacacattattaaataagcagaatcccattgtcttatcgtgctcggcgtggtgccccggtggtcgaataacagcaattgcgttctttaccttgcgagtagctacggctaggcaagtttcaatggcgccgccgacagatagcaaggacgatgcgaaggtgagattattgaagtaaattgaatctcgagtatgctccaaggcaatcagttcctcatcagacatatctgcaggatagattagttttagaaactctgcgacaccgagtaagaaccgtaccctttgtgctctctacgaatgcataatgtgccgcggtgtgaactaaagagatttcttcctcggtggcattgcgagcatgaatccgcttcagtgggcgtgccacaagaggcctggttgattcgatgtcatcaaccagtcctgcccggcagagctctttgtaaatatagtagattcttcttggatcttccggatgcacatctgaggttggtcggacttcacaatgatagcgcatctgaacatcgtaacaaagtcctgacggcaatgaagcaagtggaagtccaggcgcttctttgctttcctcagcataatctgagtactcatcaacgagactgtcctggtagtcaggagtgatatctgcagcatctgcagggacggttgagttcaggtcaatcttcggtgacaagaccctcgcttcatctgtcgtggcagatgattcttgggtctgcgagttaccagcctgaaccacaggcatctgcatcggttggctgagaagcggtggcgccagatatggatcagatctgccgtttaaatggccgtgtgttgtctgctgaccggcagcaattgctgtgttgggattggcagagtggtaccctgcctcccccataatgatgtcctcatcatctaccattgtcgatgaggggagccagaaagcccttctttgttccccaggtccggtgaaaggaacgcgttgtgttaacgcctcatgaccaacttgatagtcagaacggtaatattctcaataagcccaggaaaagacaagacaaagaccggagactttttgagtgtacaaagtgcgagttcaatgagctcttgatagttcaaaggcagtgcagaatagagaataggaagtaagttagtctagttgtatggaagggcaatgaaacaattgagaagacaggaagggtctggaactagatagctctgtgtgaaacccaaattgacacaaatgagagttgaaactgggcgccgggacgccgcgcgagtcaagtaagaatgactgaggtgcgcagaaattcgcactcggacacaccaagctaggagggaagattaggggcccaacttaccccggcgcgtgcaggtggtctggcgtaggagtttggttgatggagctctaggacggaatttaggtcggaagcttccaaagcgccttgcacgtgacatatttccccggtcaaaaggactaagtatacccagatgatagaacggcatttgttctaatctgataaaggaacgcgggatatactaccttcggcatttcaaggctttcaagtcctcagctgcctggcatgaacaaatgtggtagctcgttgtcgacgccgaaattcgcgacggccaatataagagcaagtactggctatccacgagaaatagtacgtctaagctaccagtagaagtgaacaatagtggtgaaattgatcgtgtatttgtcattacatagtacgtaacaatgggatcctatgccaatatccccaacagctcctatgaatctgcagttgcggcatgtggatacggacatagtctgcacactcctgctaaagaatgggcaacttaatagaccaaggagtatttttttacaaggagctcctggccattggcttccgacctgtttcctattgggcatcaaccttggagatgtaggctgggtgcgagttagcaacgcacaaaatgtttccatctaactgaggacttactgatgaggtcaacaacacggcgggagtaaccccactcgttgtcgtaccaggaaacgagcttgatgaagttggagttgagggcaatacccgccttagcatcgaagatggaagagcgggtgtcaccgttgaggtcggtagagacgatgtcgtcctcggtgtagccaaggatgcctaaatcaactagttagtcgaagatgtccaacagcaaaagcacattcacattacccttgagctcgttctcagaagccttcttgacggcatccttgatctggtcgtaggtaacagccttctcggtgcggacggtcaggtcaacaacggagacgttggaggtgggaacacgcatcgccatgccggtgagcttgccattgagcgaaggaatgaccttgccgacagccttggcagcaccagtggaggaggggatgatgttggtagcagcggtacggccaccacgccagtccttggccgaggggccgtcgacgaccttctgggtagcagtgtaggagtggacggtggtcatcagaccctcgatgataccgaagttgtcgttgatgaccttggcgagaggggcaaggcagttggtggtgcaagaagcgttggagaggacctgaatgtccttcttgtaggtctcgttgttgacacccatgacgaacataggggcatcagcagatggggcagagatgacaaccttcttggcaccacccttcaggtgagcgctagccttctcctgggtagtgaagacaccggtggactcgacaatgtattcagcaccgtcctggccccaggggatgttggcggggtcacgctcggtgtggaagcggatcttcttgccgttgacaataagaccctcgtcgtaggtctcaatggtgcccttgaactgaccgtgctgtgagtcatacttgagcatgtaggcctacatcacacgacgttagctaaacataattagctccctagaattcgaagtagcatacagcgtagtgggtctcgatgaaagggtcgttgacggcaacaacatcgacggtacccgcctcgatgctagaaaaattgttagaatcctatattcacacgagaaaattcgcgattcaacgagctaaacacccagcaatataggctatagctgttgaatatggtgggtgacactcacgcgttacggaaaacctggaggcagtgttagataggagataggccggaattgggggcaaagcagaactcacgatgcgtccaatacgaccgaagccgttgattccgac

SEQ ID NO: 5938 - DNA, 13388 bp, Emericella nidulans
atgaacttgtactagacatactctctccaggaacaccagtattcgaacatgtagcttatctgcgcccactttcgagtgtcgcaccagagtgtcgcaccagaagaaagtgaagagccagaatagtatacaaacgcatcgcctctgctacggaagaggcctccgccacggaggcaaatacgtacacgaaggccaatttcctcacattgtatcggctagtgtgagacgcatgtttaatccgggattgggcaaacggacgatttgcaaaggcagtcttgtatgtacgttgcaggtgctagaaatgtgcgatggctgaggtcaaggtgttcctgcctgctagtaagcagttttcattgacgttagcggcagaccgctcagatattggcctgatgtcctgccgattgacaacacacccggcataagaaactgccaaaattgacgtaaagccgttttgtacctttgccgatgcataatcccccaattatatctttagaccgaagagagcagtccgcaattcagagatcaaccaattgctcctggggtcgacagcgagacggcggacggcggacggcggacggcaatgctgcctgcaaagccggaactgagcagtgagggaagaccgcgtactggagaccgttgactggttgaagtccagtgacagcggaaggccctcgctcgtacggaagctcgcaagtttctggttgtagcggtgaaggagtcgagattcatgacggtaacctgatcctctttgaaggctctgccgggcacatgtcgcgaagtatcgacatcatacagttgtctaggctccgtaggagagacagaaatgaaggtgctgcgttgcagggccgggttcagggaagtaaagcatctatggtagctgtcaagcagaatgcagacatgcaggcggaggagctgagtgaacttgctcgggaagcaagtgatgcatactagcgtaccttgggataccgtacgtcttgtcgactggtgtgggtggccatgggggaattgactcgcacatcctcctgcaacacagtcacgggtccttatggtctgggctgacaggtcaggtgcaccatagcgtaaacaggcaaagatgacggtgcagggcctaggcatggcttcgtcccgcgttcacacctcgaaattcgttagatacggtgattttgcagcacacactgacagggtagctcttccatctaccagacgctaccgtacgctgcgcttcgccctgaaatcagcatttgatcggttcaatgggacttttgaagtcagcctgtctttgcatcaatgttgaccggcctctccgggtggggcaatcgggatccgtcttgattcttcgctaggattccctcagaagaaggatgcagaatactccgggctgattcgcagaagtacaatcttgtctttaccggtctatcccagttggcatgtctggtgtagaagctggactgccctcagctcacccgcactctatttagaccggcccagtccccctccccagctttccgcctcactttctctttgcctctcctcaaggtctcttctctcttgcctttcttccaagtctcaatcctcgccagtatatactcaattgatccatcacaatggctgccgacatccccaagactatgaaggccctcctgtaagtcgcacaactggatgctccttggtgaagctcactcactcattgctttaggtacgataagcccgaggtgcacaagatcgccgagatcccggtcccaacgcttcgcgagaacgatgtcttggtaggagtaaagagccggcggtctcagtatgcttggttaacacaattggtcatacagatcaaggtcaaggcgtgcggtgtctgcggtaccgatctccacattcacgagggtgaattcattgcacaggtaggccattgcttaaccacgtcaggtattgagctgtgttgacattcctcacagttccctctggttccaggtacgtcgggcgtcctcggccctagccgcgggagcggagacagtggaaacagatattagtgctgacaccatcaggccacgagactgtcggtgtcgttgcagcaatgggtcccaagggcaaaggctttgaaatcggcgatcgtgtcgtcgcgacaattctgagcttttgcgggagtgtttttattgtcgtcggggcattaggtgttttgcgagattttcaggcccacggtgtaaccatgaacgggggcttgcggagtactgcgcctaccctggtacgcacggctaacatctgtggtctgtcacttttgttgacaagagacagctggcagggtcttcaaaatccagaatctctctgacgttgatgccacactcctcgagcctgcttcatgcgcggcccacggtcttgacaagatcgctccgaagatgggctcccgtgtccttctcttcggcgccggtcccaccggcctggtgtgttcatattgaatatccggcatgcataaacatactgacagccctagattctcgcccaactactccgcctgaacggtggatgccacgtcgtagtctgtgctcctgagggtctcaagatggagctcgcaaaatccctcggcgctggcgacgagtatatcggactgtcgcgccaggaccccagtgctcagttcaacaagctcaaggccgacaacccctacggcttcgatattgtcgtcgaggccaccggtaacgtcaaaatccttgaagactccatcaactatgtgcgccgcggcggtaaactcgtcgtgtacggcgtttacgccaacaaggaccgcgtttcgtggccccccagcaagatctgtaagtctttcttgctttatggaggctggaacttacaatgaactgtatagtcggcgacgaaatccaaatcatcggcagcttctccgaagtctacaaattccccgccgccattgactacctcgactccggcaaggtcaaggtttcgggcattgtcaacaaagtgtataaaattgagcagtgggaggagtgtcttcaatcaatgcgaaataagagcgccatcaaggctgctatcgtttttgaatagacaatagacggtgtgggttggaatgcatgagtggacgctttggggactaaaggttggtatatgacacaaatttagaaagaacttggtcatagacaatatatagcgttttagaatgacatctagattactgcttatatatcattcttccgccaccaaggtccttagtccttacatggggtccatccgccatacttcctgggggcactgcgggccccatgcatgactacctaaataggactagcccctgtccagtgtccacagctgatcttatcgataagttcgtcacttgagcttcatttcaccacgcaacttcaattccatttcgcctcaatttcacagcgaaacgtgtatctaaaatggtcaaaccacttacattcaaaggcgacaagcccaaatccaaaaagcgcaagaatccctcctccacctccaccgacttctccgcgcccgcaaaactccctaaacaatcacaatcctcctccgacctccgacaagatcaaactccatactccaacgaagaagccgaaaacaccgctgaagaccaaagttgggtctccgcggacacaacatctgacatatcaggcccaatccttattgtccttccctccgacccactgacatgcatagcctcagacatgaacggaaaggtcttcgcaagcgagctggagaacctgattgacggagatgcaaggacggccgaaccgcacgacgtgcggcaagtgtgggttgcgacgagagttgcggggacggaaggcttcagtttgaagggggcgcatgggaggttcgtcttacaacatgatcttaccgtggctggatagagttaagagttttaatgtggttcaggtatctctcctgcgacaaatacggcctcttcagcgcgactgcctccgcaatttcccagcacgagagctttctcatccacccctcccccgatatcccaggggcattcttcatgcagactcaaggtgggacaggggagagcgatacatttgtttcggtgaaagagggcgcgaagggcgttgagattcggggcgacgaaaatagtctgtcatttcagacgacgctgcgcgtgcgtatgcaggcgcgcttcaagccgaggatcaaggcgaacaaggagacgaaggcgcgggagaagattagtcggaaggagttagaggaaattgtgggcaggaggttgaatgaggatgaagtcaagagattgaggaaggcgaggagggagggaaactttcatgaggaggttctggatgttagggtacgggggaagcatgataagtttgcttaatagtttaggatgtcattgcgctatattatatagactcttgataggattgtccgtggagaaaacgaatccttactggctacagataacagccgcatgaataaatatatgtatttcatgggtattggaaatgctattgattacttcggtggtgcgattctagataagaaggcagtattctatatcgatgtgctgatagggtatcacgaagcccacaatgagacaactcaataccaagcctgtgaaagcagctacataccccgcatgctaacccgctcgtatacagcgtcaggaatagatatgggaaagcatcccggttcgagcacacttttcttgcagagcgggcagagactgctactttgtgtcaaagacatatcgatacactcgggatgatagatgtggccacacggcagctcgcgtacggtggatgaagcggggataaagtcatcgaggcagatggcacatattgtttgtggatggctcagtcgctttatgtgtctcgggcaacaaaaaccagaataagctgttgtcggagagaatggcctgtatggacatggttgtagtggagtattgccgctttctgcgttggctgttttgggaccttgttcagcgtcagtggtctcttcggctttgacgtagctgccgtatttcgtcatatgtgctttcgtttctgcgtcctctttctcagctttcatccgttcagtcgtggctctttcctaccacatcaggctctaccacggtttattgcagttgtcagtgctccttgtgtgaggtactggctgtcagaaccgtctagacctggatagacatatagtggaagcctagcgagaaactctcgcggaaccctgaaaggtcggagatcatacggttggtgatccactgcgcttgcttcaagctgccgctgtagaatttcccggcgtcgtctctgcaagagttgataaagaaggagaaggatcaggcagatgactagaatagtcccaaggatggctaacaagaagccccagatagtcggtgttttccgtccatgtttctctaatgcatgcattaatcacggctctgcgcatcaagaatcctcagagtgagctcacccaggtcaatgacactaaaaagcagcaccctccacgattcggattccgaaagcgccacgaactcattactctgatcttgtggaagcgtcctattgtttgagtaccatgatagttgcttcataagagcgattcctgccggaccaggaatcgcgtagactggatacatattctcactctcccaggacgattcaccatgcaatagccacgttgaatcagctggcggcggtggtttggtgtcgtcactagctggtagaaagaacattagggcctcgcttcctgcgcgtctggcagcgtccaaaaatgactggctgcaattaggcgttaaccacggtgcgaggccaatagtatgatatccaaatgaggttacgtcttgatgccgagtcacattagctggaatgaacggggcggtaatgttgttgcatgggtcatgactgttgagactgggaacgaaaagtagaccctcaatgggtccatctttcggagcatgctgggcagagagcgtctgtatgttcccatcaagagtaaagtgaaaaggtgcagttccctagtaggattgctattcagcctcctggtctgtatccaatgacagcgatcatcgccattgggaacatacattaatcgatggtgtcgagttgctcgctttaccggggccggcaaaaagcgtagcagccgtcgtaagagatatggcagctataggaacagaacattagccaacgaccagcggctaacatcaagactgaacgcaagctcaagtttggagcaacacatcaggaaccatacacatatatgaccacttctgagtctaagtccagcaaatacctcatcagatacgcattgtcgattcaaattgggcggtcaggttcaggcccatctaattgcaactagactttggaggatacgagatttgactcaatgatccaggaaggttgatacgtcaaatcaacccagctgagcaaccggatgttttatttgctgtcaggcagtgaaaagtcatgcagggagagtttcggaagcctcggatgaaaagcgatacaggcgaaagaatttttttttcacctccagcgtacgagagcctgccactgaaatcaaggctagatcgtttcccagtctatttgtagtatgacgctattcgaagtggagcgctatcgacgtttgcggacaatcaagcagcggagatgacaaggaataggcagctcgtgcgacaggtttgccaaggacgacttcttctgttgatgtctgcatccgactgggcatcagcatgattatagctcgaggccacagaactagaagctgcaaggctgaaaggccaagacgtcgatcttgtttactgcatcttcatcgaaaagcccaagtggcgcttaagttataagcgacagtatatcctgacacagcatcagagtggacaaagcgtgatttcctggtattctgtcaacatcattcactcttccaagaagcttcacaggcatcagtttcatccaaacggctacttactccatagagtacgggagtgcagatcatgggccgtgcccgctctaagttgtctccttattctagaaccgccaagctcttcttttccacatacagttggtgcagtatcttatctccatgtgatatcacgtgcgacgacctcaattggcaacaaccggaccgcgttgtgattccccgtgggcactaaactagaacatcactatcatccccaactccatatttatctttccttccaaacatactcagtgatattcagtatctgttacggccgcaacggtaaaagcatgaacatgggctatttgagcccaatccaatagcgccatcctgattcgtacctaccactagcttatgcttagcagtccagttacaacttgaagatgccctctgcaaacaaaggcaagggaaaggaccgcgatgtgcgaccgtcgcgaagccgcaacacgacccccagctctgggttcggcgcagcgccggctccgacatctgcccccgttaccagctaccttgaaaacgacgcgtccaaactagtgattccggtgaccatacaatattcggagatcctcgaacgcatgggtggggtaggccccattccggactcgaaatccttggagctgttgatggaacacctaaagtcgctcagccaatctgctgaggctcgtggtgatgcctgcaacgccgggatcagggagctttctcagaagcgcaaggaagttgtggatgaacctgagccgtatgaaggcgacgaccgcgttaagatgaagcgtgaagatgacgatgaggaagaaagcaaatggggcaaggcaggaaagctcaagaagcgaaaagaccggggcagcagttcgaaggaagagcggccattggcccatggagctcgtgaaataacccgccaggatggcggagatgcaaaggtggaaggtggtaagtctttataaatcacttcagatcgattgtctgtactctaaccggtcacttgcagccacgtcgccagcatcaaagaaatccaagaatgcagtgtcggatgagatgtcatcactatctccgccgtcattggcatcgcctcgccaggaagttgatgacgcaaatgcgggctcgcctggttctgatgacagctctgattctcaccaacctgagcccgcgccagccgtacctcagatccaagtcttcggtcccaacccgcttaagttcgatgatcctacaatataccatatccgggaagtcacgccaaacatgacagatgaagagaagaaggagatatatagtgtcaacgtcttcccttcaagcgacttgcgccacttgatggctgggactcctccagaccgtgatttcagtaacgccaaacctaccaaccaggtgaacaacaacacatttctcgtttgggttgacccttatgtccggcccatgatggaggaagatatagctttcctgaaagaaaaggtctattccgcctcgagctcatgcatgcaacatctcactaattctttcagggcgatcgagttacgccatttctgatgccgaaacgagggaagagaaaatatacagaaatctgggcagaagaagacggtcttatgaatatcgaccaaacaaacggcgatcgagaacgattgcctctgaatcaaggccgaggtaatatcgatcaggtaacggatgagactatagagacagacaaagtctctgtaggcccgttagtcagccgcctttattccttgctacggtacgagcatcgtgctcccgaagaaaacaccacaaacgggagcaccaatgctgatgtatcggtgaatggtatgaacggagattcaatggatatcgaccatccgacaggagagtcagaaaacaaaccacagccatctgcaacaacgttccgcgccgcatcgcccagcggcttcaaagtccccgccgcgaagctcgaccacgcacagctagacgaacgattaaaagctgagctgcgccacgtcggcttcctcgggccagacgacaatccagactatgacgctcactatgacgacgacatcgcgcagcgcctccgcctcttgcaaagcgaactcaagaaacagatgattattaacagtgcgcggaaagcgcggctcctcgaagtcgcccgcgagcgcatggcgtaccaggagtacatgacaatacacgacgatctagattcgcaagtacagcaagcctacttgaaacgaacaaggacgctaggcaagagcaaaaaaggctcccaggcgaaacatcgacctggtggtgccggcggcggaagccacgtcgtcagcgcggctggcattagccggcccgctattggagacgtggctcggacccttatggaccgacgtaagcgctggcgcgactgtatcgggccagtcttcaaagattgcaagactactgttccaggcccgggcgagagcctgtttaccccctccgttatggcagagtacgagaaggcagaattggatgggtgggaggaggagcaggaatgattctttcattttcttgcagtctctcgtgacctcagtcactaggtcttgaattcagatgattgcattcctggttttatttggtttggcgcattatggagcatatttttcttaatgggaggtgttggaaatcattatctatgggaggttttgtgtgttgtgtgattattgtttctcaaaggaacataagcatatgagttcgtatgcatgtctacttagttaagtcctgagggaacagcgaacgaaattgggtaccaattgcaagcaaacttattatggatcctagattaatcatcaacgatgcactattaggacctcaccctgatagcgcttcaaccgtgccgtcagctcccgctcgctgatttctagctccgtacatatctggtcaaaacagtgcatcccatcaaggtatttggctagatctttattgtcgatgaaatcctcatcatcgtcgtcatcatatagcggtgcggagcgactcccgctatacactgaggcacggtccttgtccttcccatcttcactgcgataattatgattacggtgatggtgctgattgtgatggtgttgttggtgttgcgcaataggcggaggatcatcacctgcactagaggcgtaaggactatttgcgccggtcccaggaccgcgcgaagatggtccgctgtgctggtagtgggagcgcggtgttgtagcgcccgacttgaactgcggagcagggttaccggttgctatagcgtatttatgtacgcggtacaagaagcctttgataataccgaaggtgatgaagcggcgaatatcaatgtgagcaagttggcggctgtgctggaggtaccactgcttaacgctctggccttgtttcaggctagcgtataactccacgatgccgacgccgtcaactacttcccggttgccaatggaattagttgacattgctaatgggtcggtggggcttcgggttgaggagatgagtgcgcttggatttcgttgactgggggtcgctgtgggactaatgttttcgcttgtgctaggtgcaatactgaaagtcccccgactaggcattgattccccaacgggtggccaagcagcgtctttatcatgcccgggggggatgaccgctggtgtggtgggtgccgtcatcggggaggcgaaaagggtattgacgtagcgggcgcattcgcgttgcatgttttcatctgcggcaattgtggagctgaatagagcagtgggcgcgtagatagccgaaaaggaaaagatgtcgagaaggaagatgcagccgtagtaaagaagatgccggattgcgcggcaggtgagggaaaagtccgtgtcggcgaggagtgagatgatgcgaatactgtttactccgttgatgtgcgggacaatctggcacataatagtcaggacatcatctgtttatacatatcttcctgatcatatacatacgcgttgcagggtcagatcccagttctcgtcgaggaaggcttgatagcggacagtgaataagggcacctgccaggcgcgaacgggaggcggattagggtatacggggaagagctttatattcagtgtattcagctcatctgtgtcctggttagttccagtccgagaaaagttatgagaaaacataccgattgggatcatgcattcgcagtagttgttcaagtcttccattaaagtctcacacaagctgtacacctttccctcaccactctttgaatgatctcgcgacaaaaacccgctttgttcctccaacccgtgcatcaaatccgccagtttctggacaacgctcttgtagctgctgaaatcttcctcctccgccagtacaaggcaaaagttgaagatgaactcattccggtcataccgaggagacttcatgcatatcggatagcccagaatacggtatccattcgtgcacacttgaatgaggtttccgcaaagctcctggcgaggaatcacaaagaacgatatgtcggagaaggtgaagaaggggggctgcgacgcagccgtgttggagaaagtaatcgctccatcagggacctggtgaacgacctttgggcctttcgagttgcatcagtcaatcattcaggagccgtaagtgtcatatggcctttaacttaccttcctgtgtgtcgaatttgctgtagaaaatggccttgatcatgattgaggagcgacgaccgacgtttaggtcaacggaacgaagatcggctttgtcccgcaaatcgaatgcggcattggacatcgagtacaggctagtcgatcagttctagcgctcgtggtagacgaggattgcgttttcgccggtctccaggggggggacattgtagtatgtgctgactcattgattccatgatgactggttattgcaacagaagacagaaaacttatgcgtcacaggcgtggtctcttgacaactacgaccttgttctctctgttcgtgctcaccaggaaagtgtcctggacttgtacctttcggaaaagggagacctgctcttttccagcggaggcgattctgtcgtcaatgtacaaaccctctatacggctactgtatatttcccatttgcggctgactagttgtaggttttgtctacccgtacctttgagcggctctattccatccattcccatcatgatgtcggcgatctctttgctgtgtcgtactcgccgagcctgaacaccatttactgcggtgcccagaacaccagtatccaagtaagcgtcttctattttcgaaatatccgtacctctgtctgattctttccagtggtgcaacctttcccaatcaggagcagcatctactcagcaatctgcggctcatttatccaagcgaacacatcgtttctttgactctaagggtcctgatggcactcgcgctcctcgagcggacggcaattccgtggccgacgggggccaggtactcaccttcaagcgtgaccatcacaatctatttgctcaccatggatacgtttacaccatgactcttgttcgagggctgctcgaatcctcgcctaacgacgaggttcttttaaccggagcgggcgacggagttgtcaagctttggcgtttagagcaggggaagcccgattctgcccccgcgttaatggcaaggttgcataacacggatcctgtactctcggtagctgttgaaggatcgtttctctactgtggtttgtcaggcggcgccctaaacatttggaacttagattcccatcagctcgtgaagcgaatcgctgcccatactggtgatctgtgggcggtagatattatccacggaatggccgtatgcggagattcgaacgggattgtaaaggtacgctcagattcatatgtgagaaactcaccgctaaaccagagtatagaaattcaactcacgatttgaagaagttggcagttgggccgctcatgaaggcactatgctggcctctgctgccggtaaatttaaggatcggcatatctacgctaccggaggaaatgacaatactgttggaatatgggatttgacagacgtgtcattgtctgcgagcgagaagcccccaatcgacaatggtgagtatcttggcctatctgacctagactaattgctgacatgggtacagatgagatggtaagctgccttgccaagctggtagctttcaagacgatctcagccagtccaaaattcgccggtgaatgcaaccagggtgcagctttccttcgccgacattgtatctacttgggagctaagacgaagcttttaaccaccggcgaggataccaatcccattgtcttcgcccggtttagtgcgatatcgcctgaaacaacaaataagacgatattgttttacggacattatgatgtggtcggagcggacgctaaccggcaaaggtggaagacagatccatatcaactaacttctatggacggattcttgtacggccgtggtgtatccgacaataaaggccctatcctcgccgctttgtacgcagcggcaggtctggcgcggcagaagacccttcgatgcaacgttgtatttctccttgagggagaggaagagtccgggtccca

SEQ ID NO: 5939 - DNA, 1526 bp, Emericella nidulans
cgtcatcgttgggttaaaagctgaattcggtgaagcacggtattttgagaactctgattcccagtcttcggcattcataggaggaagcgatccggtgacagggcgccattcggtaatactcagtctgatcatggtcagtggatgtcaaccagcgctctaggtgcgacctacccggactctgttagcctagtcaggcctccaaagacaacgataccaaacacactggccgcactggctagtagccagtatgcgacacttttgctgctgacatcgggaaaagctgactttgacgcttctggtttcgcgccgttgacagcagcggagtcagaggcatatcgcgcaaatgcttttctagccttactcctcaaaaatgtcgcatccattttgtgccgctctgaaagatgggtgcggaggaagtgcgaaggcccgtcttggtgccataatgtagactccggacgaggcattgatggcaggtaaatgatccactagacagtcgcggtgcaagccgtctaaatatgagcgcagaactcccaagggacgccatgatcacggcaatgttgggggcttggactcattcgagggaaaagcgtcaaaatatcgcgagcggaggttgcggcagcggcgggcattccggggccttggcttagagccaattagagtgccagaatttgtggcctgtagattgactaaacaatcatacgatgtcaaaatgagctaaaagagcaccgaaattgtcaatccagaaaaggaattccatcgacaagcctttgactatatgctataggctcagatagaaattagtagtgatctgtgacttcggctgcaatgtccctgccgttctatttgatcgattcctgaggcagaagctaccccgtttcggcttagctagctttggtgctcaaagcgctaccaacagcgcagacgactcgtacatctcaattcatacgccattggacaaccactcatcctgacaatgtcctatgcggttgaaacgaagaagcgcaaattccaccgagtgctcgaatcccttaccaaaccttcaagtcccggatccagccaatcctcgagcgttgcggcagctcagcataccccgtctgcgaaaagggcccgtctaagcgtgaaagatgatagcatccttacatctgtgcggaaagatgtcctgaagcttgcacgatctgcgtcccgcgcttcgtctgtatcaccacagtcccgacccagctttgttccttgggaccgcgagcgtttcttagagcggttagagacgtttcggcgggtagatcgctggtcgccgaagccatcggcggtcaatgaggtggaatgggctaaacgtggctggatatgtacagatgtatcccgtgttacgtgtgtaggaggctgtggtggctccgttgtcgtcaaaatccccgatgaactggacgagctagatggttacgacgccgataagatccaggaaaggaatgaagtccgtgagtgacaacttacattgggtcacgatagttgggcactaataaaggccaggcgcaaaa

SEQ ID NO: 5940 - DNA, 10108 bp, Emericella nidulans
  unsure (1)..(10108): unsure at all n locations
actggactccttaccctctcgaccggataccgaaaggaatttttccccctgttccgaaacgcgccacaccggggcagcttctaggtcccagcttttggctcatgactgcgctatccctgatatagcgtcagagaagccttcagtcgatgcactttcagtggccccgtctctgcccggagctgagaaagaacgccggaccgnnacgagaccccaaatgctcccgccaacggggccggagcggatcgtggtccgctcatacgtattggagcagcgcgctcgccgtgatgaagccaagcgtgacgaggctcctgatccccttgcgaacgcagagagtccggtgcgatcattcaagcagcctcaaccattatcggccggtttgcaaaaatcagcggaactttccccaccaactgctccagctgccatggttgccaaggacggtacgatcacccctgagtcatcgcctagcaaagtaggctcatccgcagtctttgcagacgcaggacggggcgcccactcagtgggacgatccgcgtcgccgggatcgctcacttcacctcgcatgcattcggcgagtattcctactggtccccgggcacttcaacagcggccccaaccgtctcgcggacctgccaaaggtaacaaacaatgggttcgtcctggatataatcgtccacattttgcgacaagtccgacattaccaccaaagagggattcaattgatatcaaggacaggagctcgtctttcggcgaagaagttaagcgagatatgaaaacggaagttgatgagcagctgccgagcccaaatgcgaatagacctgccgttgaaaaagatagggctgcgctcaaagagaaagagaatattcccgctcccgaatcgtccccaaagccgcctatagaaccagctacgaaaccccaagaccgctcgcctagccctccccaggtacaggcggtatcacctaaacccaccgaagacaagatggaggatgtcattccagactttgggaggtctagtgatgaagaggaggatgagaatgtgttcacacaggaatacttggaagaaagaaagcgaatctttgagaaagacatgcaaatcctccgtgctgaaatgcctacctcgcctctggaagatccgaccatcgtcgcattacttatgcgaatccaacttctagggatgattgcaaatgagactgagcctgaaaaggcccaggagcctacggctccaacggatgatgttgttgaagaggaagtgcaggccactcctcaggataatgacttcggcaagaagaccgaggagcaggagtcttccacaaagcttgttctggattcgctcccagcagcggtgtctgtagcgaatcttccatttctacaatctggccctcctacgcccgtgtccgacctcgatgtataccaagagaatacttccacgcatgatcgcataaaggcgattttgcgtgaggagttgattgaccaccgcaaggccgtagctaagaaaaatgcggagctgcggatgcaatggttggaaaaatacaaacaatggagattaagtgtgtgggagatggaccgtgccaaagagaaggataaggcctctgtgaccccagggcttacccctcctcctgcaccgaccgcaccagtaacgccgaaccccgtcttagaaggccgctccgaggggcgacgctacaaaggtaacagcgaactggattttcaaaatgctctccgtgcgtctgagatctctgctcaggaggagctcgcgcggcgtcgcgagaataaggctactgcgtatccagatctcactcgtgaggcggtgattccggacatgcttgaacctcgggaagccaaagccctcatatacaaagatacaaacaacattgttgatccgtctcgtgccatggaggtgttcggcttcctaccaccgccaaatgatttcacgcctgaggagcacgaaacgttcaccgatgcttttatggcccaccccaagaaatggggaaagatcgcagaagcgttacctgggcgggatttcaaacagtgtatcattcactattatctgaccaaggaagaaatcaagtacaaggccaagttgaataagcgatggagtcgccgtgggcgtgctagaagatctgcaagggctcctaaatcgaatgcacttatggccgacctgggcgtcgtcaaacctgactatgacggtgaggaggagcccacacctgttaccgacaccggccgcccgcgtcgtgcagctgctccgacattcggtggagataattctgcggatacggagcagagtgccagcggacgtctgggtaatgccgcaaaagacagtgaaacgggcgagaagccttcgggaaggcggtgagcacgcggagggactggcgctcgcggnggccgcagaggtaaggcagctcagcagcagcagcagcagcaacaacaacaacaacaacaacagcagcagcagcagcaacagcaagcctcagtgccaccacagcaagatcagcccaacctaacgacgccgactgtatcgaccatctcggtaccaactacagcaatcacaccaatggctgctattgcaaattccgatgtcccggagatgggtgcggaagcggatgctgatgctggtgttgtgaggttcaaggaccaactagaggatgaccgtgtcgagatgcccccacgttcaaagtctggcaggggtcgccctaaggatgcggtatatgctttcgagccttcagaaacagagagcacgacagtcacccctgtcaatggctccgtccggtcggcggagatgagctacaacacgccaccgacgaccagctattggtcggttcctgaggtccgcgatttcccattgctcctagcacacttcggcagggactttgaaggtatttctaatttcatgaaaacgaagtctacacaaatggtgagcaacaaccccttaaccgaatctagcggagaattctgtttctgactattcattgtcatattcaggtcaaaaactacttccaacgacaaatcgatcatggcaagaaggagcttgaggagattgttgcggatgcggagagcaaaaaggcccggggtgaacctccgaacccgttgccaattcaaaacttcacgtctaaacgtcggtatgaagcgacgccttcggccgttagtatgtccaggcctcttgcgccacttacggaggcgaccccggagttggacgagaaccgtctcgcgcccactgccagacacactgcaatgccttcgcagccaatctccctacactctcgtcctcttcacgagcgggagcgtagtgtttctcgatatccaccgctcgcgcaagccagcagtgccccaatagttcctcagtcacccgcaatgtcggtggccgacgagtcgtcccggacgatccatacccaacctgggttgccgccgcgaatgcaggggccacgcttaggttacttcgacgagaggccgccgactgtgctatcccatgcaagttcccgaactcttgatcatcccttatcttcacggcaagttgctgtgtctgcgccagatatgacgaggatggagccgctgtccagtcaagggttcaggggcgtagatgtgcacggatcgcctttgctgtctagccaaagttcaacagctccgccacaaccctacctacaacctttggcacagccccacgctcagacgccatcgcttatgtctcatggctcgcactcacgccagcctagtttgacaaagcctccaaactccccacttcagggtcttggaaggcacgagtcagagatgtcccatattcgacgcgattccttgggccagaggtctttctatccgctttctgtgcatcacgttgtggcttcgcagccacctcccgtcatgtccccgtctcgagatcctctccgcacgactttgaacccggttgaaccccctgaacctcctcgccaggtgcctgccaagcgatctaacattatgagtattctaaacgatgaacccgaggagccacaacctaaaaagcggttcgcaagcgatcaggcttcctccgtcactggaactgctgttggctctccctcgcggcctgtgtacactggaggatcttcacttccgcagtcaattcgacaagaagagcccatactctcgacttctcagcaaaaaggtccatcttatcctcaacaaagtccctatctgccgccttcgcgcccgtattccgagtatccctcttacaactcaacgacggcgacatcgggaactgctgggaacactgattggctaggtcgattcgatcctcgaggtcaacagcaatcccaacaaccatcctcggctcctccgccgcccagcagccgtccacctacaactctggcctcacaacccccatactcaccttttgcctctggtcaaatctcgtctagtcagctatcaaatctcaatgctccgtcccctgtgccaacaccgcctccggtgccggcttctcagcggcagccataccctgcttctgtttacgcgccatcaccagcgccacatccccaggctacgagcgcgggatcacgtgatgtgtcttctcagggatccatgtacaggtctggcattaactccccaacattgcggagtaatcatgtcacatacccatcgcgttcggggctctcctcgacatcatcgtatggttcggcaacacagacagtgccgacttctggacatatgccaggcacgcctcaacaacattcaagtgggcctccggcatatcagcacatgcaacccctggtcgcacatcagcctcagcctcatcgaccgcacatgggcctagccggagcacactacggtcgcagcacgccgccgccgcaatcacaagcgtccagaatgccgcctctagcgggtcccggatcccaacagataggtcgttcctacacccctccggtaatgctgcagccgaactcgtcaggtgggatggcctatgcaccaagtgggcctgtgggttcccaccctcttggagcacggccggcgggacctggctctctgagtgaatcgatgtctgggccgcatggaggctcggctcataatcgggtttacagtcaaggatcgaatccgtttcccggaccgttaccgtctcagcattccagtcggtgacatggaaatctataccgccatatgttgggaaagatatgcattgaacgatgtattataggacactcattaaactcatacattccctttctcacggagtttcgaggtttggccggatatgtttcatagtcatgagttaatgtacagtagacgactcaatagaatcagtgactaatgttcaacaaagattactgatgctcactgcagtgcggtgttggcctcggcgaatgtcattgtgcctttcaaccctggcaagaaaaacagcaccgatcctgatcaaacaggatatgcttcgctgtcttcatgtaggatgatcatgacgcaggacaagagaccgcccaacgcgtcttaggattctgtcggagtcttcggagtctcggcttcctgccttggtaagcttgacagtgctaaggttaggataagatgaacgttatattggcggtgtctttactattaactcctccagttctggtggggaagggcggtttctcttgcatcgtatgtctataaatacaagtctagattattttatccagagagcggcgacattttaatgtattgcggtatctaccctaaatacagtcccagcaggtagttcaaggcatactgcgcactatgctgactgatccaagctagtgatgtcacataatgagcggcacaggaatcgaactgttgcatcatctctggatccccagccaatctctcagcaaacgagattctttgcctccttttcgtcagcatagaatcgcttatcatatgctctccgggtaacccgttcactcccgcagtaaccgcccttgatccaccacccccatcgcttttttcccccgttcccttgttcgcgatgatgtcgtgtaaacctggcgttgaccctcgaatcgctgcggagcccatcatgttcttggccggtcaatgacagttcgcagatctttgggatctgactcgaatgcatttcgttgcataacttctcatgaaatgattgcgaggagctcgtaatcacattcgctgccgtgggcaaagagatagctggttccgcctggtcaggatatgacgtgtgtccgcgttatgagtcctgaaccgcagagtacactatccataacatggggtaaaacatcagatataagggtggagtctcgctcgttcctgggaatgggactctcaaccgtggagactattctcaattgcagcaatcactggcagttcttttccagtgaccaagctgagcttctgccctaatattcatatatcctgaccctccttatttccactcgacatctgcccgttccctcacgcgggttcttatagacgtgcccgcaatatggcggtcgaagacgatgcccagaaccccctgcatacgggcatttatgagaaggagaaacagcataataaggaagagcggacaaatccatccgaacaggccgacaatacccacgccgaacatgcttcgcgatcatccagagacagtgactcctacggcaaaaccaggccggatggaaaacgagagctgacggaggacgaagcgtacgatgcgcttgggttctgcttcccgtggtataaaaagtggacaatcctcaccgtcatctttgttgtgcaaatgtctatgaacttcaacagcagcacttactcgaatgctgtttccggcctgacagaggagttcaatatcagcgcgcaagcagcgcgagtcggccaaatgattttcttggtcgcctacgcttttggctgtgaattgtgggcaccatggagtgaggagtttggccgatggcctatcatgcagctcagcttgacgtttatgaacatctggcagattccttcggccctggccccaaacttcggaactatggttgtcagtcgtttcctgggtggtatctccttagctggaggctctgtgacgcttggggtgagttatcatgatcctcgctgacgggacgttgaaaagactgtcagaccttcatgatgaatagcaaaagtagcagagagaaatatggctgactttccgcatccagatgacggctgatatgtgggaggccgacgatcaaggctttgcggtggcatatgtggtactttcctcagtgggtggtacaacaatcgggcccttcttcggtggtatgatggagcagtggctgcactggcgctggaacttctggatccagctcatcattggcggcgttacccagctattgcatctcttcctcgttcaggaaacgcgcgcaactatcctccttgaccgcgaggccaaacgccgtcgcaagtccggggaagaccccaacgtctacggccccaatgagctgaagtccccaagactagacttcaaagagtttcttgctgtctggcgccgaccctttgaaatgttcctccgcgaaccgatcgtgctctgcctttctttgctttctggtttctctgacgcgctaatcttcacctccatcgagtcgttcgctcttgtcttcaagcagtgggggtttgaccctctgaggatcggactctgctttgcaacgattatcataggataccttgtggcctacgcgatcttcatcccggacatctggcgtcagcgcaagatccgcaaggagcacggtaatgccgcccgcctaccagagcgtcgccttctactccttctcttcatcgctccgctagaagccatcggattgtttggattcgcgtggaccaccatggggccagagtataatcactggattgcccctctaatcttcatgttcctgatcgcaatcgccaactatggcatttatatggcgaccatcgactacatggttgccgcctatggcccgtactccgcctccgcgactggaggcaacggtttcgctcgtgatttcctcgccggcttatctgccatgtacgcaacgcccatgtacgagaacatcggtggccgattgcacttgcagtgggcgagtacgatcctcgctatcttggctatccttgtcactatccctatctacgtcttttactggaaaggaccgcagattcgggagaatagcaagtttgctcagacgctggcggccgaccgcgcccgtcacgagggtagaagggccagctatatgagtgccagagaaaagccctacgcggcatgataagactggctgtattgtaaatggggatatggatataacggattataatgcttgtactatacttacgaacatagcgaatttatatatttatccactatatatttgactcctgcgccacttctcacttgcgacctgaattagattttacagagcactacgtaccttgtagtctgctcattagacgtttatttctttcagcgtatgcctgaatatccacgtccagttgggctgatatgatggttatcttcggtgaggtcgggagggagtccatacactttccgctgtgggcttaatcgagcaataaccgggaagcgcggaacaagtcccgaaatcccgcgctgtaagcatcctttacttctccagctactcttactatgtatcgtaatgcctcaatactgaggtactttctctgtcgcaagcgcggatgacgcggacgacacacccccgaccccggaaatgtaccgtgcaccgcaagcagcatcagacgtcgattaacgtcagtcgtggccgaccagccagatataaaggccgtccttagacgacttgatcttactctggtttctaaaagttcactgattatcgcaaggtatccatgtctcttcaaacaatcgggatcgccactgtcgcggtggtctattttctcatccgctacttcaaccgcacagacatcccaaagatcaagggtctccctgaagttccaggcgtaccgatctttggcaacctcatccagctcggtgaccagcacgcgaccgtagcgcagaaatgggcgaagaaatttggacctgttttccaggttcgcatggggaataaagtgagttcagtgtctgcatttgtaacagacgacaatattgcgagaataattctgacctaacacagcgcgttgtcttcgcaaacaccttcgactctgtccgtcagctatggatcaaagatcagtccgcgctcatctcccggccgacctttcacaccttccacagtgtagtttccagctctcagggattcaccatcggaacgtcgccgtgggacgagtcgtgcaagcgtcgtcggaaggctgcagctacagccttgaaccgcccggctacccagtcgtatatgcctattatcgatcttgagtcgatgtcgagtatccgggaattgctcagggatagcgcgaatggaacaatggatatcaacccgacagcgtacttccagcggttcgcgttgaacacgagcttaacattgaactatggaatccgaatcgagggcaatgtgaacgatgagcttttgcgcgaaattgtcgatgtcgagcgcggggtgtcgaacttccggagtaccagcaaccagtggcaggactatatcccgctcctgagaatcttcccgaagatgaaccgcgaggctgaggagttccgggtgcggagagacaagtatcttacctatcttttggatgttctcaaggatcgcattgcaaagggaaccgacaagccctgtattactggaaacatcctcaaagaccctgaggctaagctcaatgatggtatgccgtccggtcctgtccgcgcttgaaggaaaataaagattaacagagtctagccgagattaaatcgatctgcttgaccatggtctccgccggcctcgatactgttccgggcaacttgatcatgggcatcgcgtacctcgcctccgaagacggccaaaggatccagaagcgcgcccacgacgagatcatgaaagtctacccggacggcgatgcatgggagaaatgcctgctcgaagagaaagtcccctacgtcacagctttggtcaaagaaacgctccgcttctggactgtcattcccatctgtctgcctagagaaaacaccaaggatattgtctggaacggagccgttatcctaagggaactgccttttgcatggtacctcagcacaatccacatgtcatatagacaatactgatttattatgaag

SEQ ID NO: 5941 - DNA, 16721 bp, Emericella nidulans
tggtgcttattgctttgcttttgctctggaaatcacgggaaacgatgcaataacacaaaaagccttattggggaaagcaatcgggctctaaagtttcagctgaaaagagaatgtcatcctgagatctgtcgacgcgctgcaatgcagactttgctcaaatgtgctttccccatgtcgtatacgacttccccgcctctgcaagcgctgctacgaaattactatacgtctccatagcaccgttccagtccggtcgatacgcagatcctgacggctccgcatcatcgtgacccgtggacgctgaacgtaatagcaagtcggtcatttgctgtctctttcttctggtgagcatgcgcacgcgcgttactgagggcctgagctcagcagcaccccgccccggggcggttcgccctggtttctattttggttacaaatgtcccctagcattgtagaggtcggctatgcctttgtaaatgtctcttttcttcaaccagttcaaccaggagccttggtatctcatctaatcgtcaaagctggcttgaagcaactgaaaactcctggaaagccccgtcggcccaaagacaccgttctagtccgccggtgagcgtcgagtagaacgagcgtggtggcgatatgatagcaaagaaaagaagcgaactagcctcatgtgggtcgtcaacgaggcttgtcacttgctttttcaatatccaggcacccaagcgatagggccgaagagggcttgggtagttgcaaggcagcgagatgcgaaatacagtatgaagatcagaagatcctagcttcataagatttgggccgcggctggtcgattggatcagaaatactgagcagacaaggttgacgttctggagagagctaggggattgtctttccctgaccctgccttgacttctttagacctagtattctttttgcgtgtttctttcttaatctgcgtggaggattccctgcgatcattgcttcgtcctctcttcaagacttgagtacttgaatacttgaatacgttcactgcagcttgttgctttaacgaagtcatcagtaacaaattgactaatagttctgcctgcccaactcattagagcaaccacaaaggtgcattgcctctctcaatgctctgccccgcattgtgaattgcaatgtgcttggaagatgcagaattatgtaaaaagatattggaagccatccaattcttccaaatactgcgccggtctctaatgtaccagtggtgtgccacaagagtacctaaactgtgcagtccttgggcgtaaggtcgctaagcggtgagcagtgaggacagtgtgggtccatgttttcccataataaacgaccagctgccgtttggtgacaccgctttccccatatgtcagcatttcttgaccgcgtcaagctcgacggatagtcaattgctgcagttttaacagacttgcccttcctgtcagagctcagttgtaagacgtataacatcacgctgattcgaaatcatggctgtcgacgttggtcatgttgcgtcccagcttgtgtctacggatcgcactcgagaaccgggtttcgatcgattctccttcgtccctttcctacgaaagagctatggcttcggcctcgtcaccgacgttcccgtatgcaaagcctacagcgaaggccactgcccattgggccctgcttgtccagaccgacatccgacaccgtcgcgagtaaccacatccacgaccacggcctccggtttggcgccttcaaccacacatgggtcacttgtctgcaagcacttcctcaaaggcctctgcaaaaagggcatgaagtgtgaatatctccacgaatacaatctccggcgcatgcagaatgccaatccttctcccggtctgggtattgtcctaatggggacgactgcctgtaccagcatgtccgggagcaggcgcgccttcctccgtgcgagcattacgaccagggattctgtccactgggcccgttgtgcgcgaaacggcatgttcgtcgtcgcctctgcccatactatgttgctggattttgtcctgaagggccaaactgtgcgaacgcccatcctcggtggtcggagaatctacccaagccaacaatacgagtagagaagacggaagaagaattggagcatgaaagaaacctgatccgcgaagagcaggagagggaacgggaaagagagcgtgaatggaggaacgaacgtggacgcggaggctttgggatgcgcggccgatatcgcggcagaggacgaggctaatctacacggctacggtgactggatctcacatatactcgaagtctacctgactcaaacaacgttcgtccggctaaccggcttcactcccgttgaccggttattcagtctacgcggaagaagcacgttcttctgaggatataagcgcttcatgcgtcggattcgaatatctgagcccattatgtagcatggacttgcatgtcaagcttatcagttacacaagcagcgtcggaacatattgagcggaaaggacattccaagtggaatagcgaatcttgataccaccgactaatgctgtacacccttcgaatatcggacgctaggactctgaccatggcagacgctgttactgcattgcgaaacaacctccttgtcggtatatagctgttgctgatacctcccttgaatacgaagtatgtttaacgattgagaggtcgtggatcgactgcattagttctcgaaacaagttagactgctatgcgacggtcctcagaagcgcgggtggtcaatgattctcaggagactttcatcgcacttgcttctgctggctccttcgacttgatactgaaccaagaccttggcgtgtcctcatgcacaccatgtaatgtcagcactagccttgtatatctacggttgcaagtttatcaagatagcgctataccagcctactatgctctgttgaacttacacggggtgtcgtccaaatattagttagtcaaagtctggctaagaaataaaaaagaatgaaaactagttcttttgcaatagattgtttatggctgtttatggctgagacaggagagtgtttggtgagatctgggtacacggtatgcggagacggagtagatgcggaaagaccagtctccgtacacttccatgactttcgaccaagaccaactctacgctgatgtcgtacacttgtgtggcaaatcgagccggtagatcacgaaattagcctgctttgcagcgagtatgatcctttgtattccgtaaatccgaaaccccctccagtaacttgcgaggcagagagacgctggagcctgcagtccaaaaaagctgcttaagccgtggttgaggcatcagacgtaccatacccgcagcccgcgcatttgtcaagtctctgtaagacggtactaaggacgagcaaaatggggaggatccacggattgtctgcattggccaatcagcaatagtcaatcgcatctgtaatcgatgacaaaagcatagagctcccatagctagaattaactaatccccctcctccgattcttataaagtattttgtctgtccgtctaatacttatatcctttcagactcaaatacataccaaacttctcactcttctcattttatcttccaattgaagcccaaacagtcacaatggctcccaagatcgccatcgtcttcgtacgtcattcagttgcattgctttacccgcaacctgtggagcatatactaacgaatggttttgctatagtactccatgtacggccacgttgagaagctggcccaggctgaactcaagggtattcaggccgccggtggtaatgccgacctctaccagatccaggagaccctgcctgaggaggtccttgccaagatgcacgctcctcccaagtcctctgtccccactctagagaagcccgagcagcttctggagtacgatgccgttctcttcggtatccctacccgttatggtaacttccctgcccagtggaaggccttctgggaccgcactggtggtatctgggctactggtggtttcttcggcaagtaggtaacacgaacagcggggaagtaatggaagtcattgacatctctatccaggtacgctggcctgttcgtctccacaggtacccttggtggtggccaggagtccactgcgatcgctgccatgagcaccctcacccatcacggtttcctctacgttcctcttggctacaagactgccttccctctcctctccaacctcgaagagatccacggtggtagcgcctggggcgctggtacctttgctgtgcgttttatttcttcaatggcgatgtagggttatggctaactgtgtctctagggtgccgatggctctcgccagcccaccaaacttgagctcgagatcgctgagactcagggcaagtccttctatgagcacgtctctcgtgtcaacttcgcgtgactacatggaagcaccgaagttgagtctcaagccaagcctgctcagcaacagacaactacacccaaaacggagaagcagaacagctctgaagcgaagaagtcagagaaggacaatgagggcggcccttgcggtctgcctaagaagtgtaacatcctctgattgacttggctatatacccatgcttgatttctcgtttagtggtgttattttgtttcttgatggaaaggagacttgatgattcatgaattggctttagaaaataatgacatataatccatccatttcttatatattctcataggttctgatatgctggatcccaatgcagctattatacaagcagtccattattgtacagacataatggtcatctataagaacttccccttcgagaacctcgatccaaaatccgctgctttactcattagctcccttcgttgcgcattcgtaagcttcgaagaaagcgccatatctttctccttatcaaaggcccttttactcgggtcatcttcgtcctccttttcccctttctccttgtccttcctcttcttctcctcgaccagtgacgacgcatcctcccccctcactcgctcattataccgctgaaccttttccctcattgcctgcgccaccttatcatcgcctctcgccccgacccccccagcatccggcccagaggacgaggaaatccccattgcttcatcctgcaaccgccttatcttctcctctggcgtctcagtccacgagctatccacgcctccccgtccggcgggcgcatttccgacccgcggcccgctctggaacttccgatttcgtagctttgtagggtccacccgcgaccgatctgagccgccagtgggcggcgcaagcatccatgcgtctcgtttgggcgccggctttgattcaacttctgatatatcatgtcgagaaagtgattgctctggcgctggttgttgcggtaccgagccggatggtggagggagactaggaccgaagtcatcatcgtcagagtccgagtctgggttgttgctactgtcgctgtgattatcagtgttggaagtgggtggtgggagcgatggcccgattactctgcggcgcttatcggaagcattgtctgtgtcccctgtcgcggccccagttgttgcgtgctggtcgagctttcgttttgaagggttatccatggtgtagatgtgaattataggctgtatagtgcaattcaccgcggactataaagtagtgacaaaggagctggtgcaaactaatcaaacagagttaaatcaaggcggtatgataggcggcggtaggtatttgcgcggcaaaaagcagcagccattacgacatgaactgtgctgacttgacttagtttccaccatcttctgttgcctttcctgcatatgtcctctacttctcagaaattactcaatctatggaatgagcataagtgagatagacataattctcatcctctaaacacctctacagcaccctacccatacccgtcgaactgccgccatgacatcccgcacgattattctgagattcgagagtcgaaacggccagtttcgcctgaatgtcagcccacaagatatgttcccatctctagaaacaaaggtatgacttaatattactctataccctgtttgggagcgaggtcgtcggaaaatgctgagttctgagctgtagattctggagcatcttcccccagacaccgaaccatcttcgatcaagctttccaacaaaccaattggcgctgctggtgacgagcgtttcttgaatactctggatggagtgtcttttgagcaagttgggcttaggtcagggtaccaattgcaggaagcggacagtcgctgatgctgggaatctaggcacggagacaagctctacatcggttatcaatcaaagcaggatctccaagatggtgccagtaatgggactgccgctggctcgtccgctaggcggttaaacggagctcctataaatcaagagattactcccacttcacgagcacaagccgacagagtcgcctccgttactgtcaagaacccgtgggatgctgttaggcaatcggctcttgacgaccgcttggagaagaaggatgggaaaattcatcgttctcgcgataacaagatgtgcaaacacagtgcgaagggcatgtgcgattactgcatgcctctagagccgtacgacccgaaatacctagccgagaagaagatcaagcatctttctttccattcatatctgcgcaagatcaatgccgcaaccaataaacccgaactcaaaagctcattcatgccacctctcagtgagccatactatagagtaaggacaacaggactaatttgagaggataataagtaggacttacccatttgtctcacttttgatcctatgtaggtcttttcgacactcttcacaaaaatactcatcagggctcatagcctcatccataatccccacacagccaccatgctgccagaccttgcatgaatcacattggatgaacatgctgccgatatcatctgacatcaggtctgacgagtccagagacgaatctaaaggattctcatccttgatcccactccgcgccccattgcgattgagggcctcgcggcgagagggtggaagcccaggataatcctgctgtccgcagaggcacctagtgatttcttcttcatcttcttcatcgacatcgtcgtcctcgccatctccaattttggagtgtacgtcattttcttcgtctcctctcgcgcgttggcgttggcgcgtctcggaaaatcgcccttgtcggcatcgtcatcggactgcgagcgtggagagggatttttgtggttcgatctcgtgcttctctctcgagtcatggaagctgaagaactggaagaattcgtatgctgaatcgctggcgagggctgtgaggtacgggcacgagaggaccgacgggggctcattgtggtggagtggttttacgcggaagagtaaggataaaaagtgcagaagctggtataggaaagctgtcaacgtcagacggcagagaaataaatcccagactctgccaaatagcggatgttgcaggcaggacgtgcccggagacaagtcgtcgcagatgattgagagctgggttctcgagcgactcgtgcagacggaaaaaggcgaacgaggataggagaggcggcaagatagggagagcaattgaaacataaatgacaaatagatgcagatagagctcatactatggccagaggactacatagtaagcaaaaaatcaggaagaggggtcagaagacagaaaggcgaagacggaaaggaccagagcagacggagggaaatcgctctttccagtcttggaccgccttgcctttccccgctctcctcaccttcgcccgtctccatcgattccgtccaagaacgtacacactaactgcctgagacactgagaacgaaaagctatagcttttgacctggaagtagagaagaagttcgagaatcgtcttgcaagtggcggcgctactactccccattttgcgtgaaattccgttacgcaccgtaggagttcatctttaccagtatcacttcttcgtctttaatgacgaatatcgtttttcgcttcagcaacctttatccgactcctctgcattggctttcaaggctccaagttggtaccatcaaatcctttgcccgtcaccttcggcccgcgagctactaggagagcagcctgagtcacacagtccaatctacagtgcgatgttcgatccagcttattattctgcattatactccccgagaaccttccgatcctgatggttaattttgcgacgtaccgtttagtctgagttggggctcatagtcatagggcagcgatggacgccaccgttcccaagtctcggcttgaggtactacaaggaagcatgaattcacacgaggaaccatcccagcgcatagtctaaaatgacatacattgcatcgtaccgagaaacccggcagacttattggagtcaaatttaagcatggctttaaaaaatggtgtacatctgggtttcatgattgtatgcgaacggttgcaattcggtcacggctgtagcttgagtagcagccttaagaacggtactggacaatatttgaacaaatgttccggtgctatgccgcagccactactgtgggagggaaatcgaggccatataggtaagcttggaaatagtaatgacgccttgctcctaataatagtcgcatatgatgtatagcagcaaatatatcatgcaccttgaaactgaaactataatgatatctgcagaattatatgcgagttgaagttggtactattgtaggtgcaggacggattgccctagaacaatcgacgcctcgctgcctgaggctgacagctcgtctctgggggatttgtaaggaatcagataacagattattcagtccatactttgtaaagaattctcagatcattccagttatttattattctacgaaaaccttcaaagcatgaacgcttcttcgacagtttgatatcgattacctcgtttctcattgggaaccccacgtctccgttcgcttccaccgcctcccactatctggcccccttagtgtacttctcgtctcctttccgctccgttttgtcaggtgccgatcgggtgtcattctcccatcagaaaagtctgcttgggacatgcttgggggacagctcagaatctgtgagtggccctcgatattgacgtccctcgggctttctttacttttgttgcctgccgttcacggtttgtcggccttctcccggagtgtgccgtgaaccgaattgtgccctccactttccagcagcacaactacgcctgtggccaacaagctgactttgaatggtacctatttcaggacctttgatacacctcctcttcccttatatcgagagacacttgcggaatttccgactttgtatagttcaagtgggtgacagattgtcctcataggactacgaacaagtcctgggtttaaaaagagaagcggcaacctagaaacctggagataaacctgggaaaccgttaggctggactacgagacaaagaaaggccctaactggctgcggctgtggaggtcgagacattcaaaagttttgcacaatggctgctacgctgagtatgttctctcgtgacctcactcaaagtagttcccactgtgcaatcggttgattgtccgtcgggaattggttgcagttcccagagaacggagactggggagaaatcagaggagtgtgatggtcgttcagttgctgatactgtcctcctgcagatggggtgatttattcggccccagatacgccgtcgccagtctatcccgatagactgatccgtcccctaccaaagcgtacccttcggtcacggttgtcctccgatgcggccgattcgatcctctaccctcctgcgccaccggcaacacagcttttctacggagcttgtacgaccaatagggatgctgtaaatgactccaaagtacatgtacaacaaagtgatgggggccctgatctaagccctgatagtcgggaccaccatattccctatgaaaatggtgttgactttgacagtggtgacgaggatggaccggtggttgtacgacggagcaccggatttcgtggatcgtccctgtcgcctacgccttccaaagtgcagcaccaaactccaggcatagggaaggaacaatcgaccaaatcatctccgaccggtccagacgggtacgatgcctttgagaacactaacaacaagaagaagcggaagattccaacgcctggaaatatgggcagtcaccactcttctttgtcaccagaatttgcaaccatggcattagcgaaccctggacaacaaggttctgcatcatctggagaaggtggtcatgtcagcacattctacggcacgggtagtcccgcgtcacctgtgggcagtgggatgtctggttcgggcagaggacgtcttggacgtcaagggagacggtcatcaatacatggacacattacttggtcgtcacaaaatcgtggtgctggtcgtcgagacggaccgttgtcctccccaggaccaacaggtacgctgcatcgttgtcccacttcagtttcttgctaactctgtactcaggcgagtccggcgcgcgtaaccaaggtattatctccgctgcgatcgcgagtgctgctgcgtcagctttctcaccatctgcgtttaaaacttctgctcaaggcagcatgcttgaacagcagaccaccccgacgaggacccagtttactttcacctgcgaatccgactcgtctaaagggatggccttgcatgcgcaaaacccgcactcagctcagcagcggtcgccgatcgccgagtcccaacaagggaacaacccccgaggattatctacgcaaggcacgcagaccagtcccactgtcacagcgcagatgagccagcaatcaaatccccaacaacaaccaccaccatcacatcaaccacaggcgtctactgaactacctgcggaacgcaagaaaaagaggtcacctggcagtatctatatgctggctgcccgtcaacgaaaaatccaacaacaatacgcaaacctccaccacccgcccagtctccaggacatctggatctgtgaattctgcgagtacgagagcatatttgggcgacctcccgaggctctcattcggcagtacgagataaaagatcgtaaagaacgcaagcggctggcggagaaaaagagacttctggagaaggcgaagatgaagggtcgcaagcataagaaggcacccaaaaatgcaacaaagcatacggctgctcagcatgcagcgtatgatcatggctatgaccgggtctctgtcgatcattcttcggtaggagaaggaccgcaccacgatgactggggacatgaatacgacaatgaagcgacaaccgctggcccaccggctacccctgaagggactttcaaatcaccgcttcccccgggaagcgcggccaagaagcccactgcggcgcctttgggcggtaggggtgcagtagaaggaggattgaaaccaccctgatattagtcgaagaatcttgccttgggtatgtcttgcatcattgttttcgcttttgatttatagttctggtctctgcatggtcaattagccttttgtcattttacaatcacgaatccccgctccccattgtttcttgatgtgtcatgtcaacaaccagcatgattcctttcaggtgcataggtcaatcattggttggaatgtctccgggtgtttggtgaagatgttgcagttagagcctggtctcatgctaaggtatgggcacaggctagacatgtagcgtagctgttctatgaataggactaatcaagctatgtttaatccaaggtcaccggcggctaaattacatgattctcatccagtcgactgagcctgcagcttggccccgcgacggcgcttccgcggccaccaccagcgactccagcttgctgttggcgcgcgcgaaacacgacaatgaggtgtttcaggacgacacctggacagggaatcagtggttgtcagtctctcctgtgttactgccaacagtaagagcttgacgcctcccaaagactgtagaaagcactttgtatactgcaacaatgatataaagctgaagaactgctgcagctttttctttccacccaatcctcggatccgtttcactctctagactcgatttcatacctttctctctctcttctttgcttcagtcctataactcctgcgcaggcgcatcataccagcagcccttttttgtcgcatttacggtcttccctttaaacctctatagactcctgcaactgctcttcttctcatctctgccatttttgaagtaggcacaactaatcgtcgcacctgcctcgacctaacaaaacaacacaaccgctgcctaagttataacagccctctcacttcaatctaatgtggttcgtcctctttaaaatcttccgcttcggttactccgagaccaaaaaatacaaagccaaaaaagccgctcaacagaatcccggcgtcggccagaacccgcaattccaacaaccaccgttgccgaacccctacatcggcggtaatacgaacggccctcacgatcctggagctggaccagaacaatacccaatggacacctatccagcccctccgctccccgggcagaccccggcaccggctatgagcaagcgcgccaaaatcaaagcgctactctcaacagccctcgcagtcgtccaattcgcattcggccttgccgtcatcggcctgtatagtcaggacattaacaccgcgcgggataatggagattctgctccaagccggtgggtgtatgctgtcgtgacggcattcctttcgacagtgacagcgttcctgtacctggttcttggctggtggtggaagaagcgctcgaagccgagtttcagccagcgggctgggctgtttttgccactgttcgcgtgggagagtgtccttgttattctgtggctcgttgtctttgggatttttggcgaaatgtatattggcgtttaccatgttggggggaaggatggtggagagagcaaggttacgcgcatgaggagggcggtctgggtggatcttgcttgtctagttctttgggtgctctcgggggcttggaggggggtaaggtggtggaaggctaaggggatgggacagggagtagggttcttcagaaggcgcgcagatgttgagagtggggagaaggagatggcttaaccctttttcatcctcaaaggagaagagaggacgcacaatggttatatggatggtggctggtccacgctgcagtgaattagggctttgctttatttgtacttgtccaaggagcatgtatgctcttattgtacaggctcgacggctacaggtgcattatcatcgtcatattgaagtggtatcgaactcaaaacaaaaacatttactgtcccttatccgacctctccttctcgggtcccgtagtagtcagctttcccatttcctgactaaccatactgtgacgactctgttcaattaaaagactcaacccgcctcgtccacgtggcagggatagacctggcggcgtcgagaacagatttcctgttccaggcactgacatcggcacggccatggccgatgtcgctgcattcgcactggccttcacggatccatattgatgctcgtcccggtgtccatgttcgatcccaagctcttggttgcgatcatgtccttgaatcgacgctggatccatacctgtgagcattcctgttgccgtatcggcgccttgcgccccgtggtaaatatccggacccgcactagcgctcccaccagtcaggatcgaggtcgcaactgtcgatgcgccgtgagactgggtatgtgaatgtgagtcgccgaatcgggatttcgatggcgagatggtctccgtttcctccgttgtcgttcctgcccctggacttcctgccccatctacttcatctgctggatggagattcgtattttgagcaaagagcccgagagcaacctgaccttgaccctgaccgtaactatcattctgctcttggcccccctgctccgcgtttctccgataaagctgcgcataatactcatccgcaatcctcttttgctccgcgaacctggttcgaaaatccggcgccaccagttccgaactgttcggctgctcgtaattctcctcggagagatgccgcacgtcgaagtggcggcaggctgttgcggagaagaagccaacagtagggggagaggcgtgcgggcggagcggtggcagcggtgtgttcttgtgcataagggttttcagatcctgtatgaagggggatggaagggctggtttggtcatttcgtctggctcgaaggtttgttcttctgagggtaagggtgggaagggagccggcgtagaggaggtggaggtagacttgtctgtgattgttgttgatatcgtgctggatgtcgatggattcggattcggggttgtgatcggtgctattcgggtggtaatcatttctagaggtagttaaagaatgttcttatagagtaggagattgacgagttatggcttaccatcaggtgagtcctccacagcatcttcgtcaagcaccgctgcagtgttcgtcttgtcattgtcgctgtcgatagacggcagatctccaaagtcggtctgtggagaatgagtgcgtgtagaagagaccgaaaccgaagactgctgcgacgacttgcgtcgcattaacacaggccggcgcttgggagtcttcgcttttgccttgctcgcaacagcgaacgtcttcttctggccggcgcgactggtagccccaggagcctgcggttcgccaaacaggataggccgggaaggaggaatgggcgtaggcgggtttgacggtttgcgggtaacactttggccgccgaggcctgttagaagcagacgagtggtcttctggacttctccgtgggacgagctgttggatttcttcagaacaggctgaagcggcttggtcccgctgttgcttgcacctggagttggatggctctggcttttgccgtggcttgaagggcgctgttgcttctgatgctggtgctggttttttgggtgttgctcatcacgtttcaaactggacgagagcggttcggattcctgcatctggagatcagcaacagttacagctgcggcatggtcacagggaaaatgacgatgtgttcgtgttcccaccttttcctccgtctttgccggcggcctgaatgaaggcgaagtgaaagtcgtgcttcgattagcgggtgtgggcgtggacgctggctctgagatttgcaggaataagcgagacagcgctgatcctgtcagagagctgcttagacgcttgctgccccagatccgccagaacaagttctgcaagcgatagccggcatcgccttcgtgggcggacgggttgatgctgcacgctgttgacggggtaagtagttgcttgaatagaagaagtagtagaaacaatagaagaaaagcgcacctttccacaactgcacgatatctccaatgtccacgacatctagatcaagatcatctagcccctctgaaaccttttccgaaacagcaatcaagcctttggggagagtttccattgcgacaagttggtgttgaggcgagctggactggagaagagcgcgagtggattgttgatagcactaacactacatggtcaagatggaaagattgggcaggttaggcgaggacgaaaacgaaaaagggcagtaaagtgactggcggtgaatagcgaaagggggaaaggtcagagagccatagcaaacgcagggagaatgaatgaatgcgctgattgtgagcttggagagccttgagggactgcaagggcagcgagcaaagcaggatcccccacattaaagggagcagaaattaaccagcggctgcatctgggaaggacatgcagacagaatagattcaggaacagagtatctagtcagaaacaaggatgagaaagaaagaaggacgatagaaggaacctgtgccttgagccgagtcttgccgatggtgcccagcagtggaggccgcctggcagagttgagactaccctgggtatttttgacagataaagggtctttgacggggatccagaaatcaggacacacaggaaacagaggaaacagatcatggggatcgtagaccaaactcgataggtcacagtagtagtgcggatatgccagcagtagtcagttgatgcgacagccttgcttagggcattcatctgatgatgacattgattagtctacggaccaagtccacttggctctacgtccaacgggctagacgatcacagccccagcctatcaaaaatcaccaataaaccagctccagggcgtcgggaatgcccgttggggatcttgaaccttggaactcaccccacactcgtcccatacttcagactgaagcaagaagcagcaggaaatagcgagaagtagcaggtctcttgccaagacagtgagccccgtaagtgtggactgtggaggccgatcaggccatagtcgaccccggacccgttgaatacggggcactccagtctctagtgtccagcttgcagcctgcagtctgcaatcgcggaaagatcccagtattacatccatgattggagagggagcccatccaggaccgcaaaggctcccgcctaagcaccggcagccggcgttgttcctccagttcagtctcgtctcagctcggaggatcagaggatcggtttgtgccgtctcactgtgcgaggcccgtcagatcacttctagcccagaaata

SEQ ID NO: 5942 - DNA, 5440 bp, Emericella nidulans
gactctataaagggggaaagcacggaggataaatttcaaggagaaaaaatgtgaggagggtgatggacggtcaagaagggtggacagggacagggacagaggcagagaccgaggccgagatagaggcgagggaggattgcggtggatgctcggtcgtagtcgagtgagtgccagttatgagaaaaggcaaataaaaaagagacagaagtcgaaggttgatggaaaggggaacagggcacctataggcaaactcaaggcgataagaaaatcttctagaaccacgggacctcctgcactgttgactatttgatttatatactgtacctatggtaatgatttcaacggaatcagacgggccacaaacttcagacaaaatattgaattgatggcagccagcgggggtctcccattgctggcggctggccgacggcgtgggtccctcattacggccaggtaccgtacagaaaaatctggtattttccatctcgatctacgggctggtaatagactaagtcgagaggataggaccagcatagctgtcaggatcaccgccattcactaaaaggccatttaaacactcctggttacaagactcaatcgatgaatatacagagtaataattactgagacgctgatattgagtggatgcggggtatgtggcgtatcagttgtacctattattactattattaccgcacataagaaggccactacagctctaggatttgttacaaagcaccgatcgtcatcgatcatctcattctcaacgctcagtcgataatcgagaggctactagtcgaaccactgccgcaacccatccacactccggccgcctcatgtaagactatgtcattgcagaggcaaacgacgctcgcacttgacatgtcgctggcgcttcttagggtcagccacatttctctgcttaatccaatcgtgttgtacagacggttagggcagattggcttgcatgagggttggtggacggcggattcgggcccgatgggaatagcttttgacagttagagcttatatcgataagttgcaacatccagacggccagacagccaaatgccgcgatagcctgagattcgattctactatcagcagaaatttaggtattagctcgcttctcaataaggccgctggttgtttacaacgtgggatacagagtttgattcggctaacgtggttggtaagcgagctgcgcatgtaagcgagctgcgcacccaaccacttttttacatgctgacgcggtcatctatcttccaacagccaccatgccccgagttcgcgttagttcaagccaaaattgccatgagaaggaaggtcggctcctactggctgtacaggctattaaaaaaaaggagattacatcaatacgcgaggcagcacgtcgcttcaatgtgcctgaatctacactacgtacgcgactacgcgggactacaaatcgcgccgaatctcgcgcaaatggccataaattgactgagattgaagaggaagtgcttaagcagtggattctctctttagatctacgcggagcagctcctacaaaagctcatgtacgagaaatggctaatattctgcttgcaaagcgtggttccaccccaatccagactgtcggccagaaatgggtatataattatactcaacgccacccggagcttgagtctcgcttgtcaaggcaatacgactgccagcgagcaaagcaagagaacccaaaggttattcaagcatggtttaacaccgtacgagccacaatcgaacaatacgggatcctaccggacgatatctacaactttgatgagactggctttgcaatgggcctttgtgcacatcagaaagtgattaccaagtcagaatcatgtggccgaagaccagttctacagccaggaaaccgtgaatgggttactgcaattgagtcaatcagtgcttctggatgggcacttccaccaacacttatctttaagggcaagcagtataaccaagcatggtttacaggccttccgcccgactggcgatttgaaattagtacaaatggatggacaactaatgaaattagccttcgctggcttcagaagcaatttatcccgtcaacagagcatcgtacgcgcggaagatatcaacttctagttcttgatggccatggaagccatcttacaccagagtttgatcaaatctgtacagatcataatattataccactctgcatgccggcacattcctcccatcttctacaaccacttgatattggatgttttgcagttttgaagcgctcgtacgccagcttggttgatcagaaaatgcggcttggcatcagccatattgacaaacttgatttccttgcagcctatccacaagctcgaatcagcacatttaagctggatacaatcagaaacagttttcgagcagcaggactagtgccattgaatcctgaaccagtgctttcaaagcttagtattcaggctcgtacgcctacaccccctggaagccgtggaagccaggcaagcactttttgcccacatacaccagcaaatgttgatgagcttctaaagcaagcttctttactcagagattttctcaaacagcgctcaaaaagtccaccatcaccgtcccataatgccctaaaccagctaattaaaggctgtcaaattgcaatgcaaaagggcatactattggagcaagagaatagggcgctacgtgctgaaaatgctatacaaaggcgaaagcgagctcgtacgcatagatggatagctcatgataatggtctgtctgtacaagaggctacagagctcgaggaagctcataatgcgtcttttcaggcaatacctggtccatgcgggccaccagcagaaggtgcacaaacaccaaaggcacgggcattacctacatgtagtacctgccatagaattgggcatagaagaaatgcttgtccaaataaataataattaatataaaggcgttgtggttgattaaaaggtcaaaatatgggaaatctgtatgcaggtgcgcagctcgcttacatgcgcagctcgcttaccaaccacgttacaccctgggtatacaggccttcagagagaagccagagggcaggtcccaggcggagaacagttctctttgacctcatggctctaatatgcatatttacactctccatttccacgatgaccctaagctcgcctcgatccgcacccaaagacaagccaacgttgcagccaccaacaacacccctaccactatgccagcccgttcataaataaacgacgaagtaagggcatccttcgggatcaacatgccggttaacggagtgccgataagcgcgcccatgccacgaattaaatacaaagcaccattgacactggtaaagtgctgcacaccaaagagctcgatcaaagaggccggaaaaagcgaaatatatgcactagcaaatgcaccgtacaggatagtaaacacgataaagagtccgtcagcactagacttcggcacgccggcgtctggcgtgtgaaacatggatggaatccaaaaggcgaagacggccacagcgctcagcagcgtcgtgacaaccagggcgttgatgcgtccgtatcggtcggcaccgtagccgatggcgatgcgcgacacgaaattagacgcgttgttcagagtaatgaagttagccgctgtcgtgggactgtagcctagcgtgctagcgtacgcggcatagaagaacaacggggttgagtatccagccgactgcagaaaacagcccagagcctgggccagaaatcgtttagagcgggcaacgcggtagttcaccatgggcgcttttatccagccactgcgtcgacgtaggccctgcgtctggatacgaacttgctcgtggaacttgggctcccagcggagagcatacccggcgacagagacgagtgttaaggagatacaacccgagatgcggagcgcatttctaaaccccagatgtgttatcatggctcggagagcaggaggccaaaccatgcccccaactgcagatcccgagataatcacgcccatggcgagaccacgccgctggtcgaaccacgtcggggcaacgctcatggtaggcacatatgccagacatgtaccaataccaaggaggactccctgcgtcaacgcaaaatgccatagtgcctgcccaaagctcgacaggatatatgcaatgccgaaaacccagcctccggcaatgatgacagcctgtggcgagtagatctttgaccagtgcattgcgaatggtccgcccatggacattaatgcaatggctaagattcccaccagattgatgagggcagttgagctcccggtaaaaggggtgccttcagcttcggccatctcttcgtaaagagactggtagactccataagagaagatgaatgcgcacgtcgtaaacatcacagaaaagccggcggctacgaccaaggcatatttcctagcccatctatcagtatacccggcctctttttgatgcgggggtgactcaccaggtaggatgctcttgctccgcttcattcgtttgcggagaagcagtctggggagagccatcggcttctcggctggccagttcaacgacggaacccatggttgtagataacaatcatactttctagatatcgacgtttggaaaaaaaggaaaaggccccgtctaccatagtgtaggctgataaaacatttaagtattggcagtcattcgccgtttggagtgcggagtctaccctaaccattttgagaagccatgtttaccccagccaagcccatgctccggcgtacgatagcgataaatatattctggtagataatattagacgaatactcatgtgataaaaggaaatagtccgggttcagaaagcggcagacatattagtggaatgggaggctgggtcaaccatgtattaagcttaaatgtaacaagtctatatgcaatcgtcacctattttcttccctcctgctccaaaacccgctgctccatcttctcaaacccctcgacagccttcccatacctttcgaacgcctccttctgatagccgtccgcgatcttctcaatgaactcctcctcgtgccacctcgccccaatcaaatcctcgaaggtctgatctttcttcctctcaagcgcccaaacagccttatacgcagcgcccagcgcacacgcattgtctccaatctcaagcttatacacgccctcactaccaccgaggatctcaccggcgatcttcgcgatggtcttgttcttcgacccgccgccgacgaggtatacgcgacgaggctgggcggggatgtcgccaccgggggaagatgtgaggccgcgcgagcggagacggagagagagcatttgggactcgataatggcgcgcgcttcatcggcgggtctgttccagccttcgccgttaagcgtttcggttaggttgccagtggaaggatcgtagttgaagagcac

SEQ ID NO: 5943 - DNA, 2434 bp, Emericella nidulans
tctaagttcaagagggtgaggaattcctcgcgggtcttcgcgctggagcgcatgcatccgagcatgcaactggttgttgtgctgctgctcgtcttttggactccgcgcataaccatgcaaagatgcgacgattccatgaccacgccgacgcctcgcggcttgagaacttctgaaatagcgagggcaacctgtttcgttaagcgctcctgcacctgaaggcggcgggaaaacatttccgctaggcgggcaagcttggagagaccgaggacgcggcggtccgggatgtagccaatgtgcatctgtatgacaccttagcgaaggaccaaagtaaagatcgggagaggtttacctttccggtgaaaggcaccatatgatgctcgcacaaggagaatacatcaatatccttgacaataaccaattcatcatggtcctcatggaagaccgcgccgttgacaaggtcccgcacgttctcctcgtatcccttggtaaagtagagcatagctttcgcataccggtcaggtgtttctcggagaccctccctatcggggtcttcaccaagacattcaaggattgtccgcacagcccccgagagcttcttaatccgcgcctcattttcctctggggttgactcaagccgtgcccgtgttccggggcctatcaggcaaactgcatcagcaaaccgactgggaccgagatatgtcgaaatactcacatggccagcttaggccatcaaaatcaatcgcaggtgtcagcgcatacgggctggtggggctaccggtcgttgccggcggggtgagggcagcttcgtctctggggtcgcgggctgggtcatgtaatgaaggcctaattccgatagggtcagctagtactatggaagccgcttcagacgacgtacttagtcacagaagatctgcgacgagggctatcgtagctgctagcaagttcggtcggatgcgactctgactcaggctgatcgaactccacgggaacacgaggagcgaaagacgagcggatagaagtattcaaactctcccgctcgcggacatccctcgacgcgacggacccagcaagaggagacccgccgttcagcaggtgagaagggatggccttgggctttgggcccaagggaggagaaccagatcccatgattgactcgaaacttgacggcggggaagacgaggagcgggggtcttaatgacagatctttcaaagataatgggaccaagtggttcgaaaaaggaggtaagaaaacgatatcctgagtttaggacatatttctagccagattttcttcagaggaggtacaaaaaaataagaacgttatgacaaaagagaaggcaattctctcggagactggattgcccctccgagagcgccacacttggagttgattgcatggacccttcaccgcctgaaagctaatgatgcaggacaatgctggttgcatgcatcctgcggctgacggagcctgcccaggcggaaaattacggtaatcaataagaaccggtgcaaatcagacatgcggtattcttggagtagctctgggaagtgcagcaatactgctatttttaggcttcggataatacccgttgtaaatggctcatatttacgaagagaaaaatagcagaagatttgttcttaacagtttgcccgtaaagcggtaatcaatacagagggaattagatctcagtaagatagcatgagatgctcgtctcaccacaatgatacggctgaaaataagagagctcctatgggcgccaaattaaggctccaattcctcggtcggcacgtcctccatgtccttaccaacaattgcatcagcaactttccagacttgcaaaaggttgtcttctgcggcagagcagagcacccagggatcattgagattccaactgaaatccgaaatacgattggtgtggccgccgtgcataaaaagtctgtagatatgatgaagttagccttgtgaaatcaaatcatcgacaggaaactaagagcacgtacagctcaggtggcccatcctgagcatcttcgggcgtctgctcctcgcccgctcgactcaaatcccagaacatgatcttacggtcgtagcttgcactagccagaacggcctcttcgaacggatgccaggagatcgatgtgacggagtcggtatggttctcgagtgtgtgtagcttcgtcttcaggttacgtagatcccataggccgatagtcttgtccgcagatcctgtggccaggaccgtttcggcggcagggttaaaagcaatcgcattgatggcatcacgatgctggccttcagccgttgcagcggcacgagtagtttctgcaactcgagtatcgagaatttgaagagtgatgtcgtctgagacggttccgatgagagaggagtggagaggatggtgttgaacgtcataacaatagaggaatgatgagtata

SEQ ID NO: 5944 - DNA, 11542 bp, Emericella nidulans
catgaacaagggccaggtcgggtaccggggcccgctgactgctgagctccattaaagcacattccctgcggggtgaattcaggagctacgcagcgcaaataaagacctgacggttttgaggggtgactccgtcagagatcatcgacatagcagtcgacaacgcgccatgcccaccaacgcctccgactaccagtccctgagtggtattgctcgctgcggcgttgtgtggtcatggcaccggtgccggccatggctatcctcgagtagtgctgtcgctgagctgcgcgaggcggcagctgcgggcgcctggacctgggcatgctgctgagcgactaacgaggaatgttgctgggcttggtgcgggtggtgctgggcctgatgctgctgctgctgatactgcaaccaggcggcatcagcctgcggaaactgatgctgataagagaaaacgtactgactttgcgtttgaagcatgacgaaccgacgaaggatcagtcctaaggagcgtgctgcaatctgccctgaccgaccggaaaattcagattgacggcaggaagggctggagatagataaggagtaatcagtgtgttgagagcggaagagtagtcattgatcgatttaccaagccggatgcaaaacagtgatgagagaggaatactcgccgagagtgagtgggagagtgttggctttggatgtggaacggtaatcgaggcgagcgaggttcgggctccgggaggcggggagatgcaggttccgaccggggctcaactgactcagacccgtcagctccagctactgctagctagactactgcaatgcccaatatcttcacctaagttcaatccttagcagaaaagatatcaggtcaatattcatttacttctggttcgaactcttctgagacgctcagcgctgcaaagccatacacggcaaacccaagcctaccggtattctaccgtcgtggcccgtgctagttacacgcagcgcacaggctattctgacagatgcatggctgacaaagacggacaagatacaggtctacctgtacctagaatctagtagtaggatactgattcggtgggatgtatatgtgtatgcagctcccttaccagctgcgtctcgaatacaccctgcgttgaagcttaaaggagtgactatacatactttgattgaactacttttgttcacgccgtataacctctttaggacactgtgagggagatacttggtaaggctattcacatgctcatcattcagtatttaaagataaagagtagtatcaaacatgcagcctcaaatgcggaaagaaaccatacacacatcaaagtcattgctcataatacaggtaatttccagagtgcacagccaccataaggcagtcacatgcgtcagtcgtctcgcctcagaatatggaaaaggggtcaaatcatatcgggttctcatggaatcatgtcgtccaccttcaacgtgtcatcgttaatcgttatacccgggacctcgatcgtcctgatcgcctgctccgtcgggttcgtcggtctgagctctcgctcgctaaagactgttagcgggataatttcttgagcagttccgtggactgaacttacttgtgctggtgtaatagctataatagcttgggtacgtgtaagaggtgctactcttctcgtcgctgtggtccttcttccttttcagcccgagacaaagcgcaatcgcaccgaggacgattccaatcgttgcaagcttgccccatcctgatctattctcgccctcatgtgaaggcccagatgtccgagtgccaagccacgtgcggccaggccggtgcgtttaaacaaacccatgttcttccacataagtctcttctcgcctccttcgcccaattcccaaacaggcaagaatgctgttcaaaagtccgcgtgcgcacaggcagaggcagaggaggaacagcaagaacacaccagcgagtgtcccgatcacaatgcccgcaatcgcaccaccgctcaagccgccgtcatccggagcgtcgacccctagcgctggcgatccgtcggtggtaacgggcgtctcgaaggcctgagtggttgtcgcagtttcagtaacggtgctcgagtctgtcggtcgtacgggagccgtggcggtgccagtatctgttgcccagatcgaggtggtagctgccagaacacacttcttgtcggaactacagacttcagaagcactgcagcagtcgctgccacactcactctcaccgagatcacttcgacaactcccgctcgtgctcgtcggagccgcgacccaactactccatacagatgtgcgtgtctcgacatcggtctcagtaacaacccaggtggtgctgtacgtttcccaggtgccgcctccactccctgaaccgctgctcgaggaagaacaaaccgcttggttattttcgtctgtaatacatgtttcgtcggaggcacagcaaagctggctgtagtaaccacatgggttgtcgcaggatcgctgttcgagcgaccccccctcagtgccactcggccctaacggcgtcgcatcggcaagtcgacactggctcaggaatgcgacaatcgagatcgcagtttgcagtaattgagaggtatgcattgctaatatagaatgtgaccgaggatgtcaagcgatcggaaaaaatgctagcaagaatgctctgacagccgcaatcgtaggctgcagggccccgagacactgactgtcctgacctcgccgctccagaaacccgccgtgcgttactacggctgcgatggacaacgagcgacgactctctgagtcaaacagagataatgtaaaatatctttcgaagttacgaaaggaaatattatgataaccaaaagaggagaagaaaacgaagggatgaacttggaaaaggaaccgaagctgtctgtcgtgcctgaccgggtccgtgggcgaatctccccagcctcctcatgcaagccgtatacaaagcccaaccaccccatttctcagacagtcaccgccaatcgacagttttagccactatgctcactaatacaccgtatattctcttttttttccctttaagaaaatccgaggctgggccggaccctgcttttcatcacattctaaccctcacttcgtcaagttgagtaccctacgcagtgcccctcctcaacaccagcgggcaatccccgcatctcgtcatgcttaatcactggctatagtgtcagctactattattactccgaggctgtcctggtcaatcaggtcagagttctcactcacgagctttggaatactctgggtttatctcgggtttacttctcctcgcgctagacgcctcacgttatcaggtagtgatgagctcaggctaatcagctcgatcagacatcggacactccactgcactgtctgtactggccttgagtcatggagactgcagggacagcatccccattgacttaattcatccgccccgctcttgttctataggttttgggctgcgtcaatcgagcggtgtgcttgaaaaattggtggatttttttcaccatttgctgtctcaaaattctcttcgtagtaagtatttggattggcaaatatgatcagtatttggggcgtataccaagagtatccatccattcaacaagcaatagtgtagaacgtcactcatttactcatttcatatcatccatggacagggccgtcatcatatacaaactcgtacaagaagtcttcgtccaagtcattatatgtccattgccggtcttttaaatgaagaacccagcaatgccaaccaccaagcccacaacaagatcctgtaggctcgatgtcctccggtggcccgcgccatccgtccccccttcataattcccacaaacccccagattaagcccatggcatgcactctggcttaagctggagcatgtttcgatcgcattcgccgcagcgcctgtctgtgtgaagtccgctcccccgcccgtcacagtcaccccgtagcccccgaaatacgtaacgcacgccgtatagcttctctcgcatctatcgtagtatgatgaacactgatcagcgtcagagaaggcagtaggcacatagacgaacggatagccgccggacattgttgagcccgtgatcgtagacgtagggtcatcgtcggttgtggttgtagcgtccgatgatgttcgagtcgtttcaaatgctcctgatgagccacctagagtacccgtgcagcttgccccgctggggcagcatgcaatatggtttgcttcatcgctcgtacatatagcgtctgttcggcagcagatgccggagttgtcgaggttatcgcatgggctgtatccgccaggacagttgctgtcgcgcttgttcaagcgctgcagaatatcatatgcccgccgatttgtgtctgggcttgctgtgatggggtggtcgaagggaatgggtgaggtcgcgaaggcgccggcggtgaggaggaatgtggtcacgattaagccggaaggcttcattatcgtaggtaggcgtaatcagcccgccagtctttcgaagtagatagtactactgtggaatgaaaatatgtatcgcagatagctccaatcatccaagaatcagcggttgggtagcgatgacgagaaagcaggtggccgggtaatcaacaaattactaaaaatggcaaactgtcggtcccgcagcctagagcggtgccgcctaaatagcctaagcatagagccagccactgccttttcatcttgcacctctcactggttgtgaatctgcgcgatatctctaataagtcgctgatgacctggtattgtactaacaaatgtcctattcaggcattaccttcaatcatgccgttgctgtgaattaagcgacggggcgtctgcctacaactacccatcacacttcatcagtcctcctgcgcagcgtcctcactcaaggggtcttctggcagagactcctgcatctgttgagagttttgtcgctgaagatacagccttgctaccgcccttaaacgccgaatcttagacaacccatcggtatgccatcgactctcagaatcccagtctcgacgagatcagctctcagagccgaagccctccaatattttgacttcattcaggaaggcactgtgcatcgcttcagatgaatatgtcccagcgttgatgggctttgtcgtcgctggtcaaccttcccttgccgtaggccccaatctatgtgcgcgtaaatgagcaccgtgcttgcaggatggggaagagcttgtgctgcgacagcgcgacaacagaaattcgcctcaatacttaaagtcatgactacattcttctctactacggtgcggagaacctcttcatatccatctgggaggtgatcaagaacaacgaagcgctttaccttctcaatttgatgaagacgttcatggtctcaagtggatatccaaggagacttcccagttgacttcccagttagcgaatggaggcagtacatgccaacatcttcaacttctttctggtgcagaagttgaaaacgggctttccttctttaccccaagcgtcttcacactttccttagccccagcaatgagcaatgatacacgccttcgttagagaactgggcgtaagccattcagagcatttgagctcgatagaattcgtttcgaagcaccgagaatcccaaggaatgcctctcttgtgcgagttatggacgagatattgatagtctccaggccctcggctcccagggtgaaaagagccttctttgttccgtcccaagcccctgagagcatcctctatcttggaagcttccgtcttcttaccgataaccaagccagtttgagggggcatgattattggaagatacgtttgatatggattcaggatgggtatatttcaagatcgagggcgatacaaagctacctatgcagagctcgtacccttagccatcaacgagctctcgcgagctcagccgtagaacccacattcgctccatgaagataaaccggctcaaacactgtagaatatcattgcagtcttaggttagtacaattggaatggctgcggttgagtatttcctcggtttactccgttgtcctgtgtcccacacaagttttgctagagaagataaggtactgcggaaaaccctctacttctagtattgcccacgaacaacagctaggctgtaaccttccaagctgactttcaatcagtggctattgatagattcgaacgtgcttaaacacaagcttgaaagccgcctgtggcctaactctcatgtggttggcctaaagacaagcctgatttcactgttgctgccatcagctctggcgtgggaaacacgtatgtctgtagcgttcaatcttagtgcaacggaaaaagccatgatgcctcacaaaggtgggactatcgtaagaagttagaggcactgccttcgatggtatagattacaataaacctgactacatgaatggccgtcagagctatcttggactttatggcgacactgcaagcgtaaataaacgggcttttggtgagaagaaacaaggctatcagccctgcaaattgcaagcaacaagcttttttattacggcttagattgggtgacaggtcatggaccaaagcaatgacgatgactatgcagaacatgtgacggtcagccacctaataaacctcctagcagttcaactcacataccttcaggtatcatcaaccacctaacgggaccatttattgatctcgattatgggactcccagtcgtggacttttcatcgtggcataatgttaaagatgaaagatctcggcaacgtgtggcacaacagctcgtagacgcctgtcagcgggtaggtttcgtgcgtatcatcaatcactccttgccggaaggggccctcgacgaggcatttgaatggatgaagcgactcttcgcacttccagaagaggatacaatgaaggcgcctcatctggcgggttgggctgtccatcgtgcatactcatggccgggtctagagaaggtcacccaaatcatgagcactgacggcgacggagacgtgaagaaaaaattacgagaagtgcctgatgtcaaggtgtgcttctttactcctagtacagacctaggcttcaattgctgaggaatgctaggaagtctacgacatcggcagcgaagatgacaccagccagccgaaccaatggcttcctaacgccatactccctggcttccgcgatttcatggtccaattctacagcgagtgtgaccgcgttggcaaggaaattctccgagccatagccgtaggcctggatcttgaggacgcagagtacctcacgagaaagcattcggggaactctaaccagctgcgactccttcactacctacccgttccagctgaggatctggagaaagatcgcgtgacgcgctgtgcagcgcatacggactggagctcgattacgatgcttttccaagatgactgtggcgggctggaggtggaggatatatcgaggcctgggacgtttgtgccgtgcgcagcgtgtgaaagatagtatcgtcgtgaacattgggtatctgttgcagaggtggagtaacggttcgttctcgtttctaggaacacctcgataaattgtcctagcctgcctgtgtgctagggatatgggaccccggttacgtgtaatatttgctaactgaagtgtggtacaacagaccgtcttcgctctacgaaccaccgagtgagcctaccgactctctcagatcgtattggaggtccagataggatgacccgtgagcgattctcgattccttactttatgtctccggatgacgaagtccttgttgaatgtataccttcctgtatgaatgacgaaaccccagctaagtatgagcctattacacgaggagactataacaagatgaggatgtctatgatgtattgattctgctagtttcatatttatgccaaaagctacttgctccatatacgtatatattactaccgctgcagcatctaggataaacactgatttccaccgagagaacaacaaaactagtagcacctccagttgtagtggatgagtttaatactttagaaaagaaaaaacaaaacaaaaacaagccgtaaaatgaagtacatgccctactagccccgagcccttatcctctccacaactatgccttattcacaaggcagggaaaaaaggtcggaaccaagccgataagcgcggcggacatggagtttgtccagcaccagctccgtcgacgcaacagaactacaaaccccaatctcaaattcacacgagcacgaggcgaatcaatcggcaccatctggagctgcataaaaacataagaccttccgagatacacttcaacccacgcaaacgctcagtccaacaaggcacctccgttccaaaatcgccgcaacccctcattccatcctccgcaaaccatccgcaaaacgtctatcccaaacgaagcccctcaaaaggtgcgccggcgctcatcagaacactttgaccaagtttgaatgcagctataatgtgatgttctcaatagctccttcaagaaatcgaatcccgcgtgataacctcgcagcaacagattgggatcacgaaggcacaaatgacaagcaaaaaccgtgatatccgaatgctagagctcacatcaaaggagctaagctctttgcccgccgatactaatgtttatgagggcgtcggaaagatgtgagtgccatatcttgccttgcggacaaactttggggctgaaacgggccgtgctatattacgggacctggtatacaaataagacaagacggattgggtgaataagagtaaatgaaacggatactaatgtcacttaggttcgttgcggtccctagagccacagtggacaagcggatatcgacagagaccggagagttgaagggggagatagagaatctggagaagaggatgaattatttggagatgacgtttaagaacagtcgggagaatctggaggctattttgaagtctggacgggcgtgaaaaatcttcctcattaatcttttcatgtctatgttctacatgcgaatgaatggatggcactcaaaccatggcgctctacgaacaagcatcgttatccaaacccagacccctttgtttaacaggtcttgatgctacagcattgacccatctgacaagttatgaaactaggttttatcccgttctcaacccctccaaccggtaccagcagccatttgttcaatcatccaatatcaacccaatttccacgaaacctctgctcatcaaagtctcttttgcatctgccctcaaaagtctcccggtcaatcatcagaacgaattcgtcggtgggtgcttttgctgccggtcactaaatgatggcggcggtgaaggcttccaggatgacaattctgagttataccaggccggagaagctgtgtcggagtgaatgctggttgattgcgtgcagctaacctcgcgatgatccaggtagccgtgcgaaggctgattccgtgaccggggccccggcgggtgaagactgtttccatggcaagacctaggtttgcgctgggcttccgtgggtaaatgcaggtacatccggccgtgactggattggagcggcatgcagctgatgtcaaatactggcagctaatctaggtgctggcttcccgaatctgaacccccagtaaatgaggaaggtccatgtcgtgaccgaaacttgctggacacgtggatgttacagccgtacattactttagcagtgcgacgtgtcggtgggtgaggatgaatagacgacctcagcagcaccagcagcgccagccaatccactgacattcacatcctcgccgccatccattctagtaaagtactctgcatggtcagattgtgctggacagggcaagatgagcgtctccaatcctcgccgttcaatcctagcagacaattcgcggaacaaggtttccagctgcacgagctcagacttgcgtgcccccgccaaccggttcccccgcacgaccatctggtcaagaatcgcgtaggcatcttgaatatcaatgtagtcctggctttccgtaatgtttggaaagagtgcgctggccatcgttatatgcagcgccgcggcgtaggtgaattccatgtcgaagggaaggaagacttctgtacatcatcagcaacgctcggcgtatcttaggtagacctagaggaagggatgaggcgctacctagcaaactgtcttcgtccgtgagaatctgtaatgtcttcgcggcggacttgatcccagctgagatgagagcgttggttggcgcaacgatactttgccagtcttccgcaccgtgattaagcttctggaggcgctccttgaggacggagaggaggagaggtcgagttgcgacgatcacacacttttatagcgtcagacaacccgttatccttgctgaaataaaaggtgagaaggataggctccctacctggtggtatagaagcgtgatgtgtctcgttccctttggcatggtatctaccgaattctggaacttgagctggattatctgttcaatttcacgcgcgtgtccggcaagcacatgaaggatcgacctggttgtctctagaaatgttcctagctgggtctctgtggctttgtatatggctttatagctgtcagcttcctgcccaccaagcccaaatacaggccagtgtcgagaagaaaatatgaacctacaggagagaatgtatgatagcaaatgggacagccgcacggaaagactgagcgtggtatcactctgggagcaggcagtagcagtaagcggctccagcaacgtggtgatatcgctatcctcgggcgtcatcgacgctccaacagacgaggaaatatgcctatcaagaacgtaaagcgtccaccagagattcctgcaccgggctaccgtttcaagcccgagttcgtcctcgggcagctgcgtgtgcatcccgtccatttgcgcgatgcggatggcgtgtccgacctacgagaacgggtcagctgatacaaaatagaatataatagaataatatagagtaaaagatcaagaaccccatggagacatacataaacatgggccgaactccggtggtcgatcgagtaaagatacaacccggtcagtgccaatacctcgatcgcgacaaaccctccacgggagaggctggtatgatcgggcatgaggctcatcgcccggataaagaactttgaccccggcggatcattcgcattgttcgggttcttgtgtccgggaaacagaaacgcgttcgcaaacgcaaggacaagtaggaactgcacgaaccagagccggcactctttcacctgcttgactgcgtctccgtaatagaacgcgtgcatctgctggacgaagtcttcttcgtttataaggcagaagttatggcctagatggaacttgacagtattgaagaggtacagggcgtggtcaattgagggtaggttgctgatatccgggtgtgagccgacgggcagcggcgaccattggatcgggtagaggtccccaacgaagagctcgggagtgctataatgcgactcgatatggagtttctcggcggtcatgagtataacgtt

SEQ ID NO: 5945 - DNA, 2097 bp, Emericella nidulans
catgaattgtaatgacattctgcggtgtgtcagatgatcctgaagtcatcccgccgacagtcgacctctgagagttgtctgtggagcgtggccggtacatcccaagactaccaacactacgccatgtttggggtgtgggaaagcgatgttgaagacctgaaagaatacccgacgacccggaagagctcgatgtctcagcttcggagtcatctgagtactctgaagcaccatcgtcagtgcttgctatggtacctgttatccgtggccctggtgaacttgtttcaaaacgtccaaatctctcaaagagattatcagatcttgacagtctcgtcatttccttaaacccgagattttcaagagagtatgctgatttatctttctttgttggaaaaaagcatacaaggcggccattattgccccagaccgctccacactccctggccctaggtaccatcacgtttgcgttaacaggtcgaatcaactcggaactcattgctaggtcttggctctgcgataagccaacctcatcctcatcactggattggccacaagctagcaggccacctaggccaactacctacaattcactccacgacggagcttgactaagaagtcaactggttggttaggacaacaataacagtgcttgaccaacatgttcattacaaagactattatcctactcaaaataatggttcaccccagagcttaaaacccagcaggttactgtaaaccaagcacaaaggagatggcagagcagctgtactaccctaggttgtagctactctattaccatcaatctctttaataatatgcgtctgaaacggcgcgaatagataagaactattaagaaagtcaagaccacctattaaaaagagttcctagacaaggcccaggaaggctacctctggaaagcagtaacttatatgcacccctgagacccctacataaatatccctatattaaaaatcaggacaagggaaggcactgaaaataataagaaagccaaggccttcctagaagccttctttcccaagatggctgaagctgaagaagagagatcataacacccctataagattacctgggagccaatcacggagctagagatatacagattgcttaaggctgccaaaggaacaacagccccaggagagataagatcctgaccttgatatagaaatacctatagatatacctcttaacaaatatcacctacctctttacaaaattaattgagctgggtcactacccagtgcagtagaagcaggcatggattgtggtcctaaggaaacctagtaaactagactatgcagtacccggagcataccaacctatctctttgctaaatatactaggcaagctactagaagcagtcatggtttagagactaatattctgggccaatacctacaagctactccctaatacacaatttaaggcagaccagggtataacacagaacaggtacttcttatactagggaataccattgattaagcatggctttgatccaaagtggtgatacttattgcattcgaccttaaaggagcttttaatggggtgaaggaagcaagccttaatgcccgcctgtaggccaaagggatcctgatagtagccagaaagtagatcagcagcttcatggagaaccagtataccagtattacctttgataactttcagacagaggttgcccctctaggaaatgcaggccttgctcaagggtccccattgtctcctatcttgtttagatttttcaactctgacccggttaaccagccagtaaattaccatggggttcttctgcatttattaataactacttctgatagtaagcagggccgacggccgaagacaatattaagaagatctaagaggaagatatcccctgtatagaatcatgggcctggaagactagattattatttgctgcagagaaaacagaacttatatacctaactaggtccaaaaagcaacatgaaacagggcagattactataattagaaagataattacaccaacacaacacagcaaagcttctgggggtggtctttgataaagagatataatagagaggacatgtcaaaaacagttaa

SEQ ID NO: 5946 - DNA, 4206 bp, Emericella nidulans
cacgtggcttgaatgtcaaacagctgaagcttgtcgtcaattacgatgcgcgaacccatttgaaggattatgttcaccgtgctggacgtactggtcgtgcaggaaacacgggaaccgcagtcactttcctacggaggaccaggaacggtattcggtcgatattgctaaagcgctcaagcaaagtggacaagaagtcccagaagccgtacaaaaacttgttgactcgttcttggagaaagtaaaagccggtaaagagaaggccagcaactctggcttcggtggaaagggtctggagcgattggatcaagaacgtgatgcggctcggatgcgcgagcgtcgcacatacaaaaccggagaagagggcgaagatgaggaagagaaggatgaaaagaagaacgaacaggccgaagagcaattcaacaaggttctctcggctgtccagtctacctctgcgcagctacccggcgttccaaaaggcatcgatctggatggcaagatcacagttcacaagagagaagttgatccgaatgctcctaacaatcctcttgataaggttggctcggctgttgcagatatccacgcacggctcagccgtgctggagtcatgcgatcaggcgtgcctattgacaatcgcggtcctgatgccggtgcgttccatgcgacactggagatcaacgactttcctcgtaagttgctattctacactctcgagaaacaaatgactaacgtggttttacaatacagagaaagctcgatgggcggtcacaaaccgcacgaacgtggccaagatcctcgaagctaccggcacgtctattacgacaaagggcagtttctatcccgccggtaaagagcccggtccgggagagaacccaaagctgtacattttggtggaaggtgaaaccgagctgtctgtgacgaatgcgatgcgggagttgatgcgcttgttgaaggagggcacgattgccgcggtggacagcgagtctcgggctccggcatcaggccgatacagtgtggtatagaaatgcgcgcctgtaacatacattacttgcatcaatcgtaaccaccccttgggctcctagacagatatgtacaatgttcgtcagacctcatatttcactattctgagcagctcagtcccatcttctcgcagcagcagccccatctgcatcccttgcagctctctcttcccgacataaactcattcaatgtctgcgcttgcgtttgagctctctgagccgccagctttgatcctagcttttgtttgttttcagatcccgacgcctcggcacgtttctatcgagtaaccattagcaagcgaataaataagctgaatggaagaaaccagaaaggaaagaaaagaaacgaaaagaaaaagaatggagagcccacctgagctgccagagccgccttagctcttgcatcattagtgccttgaagtgaccccccggccgactctgttcctgttcctgaactgcgagcacccgcatttgggctaacaccaccccccaaggtcctccctggcgactcgaaatgcgattttggttttgactttgcggttgcggggagagatgcgcgcggggcggagttagctgtgttggaaccgagggcgcggccaggacgtgaggagggtccgggctcagcttgattcttggagctggagcacatgttccccattatgccggtttcttcgcagtatgttttgaaaggattaattatttgcctatgtggattggtcgactgcagcagcgtaggcactccgtagctctagtggatatgatatgcggggagggggtagttattgatgagattgcaatgttaaagcccgtgaggaatagtaaaatgtatgagtttttttggtcacaataaagtaatgaagcttcaagtatattcaggattgtatagcgagtgacttattctgtggatatgaatgttgaatggcattatggactcggtcgaggtcatgtttctgcctatgcttcgtcgtcgataagagataggacttggcggtgagagcacgtgccagggtgctctttccggatctggaccgagtcttcttgcggcctgaatctgcaggcaaggccagtagttagtagcaaaaattatcgagcagttgcaaacgagccacccagcctgaataatagctgtcgatataggcgacgcaatttgaatctgtgagcagtgcagcggttccgagttgacgtcgcgaatgttgtgatattggcaaactgccattcgtgggctcagtggctcactctgctgctaacccccaaggtactcccccacggccgtacggtcgtccgcagggtcctcaatgatatcagaaaatcccagctttgcatccccaaggtccccatcagcttcttctgcccgccatgcctcaggccagcccatctgagtctggctgctgcttctgccccctctccccctcccaccagcgcccacaccaattgtcattggtatgtgatcgtctcaatttccctcgcttgcatcaaattagagctagctaacactgcaccttgggtaaagcacacaaaggagatagatgcttttctgctgctgtcgtgctcgtttatagagcattcgtcaaagtcgggttccgactcctcgcccaaaaatccaggcaagatggctacccacacccgaaaagacgacttctgcctcgaatgccactgggagtccttccatctagacgggaaaagctcggaagattcgtccgtggcccctgcgtccgactactgccctgataaagagcataatgcctcggagtcccatgtcgacggcgcttgctgcgacaccgacaactgctctattacttgtccctctgtttgcgacggcttcgttgactgccacgacgacgaccatcaagatccctgctccgcgtctcgatgtgaggagccgcattgtcatgatcctgcccccatctgttttgatgagcactgctttgatctgaaccatagtcctcaggtcgcagaccactcagtagagtctctgtttgggcttggaatacctatgtcttccgacaagaacgacttcacactccctctagagcagtgtcaagctgaagagacgtccagagcagctgagcatgctgcagcagaagtgaatgctcacatgtgcgctggcatctttttcaatccagattcaatagcaatcaccccctgccatcctcctcacagctaccatcatgaccctcactccgctggcatctcgcatatcccgtcagcccagaacatgctcccgccgtctttaccgatgcaaaacgataccaacccttccgatgtcttccatatgcttgggatgtgtcccgattactcgaaccacttccacgtccatgaagcgtcaaactgcccagagaatttagacagcggcgccacgtcaaactcctttacttgcctccatctcgacgaagacagtatcaacagtctaatgaaaaaccctatctacacaagcaacaatcttcctgcaaaaggaccttgccggtcgaaccatcgttgccgaactcactacctcgcacacgctcatcactactctccttacgcccgtcactcccgatcaagcttcagttcacagacactccctagccctggtgaaacaccacctccgttagacggtggtatatcctcggtaataactagcccagactttcccccggcagacggcgagatccatgtctgcaaatgggtttcaaattcccatggagtcaaagccagctgtggcgataccttctcgagtccttgtgctcttcaagagcacctcgtttcgcagcacatgggtcctgtcaatggcgccaagggaactggatactactgctgctgggaaggctgcggccggcctggggaaccgttttcgcaaaagtcaaaactacagggccacttccttacgcacagcaattgtatgtctctctggtcgactatgtgttatgcgaactaacgttctagacaaaaattttcgatgctcggtatgcggaaaactcttcgctcggcaagaaactctcgagcgccacgaacgaagccatcgcggcgagaagccatacaaatgtacagtatgtggcaagtcatttacagacagcagtgaattaagtatgtcacccgcctcggtcgtactactattgctgactgggtagaaacccattcacgaactcatactggcgagaagcccttcaagtgcacctttcctggatgcaccttccgagaccggcgatgtcta

SEQ ID NO: 5947 - DNA, 6835 bp, Emericella nidulans
gatatctatactcaacttcgcagccaaaacgttggtccgtccgaaggtccgccacgttctcgatgagcaacccaacccttccaggatttcgtatactcatgaaggattttaaccgggacggttgtaatcggaacggaagtatgcggctatcacccctgtctatttgtgcataacacgtggacgtctctatgaaccgaggctgttcaggagtcttgatgtctcctggctccagaaaggtaatgcaacttagactatcaaagactcaaaagagctatcatggcgtcctggatgagcggaacgggctctgccgtcagtccgaggagatgctgacccacccaacatcacgaactgaaccggtttgctcgcgagtcgcgtcatagcacacagaaactggtcatgtgatcgacagaactacagtattggcctttgtatgcggaggtgtgatcttcgctgtgatctaatagagaagtaggatgatgaattgatgattcaataacagagctgctaggatcaacaagactacgggagattctggataagatcgactgtcgtgcaagccaggcagttgctgttgagaaatttgagatagttctcgatatataggatttatatcctatctggaactccagaagtgatctggagccatgtcatgactaacggccctaactccgaaacagattgtatttagaaaagccaaataaaaaaaaagaaaaaaagaaaacacaaacacctgttcctatactcccagtaacgacatatccatcccatcgcttcaagcaaataagaaattaagagattattaaatatcgtcgtaatgaacttttctcttaaaatgcattagggctccgtgactccacaggagacggcggcggtggcggtgggtattcaaacgccgaaggtgacgctttgctccttgttggtgttgtggctgcagcagtaccggtgcccgtggtatccgcgacatcgagggatttggccatcagggccgtatagatgtctttctggctgaaggtgggtgtaatcacggacggggcccggggtgttgatgtgacggccggggaggtcattgtatgagctcagttcgagtggagatcaataggccgcgacaccgtggatggcggatggatttatagaggtttgctcagggagattattgcactgcagcgctctgttgatttcacacggtcagtgagtgttgaacatagaggacgatcttatatggtatgttggcatagctagaagtgtagtgggcttcatggcatggacagggcaggctccggaaaccgccgagtgtacggaatgaattggggacgatatgatgattgatgatatattgagcgtctccgggattcacgcggaaggtcgatgtgtacggaatgaagatcagtactggagaatagagatgcgcctacctggtctagacggagcagaggctctattacacacggcgtttgcaaattggcgagggactgggctagaataatatgtatcgaggatgcaggcagacgaaggaagtgaatgcgaaagtgttttatacaccgacctctggacttttgacagagagtctccacaaacgagggccgacagagttggagtcgagcgaaggagaggcagctattcaaacgaccaaaaggaccggcccagccagcgtagctcgatccggcagcagaatgcaaggcaagaataagattcgtctcaaccagggaaggattgtatggagccagcgggttgtttgtccgatctgcccaacagtcgggtcaggagtcagtccactgccagcctcaccttgcgtgagtacgagcgagagatcgggatgcgtcgcctgcagtgtggactgttctgttctgtggaggcattggcggtcgaccaactggccgggaagcgttgcggaaagcggatgcgcgccccggggtgagagactatggggaaatgaatgcaatagattgacgagtgaacattgacctcaccaccgtgtggggaagttgctatttattgttcattttctggaatgctgacgaggtcgaatatcggcggatctcaatcggaataggaggtctgcgattagacaatgccatgacaaatccttagacggctctctgttattactgatcccaatatgacagctggacggtctgggtgtcgcaggagatactggattgggaaactaagcaagaagtactccgtactacaagagtccagtcttttgtgcaactcgtacaactcttacaactggtgcgactggcccaactggtccaactgctaggcgatcgaattgcggagaattcggcaaggagcgccgatcgttggcccatctgcttgctctcgtctttgcagaaacatcgtcgctctgcccgaccgtttcagcagcctgattgagagtctggggtgcccgatccgttgataagacatccagggagattggtacttcgtgtaggattctggactgcagctcaattccaaccaggtcctcgaactggcgtcggcggctatcgatatcatgatgacggttggcccgtgaatatggcggagtcgcaaactgatcgaactgatcgtcacctgattcgtggccaatatcatgtccaattccatgtccattttcaggaaaggagtaatatggatgatgtattccgtatactccgtagcttccgtcgtccagaaggatagatcttcctccttctcgtcgcttctaggtcttttccgcccacgaatccgatccccccggccatctccccgtctttacgcaggggcaacggtgatctggcgccacgcggctagacagtggacaatcaagagcccaaacaaccggaccccatctaagtggtccccgccacaccgcttgaacaggccggggtctagacggggatcctgctttaggctgagaagcggtgtacacaccgaatgggataacggtatgggacacaagtcgagggtgaggcaagggcggctggatgtgatgagctggctttcgaggctggaatccccttagcccttgccggccttgccgtcgtcaccttctgaacgatggtgcctcaaatgctgctagtattcgctgttgtttcaggtcatcgagaccagattgatcattatatcgcgtgccgcgggtcttggctcgatggtcaatgatgtttcctatgctcgtttgccttattgagcaagcagaagcagagtatgattggcgttttgtcccatatgacaggcgtgggcggctccttaaatacccctagggcccgggtgagtcctgtgtggttcgttcttagctttgcagtatttgtctcttcaaatttattaatttgacgctgtttgttatatccctgactgtctttgaagcgggcgtataaggtgtccggatcaaagtggttagtttattgcatggatatgccttgactttaagacaaacagcgacaaagtggtgaggccgcggctgcggtatactcgttatagaggtagccctggctaccaggttgagaaaaaattcaccagccgttaaagtaccttgtgctgtttttttggttctcgcaatatcgacatgaatccaccagatacatctgggaggccggcgcattctgggttcagcgaatatgcactgttcggcaacagagggcagaattggcaacctctcatttgaaccccaactttcgcatgcagtcaaattcttttgcagtcagattcgagccccagggttgacgtgatgaacacaaacaataacgacagacgctcagcgagtcctttatttgttatacctgcaactaggacctcaagatacggactctccgcgtttggcgacatcgagaacaacttgccaaaggccatattctcatgaaattggaagttagttgaaccgtttcggcctgtcaacctcggtcttgtggaaacggcgcgctcgacagcatcgacgagctggcagtgtgcttttgagacgcggtcttcgttgtggcatcgagttgacatccagttctagcgctttcatggtccgcagtaccaaggcgatggtactgtaagggtttattttgctgctaaccccgtatccaggctccggcaacgtgcatgcagattcatatctgctccatgatacgtaacccgcgagttaaggacataccatgacctttgacctacccgaggttggggctatatagatgactacagcccgtttgcgatcgatggtcagcaactagaaggttctagctatgcttaacagtattagcttgccatcagcccaagggtagacgccggtcccggccgcacctaatatccgtattctgagcgcatggaatatctccgtctctcgaacatgaagcttcctagcgttcgggtatgtgacgcacttatacagcgagaactggtccctaagaatgtgaagaggcgataagagatgtttaagactatgctgctgcagaaactggcattcaattagcatcgtcaagctcatggattggcctctcacttaccagaaaagccgaccttctcctgggtctaatgtcaacagttttgcgggctggaccgcaactacatagtactaacttgacctacagttcctgtatgcccaggttttgatcgggatacccaacttttgttaactgcattgacgaccctcgttagggtcacgccgatttcattatcgctggagtttgttttgagccagcataccatatatataaatgtaggtatgtatcacagtaagtgatgtacaactttttcttcaatatatattctgcagctgttacagacggctactccagtagatttgatgcttcctctagcttacatcttaggaatatatatagactttccattgagataatatgtatacactgtagacaggaagagtggaaaccctatccccccccagcaaaacagaagcgcaagtcaactttctaacattccaccatagctatgacgagattgaattgatgaccgtacctaggaggttctttggctctagcgcaggtgacttatgtctgagtgtcttgataatagtagaagcaaagaacggacgaggatgctctgctcacttgggggcatggaagcagcagcgtctatagaatgatcaagaaaaccgccagcgttggagggattgcgaagctgcaagtgaatccagtggacttacgttttgcaagtctacgttcttgataccggtatcaagcggtgtcatctgctttgtctggttggtaaagtattgtgccttatcatgtcatgttcatcatctttaattcgctgacacacaaacaacgggtatgaatatgcaggctgaccagctgataatgcatgcaagagcccacggaccgcaatttggctgcgctgagactctggaaagagatgtatcatcttcgtcccgacgttgtcaaggactgattggtgtcatgacttatggattcagtctagtcttcacgatgtgactcgaaacgtctacggcatcgagatgctctgaggctatatgcatgtcgcatattgaatgccctatcacaacagatatcgcgaccacaaagtatccaacgaattctgaacatttccatatcacgtcttcttggctacgtcatcgctggggaacgaaacgcgttaacgggccagggtcggaaccacctgcccgactaagaggcgccatttagagtatggatctggggagagcgaatatgaattctcgaacccagtggttttggcaactattacctcatcaaccaagtctgagcgccccggtgcacgtataagcagcgagcgttcgctccgtgtactgggagtagctgcggagagcagcaggacctggaaccccactcagtccggatcgttacttggacgttggggaacgtgtttgccagaagaggtttctatggggtaatagttgactccatggtgactgaggcatttttgggatgaaactgagttgtatcatgtattatccgtaccgacacaaagtagtattaattccagtgttgacacggtctgccattatcgccatggcctggtcatgatagggaaggggctcttccccgcaaaacactagcagaaattgaggatagtagccagctcagatccaggtacctacctgtcacgactcaggatcgcccgtccccgcagggtgacctcgcggcaatattggtaaggctggcttgaacatgaagctgggttctaacacgttacacgggaaggtttccattcccagaccttaagacaacggccctataccaaagatcgagaattgaggcattttcgaatgctttcgccatttattacacagaacgaacaagggatgcagccgaatccaagcagcaagcagcaatgatttgcaagactctagccatcatgacaaaccgaaattccgctttggaaactacttctagctctacagaacactaagtggagggagcctggccacacgacagctacagtcagctgattgggtcttatagtatcattctctctcatattattgtgaagtatgagcgaagcggtggctgttttggaagcctttcggcatcgcactgggcggccagcagcccctttcgaggactgtttgcctgaatcagggcatggttgttgcccctggtactcaagggtcatactctgaagtagatgtgttctggtatttttttaaaaaaaccttcaaaattctacacgcctcgtgatctaggcgggtttgaggcaattgtttaaaattagcacgacacactgcacagcctatcggagaccccacgaggaggactctgagtaattttcaacctcagtacgccaagcctcggtcagacgaaccaaccggatttagataaaaggaaggatccgctactactcttgagtataggagtaaggccgctcaccttggagtcgaattaatcagagctgctca

SEQ ID NO: 5948 - DNA, 8734 bp, Emericella nidulans
acgaagaacttcttaatgctggagggattaattgggatgataaccagaagaaggccttgttggacacggcaattaatgttgagttgctaaaagccatggttggtattaggcaggaggattcatacgacaactactgtaatcaactgcgcgaaatcaaccacaacctccagagagtggccaggcttacatgaaaaggatctcgcgctgctgtccccacacatattgcttgtacaagaccagcaggaggctctgaccggaccgggacccctgatcaaatggactgggaagccacccatgctcaaattgcagccctacaaaaggaagtcgcggccctccgtacgaaagggaccaggaccccaagaaaagctagtcaggcgcctgcagaggagaagcaaaagaggttgtctgagggcaaatgcctacgctgcggtgatcctgaccactttatacaagagtgccctacaaaacctaccaggcgccctaggcaggtggccacagttcaggaagaacaagaccaaatggatgactacagcgagagcgagtcggaaaacaaataacctctgtgcaaagtcgcgtacagaggggttatacagctagagaaatactacttgattggcaagatttcaacagctcgcgcatgaatacccccccattcttggtagaggcactagtcaaccatacctataatgcttgtacaatgatagatacaggctgcctgacctatggggtaatcagtgacaagtttgtcaagatacatcaaatacccactatacctatccacccgaaacctttcaagggagtgactgggaatatagaggagattaataagattgtacgggttcagctagacatcggggcgcatacagaaaaaggagcctacttctatgtgatacccgataacctgggctatgacttgatcttgggactcccctggctggagcaacatgatggaaggttagaggctaagaggggcaggctgtacctctgtactactggagtccgtctatggagtactacaaagaggcccttaccaaagctgaacatagcacagatatccgccgcaaccatgggaggatttatacaaaggaaaaggtgccgtggccaagatattgagatatttgcggtctcattggcagatatacagaaggcactggccccaaagagacatattgacccccgtacaaagctaccaaggcaatactggaaatacctaaggctcttcgaacaagacaaagcagaagaactaccaccgcaccggggagatgggattgatcacaaaatcgagctcgtacaggaggagagtgggaaggatcctgaagtcccctggggccccctttacaacatgacccaggaagaactaatagtcctccggaaaacactctctgaactactacagaaaggcttaaaccgcgtgagccattccccagctgcagccccagtactctttgtacgaagaccaagaggaggactgcggctctacatcgacgaaccgtgctctatatgccattaccaacaatgaccgctatccattgctcctgatccatgagacactgaaccaaattggacaagccagatagtttactaagctggatgtgtctgctgccttccataagatccgcatagccaaagaccaggaatggatgactgccttccgtacgagatacgggctctttgaatggctagtcacccccttttgggttggctaatgcaccgagcaccttccaaaaatacatcaactggaccctccgggaatatctagatgaattctgctcagcctatattgacaatgtacttgtctatactaatagggacctccgccagcactggaagcacatataaatagtcttgaagaaactggaagaagcaggcctatatttagatattaagaagtacaaatttgagtgtaaggagacaaagtacttgggctttataatacaggcagggaagggaatcaaaatagacccagagaaggtgaaagcaataaaggaataggaaacccctactactataaagggcgtccaaggattcctgggctttgccaacttctaccaaaggttcatccctaacttctcagggatcgtacgcccactgaacaacttgacaaagaaagggacacccttcttgtagactaaggagtgccaggatagctttgatctgcttaaggaaaagtttattactagacctgtcctagcaaccttcaacccttcctactatatagtagtagagactgactcctcaggttataatacaggaggagttctctcttaatataataaaaaaggggaattgcacccatgtgcctacttctctaaaaggaattctccagctgaatgcaactatgagatctatgacaaggagctactcacaattatataatgtcttgaagccatgatgcttatactgcgcttatgtaaagaattggagagtatgggggaccacaaaaacctggagtacttcttctccccaaggaagctgacataacaacacatacaatggtccttatttctcagccggttcaacttcaagctagtatataggaaagggtcagccaatcagagagctgatgcactttcacagagagaccaagacatgcctgatgatgaagatgacagggtcaagtctcgtacgatgcaactttttacagaaaaatacttggggaagatggtagttgccaccctccaaccagctgaagagcaaccatgggagccgtacgaaaaaagtgatatgtggaaggaggcactcaaacaggatgaaagatatagtgaagcagtactgtgcctgaaagatggagcaaggagatttcctccacacctataattgaaagtcggaatctcagaatgccagctggacgcccaagaccatatcctcttctgtaggaggaggtaggtgcctgatagtaaacagctctgtacaagtataattcaggctgcacatgactctatattgacaggacatcctggctgagagcaaacatatttgctggttagctgtgaatacttctggcctaacatgtcccgggatatcagaagattcgtccggaactgtgatatatataggaggaccaagtcttggagagaccagagaagggggctattaaagcccctccctgtgcctgatcgtccctggcaggaggtttcaatggatttcattacagacctaccagagagcgaaggttgtacaaacatcatggttatcacagactgattaaccaaaggtgtgatactagaaggaatgtcagaaactgactctgagagtgtggcctgggcactcgtacgagtacttataagcaaacacgggatcccgaaggctatcacctcggacaggggaagccagtttacaagtgatacataggcccgcatatgtaccctgacagggatcaaccgccggctatctacagcctattatcctcagactgatggatcaacagagagaatgaacagcacagtggaaacctacctccgcatgtatacctgctatgaccagaaggactagaacaggctacttccacttgcagagctggcaattaatggccgtacatcaacagcaacaggggtcagccccttctatctaagccatgggtacaacctcagcccatttacccctaccaaggaggtagagcatctagctgaagaaccaaccaagagtcctatccagaaaggggaagccatcgtacagaaagttaaggaagccctagactgggctcaagcctccatggcctattcccaacagaatacagagaatcaggctaataaacacaggagcccggccacaaactaccaagtaggaaataaggtctggctaagtctgaagaacatctgtatggaccgacccagtaagaaacttgactggaagaacgccaagtatgaggttataggcctggtgggcagtcatgctgtacggctgaatacgcccccagggatccatccagtcttccatgtggacctgcttcggctggcttcatcagatccacttccttcccagaagaatgatgatagccagccccctagcatcatggtgaacggtgaggaagaatacatggtagagaaaatcctggacgaacgtcgcaggagatacgggagaggtcaccggctggaatacctagtgaaatggtcaggctatgctcagccaacctgggaagctgccacagctttggaggaagtacaagctctagatgagtggctggattgtacaaaacaatatagacttcaggacggctcactaaacagagatgcatatataaaggctaaagcaacatgacctaccctgtgacctgtacttcctacatagagggaggggggggtactgttatgggtcctttgcctatacaaggaccttagaccttagtgactcggccaaggcctgcgctgtcctgaaggcggtgagccacctacaagacttccttgcaacaacaatccttctttctcatttcttctttagcgattccttcttgtacgtacggcacgtctagataggaagatccatctaaatacgtcccttaacagaaatagacagtaaacaggttgtttttgtccaaaaggctgttgttttgcatattggatctggaaatacttagcagccagttaccaagtgcttgacatgtacttatactatcagcaagatgttctattttaacctgtgttcatcctttggacgcaacaacatatatatggccatatatatgtgttgtgggatattctggaagatcattaatatactcaatatttaatattgtaagactggaggagcttttagctcttgtaagcagaataagcatgtctggttccttttatttagttagcaagcagtttaaaactaacttgtaagcagtggcgcaataactatacctgtatttctaaggcaacatcagcagctggctcaataagattattatccaaataggttgaaatgttctcaattgaaatgttcccggagtctggacactccattgttctaactgcttagcaaccaattgctaaatgctttgatatttgtgtaggtcaagtatcaacgaattggaaaacagaaattgaattacaagtgtagacaccagtatttaaagacctcgtgcgggacaaacttgcttaataatgatcttggcactcacgtgcagggggtgtaggccgcatgagctcaccgcttggctcatgcggcctgtgtacacggggacacaatggtgacattagattgctcgcttaactaatcatacatccaggcatgaggctacgggtttaggggctggcaaaaggcgcgatgggccaagtactgggccaaccagctgggaaagaatgaggtgtgatggtcagccactagggaccaagccctccagaagatgtcatttgtccttagattaactaccagtggtattgaaggccaacctcatctaccagtccttgctggccgtccacctctcagtatgtctgtcgtgcgaacattattatattattactattagcatgcctcattcgtctatgtattaagtatcagaaagctattcccggtagcaagcacgcctttgcctgtctactaccacaaggagctgtttcatagatgtggaacaaaaccggtttgtgacgcatcatcaagagaacatataccatatcatagggccagcggactatgattgcctggaccatcgagaaactagaaccggaacgggaagacccataagctatgggcaacccaacgttgctgttagtgtttgttctttagccttgtttgactggctctgcatttgaagaagcagccccgtctgccgtggttgactcgattttcctggggtctggctgaacgacaacctgctcaattcgtgctctttcttcatcagtggcctcggttagattaacggcaacctcttcaccgaagttcttggcgatctcttccagagtaagacgagcagtttcagggaagaagaaatagatgactacggcagtgagcggagatcacggcggcacgtagaaaaggtggcttaccgaaaatgaagaagaacgaccacaagataataaccaggtagtatttccatccggagtttgcaaagccaattggggcagtttgcaggaggatcagggtggctgagtatcgttagcttcatagcccttgcaatgtagcaaactagtagcgggcttaccggcaaactggccgaacagtgagaatcccatcccaatgggacgaatctctgttgggaagatctcagacacatagagatacatggttgtgtcgcaacatgtgctgtgattggattaggaaacttctggccggcatggcattggaaacaggtgttgcaacgtacccctggaaagcaaggtaaaggtacatcatgaggatacccacggcgtttcctcctcggttcgtagttccggcgtattcggctgtcatggcagccaggattgatgtggttatgatgatgccgacaaagccggttatgtacatgccgcggcgagagttgaccttgtcgtgcagccatgcgccaagggggttatagatcacacctgagcatatcagcacgcttttcgtagtatcaagtgcgcgcacaacgcttaccagctgtagtcagccaaacggcgctgagaagcaggggcatactgccagtttcgccgagaccttggtagagtatgacagcgtagttgttctgcctcgtacgtcagtttgctggcagtagaatgactggaccatgaataactcacaataatcagtggaccaccaaactcggcaccccactgtgtgaggaagccgataatcatccgcttccggtatgaaggtttcttaatgactgcattccaaacatttccgtacgctgaaagcttttcagcctccaggcggatctgttccttcatctgggagtattcttccttcgcaacaaggttatcggggtcgtcaggagacttgcgtagcttttctagagtcaattttgtctcttcatccttacccttagagatcagccagcggggggatcgaggcatcaacggcgagcctgcaagcaggaccagcgttggcaaacactgcaggcacagaggaaacctccatccgaatgtgcctagctttccctcggcgtagtagcaggcaaagccaacccagcccgccagcatgtatccgaagaccaagaagattgcatggtgtcccacaagccagccacgacgaaatgcgcttgacatctcagagagatacataggacagacggtcaccaggataccgatgcctagaccgcagataaatcggcctgcctggaacattctagagagacgatgttaatgaacggatcctaattatgaccggctaatgttggagacctacttgagcgagttcgcgcctccttcaagtgcacctccaaacagggagaaaaatgcgcccagctgaatattgaccttgcgaccaaagtaaccacaagcccacatcagaaacagcgtgccaacggcaccgccagcgctgaagacaccattggcggtagcaattgtaggggttgtggtcgagtcatatccgggctcgccttccacgggaagatcgaagtaggtgtaccatcccggctgtccgatagtactactgataatggacgcgcaataaccgtaggtctagcattggacgtagagttagtggtgcgcagtcacggatactgtgatcgtcgaggcaaatgagcaactaaccagcgatccaaccgcgacaaagatggacacaagcctgttataagtgcttgtttgcgagccaaatcgccccattgtgagaatacagcttccacctatgacagctccagcttgggacaagtatcgatcaaaattgaccagtcgcgtcagccagcgcagcagtgcagagggtgaagtccagtcggctgcacagcttgtaccgggctccaatcaatacgattatttttgttctgaaaaagcaccaaattccaagagtaggggacggcgctggttgatgtaggtgctgatgcaaactagtgggattccatcaaggcaaagcacaccgctgcgagttgccgacagttacaaacgttactaggtcttgttgggcaatccttcgtttcttgattcgccagagagcttcgttagatcctagaagagctcctcaacgcccttgtgacccctagcgttgcgctacgcaatgcattggagtacgctgcgaaacatgcatgattagtaagtggagctggacgaaccggggggaagtcagcgccgaagatcagcacgctagagtagacgagtggatacaggcaccaatgaaattttagctagcaggtacgagacatgggtttcgaggatgggagaaagccgtcaggccgccgtaggagggcgagtggagcatatggagtagcccacaaagaatgaagcgcacttttcgtggaactgccgtacttggatagattgacacagatttaaagactagggaagccaaagacaggctacgaaagtgtactatctgttagcctgtagtccgcagtttaccttctaccgatccctcttatggggttggctcgcggaacagagtgccggcgagtaatagttcctctaaatgctacgacggagtgcattttaacttgataaccctttcagggaatatatatataaaaaaaaaaaaaaaaaaaaaaaaaagaggccccgcgatcgctttcccgctgcgagccattctgatagccgccatatgccaaccaaatggcatgatttgtccatgtaacgcaagccgacagtctcattggaggccaaaactgccctagcgaatatatgcagcggactgggacgggaagccg

SEQ ID NO: 5949 - DNA, 10326 bp, Emericella nidulans
tttggtgctacatccccggggactagccccagcttgggtactgcagtgtatatttcgctcgcgaccattgttatgtctgccttatccatgcaacaaggggccactacgatatcacatttcaacgcgggaggcctaattatatagggtggcagttgtactgagagcttctacctagagcttctgcctgggaatggtatacagagctcggatcacctcttggatcctttatcgacgccgttttcccgtgcctcttacatgggactcgtctcacaagatcaatgtgtcttatgcctgacggcctgaactcagcttgagctatatctcacaaagaatgcgcagggacagtgtcccactatacagaatgcgaaacagggcttttgccgtacttactccctggcagcacctgctgactctgcctcctttactcgtgtctttaagtcaaggtggtatttccgggttacccgcggaggttggtatgaaggacagccaaggtcagccagagcaaggccgattgcttccccgctggccagaaaatacaaatctccacgggcaattcgggtataccctgcagatcccccggcctggtcttgggtctataagccctatgtttgcttgataaataggcaatcccgggagccgtgcacatgttacactcttcggtttattttgattcacggccgatcaggaacctctgaagtgcccattgctcaatacttctgttttttatgtccttcaacagagtaatggcgaagcttgagatgtacggcagagggctaggccttcgaatggccattctgttcacttgcctgatggcattcgttttgttcggtaggtagggtccctgggagcagcacctgaggcacggcaggctgatcttgctattaccccgtcttttaggttacaaccaaggggctattgcgggtgtccttgagaatgaggattttcgcaatgtcgtcgagcatcccagttctgctgtccttggggtgattgttggcatttacaacatcggctgcttggctggcactgcagcagccttcatgacaagtgaccgccttggatttcgcaagtccatgtggattgccatgggccttctaacagtgagtacttttcttacgatgtctagatcagagcgaagaattcgctgacattaagcgcagattggggcgattccacaagcatgcgcctattccagggctcaaatgctcgcatcgcgttttatcggggggattggcaccgggatcatgacctcgatcgtaccggtgtaccagtctgagctttgtgaagcgcggaatcgaggaatgtacgtgtgcagccagcctctctccgttggtgttggaatctcgggtgcctactggtttgtctatggaatgagcttcgcccctggatcagtcgcttggagacttccaatcgctgctcagctggttttcatcatcattgtggccatacttgttgccgggtaagtttagctcttgcataccggtggaactttgagtcctagctgaccggcggacttaaagactaccggagagccctcgatggctgtgccgtaagggtctgagcaacgaggcagtgcgagttctctgtgacttttatgataggccggagaatgaccccaaagtggtcgatgatgcggagggaatatttagagccactgagctagacagtctccgcggcgagtacaaatggtcccaggtgttgaagaaggacgagattcaaacgggccgacgggtcttactggcatatggactgcagttcatcaaccaaatgggaggtgtcaacatcatcgtggtgagtataactgcaattcttcgaagcataacttgactaacgcgcctgcagtcctatgtcacgaccggtacctgcccaccccagcaattaagctcaaaggcattactgacaacccttagtgctgcaatacaatgttggtttggaccccaaaaccagtctactcctaggaggagtgatccaggtgatgtttgtcattggtaagttcttcttgccatacctgtcttcaccccatcccaaccccatccaattatgcaacgcaccatccaccccaaaacctttacacttgacgctaagagggacacttctctcccccccttcaggctccttctatcccactttctactctgatcgccttggccggaagaagccgatgatgtggggctcttttggcctgttcatttgcatgatgatgatctccattcttctctccttcaaaggttagtaaataccaactttaactacaaccccagccctagctaaccacgtcaaggaacgccgcaagagaaacctgccggtgctgcgtccgtcgcattcttcttcctcttcatgctgatttatggcgcttccactaactgtgtgccctgggtgtacggacctgagctcctgcccatgcacgtccgcacaaaagggtaagctggccagccatccgtcctcacattcctcgagctatccagcgcaaccccttgcaagttgctagggcacacatggcattggccagtgctacccaacatccttggtgttgatagcagcgaccgaaccctgacttgtgatctaccaagctaactatgttggctttaacagcaacgccatcggaatctcggcgaattggctctggaatttcttcgttgccatgattgggccaacactaattactgatctcgagtggaaaggctaccttatcttcatgtgtatgaatcttgcttttcttccggtacgtttttacatgtctcccagccttcatcgggcatttcaaccaccacacccaaccctccacccactctcctattttctccatgaatatgcaatgaaagaaagatgaaaactaataaggactagatcctttacctatactacccagaaacggccaatctcagccttgaggaaattgactccctcttcatggtgaaagcaaccagccacagctgctctacacctagcgctagcacaagtactagctccactaatgacccggataccgttacgaccgagaagaagagtacggttacggctcagactcatgctcagactcaaactcaggcacaaactcaaaggcagacctccaagaaggagggtggctcttttccgccagtttgagcgctggattaggagaggtgagcagagagctgccatggagcttgaagtggcgtttttgctcatatgtaggttggcgaatagggttctatgggtgtgaccaacggggatgccagattacgtgttcagtgtacggcagtcggttggtgatacagcaaggttcggcaggcgagagtaggcaggtatggagaggttggaggcagagtaactcgactaaccatcgaggtagcgctgtgttggtgatgatgctgatataaaatgtgcgagtgaatagtaaggatagctctaggaggagatggttgtctgcgttcactgcgggagtctgggttgttatttcattgtccctgggagacacatgcagggcaaaggctggaagcacacaagacagactggtactcgtgttaactggattaggtagacgtattagttacatggtagttcaggggggaaaaattctgtatctttatcatatactaccatgatcagagcaaaactggacgagtttcagcttatgtgccgaaggctaagatttgctacatccacattttaacttaccatcaggcggagcgaactacggcactaaatttcaaggcatcgtcacagcttacttttctattttttttttttatcaatttctcttttttttttacatgtgcatacagttatagctgcgtctgctactcatgatatggcagcagaactgggaatagtaggtaggcaggtaaatactcgcgagaccaaagagaaaagcatgaaagtaaaacaaacaaagcaaatcttcgcaccgccaaacccattaaccctgccgtgctgttgtccgacgccgaaaacccaattaagaacgagaacagaacgagaaaacgagttaataaggcagaaagagaagataatgaaaaagggaaaagcagagaggaaagaaaaaaaatccacaaacgtttgccgataatgtctttacgaaagcgaaaatgaaccgaaaaaagaagcgaaaagctggcaatgatgagatcagtagacaaattgcggagatatttggtcgagaatcgtccgaggcgagggtgatattggttcccgtcgagacatgcgtcgtttctcctggcgcgatacggcaaatcgtttcgtctcaaagcgaacgcgcgaccgagttgggatgaacgatatttatgggtcaatgtccatccccgtccccagttccacgctattgttcagtccgacactagccggctgagcagtcaacgtttgcagaagagggagccctgtttcggcgggagtcgtccccagtacattctggcactgctgggtctgtggcttgtccgaggcattgagaatctgtttgccctcaaacaccactggcgaggattggagattgcggaggcaagcctcccaggatgaagcaacaagccgagcgtgagtcaggtcgtcattgaacagataatatgcgggcaactgagccggccccgcgaaaggagttactggccgcgcagaaacaaggtaggcgttgagagcacgatttttcatgaggatttcggcctcagagaggtattgcgagaattggcggtcgatgtacttcttccaaccgcgcacggcagcggccatgtcattgtcatcggctctaacgcgctgccaactgattccaagaagacgcgtagcgtcgtcaaccaatggttcttcagacgagaatgggctcgatcgagataatgaagcgttgaggatccggcggttgtcatcgctatcattttcttgaagttgccgttgtaatctagaggaggcaatgtcatcgaggctaggagctgagggatcgagacgctgcgacttgcggctcgcttgagagggcagattggtttgcgacgcggaagatttggcagcggcaatggccttttcatactcctcttcgtaccaggtcccggtttggctttcggcggagagcgccagcccagtgcgagggttgagcagggtcatgccttctccgtaaataggctcctcctcaggcgctggaggcgcgactggaacaattgaagcgggctcgctgggagtctcctcagcattgacatcatcacgcgacctcttgcgagatggcttgttactgattgtgaggcttggagagaccgaagtgccaaaagggttcgcgcctgagttcagggcatccgcgaaggacgctcgagaactgactccagatgaagcttccagcttcggctggtgagggaattgacgaaaggcgtggtcctggggaggggataggatcattgtcggaccgtcttggaaggagttgaggagcattggacacatgttgaagcgaatcgagggagtcgaacgcgattatgttgagatgctacaagcacgcgacaaatccgatctgtggagtcaagtgagttagacaacaagttggaagcacctatatttgtagagtctcgattcgatcagtggtaaacagagcaggccgacagaaaggacggcgataggtcaagtaaattgatgagacgaaagaagtagtgcgagacaacaaggtaggtaggtaaggaaggaattctagaaaagatggaacaaagtggaagaagagcggagagggagggaggaccgcgagagtagaagcggagatggaaagaggagtggaaagaggagtcgggaagatacaagaagcgacgcgtgagggctaggaagaagaggctgacggatgcggacgagaagtcgattgacgggcgtcggggcttgatgcgatttgatgcggacaatggatgagctgcagatgcgcgacactccaaatgggcttggcacggttgatactgtcctgttactgtatgatatgcagttctgcactcctattcgtgatattttctgcaatacggtaccgtatgataccgcaccttgccaaccacagtctagcttacagcctcagatcggccggtaaggacgcatccatgattggctttgaaagatggggctgcactaggatatacctcccttattggttcaagagcgagagcctgcgcaccgtcccacactggagctcattggagcatggtttcgtgtctcactggctgtccgagcaacaactcaggattgctggaggcttgagtggctgcgctgtaaaaagggtgcctgaggtccttacgtaaccatggaattgtggaagctcagagattgaacatcaaagactctattttgctggtacatagactacctaacaaagaaagaaatgtagtatggaggaccgccagacgatacaagcaaaagccgactccggaccctcgtgctagttaacatgacaaatgttcatcgacccaaatcagacaacacaatacacccttcaattcaaccgcataaccaaggtgagtgaaaggtagtacaaagtagacaaatgggaaaaaaagaaaaaaaaaatttagggaaaaagaagtcccgtctggagcctcgtgcccagttaacactgggcagaaggtgagcaacgtgcgttgactagatccaggctgcatttcctgcatgaggccgtatctaggcgcgcttcgtttgttcctcctagagaccgtctcggccgagcgacattatttttgaaataggtaaaatcgtgacctgatattctatgaaggccgcagaagtgaaagttcgagaataagaaaggaaattttgtcgttcaacatctcaacttcgccaacgcatacaccgacagcgttgccttgatgttcccagtcaatcccaggtcataacttggagaagtggaaaacaccaaaactgctcacgaaggttgatttaagcattgccagtactggcaccgccaagcatgcccttgacgttggcaacggaatcgggagcgtagctgggtgccatggagccaacgagcaagaagaagctaaggagagcagcaccaatgatcacaaagcggcgctgagcggggtgagtggcaccgtattcagcccaggcacggttagcctggctggtgtattccttgatcttgtcgccaccgagcttgtagtagacgagaccaatgagggcaatcgagtaaccgaagaactggagggcggtgacaggagtgttccagatgaccatggaggcgacaacaagaaggatatccttaaggacaccgcaaagggtcatgaccaaagaagaagtctttccgatctataattgactgttaggcaacagtagagtactcaaaatggagattacctaccaggaagacaacggagacgttcagcatgaaggcgaccatggcgttggccaggagagtccagacgccgacgttgtagatgtggtccatagtcagggtaggaacctcaaggaacagagcagtgacaccgttcatgacagcgcagaccggagcgaaatagtaaagggagacaagagggtccatcttgtactccgcggagctgagcaggcgctgcaccatgaccaatcgggtggcctcgaagatgataccggcaatctggaagaggaaaccgatgaagacaaacttgatctcaccgaaagaggcgatgatgacaccgaagacaatgacgctgacgtttgtaagaaccttgaggttgacgggtgccatgcccataccccaagtggcaagcagaacagcaacaggagtggtggcctaaatagcggttattagtttatgccacatcgaatcccaaacagaggtccgtccgtaccttgagcatttggataaatgcaacacttaggtacaagtatgtaacgttaccgcagatcaaactcagactgaagaagagaccgatagggacaatggcgcggaggtagacacgaccagtcatcttgacggtcttgcggccgtcaaggagggttgtagtgcgagcgagaacctgcgtcatgaaagtcgcgaacgccagatgccatgttgtaaggatgatagggaatcctgaaccgaatcgaagtcagcctcgttcgcttcaattgacagcctgcagcttgcggagcaaagtggactcacggaactgagcatagtcaaggatgtgcttgttgaacaggataacacttgaactcagggcaatccaggaactgaaatcatcgcgggtttagtacaatcgtcttgaattgcataggatcggggtcgactcacgtaacatagacggcagggtggaaggtcggcttcgggggttctggcttgtcgacggcagggttgacggtaggcagagtaggttccgggcgagagacctcgccggaggttcttactttctcttcggagctgctcattttgagagcgcgagcttgatcagacagaaagcgttgaaaatcaaaaggtcgcggccgtgagaggctgctttggttgaaccgcgcggagaccagggggaaagacgtgattaagaataaagcggaaagagaagcgcgttacagcgataatagaacggaaagagtcaaaggagggttaacgaatgtgagtctagagttggacgaagcaagcaaaacaagtgcgaaagagaaaaaaagggaccgagtcggagaggtggttaggttggttgatgaggtgaggtgagtggcagaggagggagacgacaggcagggaactttcagttgaagaggaaagctggagggggggcaagacaatggcctggaataatctcctttcaatggaacaagcgcggcacagagtggattagcagctaaggacgaatggattaagggcgatagaaaattggaagcagaatggaactggaatgggatccgcaaaagaaaaccaaaccgcccgtgctaaaggagatcaagcacaggtggctaaagaggacaaattgatatgcccacgagttgtcgcgactggccggaaaacacaaaaccttgatgatgcttgcgtacgacgacgttctcctgctcctcaattccggttagttggcggccggaaccagtcacgcttcagctgcggttactcggctgaggccctggtttcggcctacgtagacgctttttagggggttattattagattctgctagagatcctgagggccgtttcgagttctggacttgagacgtgaagctgggctcttgtacagtagatttcaatactaaatttacagccgcttttgtgcgagagctgggtaaattacacgtaatgtatcataccataccctctctagttagggcgcaacttgacacagtaccgagtaatatgaatttcttgactttctctggagaaaattattgtcactattgtgtttcagttcctgattcttcaatgtgggtcgaagcagatattatttagtggccattgctcgtgggcgtggcgattctgctctctccacattattgctggcctgaggcggcctatcgcccgtggtcgctcagagcctgactgaggatccacggctcattgcattctcgttttcaggccctggagaaccaagtcacttgttcctttcgcccacctgtatgtgaccctgcgtctctacgccttcatgcgctgtcgatactcagtagtcgggctgtatcaaattgacagccataaaagtccgtgggcgccgatcaacatttaccagcaggacaccgactcgtttggcacagggtgcattacgcaagctctatggagcccagtgctcagctacccgcggcctatcccatagtgtccccgcagtccctggccagtgagtggagctggcagcagcgatctgacggcttcgccttacagaacacaaacgccattgcatcggtgcgatggcgttctctctgcagtcaagccgctatctactgcatattctactactgtagcagcgcacttgtcggtatcgtcaaccggacgaggacggtccatgacagtttcggtatcctgtctggtttagtacctaggtacctgatgggctggagacagccatgacgaacttctctactccgtactccgtacctacagtcgcagatggtgatccgtgcattaaagagatcccgaacttcgtcccctacccgatcgtcgcccttggcatgggagttgccatgctcaacgtccgtcgtcaacaagtcaggtctttcggataatcggtctcagtttcgagattggagatctcctcgatatttccccttcgaggaacgacaatcagtgggcctctcttccagaattgtgtttttccgcctcacacttcaggcccgctggttcaactgtccaatatcagccctggtggcgggcactgatcaactgtggccgtcgcagaggagtacgtacccttactccataccccattgaacagacggaatgatccgcctcctactcttggtttttgtttcaagggcgtgcggaagagtcatgagttgg

SEQ ID NO: 5950 - DNA, 4760 bp, Emericella nidulans
ggcaattctatttacggtgttggcggcttttgggcatgaaggttcaaacctcctcattttacttgatttttaagggcggttatttggctaatcgtggatgggaaacagaccatgcagtatctgcctcgacagtatacctcatccgctcgctgggaacggtctacggtgttgcgatcacgtctgcaatcgtgcagaatgagctcgtgcgctccctaccgggggcgttgcgaggtgtaccaaataaatggaaagtacctcccctgcctcccctaccctttcacctatatatgcctccttaaacacatatattcccctttaccattcataacatcatcacccattacatcaacaacctgctcaccactacttctttattattgtgcaggtgatcgacgagatcagacactccgtcagtgcgatctataccctcgaaccagagatccagctcgcagcaagacatgtctactacggcgggattcggatggcgtttgcggttagcgcagggttcggcgctgttgctgttgttgcggcgttgttcgcaagaggacggggcctgaagaggggggaatgagatttcccttaatgggggtctcatttcctgtcctggtagtgactaaactacttctagggttccccatgggacagctggttgagtcgggggaagtagttaggtgagtattacgatctacgggatgacatgttgcttgacggagggtggtggttaggaagagcgccgcagatgttctgttaaaggccgtatataaagaggggtagattgtgatatggaagtagaatcgatagacaaatggcttttgggacaccaacagttcaccaacctcttcagtcaaggcaacaaatgacgtctctagacttttgaaccatatccgtattcaagcaatctatatacactaccatatcggcataccatgatttggggccgcggtgaaagaccactgcgattgctctacctccccatccaacctccatcgaccgtaacaagctctccactaacatagctactggcctcgctcgccaaaaacaccaccggccccttaaagtcctcgggccgtccccatcgtcccgccggaatgcgcgccataatccccgcattccgattcgcatcattgatcaacgccacattcatatccgtatcaatataccccggcgcaatcgcgttcacattaatgcccttgctcacccactcgttactcagagccttcgtcagctgcgcaacaccacccttgctcgccgcgtacgcggggaccgtaatgccaccctggtaagacaacaaggaagcaacattgataatcgagcccttcttcttattcggcgtgaaagaagactctggcagagagaggatgtaagcgccgaactcgcgacagagcgtgaagacgctcgttaaattgacgttgagaacctcgtcccagtcctcgtcggggaatctctcggatggatgccgccgttgaatccctgcacagtttagcaggattgttgggttgtgcccttgcgatacgagcgttgggataatggcctttacggcagaccggtcggaaagttcggcggcgtggattgtggctttgcggcctaagcgcgtaatctggtctcttgtcgtggtgttactggtgtctctctgcgcgtcgcatgttagctagtggatcgttgtcgtgtagtggatatggggaggtgaaatgggtggacgcacctgaatgaggataatatcggccccggcctctgcaagcgcaatggccattgcagcgccaatgccgcgggttccgccggtaacgagggcagttttgccactgagggagaaaagagatgcgacgtctgtcatattatgattggggtgctttgctatgaatgttgattgagtaagagggggtcggagccttcaggtactgttatatagtgctagtgcggggcatccagaagaggatgtttccgttgccgacctcaaagcccgtccgagtcgccccgcatcggctattgctccgatcgggagtcgtccgatacgacggagtatatagtatatggtagtaggctttttgcaaagatctaagtgaagaacgcacacaagaacgcaagtggcattagtcctagtatcaccacatggagatctgattatatccggccacggttctgagagatagtcgtctatttgtgcaaacggatatccattctctttgtgctggttggatatgtttccgtttactcggacaacttccacctgccagggctttgcacttccatgttgattgagtgtagcacattttccgctgctaattataagagcttctaatagcggacgaagcaacatccagttgtgcgcagagctaccagagctcgtccaggcaccgggaatatgcacattcaagactacacatagtctaaagcgccaaaagggaaaacttgtatcatgttacatgatgaactcaatcagacataagccactcgggaaccgcatcctcatcctcagggtcttctgataatagagaaccctcattctcttcatcttcgtgttcagaggcctgagatgcaacttccacggattgcgcgcgggactggacttgtgaaggtgcgcgagagagaatctcgacactggcggacgcagagtcgttgactgacgaggctactgtgataggctcgtcaattgagcctcccaaggcccttgtgacggcggagagcgcttgcgctggatttgcattttggggttgaccaatggtagaatgccgctcggatggtggaatgtctgcgttgtttggcacgacgataaggtcaaatcgtaaaggcggagatttgaccctgcgaggaggttcacgaacagttgggtgtataccgtcgaccactgaagccaatccgccccccaggtcgctcaatgaagcagatacaagctgatcccgctggtcgccatgggaggttctatatctgcgtaattcgcccacgagtgaatgaccttccgcactgaagtccggtagaaacccaccccccacctccccgtcatatgcggaatgctcttttggtggtcgaggattaggctggggggtcaccgtctcggcatcagattcaggaagaaagccgcccgctccctgtggctcgccctgttccatcccactcgcctcgtcatccgcttcaccctcaataacatagcctttcactcgctcagcaatccgaagcttcattaagaggttcttccatgctcgcagaacctcgacggctctttcttcctgctcattctgcagtttctcttcctcgagtgctttcaagacttcttcgactgcttccttatattcacttgcgacaactacccctttgatgatagctgtgccgtggcgtcccttgaaactaaacccggtaacggcgtctgcatagtcgatccctagaattcgggcagcccgcgcagcatctagatgtgtgatatgaataccaccagcgggaaccatactcggtacataaacatccaaatttccaaatgcgttttttggtattcgtccctggacgactggtggtggtttatacagctccgtttggaagaaggcgtagagagcagtttcttcgccttcttcctcatcatccacggccattcccctgtttctcactggtatccgctttagcggttgctcgccaacctttatgtcgcggcctaaacggtaccacttgttcgcactgcgcagaatatggacatctgagcgacgatagatcggctccgtctgacccttcccaccagactttcctaggctaacatgaccagtaacccgcttgggaaagataacctcgttgcgacgtagatgccgctccagcgcataaatagggtggtctttgaagtcttgcacgttccgcggcataggctcggaggctgtctttgcggtcagctcggctatttctagctcatcgcggtcttccaaaaatggcttctcgaagtgttcgaggacccttttccaccaagcttcaccattcttggtcgattcaacccgtagtttacgggtcttggcgttaaacactctagtatagcgacgggtgacgtctcttgctgatgcgtcttcttcaaaagctacgacgtagctcagaaggttataaggatcggtagcagggggttcgagtttgtgcggttttgcgagcgttttcgtcaccatgggatcaataacgacccatttctggaaggcttcgttgaatgcctccacccagaaaaccggatatgaggactcactccgagtgggtcctgtaattgtcagtaaagccattaagccggtcgagggacgtacgtgaagagagaacagtggtattctgcactcccgttggcttgaaacccggccgcccaatcctgcgaataggcgctggttttgcctcacttttggttgaaccatcagtcagcgagtcgggatcgtcagaagatatgacgataggttccggctctggcttttgcggaggttgcatggctcccgagaacggcaacggctgtaaagagcagaccaacctggcctcgacagcaaccgaccgaagaagtgcacagaacaactgagcgccgaaatcccgagagccttgcatagtcttggcctgagcgcgaaagtcgtctaatgacaggaacacttcggcgtcagagatgatagcctcctatagcatattagcaaagtctgattagaggaacgagtgcctaccgttcttcgctaacaacgagtcggggtcgttcgcccagtgtgcacgccgtaagccaggtcttgtgatccctatagtgagtcgtattatgcggccgcgaattctcatgtttg

SEQ ID NO: 5951 - DNA, 6303 bp, Emericella nidulans
  unsure (1)..(6303): unsure at all n locations
gccggtaccacaaagatgtcttgcactccaagggtgttctgcgcggtcaagccggtagttgctgtaagagcatagcagccatgggcagtcaggactctctggtcagcctccagtccactaaccccggaaggtacattagcaggcgacctggaggggcaatgaggggactggggtgccatacgcgccgccagaactatcagatcccgcaataacgaggactcgcccgactgacatgactaagagctatctttgactagggaccacctcaagttgaaacctaggtcaaagcactttccgcttaggttgtcgctttcaccgtcgagttcgtggggacaagccgaagatgaattgcatccggtggagactcgccagaaagggcttagctaatttgacggggtgtatgatataactctacgcactctaagtacaacacaagaccaactctctacccactctctttcagcatctaaagtttttgatcatatcgaccagttatacgtctttctcacgctctacccaatccacgtccagcagtcgagatcttaaaccggatacattccaatgttcatcgtggtgcccccgtcttcatcataagtggagttacagacaagacagcaatggggctgcttaaccggggcatttggagcttttacaaacattgatggcctgaagttggtcgaatgctgagccgcctcgatagtcgcactctgcgagggagcccacgaaagggaggagagcacgctggtgcttacggcattccttaggattttcttatccatcacatttcaggaagtagtcttgacaacaaggctgctttgcgcaggcaacctcatcctgtcatccgggccataaaccgagctctcatcgaaaggcagcgaggaatagcccggttgagcggcttcaacttgaagaagcatcatctgaaaacgcacataccagatattcgagattggccagggctcgtttggcgctcacaaccttacctgtgataaacggtctgacatagacatagtatccccttcaatgaagagcaagacgtaaatcggttttacaaagtatgcagaaaccccaatacagtaaccatgacctttggcaacaacgataccagattcctagcaagtgaccagcaatttctttcccgaatgctttgaagctcgtccggatgccgggtcgagcattaccagcgaggcgaatatcatccatctttaaaaaaatatttagttgaaatcatgttaattagttaagcaatctcattccatcatccaagaataacagtcaaaagcaaagcgccggtacaagcttgaaacaatgcatcattcatgcgtgccggacaaacaagaagccctatccatccatccatccatgggttgtcgacaaaacggcaaactatatacaaggcaaaccaccaaaggctagctggaaagtctaagccaacataaacttaaacaaggcatccatctcaacccattgccttccacacttcttcaagtaagcatcaacgaccccctttatcgtcccaaagcgtacccgattgaactccaccaaagctgcaatgctatccttcttctcctcattgctctctttctccgccgcggcccgcgccttatcgacgtcccataggctggcgaagtacaatagctggttgtacatctgcttctcggaatactcgtacgccatgcgtcccaggcacccttctgcctgcccacgcggacccagacagcggtgcccatacacgctgatttggcgtgttcggttgccgcatgttgattcgtcgcagacaagccatccctcgtagtactttgaggtctgggcgcggatctgactctcgagctgggcgatgatggtgagagttgagattgggtttccacaagaagagttagggcagaacaagccggtgggtttacacatgtggattgaggctgcgagcccctcaaagacggagcgttccttgcagcggcggcaggtgaggggtaagtctggcagcggattcgaagcggacagagtcaggaatctgggattctaacggaaagatctcggtattctgggtgctgtttgtggtggttgtgtttatttggtattttcggacatcaagacctaggcattcggctaggcggacggcgtcagtgccgggtattggggcgcaaagacgttcgatgggggggaatatttgtttgaggaggtagaactcgatgtcgggtttgagccttgagtctggcttaattacgtcttggagggtgtaagagcgtttggctgggggaagagaggaggtttctgagtcgccggatgtgacaatgtaagagatcacatcattgggtcggactgtcttgcctcgcgctagttctcgtaatgcaacttgagctggaggcatcgtttccttgttggggtactcttccgggcgtttagataatttctagagtaagtcagcgagtgctcagaaggaacaaaggggcaggcataccgtgtagatcacgtatttctgaacaggaatagtatactccctcatattgcctgctagctcacgcaaataatcgtgaacacgattcagaacaagctcctggtcgtcgccggaaaggatctcattcagaagacgctgcgaagcctccttggaaagcgcacagtactcacgcctcttcatatcgagacccttgacctcgagcttgtcaacgtatttaccgtccacttcggtcatattgatggcagcgtactttttcttggcgtgcaggaggagacggcggaagacgttatcaatgtcgatttccagcagcttataccgttcgtttacggcagtcttaagctcctccccgaccttgagcgcatcactgatagtgtccatattggtgttgatcatgacggagtcggtatcgccatatatgaccctcagctgtttgctctctactagctccttagtgcttcgtagaatctcacgacctttaaacgtcgtgagcatggccaagggacgagcatagaagcggctctgtgtgtatccaagacatccgtacatggagttagcggtaagtttgaaggccaactgctttgtgtcccacaaggcgagctgttcgggcgtcgcccgtttatccttcatcagcttcttgacctctcctcgacgaccgacaagagttgcaataagacgaggtaggataccctgctccgcgtcggacgcggggacttctggcactttttcgtcattctcgttctcggcctggacatgttagctttgaccaaaaatgagcgtgaaaataacataccgaggatgtgcgatccaccgttgtgaagcagatattgtattcttgaataatactggggtacagactgttaaagtccatgacaagcacgtatctgtcatatagacccctctcaggctcgaaaacgagaccacccttatatttgtcctttttcttcttatccgttgcgtcatcctcgtccccttcttgggcgatttcttccgccttctgcagcttagacgaatacttgtctgggcaaatgtacttgtttttgtagaactcatgcagcagaatgtactcgttacgctcagcgcgagtaccacttagtgttctagcccaagaattgccggcaatgttcgtaagtaccttggtcaaggacaacatctgaagcttcagtaccaaggcggcaataaagtaggtatcggtatcgcaatgggtaacgaaattgacaagcccgtctttcgaggttgcccaagtctttagtgccgcatcgatgtctaggtcttgccgcccgttgccagacccaaggtaaagatcgcacatttccgtcaaactccaggattgacatttcatcatgagtgactaccagcgttagtgattttctagatatacggtgagggtccttaccttgcccatatcgttagctacatcgcacaccaatcttcccgctactaggtgtcgctcggtgaagaaaccaccgcccttgttgaaatttttaggccactctccgcgcttgagtcgtccaaggcgatgccacccaggggtctttttctctttgagcctgctgagcaagatactgaggtcgacttcctggagctgatgccccatcaggacatccggatccattctttcgaatagagctagaaatttactgagtagcatttgctcactcttctccagcatgtacgtgccccgttgcttccggatttctgcctcaaagttcacagggtacgacgaaccagctggccgcatcacagtgaacgtcttgcaaggaagcttctctggaggagtcgtctcggtgagagagatattctcgtaaactcgagcgctggcgactaagatctcctgcttgttctcttttacattgagctgcgttcggaaagcaagactgatcaaggtgagagttggtgggtcgaggttttcagaatcggggactgggctgataagcccgggcttcgaggtctgacattcaaacttacaccacgaagcattgttgacggcagagaaatcggcttcttcgattttgagccagcatgggcccatgatgttcttccagagaacgaactgctcaaataatgaggtgtttgtgccaaaaacatgagaaaaggtctctcccttggtgtccatgggtagcgctggcttgtcgtaaggatagagtagctttaaatactcagcttcctttggtataccaggcatctcgaaggcgtacttgcgggtgcatgctttgatcttgtgcatgcccactctgagtctcgacatcatctggtcgacttcgtggtaaacatcttccatgtcgacctcttcgtcagtctctcgaccgcccttgtgtctgtactcacgggggaggaagtaaagcttgcggaggatgctgtcgaccttgacaaatgcactagcgtaggatccgttctgcttgttcttcacctttccgaataagcagagactgccgttaacttcagtatagtcgagccagaagaagcgcagactcccgtcttgctcagccacatcctggggccgtaacttgccaaaggcacgtgtctcagttgacgctgggctattgagcacgttcaatttgttgcgcacatcgttccacgaagcattaacatctgctgcagacttgaccggagacgaactagcaggagtcgcgtaaggctgctttttgattttgggcggaggcctactgccagaaatgttgacacttggtgccttggcttcgtcatgaccggtagcttggacgacctccatcatattatcatcatcgtcttccggctcttcctttatgaggactgcgcttttcctctcgaccgctttcgtgacgggggaggatggcatcgtgtcgctcattgggatatcgtcgtttgtgtcaagaggcccgtccccgttgtccatgtccagaaccggctcttcggcaaccggaggaactggaccactattttcgtctttaatcgcaggcttcgatgtgcgcgtcttttcagagagcggaggagatagaatgcggactttgcgccgtgtttccgacttaacgacattgtgcttaggaaccgtgttcgagactacattattgtcgacctcgccaagcaggtccgcgagaaaggcatcatcttccgcagtagcaacaggctgcaagcgtacaagttagcccagcgaccttcaaccattttcgttcagcaaccctcgctcaccttgggtttcggagtcggcgccgcagctccactactgaagtattttgaaatcccattgttgatcttctccttccgttgcttctcctcctcgcgcttacgcttagcagctttccccctagctggtaagtcgtcatcatcgctctcatcactgtattgtcccgtttgttcgttccagacttctcgaccgtcgtctgcgtatccctcgccattatcgtcgacaacgaagtcgtcctcgtcaagtctgttgcggatgattttcttgtaaccatcatcgtcaacttcctcgtaaatatcgccctgttcctcgacctcgtatgttgacagacgcttctttccggcggcacgaagagcgcggagctccgccaacttcgcgcgggctgaagccattgtggtttggatttcagcctggcaattattccatagaaatgataggcatggaatgtgatatttggagtgaaatttacccagtggattacgcactggctgacaattgttttggggaaggatgcttagaggctcactcggcaaatcgtgacgncgggttgggnaaanncgcgtttcaaccgcggtggacgcgacgcccgcagcaactccacaatcccgttgattaatttaatccacagtcctaggttacttaaaacagacaataaaggactcaagatgaattcagatcgcttggctac

SEQ ID NO: 5952 - DNA, 14590 bp, Emericella nidulans
ttcttccataactccaagaacaacacccaaactctccataaatccgttcacagcgactctcagcatgcgattcgtagtagccttgtaggtcgtttcgaggacggtcttcccctcatcgccgcccgtactctgctcttggggttcggaactcttaagtgcgaacagcgccggacgtgcggggagagttcggcgtcgacttcgagagcgcgcatagccgaggaggcgagtcgatggcttggaagggggagggagattgtgctgtttatgaggttagtgtgttaagaggggtagaggaggggcagtcttacagagtgcacgggaactcggtatcggaaggctgattggcggccatcttggaagaggcaatggaagaggcaacaaactatggtagttgaaatatggaataagggaatatactaagtgcgtgttttgttggtgtatgcacacagaagttgttcccttgaccagaaacccgttgggttcgacgcgctaaaagttagcatcgacgcactagtatgcctcaggccaaagaatagtctgccgtacaaagatctggcccacgccccaaaatttaccttcgtatctcctgagctaccacggtttttatggctttcagtacctttatttgatttatacaaatggtttgagatatgagcaagcaaaagaaagaagttacctacccttagataatataatgtactaatagaatactcgtggaagaaaatgtgtgcggacaagcacccagctagaccgagaaggtcactatgtttggaccctatagtctgatctgccgggatcgcacctatatagctagctcgctcaaaacactaaatctactaggtaaatagtatgctaaagacgagttatatgagagcgactcttttgatctacgattataaaggggcccaaaactgcttgatcttcgcagatatggatgctgctcttcagaagcaacaacatggcatgaatacaatgaagtagagctagggtaatactatccataaaagtatcctattcctccgatacattgcacggcgaccctgattggtacgagtcagattctagagattgtgtttatgacgttgaagaacgtgacagtgtagcctggaagtgttcccagagccgggagtagcgtagactattaggtgagaggatagagcgacagtctccagatgacagcgtgatggagggtttttaaacctttggcacttatcgatgagaaggttgtttcaggtctgctaagctgggatatttgtgctgtttctgtgggcatctttagatggaagcttgataaaaatggcgtataattcttggtacaaagctaccaatgttctgtatagctcctgccattggttcaagtccttcggaatgtattcttgatgtagctgtgcatattatcaggacttcagcaatagacatccacttcactgatcaaggtcaaatggccagatcgccctcagattcatttcatctcttaccggctcatcatcatccacgtccgggtttgatacaacaacttaaaacatcccatcaaagagttctctatgggctaattgggactccctccatctctctggaggtacccaaccatcgacgcagtattcagcagaccgcataaatcagctcgcaaattctgggctgcctcaaacagtttatactcctttgcatggtttacaagttctacccgcgtgggtaaagggaaggacattggccttcagaccctagctctttccagagccgagcagtttcaatcaactcatggcgtaatgccgctgcaccgtccttccatgtcctataacagtagcgaaatggccgaaagaggctttcatttatcagccgtggatctgagagcttgggtgtaagaaccgcgaagagagttcgaaagccttggtacatagttcaccccctgtagcaaagtctggaatttcatccgagtaccagaacgcaggttcaacactagtactctgccgatcaataatgcctgtaataaccagaagggtcgtcttgggaaacaaatatgtttctcatatgcaaatctggatggaacgtcaatggcgcggcggaatgcggattctatgatcctcggccatctgctttaacaaagagcgggcagattctagaagagccaagtccgctttaggcgatccctgatataccggtctcttttcggtttcaacgtccactcgagtgacgcgcggcaggccggagtcaataaaaccatcacagtaatcaccaatgctcagccctaatggatctggttgtaagcgaagtctctaaaaccggaggggaatctcataattgacatttggccacaacttacagggtccgtaactcttccttgcctaatgataatacctctgctccccggcatcgcaaccccggcatcgcgtgccacaatgcggaccaatacagaagccatcactcagcgattgtttagcaacggaatcgagggtgtcatcggaatcaatgctcccatatgccggaaattccaagtcaattacaccattatggcccgatagatagcatttacgcacctgacttgctggtcgccagccattttgtgccattgatcgcgtagtggaacactatttgcacgctccatgacatatattcgcagccaactgtatcattcatattactgcagtcatgattccagtcaaagatttccggtatggggatggatgtcttcgcttgcactgaaaaacaagcctgatcatcatctgaggaactgatattggattgtgacacttacagtagtgaactgtggcagcttcagaaagtgtagttagccttgctggcctcaccagccgaaacgggagcctggcaacgaattccttggcgttgtccaaagtaaatattaggaccctgttaaaagctccttcgatctttcggcaagctcgaatagtaattgcgccagggcatagctcaataattttcggcaagaagcatcgaggttgaatgggatttagcgtgacccgatctcgagttcacgcggcaaccaccggccgctcgtgtacgtatggggctcgatttcttcagtcgcattagtgttgttcaaacatcctcaaggaaagcgctcaatcattcctagacctctgttcgccgtatttgccgtagaacttgctctgttgactagagaccgcaaatgagaacacgaagtgaatgatcgggtgagaaagggtgacgacggaaccggtccaaatcgacctcgcaacgcctcagggacagaatacctgacgaggcgcggcatatgccgcgagtatgacacacccgccagaagctggcttagacatctttggctgtggtggtgaggtttgccattgctcatagcacgatgtcacctgacgtgacgtgggttcatgacattaaatatgtagaaacaaagtctagtattgctagacatgctaatactgttaagcagactttgacttgtgagaggacgatgtcacttctaacttatctacatttgattcaatcaagggcagtagattctgcaacagtctggtactctacggaacggcgaatctcatgaatcagaagattttgattaagcaaattaacagaagggtattaattaaagtatatgttgcttctcatacatcatatcgaagccttggccctgattatggccaagttgcaagtcatccgctggagttgattttacgcagcctcagcgatgacgtggttgagattggaaagaccagctaaggacgatcagcaggctatcctgaatagcatggtctgaagagaagacttaccagaaccacctaaggcggtcagaaggttctcaaggccggcagcgtcgacctcgccgctctggatgcggtcaacgaggctgtgtgcgaggtcgccgacgttagaaacaatgccatcgacgttgacaacgggttgcacaactgagtaaacgtccatcagttgggtttgaataacagtgtttgagagactgcctaccgtcgacgacgctggagacgacgttgcccgccaggtgaacgacatcctgtacaataccggtgtttcccacaaggtcgacgactccgccgaggacgtcgctcaggaggttgcgaatgccgacaagttctggacagttagcgtgacttttattggcatggtttacaataaccgtaccgttcttggtgtcagcgaggacttcctgggtgtcggggccaagaatggcaccgtcgacgtggtcgaggactttgtcgagttgggccacggtagagttaagcttgacggtgttgaggcccggcaccgcagcagcagtggcggtgctggcgacagaaatgaggcgacgagtccggtgaacttcattgtgatggatttaaaaggattaagagaggtaagagagtgacgctggtcagatagagtggaagtctaggtaaagaatgacaggaacgggatgctctgaaccactttgtcgatgagattgaaagacattgcgcagggctggtggctgccttatatataccggcgatggcttctcgccatctctaccttgacacttctctggttcctgcatcgcccgtgcagatcaggagcggaccggatgctgttcgttgcatagtgattcacaggtacggacatagctccttgtacggaaatagctcctcgaagacgacaaatagcgtggatgaatagggatcgactggaaaagatttggcatcaaatactccacaccagttgccttgatattgggactgtcaagagctgacatcgcctacagtgcgtgtattcagcggccgagcggacttcacgccggatggctggattgtggctgaaatggactaatggcggcaaactggaggccctttggcatatcgatgtttggcataccgacgcttcgcaaaagaaaaaaaaaccctttgaacagtccttgggcgtacctggcttcacctgcggttgcatcatggcaggcaaaaagcaggcaagtcggcacggagacaatgatggccgacgaagctatagaatgtcgatcttgcgcctttatctttgaacgacggccaatcccaagacaatctgcggagaaccggagaaaatatagctgggaaacggcatcgaacccagggttcgtgagcaatagctcggctacgtagtgctggacacggggctggacactgcaccgtagaatgcccgaacccgaaacacgccgctcatgctgcacaggcattacttcgcgaacgctcgcgtggcaggagaatttacggaattgacgattgcctctaatgagggccggcctcccagttggccttaaagggactagtcaggacattacgccttttttggattaaaaccctgataagatgccgaagtcacccggcttgtttgttccaggctcgtcttgtcattagatttaagcaagcagtggtgtctattttaatggccaaaactttgctgtccgctagcttggtgcttaagtggagagtaccctagagtccatggaaaaaaagcgtctggtccctggatctcctgcgctaacggtcgatcaacgccactcgccagtgagcatggccagctagcgcgcccaatagcacaacaacaacgacgatcttcaagttttattgactttaaccaattctgtcgaaatgatggaaattcatttgattgtatcgggactcggcaactgcaatgattcctgactgaggagctgcaaggaatctagaccgagccagtcttgtggaagaggcaatctactcatctggaccatgtatcggctgttccagacataacctcgctgcaattctccctggctgcaaaacccgacagagtgcaagccatgattgccgtgaccaggcttgccgtgaccaggctcgttggtgaagcagaacatgcgagcagtagcgaatgtatgggtgcaaatccgctgagtggcagtctcgctcccgccggtggatgctctacagtgcagcggccctagtgaatgtccggttgcgcgtttatgcacccacgctgcctgtgttgggccgcagcgccgtctcggaggtagtatgggtggcaacggttttgggcggatctgcatatcaaccatgtgggaacgaactgggaatggacgtttggaggtccattgtcaggatttattcaagatgtgctgcttcgcaaaccaccttcagactcgacaaggaccgtggcatggataggttcgtctaaatgcatacactcggtaagaaatctcttagttgtctcacttgactcgcaatcctcgtacacgagctgtaaccgagacgaactccgttgtttattatacgtgactatggccatatctttcgatattacttcttccttgagcaggtacaactgatgcaaccgatctccgcagacgcaccagtcatgccctaatcatgttgccatttcctcctcagaaccagggccatctccttggcaggggccctttcgtgcctttcccttgccacctgctaaaacactttgcagcaggacatgcgcaagcacagaggtcctgccgctcagaccaaaaataagattaatcaatgttgtgttccttagaacactttcagagattaaactgaaaagaacagatactacacttgatctaagccaaaaggcaaagagagctggaaaagaaaagaaaaaaacaagtaaattgccggcgggaacggacgtttatatatctgagaggagctgcgctagcactagcgtcgattaagcgaggagttatactaagtgaggaattcactgccttaatatatgcctgaggctttaacgtggttggtaagcgagctgcgcatgtaagcgagctgcgcacccaaccacttttttacatgctgacgcggtcatctatcttccaacagccaccatgccccgagttcgcgttagttcaagccaaaattgccatgagaaggaaggtcggctcctactggctgtacaggctattaaaaaaaaggagattacatcaatacgcgaggcagcacgtcgcttcaatgtgcctgaatctacactacgtacgcgactacgcgggactacaaatcgcgccgaatctcgcgcaaatggccataaattgactgagattgaagaggaagtgcttaagcagtggattctctctttagatctacgcggagcagctcctacaaaagctcatgtacgagaaatggctaatattctgcttgcaaagcgtggttccaccccaatccagactgtcggccagaaatgggtatataattatactcaacgccacccggagcttgagtctcgcttgtcaaggcaatacgactgccagcgagcaaagcaagagaacccaaaggttattcaagcatggtttaacaccgtacgagccacaatcgaacaatacgggatcctaccggacgatatctacaactttgatgagactggctttgcaatgggcctttgtgcacatcagaaagtgattaccaagtcagaatcatgtggccgaagaccagttctacagccaggaaaccgtgaatgggttactgcaattgagtcaatcagtgcttctggatgggcacttccaccaacacttatctttaagggcaagcagtataaccaagcatggtttacaggccttccgcccgactggcgatttgaaattagtacaaatggatggacaactaatgaaattagccttcgctggcttcagaagcaatttatcccgtcaacagagcatcgtacgcgcggaagatatcaacttctagttcttgatggccatggaagccatcttacaccagagtttgatcaaatctgtacagatcataatattataccactctgcatgccggcacattcctcccatcttctacaaccacttgatattggatgttttgcagttttgaagcgctcgtacgccagcttggttgatcagaaaatgcggcttggcatcagccatattgacaaacttgatttccttgcagcctatccacaagctcgaatcagcacatttaagctggatacaatcagaaacagttttcgagcagcaggactagtgccattgaatcctgaaccagtgctttcaaagcttagtattcaggcttgtacgcctacaccccctggaagccgtggcagccaggcaagcactttttgcccacatacaccagcaaatgttgatgagcttctaaagcaagcttctttactcagagattttctcaaacagcgctcaaaaagtccaccatcaccgtcccataatgccctaaaccagctaattaaaggctgtcaaattgcaatgcaaaagggcatactattggagcaagagaatagggcgctacgtgctgaaaatgctatacaaaggcgaaagcgagctcgtacgcatagatggatagctcatgataatggtctgtctgtacaagaggctacagagctcgaggaagctcataatgcgtcttttcaggcaatacctggtccatgcgggccaccagcagaaggtgcacaaacaccaaaggcacgggcattacctacatgtagtacctgccatagaattgggcatagaagaaatgcttgtccaaataaataataattaatataaaggcgttgtggttgattaaaaggtcaaaatatgggaaatctgtatgcaggtgcgcagctcgcttacatgcgcagctcgcttaccaaccacgttaggtaaatccacagtcggccaggaaggcttgcgaatattatctagcaccttctattgcggagtagctaaaatataggcatacttgtggacttattacaccgtaacgccatccagaccaaaccaaacaaccgagccaagtaaatatgcaaaataaaacgaactaaatgatatcaacgtaaaggttccctgagcgcccaaaccgcattttcacttgccacctatgtctagaacaaaccgtcggtctacctccatctctttgtcatcttcctcgccttcaaatttgagacggtaggtgtctttcttcaaacccatcacttctgcacggtagaatgtggttgtgtcagggtaccgtgcaaggacttgttttccaactgggaacgaaggcaatgcggaccctatccgtggaattggaatcaaggacaccgccgtagtcttatagacagccccttgttcgccgttctcgttgggttccgggtcctgcacgtcgtatcttcacgagatatgcatcggtcaaccgtgcgtaaaaaatgaagatgtatagatctgacccaccttttcttgtttccctcacctgttattccctttatgatacactggatgccctcaccctccacgccttgcttgtttttgttgtgtttgaacacaacctcggcgcccacagttagctgcccgttgcgctctgcaggtgtggctttggcgctttcagctccttcctcaatcttaacctgcacattgtcacgaacttgggtgctggacgcgctggtgctgcgctgcgtaccacccttagagcggccgcctttgtcagaaagaccgcctaccggccctggtgaatctgtagcagatccgtcaaagtcatttcggttcttgcgggactttgacagagaagccgcacggctcagcagggcttctgcctccgaagcctgccgaagtgcagtcagtagacccaagttcttgatgacgtcgcttggttcatcttgcaggatagccctctcctcttcgcatagtttgagcatctgacggtagaggctatctagttgattgtgctcactaagagtgggttctgtgtgcagagaccagtaagctatttgaacataaagtgctcttctgaaccaatgtttccatatgctcaagatggaagacggctggagccgcgcagatagaggtactacttacttcctccctcattgccaatcttctcattcagagccgctatgtgttccgccaaggctttctgtttatcattcttttctttggctttgcgtaagtcctgaagaatcttattccacatgtcagtctcctcgttcgcggcaaggccattgtccctaggcatagggggccctctagggcgattccgagacatcttcgcagggggcttggccacttgaacgaccacctttggcctggaacctggattactgtttccggcggccttcggagccccctcgggagaccgctgcttcttgatgtcgagggcggcccactcaaaattggaaataatctcctgacaattggcgcttcgggtgccgcgagctgctccctgccttaacgagtgtgggcggccagcggaatcgccctggggttgttcagagtgcagggcaccttggatatgcggttgattggggcccggacgaatcgatgtaacctgcaattgggatactgggcggcggcggctgttcttggcgcctgtcgagcgagattccggtgctgggacgcatttgacgggccacggccgatgattggatgattccatgttgatcacggggtcagcttatccgtgacggatgcggtgcgatgcggtggccgaatcaggcaagtctaatgatttaggtcttgtttatttcgaggggtagaagacaagcttagccagctctgctaattctaccagtccagataaaaggcagacagcttctgtacgcaggagaaacacagaggcggcgtcaagagtaaaaaacaacatatttgagcagctgcgaggcaattaccagaaatccacgcagtcaattgccatcagataccccgctcttgagctcattcatctacacaacacagctcggtgtgtgcagtagcttcttgtcttcgtgaaaatgcaggtaccgcttctacgtctccaatgtggtatgtctgttctctcgttctctctttttgagttgacgctaatgaatgtgtctcataggcgtaaatagctacgactggggtagggtccctccgttcgaatcgccgtttcatgtacatgtctaagctcccacaggcaaggttggccccgagtcagcagctgcaaaatatgcagcggccacggcgccctccgatttcactattgaagcagacaaaccttatgcagaagtgggtgttctaggatgcccgtagtcgacacaatgcagtggacgagaagctgatccatgatagctgtggatgggaacccatccctctcttccctcgaaggatgttgaaacgcagcgaaccctgctcgatatggtccaggataacttggctttgatgtctccggaagttagcgaacgatatggtggcaagcttccattcctcttcaaggtgctgtcgatccgtaaagctctcagcattcaggcccatccgaacaaaaagcttgcggaagctcttcatgcccgggatccccgaaactaccccggtaggtaaatcctctctatgtggttctccttaattgaccttatcaattcagatgacaaccacaagccagagatgaccattgcaatcacgccttttgaaggcctgtgtggcttccgacctctggctgagattgtccattttcttaaagccgttgcgccccttcgttacctcatcggcgtacaaactgcaactgactttgagaatgcggtacgcggctttgaaaacaccgaggatcctgaacagacaaagaaaaataaagtcgcgctgcgaactctctttacctcattgatgcaatctgcctccgaaaacatcgagcaagccgcgagagagctcgttgcagctgctcagagctccccagagacgttcgcatcgctggtcaatgctcctgatacgaaccctactaacgccgctgagttggcatcaatcataattcgactaaacgagcagttccccaatgatattggcttgttcgtcttcttcttccttaactttgttcgtctcgagcccggagaggctatgttcctcaaggccgacgatattcacgcctacatctccggcgatattatcgaatgcatggcatcgtccgacaatgttgttcgtgcgggatttacacccaagtttaaggacgtggacactctcactgagatgttgacgtactcgtatgcgccaattgacgagcagaagctgcagcctacggactatccatacacggtgctgaatgctgcggcgtactcgagtgcttcagattcgcttctttatgatcctccaattgaggaattcagcgtggttaagacgtccctccgccgcacaggggcgaaagcgacatttgatccgctgactgggccaagtattttgatttgcactgggggtactggtaagatctcggtaggtcacaagacagaggaagtcaaagaggggtatgtgttctttgtaggcgcaaatgccgaatgcatcattgagaataccggaactgggtcggatgaggagaatgtttttactacattcaaggctttttgtgacttgacaggaaaggaggatatggccaacggacactagggctacaactgcacgtatgaacaaaatttaacgaattctgtttgcttctctgtgcttacgactcagtaatgcttgtttaatatcgttttgtagttcctccgccgggtccacccacagcgccaattccgcagccgaggtcctcaaggcactgaaccggggatagctacagcaacccctcattggatccaagcccctggcgcattctgatggcttccaatacatcaaaatgcggggttcagagggggagatccttcaagatggaattttgacacgccatgacctcgttccgcgtctgattcaaaaccccgctagctgcgcatacaagtcttcaagttaccagcatagcatacccccaaattcagccaattcaacagcctaatggcatcctctctctcagacgcgcctctttccttctgggagaaggccgacctcttcgcaggcaatctgtccgtgcttgggaccgttctgtatagcgtcatcacaggcgtgttccgaggtaaaagcggagcgaagacctttaaccaccatatcgctcacgccgcagttcgcaaggccatcacgcggttgtctgtgcggcagcttcagtgggtttacctggttcttatgctggctcttcttgcgcagagtttgagtagctacacgggtattgcaagcagcttctaactcaatgtttactatagatcccaaaatgcaactaccatccaagcgtatgaaacatacatgaagcagaagaatctcaccctagagattgtgacactcaatcacggcgcccacggcctctgggttgggaataagaatgccagaaacgttgttgtttattaccacggtttgtagacccaacagcacaacaacctgacagaactaacagcgagccaaaaaggtggcggcttcgtcctccctgccgtcccgggacacttcattttccttggtgagatcctcacggagctcaacaaaaacggccacgacgtcgccatcttcttcctctcatttaccctctccccacccggcgcgtacccaacgcaactgcgccaatccgtcgaagccctccggtacatcctcgccgagggcaaaggcggacgagatccattgaatgtcctcatcggtggggactctgcgggagggaacctagctctctctgtgcttttgcacctcacgcatccccacccagatattgacccattgccactgaaagatggcgccgagcttgccggggtctttggctttgcgccctgggtatcgtttgatctaagtgggaggtctatggccacaaatcaatacaaggatatcatttcgtcgcagggcctgaaggtctggtcgagggagtatctagggaagaggcaggagggtgatgcgtggagtgagccagcgaaggcgcccactgagtggtgggttggtgcaaaggcgaagagggtgttgatccttgctggtggcgacgagattttgttgtcagcagtcgaagagtttgtgaataggtttaaagtaagttttaacatttccctgagggttttcggggactctaccccaatctagcacgtgatgctaatactgaattgcagaccgtcgttccgcagaccacttatgtggtcggatatgaggatacccatgtatctcctgtttacagtggaacagggttgggaggtccacaggctcgtgggttaaggaactggcttggcgctaatctttgatccgagtcgtgtattcttcagccgcatgtgctttattcggtagacatgaagcccagtaatcttcattaattcaaataatgctgcgatgtaatgtgttcgttcagattcccaggctacacccaggaaaaatgagatgataggaagtaatgtaccgtctatgaaagaaaacattggacagatggttcggcgtatcaaattcatgaaataaagacaggactaatcatattacctatgaagaaaccttggcggagtatttagcagcagcagtatcgaaaaagtcactcttctcttggatgtcagccagcagtgcatgcgatggctcaaccaattgaaggcgcctataacgaagcccgttagtaaactccatacgaccggaaagttcgagtgaagcatacttctccaaatcctctgttggcttcccgatcagcacgttcagaacaatcgagttcgcaatcaaccccgcctcattagggtatctctcaagagcagcagatattgcagcctcacgtccggcagccgaccgagatggatctctgcgacagcctgtccaatgatcgaaagcggtgcggaagtgctatcgactgaagcgagttcttcgtagacataaaaagcggattgatacttctcgccgccc

SEQ ID NO: 5953 - DNA, 8025 bp, Emericella nidulans
ctccgtcgtgccgaggcgtttggagcaggcaaccacgtcaggagaagactgcgatcttggtcctcttttataagcgacaccttattataagttgcagttcccagtcgtgctgttattgttagctagatgaataaaacgggatagggctagcgtacaggatgcaagaagataggaaatcgacgaaaagcgaccggtatctggtaagcatatcaatatgcgcccgccattctcgttcatgaagcggttgcaggaaccgtgatcggcgtttttgtaggtcaaaatacagaccagagagagcccggtagcagtccatcacggtgtccgcgcttagtgacgaaggccgatccggtaacaaaccggtgatctctacatcctgaaccgcctgttccacgcggaaaagcacctccatgagagctgagacttcctgcaagtactccttctgggtccgtggtgcgttcttcacatcccgggcatacttgtagctaagctgagcaacctcggctgctacctggatgactgcagcgatgttgacgaccagacccaatgcttccgccaatgcgctttgaaatcgagtcggttgtctaacgctggcatttatcagcaccttataatgcccctaaagaggaaattgagcgacaccatacctcggggttgacaccaacttcgcaacagactggcagcggccaatgcttatccttgatacttggcccgctaaatgaaagtcgtgtgttctctagccatgcagctggccttgacgccggagtgagaaaagagcaaagaacatggcggggtaaagtacgaaggaatattggggtttggtttggtttggtttggttttattatttaacgtcactcggcggatcacggggcccacgtgatctgcggcctcccagggggcatctggacgtgctgtctaaacagaactccctaaaactagctagatacaggtttgaagcagcaactatggacaatatatgttggaaatgagcggaagaagcatccggcgctaccctggcctggtcttcgagggcagatgcccgttttgactacctatagattggggggaggggccgtaccctttatccaggtagatgtgtggactgtcgcactatcaagcgctccggcgggcccagttcgggcatatatccttgaagaaggatgattcttgcacgatgcggctgaattcttcagccccggcagctgtacttaagagccagtctattgtttttgacgggccgtcccttatgcatctccatctatctttccagcgctttctggtgtatgggcagaagaagaagtgtactggggtcttggtcttgccacaagagcagctctccaggtagtctgagtggttgaagcgctggtggtatgccgtaaagtctccgtggcctgtacgggcggcgacgagtcggccaagtacccaacggggaagcttgtgctcgcgggtgcggctttcctttgtatggggtctgatatccagggtcttgtaggcttggggtgccttactagcatatgctgtatatgcctctgtacgaagccactgttttgcctcccgtcgtaggtatgcaggggatggggggatgttagggctgtatatagaggacccaagctttgcaagcttgtctgccagctcgttcccagcaatcccagaatggcctgggatccagcggacttgaaggggcttccgtggcctggttaggattgagggagcttccaaccactgggtagcaagctggccgaaggactctgacagtccatgcctatgcggagttggcctatagcttgctagcagggaggctgctgctaggttgtctaggaggataactagctgggtagagtaacccacacatggttgtcccagggctgcgcgtaggccttctacagcgcccatgatttctgcatcatagacctctgtcctggggcccgcggggccatgtcccttggtcaccaggatagggccaaagtagattgcatagccatatcctgccccttggccagttcgcgagccgtctgagtatactgatatctgtaatggggcggggctatagtctttgttgtctgttggaagcatgcgtaggggagggagaggcagccctattatggtgcgctctggcagggggctaaggaggagctggaggatccttttaagcctggtcttgggcctgcttgtggtggcctctgcagctatttgggcaattgggtgtttaatatcaaggctcatgtatctcactgctgcccttcggaggatgctgttgaatagagcctctgggtctggtaggtctgcttcgcggagcagagctgcagtaggggtggtcttgtaggctgggataatagccagggctgctgtacgaaagagagagagcagggagttaacaacccattgttgtctttttcctgtatagaagacttctgccccgtacagagctgttgggagaacacactgtataactgctgcgcgcatggaggccactggacagccacgctgggtattgctaagtctctttaggtgctgggcgagttgtttcccgcggctaaagacccagttaatgtgggctttaaaagtaagctttgtatccagaagaactcctaaccaacgtgtatatagggatggtgtaatctcccctataccaggtagagtgactatagggaaatgctgctgctgctttttagagaagtgttgtatctctgttttctctattgagaaagggaggcctgtctctgtccctaggacagtaatttgcttgtaggcctctaccagttgttgtgagctctcttccagggtattcccagttagtaatatacccatgtcatctgcatagcagaaggagctctctagggtagagactattcttgctgcatatagtaggaagagtattggggataggggggatccctgggggagtccacctttgattggtgctgtagcggtgctttctttgatatgaacagatacagaacggccagtaagccagtcctcaagtagctggagtaagcctttatgccatccttgcaggcgtaggtgagaaaggagccgttggtgtatgacagcatcaaatgcccctttcacgtctagtaggagtaatgaagcatcctttccctgttgaaaggcctcctctaccctgtgtacaaggacctggaccaggtcaatggcagaccgtcctggcaaggccccaaagtggcagggggctagcaggtctgcctgaattgctcttacagccatctgctgtgctagaaggcgctcgaggccttttcctagggtagagaggaggctaattggccgccaagtgttgagttgggtatagtccctctttcctggttttggtaacattattatctttgctgacttcaggcttagtggaaagcagccttcctctatacacctgtagtatagttgtgtgattgtgtctcctaggacaggccaaagctccctccaagcagtggtggcaagtccgtcctccccgggggcagacgggggtggggcacagagagcggcccagcagtgttcttttgttggcaggtgtactgggcccaggggcttgtttgggggtccctcttctgtttgatttggaagcagggcccccttctctaggaggtgactgaggaaggcatttgctttgccctgcggggtagagacctgagccccttgtacattcaggggaggggcagcaagctggtctggatgtctaatccatttagcaagtttgaatgcgtctgtaggtgctgtggcttgttcgatctgctgcttccagtattcagcctttgcccgtacgatggccttccggagttgtttatagtcggggttttgttgatatcttgtttggtgtagtatgtctgttagttctggagtccaccatggggtcctggggagtctgcgagtattgtatcttgatgcgccttgaattgctagctgggatatctggaccagttgctcggctagtaggttaattggtagggttgggtcaggcgggcttgccagggttctggctttctcccagttggtagagccaagcttgtgaataggagaaggctcgtcttgctccagtattattccaattgttgcatggtcgcttggagtctttagatggtcttccactagggcccttagtggtatgttagagaagactaggtctagggtatttggtccacgggtaggggtgcctggctcgaggcgaagttccagctcgtgggcatcaagccagtctaatagtcctgttgcgccaggtgtgacagcatgagactcagtatctggctgccagaatgggtgccgggtattgaagtctcctgctaggatggtgatctctggtggggtatatcctaggagtgtggaaagtgtagagggtgttgagccagcaccagcaggggcaactgggtcattagggggccgataaacattgataatagtaaggcctgccgtgtagattgtggtgatatccggagagataggttccgggagggaatgggctgggagatcccttcgtacatatgttagagttctgggcctggcagtccatcgggttgggggactgaacagctgatatcgtgggtgggtcttggttaggtgttttgctgtatttgtccaaggttcttggacaaggatgatatctgcttcaaaggagagtagcaggtcatgtgcagcgcccccccttcctacattggcttgtagaattttcatagttcaggggagggcagggtttggtttaagagctcctgggtgagctgtcttgtaggctggcttgtagtttgggtactgtctgcttgttgtttagaactttcagctttcttctgttcctgttggaaggcaagccggccagccttgcggatagcagctagagcatccttcgagaggcgggtaataatgttcctctggacatggggtctggctgggcattttgggaagtctgctgcatgtgggccgcagcagttgatacactgtacatggcagttatgatcttgttttgaggatccgcaggagatgcatcggtcactagagcggcaggcccttgtatcgtggaagcggtagcatcgggtgcattgcaaaggcctttgcttggggcgagtgggccttgataggccagacaagccaaagagttgcagggggtgttgtagcttttttggaaaggctatgactgctgtgatagagtccctctctactgggtgttttgagagcttggccatgagaggcttaatgccagtaatgcgctctgcttccatgctaatgtctgcaattgttgtatctatccatccatctagggaccagagttgttttgggatccgggagacaataacctggtggtactctgttggaatttcaaagtacccatccccagctaggcttgcagccttctctgatagtaggaaagccttgccctgttctgttgtagtgattgcatacccggttgatattacttgtacctgtgtgatcccgtccggaaccttcccagcaagggtgacccggatgccatgtggtccaatagctcggaggctggaggaggccgggaggcggaggaagatgcggtggtcagtcttgtttgactgcttcagccttcgttgtgctgtttgcttggcttgcatatggtgttcaggggcaatagtttgccagttcccctggccagttcttggagctgttagggatgcccaggttgtaggctgcgaggtttgcctgttcagggggcttttggaagcttcaggagtgggaggatggtttggctgttccatctgtctgggtggctgtgggggtgcaaccacaggcatctgagaaatctgctgaggggagtcctgctttgcaagggtgacgaatctggctgcaagctcccgggccaggtctcttgggcggccctgtagggaggagacagttagatctagagctttggcaagggaggtcatggctagtttccaatcatgaagaagggctagctggtcgtctgctaccatgccgacctgttcgcagatcgacggggcttgcggcgtatgggatacagggactggagctgcagtgggagtcttctgcggggagaataaggcccttctcttcagggagttccggggtaggggggtcggggtggtaggtcctgagggggggtcagagttttcacccaggagcggagtcgccggacgggttccgcctgggggggagatatccacctccatggggtggaggggatgagcaatgagccaagtgtaagagatcagttattagagcagtaggggtgctgttttcccctcgtcgtgtcgctgtgatgaattatcacctcggtggagcaggtgacgtctactagatgactccacattcacgtgcaccctagaaccggcagtgattgcccaagaggcaatctccaagccatcccagggtctctccctctcgtgaacaacatctctcgactttttgttcttgtctctgattactatatattatatcttactcttatttggtgggactttatcttagcgcaaagtttctggcgttccttagagtcattgcgcatctcatctggttctccgcctgaccgcagttagacatgacgcacctgccttagcgtcccatgactctcctctgacacaatgctcataacccaaaatcctgtccaggatgctgttaccaccactattgagtctttgtacgggacgccaggacttcccttgcgaaagtctttggaatggcagcaagacacttcgataatgccggcgaatacggagaccctcgacgccacgacacggccagcaaagccctcggttctcaggctacaagctgtggatagggtaccgaacgaaggcgacgatgatgaaatctccacggcaacagacggtcttctaagcgacagacggccgtcgctaccaccgctggcaaatccgcaggtgcccgtcttcactctacctgctcatccgttattcccaccacttccggtatacgagcaccccccgtctgcagttgatacgctgcgttacttagccatccggcttgtgtcgtttatgttgtctttgttcttccttctggttgtggtgctcggtgctttcgttcgcggtatttggcttttcctcatcgcgtctgggcactctatcatggggaagagcccgcggcagcaaaggaagtttcatgcggaggagcgagtgcggaaattggaccggagaacgtcatcgcggcggtggaagcttagacaagagaaaagagaggttgatgaagaagcgccagacgactgtcctcccctggagggaggcaaggacccagtcgtcgacgatgtcacgtactatgcgaggagagttgggttagacgtggagacgtataaagtgcagacggaagacggattcattcttacgctctggcacgtttacgatcctcatgaatatagtcctcttcctgccagcgagcgagggccacgcgggccacatgttttcggcggacagaaagatccaaagacatttggtgatgctcgtcggcggaaataccccgtactcttgatgcatggcctgttgcagaattctggcgcttattgtgcgaatgatgatgacagtcttgcattcttcctgtgcaagtctggatatgatgtttggctgggaaataaccgctgcgggcttgagccagagcatataacgatgctagagtctgatccccgcatgtggagctggacgattcagcatatgggtgctttcgacatgacggctctcatatcacgggttctctatgagacagggtatgagaaactgggtctggtatgccactcgcagggtacggcccaaacgttcgtggcgctggcaaaggaccaacgtcccgaactaggcgagcgcatctctgtcttctgtgctctagcaccagccgtattcgccggaccgcttgttgagcgcgtctactttcgatttatgagactaatatagaccggaacctttcggctcatctttggcatacactcgttcatccgcttcatggtcaccgatcgacggtggcttcatgctcacatatacaggcagataagctacattgtcttttgctacctagtcaactggacagacaggcgatgggactatgaactccta

SEQ ID NO: 5954 - DNA, 2289 bp, Emericella nidulans
tagaccatgagctgaactggcttgctataggtaaatgcatcctagcccttgtccgattcgtcagattgtagtggttgcgggaattgctctattatatctattggggaacgcaatcttgaagagctatggtgccttcgagtaagctgtgattaagattcataatatctgagttgagagtcgctttgaatcgagtgctattctattgccgtcatactttggtctcagtctttgtgacatccagtcagagatgaacagataaccccgccttttggtgccactttgctcgagtaatagggatcgtggattgaatatatctgttgaatcagtaatgcataaaagataatgcatacagtgatgatggttctgataattgggggaatgaggatacatacgtgatttctcccctcagaggaatgagctcatgcattagggtgtggtaccagtaggagagcacacagagtaccctccagagctgagttacctaggcaggctattgtaaatctccaagtactgagaagtcctctgccagctttatccagagtggcatttagagagtgagctgggaaggcaggtgacccgctcaccctggcagcttaattgctcaccatagcacatatactcacactgtacttacactgtttctacctcggcaggcatcatttttcagctctcactaaggaactaagggtaagatgcgttaagatgccgcaaaagacaggtattggcaaggctataacctgagccactgctgcctcgctggaatggtttgagaagatgttcctccaccctttcttgctctcatcctcctggaccctcttaccattgtacagtacgcttctcttattccagcagtactccagaagtaatttcgccaagattttgttagtttagtagcttcgagtctcctctttcctaaaataacagcagtagcgagtggcagtagtgaagtagcagtagaagcactaagatgcctactctaaaccacgccttaggtgatacgcaggtaatcattatgcacgggacatgtttgtcaactaagctcgctcattcacattgctcattcagttccctaattctgtgccaactttctctgatcaacgtagagacgctacagactgacacaaaacaaatgggtatagatgctgctcttcagttactgctaccggcctttctggtagagaaggccttgttcagtagcccgctaccacgactcgtctgccactgagggatttcacggtgtggttacctgccatgctctcaactagtaatcaatttaaaagaacaagcaggaagatgatataagcagctggaagactacaaccatttaaggcacagagacagtatttggcttcctctccattctttttctacaaccctgtgatttctcgtcaatgcaggattgactgctgaaaaaatactgcccgcattcaatagaggtacttgcgagtatgggaaacgtaattctcaacgaaaacgtaattttcaagcgagccgccaactcatcgatgtccacgcatatacaacccgtagatatacaaccgcccggccgcgaactctctgggattcgtgggagctttgttggaatggatagctttacaagcgcaccatggtatgcctcccaggcaagcaaatgtgaagaaatagtaagctcatattcatcctcgccgttgatatgcatctttgagcgcatccacaatgccgtcttcaagatatgcaacgttgcttggtatggtgaggcgaacaactttccgcaggttcggaagaggcgagccttattctacgcatgatgtggcgtgccgaaagaggatcgcttaggtacttgtgtggatagagtgaatatgtgctaatcttggggatttccggctcgcagagtaggctaaggcctggtattatcagccgcagctcgccacagtaataagaaggacaaaaaacttccacataccctcttcactatgatgtcttctaacgaatggcgaagaaaaatcaaaggtctcccactcgcatcctcgaacctgtgacgggtcagtcatgagaaatccaacatagcccattataagactagaaagtgcacacatctcaatctgcttcaagttgatgcacaagcatttgagctagttggtccagtggtggacgagatgttagcattgtagccccaaaccagaactcgcgcatttcgtatatatctgggcattagtctgggttgttcagccggcaaatattctccggatgagctgtccaggtcatcatagcatttccagtgaggccattaacagcaacaatgctcattta

SEQ ID NO: 5955 - DNA, 13774 bp, Emericella nidulans
ggcgaaaatcaaattatatatagtcgacgtttcccaaggggaaagccttcgctaatggactgatacagtcgaactcgtggaaaaactggcaaggccggttaaaaaaagggctccccatcaggccagggccaccgacaattgtttgcagccacacaataggcattaacggctcaattccagccccattatttggcatcgaaggccacggtcaagtgggcttggatcgcgaggttccttaacaagaggcctgccaatggatgacacaatatataatatgcacagtagcggggcgtgacggcaaccatgagctgtacaactgcggtcacccagacagccagattgccaaccagtgattggtgcagctgcgatcccggatggattatgcgccgttcggctgtaatttccagtgtgggatgccacagtcagtctgccagggctggcaggccgggcaggagtgtctgtggcgcggggcgctgatctcgaccactgcagggatgctgtacgggcctcacggggctcaggtgcagtacgcctggcagcgccatttggccggatggatggtcgaacaccggatggtgtatgcgcagaaaggctcggcgccaggtcgacgcccatgtagtgcatgtgcaggaggtcacctcggtgtcggccatcctcgggcaggcaacagctgacagacagggcatggagatgcaggctgcattctgctggttaagatgggtttgtcaagagtgcgaagcagcatgatctgacagcaatatatcaagaatcagtcatgtagagagtcatagcagatttgttgctttattatgtgtgtaggcggatagcagaatagaattataggcaagaggaacatagaccgagcttgcaagtacaggctgccagctaaaccatgagagccgattgacaccgtgcacggcgccggcgatgcgttggctacgcgtccaggtcacgcaaacctggtcagacaaactcaagccagcttggtcttgtacaagccagttgtcagcataaacagtgtcatgactaatagatggcaccaggcttgatacaggcatcgcaccgcatgacccacatcgtgccaccagacagtcagctcgggccgtgccgtgcctcaaagcttggctgcacctgcagtgtcaacatcagtgtcataccagcagtatgatggtgtcaagccagtacttaggagatatatgtactacaagtaggcaaggatcatagttaactacattattattgcataactatacaggagtatcatcaattattacaaacaactacccagggtgctatgaagaaacaaaatccacgccacattcacccaagcacagtatcatgacctcactcatcatcatcattgctgtctctgtcgttgttattgttattatcatcgtcgtcatcctcctccacattgtggttgtcatcgtcgtcctcctccaggaagtcaagatcattgtcagcaccggcagccagggcgttgtcgaactcgtccaggcccaccagcatctcagatgctgggactggagcgaagttcttgagcgagcggatctcattccgcagctgaaaggtgtggtacagcactgacagctgtacctggcgccagaactggtatgtttcaagcacagcgccagcaccacatccaccccctgcaatgacccttgccttctgtttgttggccttctgcagctcggcatcgatgtcgaaatggaacttgagggtttgatgggcggcctccttcgtccggggcatccgcgccagggacaaagcccgtcggaccaggcttgcggggaggggaatacactttttattcccttcagcgcaccgagtgcaacgctttgcccggcgacgcttcagcacacagacggccggaccgaccaccttgccagtggctgtgtcaaggacgaagaggtttttcgcacagcggacgcaggggcgatcggcgacgacggggtcggggtctcggactcggggtctcagactcgggctgcagcctggatagccttctgggtctggtcagcatgcatgccagtgtgcaggccgagtactcaccttccttgtcaggtatttgttcgcgcgggcgcgtttctggcgtgtcgacggggctgcgacatcgtcgtcctcgcttgcgacgagggatcgggcgcgacgctttcttcgagtgttgtcgacaacaacagacacaggcttgctgatggggcggaggccaatgcccatgattggggagctgggttcatcgctgtcactgacggtgtcgatgtgctggtcatctgcattgtgatcatcagtagtctcaataataggcttctgctgattctggtcaccgttgctgttgtggtcgctgtccgcgtcgctgtccgcgtcctggctgttgttgctgttggtgtcggtgttgttgttgttgttgttgttgttgttgttgttgttgttgttgttgttgttgttgttgttgttgttgttgttgttgttgttgtgggagttgtcggtgtccgctgcgggctttgcgatcgcaagctcatccacgccgtccgagggagcagggcgctgaggcagagccgtcatcaggctggcctgcagcacacgctcccgctcccgtcgctgattgcggtggtgtctcctctttgactttgcattgacgatggtcggtgtcaggccgggggggctcggggggctcgtgaggtcggtcgagcggcggcgaatcggggtctggggcgcagaggtggccatttcggtgcaacgaggtcggtgggaggatgaaggcgatggttggagaggcgatcgagcagccaaaagggaggatagtgcaaggtagatgatcggagaagattgagcaagcggtgcgatcaatgggagcccgtgatgcgagcaagcaacaacagcgatagaacaagtgatgtgcaagataagagtaataggcagagggaatgagtgacacagcaagagagaagagcaagaggaaaagaaaagagcgagcacgaagggagattgtgcgatgtgtgttgtggtgaatcaagcaagctgtgttatgatgcgacactgaagccacgccatagcaacgcccacatccccagcaacagtattataataagcttattcactacgcgaccgacgagctgtgtacgcgccagcaaggatgagcaatatacaatacttctgatcatgcaaaggtggttcctgacggtgcaagagcccaatgctaacatcaatgctaccgtacgacaacgcgacgacggcaaagtgacgacaacatgacaacaacagagctctgactccggacaaacatgctgcaaaatatggacggcattgcattgctgtcagctactggctgattgaactgcagaggttctgctcgttgatgatgtaacatattgtcatgctcgccggcgtgacgtgatcgcaacgctggcaacatgaagagaagattataattatcaaggcatagctcagtcggcagcattgtacgtacgtcgtaaatgcttgcatgaactggcatcggcagattcagaatgttgtgcacaatgctgggggagcgccggggtgacgccggcgtgtcgtgaacaaggcatggctgagggttgtcacagttgcaacatgcagacaggaggtattggccggcagatcagcatcttatttagcttagggtataatgtgcaagcagacaatgccggctcagacaagctttgtacaagtatcgtgagattaggcattgatgatcaatgctaagatgccggcgtcagatcgatccagtgcagatcctgccccaccaaccatcagcctgcaacatgaacagctgaagtatatctgttacagtagggccagttgcacagtcaggccattgcgcagtccagcagttgcaggccgtgggcgtcgcgctgccacagtaatggagatgccaaaggtgacagatgcatgctgcacaaggatacacacatcaccacccaacattgccaggttagtaaagccatccttggatcatcacgaatactgtacaccgttgtcaggagacttcgacacaacattagggattatattgatgcaaagggagttgcgctgccacagagaggtaggtgactggttgttgccagctggcaagtagttgtagtgtgatcggccgcacaatgatccactctgatattgatcaggaccagccaccctgccatccttctgctagccagagcactggtataataacagcaccatattatcatgatagcagagcccacacagtgaatagaggctgatacaaagtagatataactgctgcagtacacgcccagcccgtgcagagctagtgttcgacgaggtcccagctggcgcagcgccgatgcagcgccctccaggaacccatccaaagccggccagaacttgtaggaaccggtaccaaggccgctggagccggccaggccagtaactgatagaggccctccagaggctgctgcagcgcgctgccagcacaggctggggaagggccgggttcagcctgtcagtcaccccaaatgtgtataccgcccatagcacgagcgaatacctgcaaggggccacagcaaactgtcagcgcctatacagggccgggatcaagctggagccagtaccagcacgaagaccaagaaggcatgtcaccagcacagcgccggggaccaggagggccagctaattatcaaaatcaagtcagggggtgccagcaaggattcagcatcaagccagcatggagctagacatgtgccaggaacaagcttgaggaaagcctgcacagggctggtagcaagtcagcacatgcccatagccagcatggcgccggggaggagcaaggggggaggcggcaaagtcatgcccgaggcgctacgccagggcatcaggggctctgtgcctggggagagcctgcagaggcatactgacaggtcattacaatgcaagaaaagtgccagcgccagcacagagcacgtacactgccaggacatactagtaatatcaccaagccagagcactgccaggatcatgctgacaacccgccagcatagcaccagtacagaacccaagaaggcacatcacctatccaacccaggggagtataagggaaatactatggcatatagaataccagcacagtatcagggagaagctggtattagaacagaataggggcgggaccggcgcaacgccagctaccagcaaaagggcggagcgccagcatcacgccagggaagcacatgggacaagccagcaagacagcgcagcaagccatgcccgcacagtgccagcaacgcgctgggggcataccaggggatttatatcagcagcacagtgcccaggggagccggagaacaggaggcactggatcagagcccgggctacactgggcaagagccagggaggcgccagggagatcaggatcatactagaggtggccacaccagggcagcgccgcgatcacgctggcaacaagccagccaatacatatatcccgcattgcgccggggaggcgccagctgggcgccatgacagatcagcataatactgaagaagagcagcgccagcagaaccccgggccaacgcctgcatggcgccagcccagagcctgcataggtgcacagcccgcgtcgcaccagggcagccctgggggggagccagccaaggcacaacaccagcagtgcgccggctatgcgcccgggacaagcaggccaggagcattcccggggcgacgccggggaagcaccagtcatgcaccaggactgatgagcataataccagaggagcgccagcagaactcctggccaatgcccgggcggcgccagccaagaacccgcataggtgcacagcccgcgtcgcacccgggcagcactgtgggggagccagccaaggcacaataccagcagtgcgctggctatgcgcccgggacaagcaggccaggagcattcccggggccgcgccggggaagcaccagccatgcaccaggattagggtttaatgccagaggagcgccagcaaaacatcagaggcagtggagggctggcaccgtgcctgggccaagcccatcaagccaaccacagtgcatgccatgtagcacacatagagctccagtcaagcactggtagctagcagggcagcaatagcaaagtgcccaacccatgccccatcaaagtggcacctggctcgtgctggcagggaacctatcctgagcccaccacattgccatgctggggcagcgccgggaccaagcccacctatagccccagtacctgttccatggtccgggtattaataattgcagttcgcaggccaacttataggatctaatatatcatggctagtaccaggccagccaagccagccagcaggagttacccagatctgagtccaatcatccttcccatcatattatatatttcccacgtgttatactattgcagatatataattccgtcacccagcccaaccaacccaatatatttcctaatctatatatattatttactagttactagctgtgcccatgacacaggattagggtttaattatattaattatcagatcctgagcaggataattatcaccagcagagccagacaagcccagagggtcaggcccagcagggagcaagagctgccagatacagaagcagcccaggcccagtcagagccagccaggcataccagtacaagtaagggccagtgctaatcaggccagatatctgcagccaggtcagtaatgccatggccagggtttggattattgcagttattaccagagcccgccagagccagtatcagtcaggcagttatcaagtatttgccaagtggttgataacaagggattgttaatattaccaccagagccagtctgagcgcacgcaagcccaatatatatattatatcagtatatacagggcggcagtaagtcaggccagatatataaagtagcaagtacaggattaatccaaagctgattatccagtatttaccagtagttagtataaagtataaatatatataacagtataagttggcaagattagtacagcccatgatttcatggtcaggattttgatagttgtataatagccagcagagcgccaagccaggctaatacaaagcaagccaggaccaagttggtcccccattatcaatatatcagctaacccaaggaataatttgtcgggtggcaggaacagcaaatttagtatatttatatataactaaactagcagatttatacaggccagccaggagttggctatatagaatatctagtatagggtcaatctacagcagattatccaggattagcaaagtagttagtattatatatttatattaccagctaatatagcagattagtgcagggtatttttcagggtcagggtatagttgttgccagttgccagcagataggacatagtttgggtatagatcagccagctggactgagttagtgcccaagccaggccaagctaagcacagcaagcgcaccagaggcagccaaagcatataagcatcatagcagtcaggggcagagcccaagatgggtcagtagcccagggcaagccagcgcaagccccaagccagcacagcagagcagagcccatagatatatttcatggtcagggtatggttgttgcaggatagccagccaacatattccagcacactgaggagatggatatatatataaaagcttagtagaaggttataccaactaatacagaactagtagagagattatatcaaggtattaatattatagtaattagacctgattaggagaagtagcagaataatagcataatcaggattagattattagggatattagccaagctagtaggtgttatgggtcctttgcctatacaaggaccttagaccttagtgactcggccaaggcctgcgctgtcctgaaggcggtgagccacctacaagacttcctcacaacaacaatccttctttctcctttcttctttagcgattccttcttgtacgtacggcacgtctagataggaagatccatctaaatacgtcccttaacattaggaatcgctcactaatctcaataatagtatgaggagaccttttactatgacaatggaagaagaaagtgtcacattgttgctacagcagctccaggagctccgtacggagatgcggactcagaaacaacagctccaagaagagaataacagcttacgggcggaactacaggccgtacggaactcgcagctgagaaaccatccaccagttactactacagttacatctgcaacgcccaccccctacgaacgaagctatccccgtcctcgtcacccggatgtcgaaccctttactggagaagaccctaaggactaccctcctttccagatgaaccttcgtacgaagtttgcaatcgacgccgcctgctaccctacagaggaggaacaagtttactatgcctacagccgcctgagaggaaaagccagccagcgtgtgctaccatggctcttggctcgccagaaatctgagactcctgtgctatgggcagaattctccgcggtactagacaaggccttcggtgaccctgaccgacagagaaaggctcttgtacgagtgaatacaataaagcaagggagacgtgactttgaagagttcttgaatgaatttgacgaagaacttcttaatgctggagggattaattgggatgataaccagaagaaggccttgttggacacggcaattaatgttgagttgctaaaagccatggttggtattaggcaggaggattcgtacgacaactactgcaatcaactgcgcgaaatcaaccacaacctccagagagtggccaggcttacacgaaaaggatctcacgccgctgtccccatgcatgtcgctcgtacaagaccagcaggaggctctgaccggaccggaacccctgatcaaatggactgggaagccacccatgctcaaattgcagccctacaaaaggaagttgcggccctccgtatgaaagggaccaggaccccaagaaaagctagtcaggcgcctgcagaggagaagcaaaagaggttgtccgagggcaaatgcctacgctgcggcgatcctgaccacttcgtacgagagtgccctataaaacctaccagacgccctaggcaggtggccacagtccaggaagaacaagaccaaatcgatgactacagcaagagcgagtcggaaaacgaataacctctgtgcaaagtcgcgtacagaggggttatacagctagagaaatactacttgattggcaagatttcaacagctcgcgcatgaatacccccccattcttggtggaagcactagtcaaccatacctataatgctcgtacaatgatagatacaggctgcctgacctatggggtaatcagtgacaagtttgtcaagatacatcaaatacctaccatacctatccacccgaaacctttcaagggagtgaccgggaatatagaggagattaataagattgtacaggttcagctagacatcggggcgcatacagaaaaaggagcctacttctatgtgatacccgataacctgggctatgacctgatcttgggactcccctggctggagcaacatgatggaaggttagaggctaagaggggcaggctgtacctccgtactactggagtccgtctatggagtactacaaagaggcccttaccgaagctggacatagcacagatatcagctgcaaccatgggaggatttatacaaaggaaaaggtgccatggccaagatatcgagatatttgcggtctcattggcagatatacagaaggcactggccccaaagagacatattgacccccgtacgaagctaccaaggcaatactggaaatacctaaggctcttcgaacaagacaaagctgaagaactaccaccgcaccggggagatgggattgatcacaaaatcgagctcgtacgggaggagagtgggaaggatcctgaagtcccctggggccccctttacaacatgacccaggaagaactaatagtcctccggaaaacactctctgaactactacagaaaggctttatccgcgtgagccattccccagctgcagccccagtactctttgtacgaaaaccaggaggaggactgcggttctgcgtcgactaccgtgctctaaatgccattaccaagaaggaccgctatccattgcccctgatccatgagacactgaaccaaattggacaagccagatggtttactaagctggatgtgtctgctgccttccacaagatccgcatagccaaaggccaggaatggatgactgccttccgtacgagatacgggctctttgaatggctagtcaccccttttgggttggctaacgcaccgagtaccttccaaaaatacatcaactggaccctccgggaatatctagatgaattctgctcagcctatattgacgatgtgcttgtctataccaatggggacctccgccagcaccggaagcacgtacgaatggtcttgaagaaactggaagaagcaggcctatatttggatattaagaagtgcgaatttgagtgcaaggagacaaagtacttgggctttataatacaggcagggaagggaatcaaaatggacccggagaaggtgaaagcaataaaggaatgggaaacccctactactataaagggcgtccgaggattcctgggctttgccaacttctaccgaaggttcatccctaacttctcagggatcgtacgcccactaaacaacttgacaaagaaaggaacacccttcttgtggactaaggagtgccaggatagctttgatctgcttaaggaaaagttcattactggacctgtcctagcaaccttcaacccttcctaccgtacggtagtagagaccgactcctcaggttataatacaggaggagttctctctcaatataatgaaaaaggggaattgcacccatgtgcctacttctctaaaaggaattccccagctgaatgcaactacgagatctatgacaaggagctacttgcaattgtacgatgtcttgaagcctgggatgctgaactgcgctcatgtggagaattccaagttattaccgaccacaagaacctggagtacttcttctccccaaggaaactgacagagcggcacgtacgatggtccttatttctcagccggttcaacttcaagttagtatataggaaagggtcagccaatcagagagctgatgcactttcacggagagaccaagacatgcctgatgataaagatgacagggtcaagtctcgtacgatgcaactctttagtaaaaaacacttgggaaaaatggtagttgccacccttcaaccaaccggagagccaccacgcgagccgtgtgagaaaggtgacatgtggaaagaggcactcaagcaggataaagggtacaatgaggcaatacagtgcctgaaggatggagcaaggaaatttcccccacatctacagttgaaagtgggaacctcggaatgccaattagacgcccaaggctatatcctcttccgcggaaggaggtgggtacctgggagtgaacagctccgtacaaatataattcaagctgcgcacgactctatgttgacaggacatcctggccgggagcaaacatatatgctggttagccgtgagtatttctggcctaacatgtcccaagacatcaggagattcgtccgaaactgtgatgtatgtggaaggacgaaatcttggagggaccagagaaagggactattaaagcccctccctgtgcctgatcgtccctggcaggaggtttcaatggatttcatcacagacctaccagagagtgaaggttgtacaaacatcatggttatcacagaccggttaaccaaaggtgtgatactagaaggaatgtcagagattgactctgagagcgtggcctgggccctcgtacgagtacttataagcaaacatgggatcccgaaggctatcacctcggacagaggaagccagtttacaagtaatacatgggctcgcatatgtaccctgacagggattaaccgccgactatctacagcccatcacccccagactgatggatcaacagagaggatgaacagtacagtggagacctacctccgcatctatacctgctatgaccagagggactggaacaggttactcccacttgcagagctagcaattaatggccgtacatcaacagcaacaggggtcagccccttctacctaagccatgggtataacctcagcccatttagccctaccgaggaggtagagcaactagccgaagaaccagccaagagtcctatccagaaaggggaagctattgtacggaaagttaaggaagccctagactgggctcaagcctccatggcctattcccaacagaatgcagagaatcaggctaataaacacaggagcccggccacaaactaccaagtgggagataaggtctggctaagtctgaagaacatctgtacggaccgacccagcaagaaactggactggaagaacgccaagtatgaggttataggcctggtgggcagccatgctgtacggctgaatacacccccagggatccatccagtcttccatgtggacctgcttcggctggcttcatcagatccacttccttcccagaagaatgatgatacccagccccctggcatcattgtgaacggcgagaaagaatacatggtagagaaaatcctggacgaacgtcccaggagatacgggagaggtcaccggctggaatacctagtgaaatggtcaggctatgctcggccaacctgggaagctgccacagctttggaggaagcacaagctctggatgagtggctggatcgtacaaaacagtatagacttcaggacggctcactaaacagagatgcatacataaaggctaaagcgacatgacctacccctatgacctgtacttcctacatgaagaaaggggggggggtactgttatgggtcctttgcctatacaaggaccttagaccttagtgactcggccaaggcctgcgctgtcctgaaggcggtgagccacctacaagacttcctcacaacaacaatccttctttctcctttcttctttagcgattccttcctgtacgtacggcacgtctagataggaagatccatctaaatacgtcccttaacagatgcggcgtgatttgggacacttttccgttatatctgtgcatccattactgtcgattgtcgacgtggctgcatcgatacgttcataagatctaattgcttgaatttgctgagtttcgttgctctgagaatcaggattttgttctaatatcactcaaagtatggcgctcggcagcatgtgttatgctctaaagcactcgtatactcagtgagatggtctaagcggcccgccccgctcttgcaccagccaatctcgctctacgctctcccctcacactccacaagcctcaacctcaagcttcaagcctgcaccgtttcctgagtcccttcctcatttccaggtgatggtttaatcacaagcgcccaaacccttccaagatgacagcaccactaccatcaacagaaacgatgccagcccgccacctcttacaaacgatgttttcctcgctcactcgcgcgcctttaatctcagccccatcgtctgcatcagcgccaagtcccactccctcatcttggacgctcctccgcaccttgaagagtgacaatccatacgacatccagggcgatcttcacggaaccgcaacatgtcacccgcctacgtacccctcagacagaaactaacgatacggacacaagcggcgaagg

SEQ ID NO: 5956 - DNA, 2865 bp, Emericella nidulans
ataggtagactgttcgttttccaaacgaagtttgtgattcgaattcactagtcataaaattatattattatttaaagtaatatgaatatatactaagatatataatataaacggttataagttaatggtagactacttagctaccacctaagatgtgtcgattcgaattcgactagccgtaaagggttagtagtttaataggtaaagcgcttttttgtcaaggaagtttatgccggttcaagtccggcctaacccgagattactcgtttaattaattgaaatgtaaacgtattaattctaaaaatcaactaattaagggaaagtttccatgggtagggtaagatatttgctaaatattgtgcgtttgcacatagatgttcgaatcatctctttcccgaaagagtatagtttaatggtaaaactgtaagcttcaaccttatatttcttagttcaaatctaagtactcttgaatataaagagatatatgtatatataaaatgatatatatatattaataataaatccacaaaaaaaaaaagagtaaagtaataaataaaataagcaaataggaagggaatatatttattaaaatatttttttataaaaactgcgaattgtaggttctttaacttaaccggtaaagtgtgttcttgataaggatatgttcagtgttcgagtcactgaagaatcaaaatactaaaataattaaaaagagagttggctgagtggtaaggcgactagcttgagtctagttaagttaaaactttcatatgttcgaatcatatactctctgaataaataaaaatataaacaggttagagccaggtggttaggcgtcttgtttgggtcaagaaattgttatgttcgaatcataataacctgaatataaaaagtataaattgaatatctattcaataaaggtgatatatatcatatataacttgagaaatcaaggctagtatataaagaaactattatggataattagctatatattaaagaaataaatgactagataaatctaggattctaagaaaaatcaagtaataaacgaagtgaattgaaatatcttagtaactttaggaaaagaaatcaaacgagattaatatttagtgtaaactaaatattaaaagcctaataacaaaacttgttaagtaaaatggattcaaatctgtttgaataaaggggaaccttcctctaaggctaaatataatatataagcgatagtgaaaagtaccgtgaggtaaaatttgaaatagtagttttataagcagctcaaataaaatttaaataaaaaataagagcgtaccttttgcataatgggtcagcaagttaattttagatgcaagtaaagataaccaatttaaattataaaaagttatgattaaaaaggttattttaacttagataaaccaattatgaaaaaatgagttagtatctaaaattagacccgaaggctagtgatcttaccatggtcagggttataaaagcccgaacgggttatcgttgtatagatatccgaagaattgtggtaagttagtgaaagacaaaactgactagtatagctggttttccgcgaaacctatatgagtaggtaatttaattaacatcttagcaggtacagaactgtgatctcggataatatcaattgattttatcaacatcggggggttgtagtgactttactggagagtatttgcactcggaatggcaaagatgaatgttgaataatcggacatagtgcgataaggttgtatgtcaaaagggaaacagcccagaacaagagttaaggttccaaaattattgttgagtgaaattaaggatgtttattattaatacaatcaggaaataggcttagaagcggccattttttgaagacctcgtaacagagcactgattaaattttagtaataaacaccaaaaatttaacggatctaaacaatataccgaaaccttgtacacatattataataattatatatattaattaatatatattgtatatgtggggtagcggaacattggataaatattatttattattacttctaagatataataagtataaatattattttaataataataatttatcaatataatccaagagagaatgctgacatgagtaacgaaaaaggaataacctcgccttaagcttatggtattgtattaaattttcggtgtctaaaaatattaatcaaaaggtaattttgatgatatttatatatgtactaaatattaattagagtatataatactcttagttaataaaagtaaaaaataaaacctttaaaaagtaataaaggttctggaaaattttttactatattatatatatattttatttagagccttagggactagttatataatttcttgttaaagttttcaagattgtataaagtataattttaatataaaattaatcaataatatatatatataataagttatatatataccgtacctagatactatcacaagtaagcaagtagagaatacaaaggcgtttgagtgaacaatcattaaggaactcggcaaattgactaccgtaacttcgggataaggagggccattattataatatttaacgtatatatgtctgtaaaaagatatatatatgatataattaaatatataataagaggaaacataaaataatgttgtacgactgtttaataaaaacacagcactctgcaaagattaaatatcaaagtattgagtgtgatgtctgcccaatgtcggcagggtaacgaatcttccttggtatataactaaggttttgaaggacaccccaataaatggcggccttatctatgagggtcctaaggtagcgaaataccttgcccgttaaatcagtcctgc

SEQ ID NO: 5957 - DNA, 4372 bp, Emericella nidulans
  unsure (1)..(4372): unsure at all n locations
ccggtaattgatagaactgcccgttactcaacattgtacacgggtccgcgatattgcagtcattctcaatatcagcccgtgtcattgccgttctgctcagcccaagcggctccaaaattctctctcgcacaaagtccgcaaaccgctggccggatacacgttcaattatgagagcctcaggctacagcagcattattataaagccattcgcggttaaatctctgttctccgtttgccgtggganttgcgttcaagattggaatcaagtcctcctcgtcgctcacaatagttcccctagggcctacggtgagcgcggtaggggaggcaagccctgtggtatgtcgcaggcagtcgatgatatccgcctcctgcccaattcgtggatcgccctcggggttgaagtctgggagatgctgttggatccgatcactccagcaaagcttcccttcgtcgacgagtattgctaccgcggcggacgtgaacattttggagcaggagccgagcatgtacatggactcctcgttcgctgggagagttaacccgctatctcggtagccaatgcttttcttcataatcacatggccacggtggatcacaccgaaggtgatagacggggtccggcatatggagtgaatttggtggatttgggggagacataatgaaagcctatgcagagccgcgttctgttcttgattcattgtatttcagttcagcagactacaggcggaaaatacagagggggtggtgcggaggagaaggggttatatgtgtttgggtgtatctggggggaacggagcggcctgtgaacatttatagagttaccacataacctatctccacccaaaagactagccaagtagcctacttaatcaaaatgtagctcgcaggagcaatgaagattctccactggccgcgaaggtacgtagtcacctcttggactttacaaatggaactacatgatggcttgtttctctccttgcgcgcaacatagttgaatttccagctaaagagcgtacagcagtaaatgcctgccaacctagatcatgatattcacccactgataactatcactaccgcaaagaacctggacttccgttccccctccagtgcgccaggaatgttggtcatatcccctccatcgcttacttgggaagcggctcgccaccaccgtttccggcgcccgcagaagcaagatcattgaatggatacattctgttttaacgggcaaccggtgtcagccgccgactgagtgtgctgataccaacatatgcaatatactcactggaagcggagggttaggtttgttctagaaaatgttagcgaagccttacgcggtcaaaaagaaaacagtaaggaggaatgcacaaatgattcgtaccttgaacgaagcgaggaattggcttgagagatactaaaggctttgtacaattggaatggagttggaatgctgcaggaagacaggaaagaaagccgtatttataccttgcctacagcatccagacttcttaattagggacgagcctaaagcatcgtcttcagggccgatacaacgcacgctggctgccaagataatcctgtgagcctagcctactaaccaccactccctagtattggagtccgatacttagaagtgcctacccaacagatcctccattttagatcaacgaataatgaggttacgcggcatctccgcttgcctccgcgcggggagtcacgctcaggcccagggcccaggcggggcgaccgccggggaccttccccgctgccaaccccagagaatccctaaactagatacttatttacttagtggggccagaacaaagtcatattagatccgtcgactgcggtacctcaacctcgctgggctgttgcttctgcactgcataatgcttacctgtaagcctaccataactcggagaagtctgaaaattcctgtgtgtattaccacgtcgaagaataatgaacccccagagcgttccgccataatctgccattgttgctgtaatatgcttgtttagttaaaatataaaatttagtcttcatggttagttcatggctttgctactgatctttgcattccacttcctaactatttctttcagctctgactaagcgggaatgccacggattcatagctaataccaactgccctacccttgtccatgagttcctaaaatggatgctatgcgtctggttggaatattgatatgaataatacactacctaggcacatggaagactttcaggagctcccgaccttgccttagaaagctgctcctgttaagcaaagaagatatcgtattcacaaccaactaatcttctggaacatacggcgtctcaaatggacgctcagcctggggagtgaggcgtgccaggtgccgacgctcacgagttctccagtcgacgatcgcagtgtgcgcagtgacacggttctattcttgtcagggtgatgcacaagcatgacggcatatggtgtacttacatcccaaatgacaaccgtctttggctcccaccgcacccggacttggtgttccaggcaatgcccaatatgattcatcaagaagcccagcaacatatcactctcctccttcttcatcccgacaattctcgtcgtcactaccccagtcagtgtcttcaataacccggcactcaagtgtggaagggcagagggactcacatgcattgacaaaaagtgccttctcccctgtcactggatgtgtccggacaagtggatgctcaacaattactggctccctccggaccaatcttcctgcacgatagtagggctccgcctgtgaaacaccatcatgaaccccctttagcccatgcaaccgctcccgtagcgcgggtgaaagccgcttatatgcctccacctggttcgcaaaggctgtatccccacccacctcgggcaattcaagcgcgtagagaattgtcatacccggcggctgctcatcatatgtgacgtccgaatgccagagcaccgtgctatttttgccagctaaaaaggtcgcaaagtccccgttctttgtatccatcatatacacgacatggacctccggatatccctctggtaccccggcagttgtgtgcacatgatgccttccgaaatatccaccaaaggcaacggcttgatcaatcgggagatcggcaaattctgatcgcgaaacacaaggaccttacgctgggcagcaaaaagcgcaagttgatcttttgctttgtccgtaagtgaggagagctggattccagtgatctcactgccggttgtgggagtaagcctctttacagtcacacctggaatgaggagatctttgagagacgggtcggcgtttttgccggggtcatggtgcgtgaagggctctagagggggaaggttgtctgcgtggtcccagacagggaggtagtgggggtactgtcttgtgtggtcagattatctgcagttgcttatgatcattttgcacgttggaaggcacgacctactttggcgtccgtagggctatcctcttcgtcaatagcccgaattatcttgggcctgacctcctcattactaacctgaccatcgcgttcagtctggacggccattgtgaagcgcacccttgatcacgatggcaataccagctccctggatagttaccattcacttaccccgggcttccagcgcagagtgatgttatatacgacgtgaagaactccgcatgcaccgatccttggcggccggggaaggtccgacacttccccactactctatactcaatacaagtgtcgtgctaaagcgaggtatactgcacagtaagcgctaaccgacaccaagctattaccaaatgaagacccctgcttacagagcatgaggcgagagaggggctatttggccaggcatagccccagcgtcaagtagattttataaaacaataagtggtgtacttaacatctacaagcagcccatgatggttataacgcaagtcgcattcttcgttcccgaaccttcctttattccataatatatcctgtgtgccggataacctcgcatcctgtcatttaagatcccttgtattaataaactgtgcctgatgacattaccaatcatcattagaatttgtctagcaagcacctcaactaatgattgaagaaacggaatatttccgtggcataatgcgaattgagcacttccatcgactcttacttcggtcggctatgcagcgcactgantgccgcgaccaaagacgatagatatgggcatggtagaacagcctgacaccgaggttgaatacaccaatggcggggtgctgcagatggcttgataggtaataaaaggcccactttgtccttcctctcagtcacggtatatacctgatgagcgggttgcgctgcttggggg

SEQ ID NO: 5958 - DNA, 5714 bp, Emericella nidulans
gcctggtatactcgactcactatagggaaagctcggggccacgcatgctgcagacgcgttacgtatcggatccagatttcgtgatgcacctatctcagcgatctgtctatttcgttcatccatagttgcctgactccccgtcgtgtagataactacgatacgggagggcttaccatctggccccagtgctgcaatgataccgagagacccacgctcaccggctccagatttatcagcaataaaccagccagccggaagggccgagcgcagaagtggtcctgcaactttatccgcctccatccagtctattaattgttgccgggaagctagagtaagtagttcgccagttaatagtttgcgcaaggtggttgccattgctacaggcatcgtggtgtcacgctcgtcgtttggtatggcttcattcagctccggttcccaacgatcaaggcgagttacatgatcccccatgttgtgcaaaaaagcggttagctccttcggtcctccgatcgttgtcagaagtaagttggccgcagtgttatcactcatggttatggcagcactgcataattctcttactgtcatgccatccgtaagatgcttttctgtgactggtgagtactcaaccaagtcattctgagaatagtgtatgcggcgaccgagttgctcttgcccggcgtcaatacgggataataccgcgccacatagcagaactttaaaagtgctcatcattggaaaacgttcttcggggcgaaaactctcaaggatcttaccgctgttgagatccagttcgatgtaacccactcgtgcacccaactgatcttcagcatcttttactttcaccagcgtttctgggtgagcaaaaacaggaaggcaaaatgccgcaaaaaagggaataagggcgacacggaaatgttgaatactcatactcttcctttttcaattttattgaagcatttatcagggttaatgtctcatgagcggagctcgtgcaccatatggacatattgtcgttagaacgcggctacaattaatacataaccttatgtatcatacacatacgatttaggtgacactatagaatactaggatccagagctccagacgatctggacaggcagatcaagctgaacgggagctagccatgagccggagccgcatcaacgtcgctcacagtttgagaaaatctaaatggttataaaagggtatgcaaacggatgggacgaaaagggacagggatccagatgtctagtgcaagaagactgcgccgaagcagcaaaacccacgcggccactgctgaggtcaaacatttgggggagttactagtaagattgcagaagttcgaagacgcaaggcgcggtatctccacgggcagagggggggtatcgaaagcctcttggcagcaaaacaaaaattgcgccaagaagagaggaacagaaaaagagagcagcgacagtcgggcgtgtagggaagcgttcccttaagaccaagaatgtcagatagccggatactcaggagtcacaccgctaccctaactccaggtttcagccgtcccagctcggtggacaagaagacagtttgagagaatgagaagcaaccggactcgcactgcgagtctgccagtggtgctacggcttacatacatcgttcgagtccaagtgaagtgtggtataatccgtgcatcaagccccctttgtcgacggcgcggaggagctaccacgctgggttcagaaatttggcctggcgggatgctatggttatgttattgatgtcgcaggctttgttcagcaacgtcggcgtgtgtacccccagtttggatacgtaggatcggattctggcacccgctccttctggtcctaggaaatgatcttggataagcccacgaatgtataagaaccggtacctcttccttcttcaaaagctacactctttcgttcacctgcttacaggccccgacagctcaagggctcactcatccatttccttgagcagggacaaacgtaatcgcaggcccaggctgttctagggaccgtttaaaaatactgctgcgccagaggattcggacgagaataaatgttccagagtcgcaaacgcttgtccacaatatggaggcacatttgatgttaggttacgccaagtctatttggaagggttcatgtaataacatctgctggacctgatcaagtccagcacgctcaagtaccgcagataggaggccgcttcagatcaagcttgacggcatcagagtttgctgcctgtactgcccagaaaagactctggtatttcgaggccatcccgtcaaagtgaaagcagtggcctctctcgaaaagagttcagaaatctacctgtaccaagggttgcctgctacgcaataatcacaacctgctggcccgctgatagctccctatttagccagctaagcggtagactcagagacgtcgaagaagagaggcggaatcttaggtaacagcaaagttcttgtaacttaagaggatggcacgaagataatcatttattcgcatccacctcaaataccaatgctccatcaaagcagattacggtgtaacaacggcgtacaaactccccggctaccacagcataataccgtccttagcaccccggtgccatgtccttttgagcttgtcttgaattgcgttacactcgaatatgatagttcctaaacattgctagcgctgcttccctccacgccttagagaccccaatcccaaccaacctgagcaagggcaagtcataattgccgtcgacgctcccgcttgaagaagatgatggtgagttgccattgtctgagaggggtgggaagccagggaacggcttctttgctagaaactggcaataccaagtgacacttcgtttggagcagaaagaggaggtctatttggtaatggagtatgagacgaaggtgccgagcggatatgataatgttttggcttgatatccatcacaggtagtcaatgggatagacagtatagtcaattgagcaccgtaaagctgacctggctaagtcgaggaacatcgccagaaatcgtttctcccattattggacccagaacacagcactcgcttccggtagtggtcagggataacctcaatcttcatgaacgccaaagcacagtgaagtatgaggataggatcacttatattaccagtcaaaactcccgggcattttcctcttcacctcctccttctcattcctttcctgcaaatccaaaccccacctctccctccagcaagccagctcctccttccatagatcattcacgcatgggtcacacgaactgccacaacactcgcccagccccggttttggcggcggatcatccacgtcccgcgctgcggctttgatcagctgctttgtgcgcgttgctgtcaggcgcttggcgttcttaatacgcggaacggattcgggagtatatagtggctctgttttggaaggcattttcgactaagggattgttgattagaccagcaacaaggatctgggcaataactataactatgtctacaaagagtcatttggagggcagattgatcacgtgctaagcttcgggagctcccggacttaaatcggatgagacgtgcggatatttccggcttcgacgatttacggcgtggtatctcatggcggtcgaggatcagaaattggggattgatctatttttacggtacgtgtcgtatatctcgaatatagcagtgaaactgatccagaatactaaaagttaactggactgatacatttggggtgaattagacgtatgcttgtcattctcatagcgttcatagcgctcatagcgcagtctttcgtatgcgcacacgcgattccttaaacccacaccgggctgaggtcattctgagctcaaacgtgccgttcccagtccagcgccaaaccacctgcgaatcgaactacaataaccagtaattgaaggcataaatacacaggtcgtcactggaatactataacggacgaagtcgagagcaaaaacaaaacgaccattgcccttggcgcgtcttagcggcgaacagtagtctcgggactgagacaaagcaaagggcttggttgcctggtttgtattcgtatgcctcaggctgtaaagcgttgccggagctccggaagctcagatttttcatgatgcgggtgtagaatgtagctgcattctgtaaaactgccattgatccctttcagtttaaaaaagattaatgtttatggtcattgtacccattggtagctttgacggtggcagtattaaggttaagttggatggccgtcatgaggcgagagctgacgtctacactgcgactacagtgagctgttgaggccacgcatccgcaagactccgttccactcacggatagcgcggccccatggagaatggagggcgaagagagcttgagctcgagctcttaagctgtttatgcggagaactaccgattgtgatctgataaaactacgatcaaagaccgagattgggttgattcaagtcagttgagtagaggcactcgtgaagtggtcattttatggtctatatgtacaatgtattgctggccggaaacaaagggaaaaaaggaaaaatgatgaatagtgtagtacatgataataaaaagaccaccacaattaccaatacctcctaccggctagcgatgcaaccgaaatgaagaaattgtcgagaaaaaaggagtccaaaaatccaatccatttcccattgttgttacactaacgtagctcgatattcttgtcttgtttcattattggcggaaatcgtctcgtttttgtcccattcttctcgtcgtggtgatttttgccaaataacggatttgagggttcccgtagaatcacacgctcaaaccgctatccccgctaattgttgatttagacgtacttgcacatcatggcaaccatgaggtcgaacagaccaatggcttcgacgaaggcgaaaccaagaatggcataggagaagagctggccacggagagcagggttgcgggacacagcaaggaggagggaaccgaagacgacaccgataccgataccggcaccaccaagaccgatggcagcagagcccataccaatgttctgggagacctggaccatggcgtcggcgatctcagaggagtactggcggcgggcagcgaaggcctggcgagcggaggcctggatcatggagggttgctggcgcttgatggtctggaagggggtggccatgcgctgggtggtgagggtgcgggcctggatgcgggcggcagggcgagcgaccttcatggtcgaggccaggcgctgagcgaagacacgagaggcggccattgtgatgtgatggagttgagatggaggtgaggagatggatgatgggaaaggaagatggactgaggatggaagaagagaagaagagagagagagaaagtcttccaggagagaaagggaaccgaagaaaaatggggaggaaaccggccctagcacctaaatacgtctcccgcttaattttcgcccttttttcaccaaaccctccgcgtctttcgtgcgctagctgtcttggggggtgtgtaaaacttgggaacaaccctacgccgaacctcccgtacgaagcccgtacagtgtattctatccctggctttcccagcctggtaagtcgggtcccttcgggacggggccaaggagactgagtttccgggttaaccaataatgccgacagccgtggagcggtgta

SEQ ID NO: 5959 - DNA, 4949 bp, Emericella nidulans
ctctccatgccgtagttggaaaggcttcaccggttgatttcgatgatatgaaaggagctaagtcttcttccactgctacttcgtggagaagatccttgcgagacggatcgtaactgtctagtttagttggttttatcagacggagaccggcatgagccataatgtgtttatggtacttatggggcacctcatagtcttgaatgggtgtctctgtgtctgcatccacccagcccacatagggccgacctttcgcgtgtccatcgacgtgcttgatgaggcccataatccaggccatctcaatatagccttccaggctgaaatctccccgatgctcaatctcccaccgcgtgcgagcattgccccatggacctagttcggagtagcctacaataactgggatgcgggtaagatcgatcattccctcaatattagggtacccttcgttcacatccggaagtggcggaaactgtaggcctaacctggcgtgtctagttgtgggtaaacctgattcgacatcggtgcttgctgaacatatcatagcctgctcacgcgcatcctcctccgcaattgcgatttgtaggatctgcctctctgatatcctttttcgagcggctgagatttcctgtttgatattccacatcgatcctagacctccggtcaagtcggcatatattggtgtatcttcggcaagggcagtcaaggcaggcgtcatcaacgcaagaatattgaaggccatttctgcctgcgtgaaagtgatgactcccagtttctctacctcttcagccacagcgtttgatgtttgcattatagctgtgcctcttgtccacccaatcactgctccgcatatcgttaagtatttcgaccagttctccgagtaaaaccggttaaataaagcctttaaaccgattttggcttcggagtacagcccgtctccaccgaaggtaccctcgttacaggacattggcagaacaatcattgttggcctgttctcaatacgcagccgttccttttcttgacgcacgaagccgataagacgcaaaatgttcacaagcatggcccttagtgcaagctcttgccgacctccaaaagcgtcaggttctccgacttggggaatagcggcaaacggtaaaatatagtccaggtcaccgtccgtaggggaatcagggccatagatatgctgcaccagctgttcgcagtcttgcttgcttgcttggttgaaggggaagaggcttaaagaagaccccttggcgccatattggcggtacatctgctggtagaaatctgcgctctgcgatatagatctactcgttgtgacgataatgcgagcaccgccgctcaacagcccttgaatcacgctcgcagcaattgagctaggcccagccccagtgaccaagactgctttatgggtaaaggtaaggccggtcgtaactccgacatccaacatagcgtggtagatactagtagctttagaatcatacatccagtcttgtccgtcttctcgggtcttgatgtgaataaacggagccgaagtatgcccttggggccatggaggtccatatgccatagcttcgggataatggctgatttgccgtggaagctcatgatattcaagacaacccgcatctgtgattatggtttgaggtcccataggcgggaggttgtggacgaacaaggggtcgatggaaagtgtttggttgcccaaggtaaaaatttcctccaagatcagttgaagcttattcataggggcactagaacgtgattgtagcccaatcaagtgagctcgaacgatttctgaacagtttgcatcccatttgtttagcagattctgcaggcgattttccatatctggggggcaagcactcgaagaatcctggcatatctcattcaagagccgtataagctcttcgcgagaccagttccaccaagagtcgtatttgcggacttgtttaatattgaacgaaggcttgattcctttaatgaattgttcatccaactcggtattcaataaccttatcgtctcttctagttcagcaatgcgggattccgactctgacattgccttctctgaagcgaaataatcgacgccgagatagcttgccaacgagtcaaactgcgccctgtagagcttggtgcgcttattcatctcatccacatcggctacgttcataacgaccggagcaagagactcatggccgtcagcaacctgattcgacggcaccagagatatcccttgaaaggcggcatgcttctctaccaagtcgtcaaggtaagctcgcgcttcatcggcatttgcgagacgcctcgcaggctccatggtcggcgcaaagcaaagaggtatagtggcgtgggattttgtaagtcccagcggctgttcaagtactcttgaatagcactctggttaaaccctgctggcatcttgccggatataaacctcgagataagtgtagacatcgccttgccgggaataccactgaactcgggctgaaatgactctgccaaagatgatagaggttggtcttcgacaccttcgggaacacgaccgaattcagccacaaggtcgccggtcagttcgttttggagggtggattttccttggcagttagaaataagtacagattgggcaattatagtgcatacctccggatagatcacggatggtcttctcaactgggacttgatcaaatcgtcgacgaagtttttgggccgtcatggcgagaatgacatgccctgcctgcagagtgagttctgcactgggaatggcgctcataggcaaagccttagagggagatggcgaccgtttcgtgagatgagaaggtgaagtgggttcgaattggggctgtgtgggctgagaaagcggataaatagcttggtcgttttgatattggtacaagatctcgggctgattatcatggtaagaaaggaactcggggctgtaacaactcgctgaagaacgctgatctttctggatactggcagaccttttcgccattgtcgagagaattgtccggggccctatctcgacgaatcgttgaatgcacggctcgccccgaaagagctgctgctgcgtttcgaccctgcttggatcagtagaatataagggtgggggagtatggtagcccaccatcgcactggagatgccaactgatatctaaagagttaaattctgataccagggtaggttcaccgactgacttacgaaagtaattcaataaagagcttcaaggctcggtcattgctttcggagccacgagctttcctggaaggcgccaggtccgcggtggaggaaatagccatgctagattcactcaagcccactcttgggttatcaaaagaaacagatatcagaatacaactcttttcatcgcaaagtaaactgccccctagctgtatatcctcatacgtgctatccggctctccggctctggttaagcaagctctgcgtttctgcataaccgttgacccatcgttcattatgcgccagatgcgacaggaactgattccggttgcattgtaagtcgtacagtgtaggacagccgtaaaaaactccgaaggcaccagactctaaccattgtatgacaatcaaagaatagggatgagcctaggcgagcctaggcgtggacgccagtgagactcggaacacgatatctagaacgccatgctataggctctggacatggttagcgtgtcgtacgtggtaggggtatggcttaaaatctccgatgcatgcttcggacaaaagagaaagatattgacttcaacaataaaactgtctgcttacataaacagtaatacaaggggtgttatgagccatattcaacgggaaacgtcttgctcgaggccgcgattaaattccaacatggatgctgatttatatgggtataaatgggctcgcgataatgtcgggcaatcaggtgcgacaatctatcgattgtatgggaagcccgatgcgccagagttgtttctgaaacatggcaaaggtagcgttgccaatgatgttacagatgagatggtcagactaaactggctgacggaatttatgcctcttccgaccatcaagcattttatccgtactcctgatgatgcatggttactcaccactgcgatccccgggaaaacagcattccaggtattagaagaatatcctgattcaggtgaaaatattgttgatgcgctggcagtgttcctgcgccggttgcattcgattcctgtttgtaattgtccttttaacagcgatcgcgtatttcgtctcgctcaggcgcaatcacgaatgaataacggtttggttgatgcgagtgattttgatgacgagcgtaatggctggcctgttgaacaagtctggaaagaaatgcataagcttttgccattctcaccggattcagtcgtcactcatggtgatttctcacttgataaccttatttttgacgaggggaaattaataggttgtattgatgttggacgagtcggaatcgcagaccgataccaggatcttgccatcctatggaactgcctcggtgagttttctccttcattacagaaacggctttttcaaaaatatggtattgataatcctgatatgaataaattgcagtttcatttgatgctcgatgagtttttctaatcagaattggttaattggttgtaacactggcagagcattacgctgacttgacgggacggcggctttgttgaataaatcgaacttttgctgagttgaaggatcagatcacgcatcttcccgacaacgcagaccgttccgtggcaaagcaaaagttcaaaatcaccaactggtccacctacaacaaagctctcatcaaccgtggctccctcactttctggctggatgatggggcgattcaggcctggtatgagtcagcaacaccttcttcacgaggcagacctcagcgccccccccctgcaggaattcgatatcaagcttatcgatgccacca

SEQ ID NO: 5960 - DNA, 3512 bp, Emericella nidulans
aaatgaataccactcactatagggagacccaagcttacgacccgacgtcacgccccctgacaaggcttcaactgcctcgctttggatagttagctaagcccgtctgtctcttgcagaacagagatacctacccaacaaaacctccttcgatggcagagtaatcaccatgtgccttggcataggctttttccagcagtgggagccatgtctcgttttcgtccacacactgtgcaaagtacaaagctctcgaccccacttggaaggctctgcggtactcttcctcggtatctttgcggttgatattatcccaaactgggcgttcatcaatcgactcgtcgtagtcagcagcacgcaggtagagcttgtcatccacaatacattgttgccactcgccatctgtaatgcattagatagcttcaacaacactttgggataaccaacctctgtaaaagacaaatccgtaaacccccacttcttcgtcccggtggacacaaatcttctctatcagtcccgccttgtttcccattgtgcaaagcgcagccatgaaccagcaatccccatcacggccctggcgcacatctgaggctgtcggtccgttaacataaaactgaggcttctcaaatatctcctgcagtcggacgataaagtcagtttatggaatgggatctatttcgaatgtgatggcttacagtaactcttttcacccccatcgggcgcatctcatcattctgcttgtcaaggccatccaggcaattccgggttccacctttcaagtccatttcaatatcgaaatgcgggtccgagtatttctgattgaggcgcctgcattcttttgcaatacgattgacagcccgctcacactccttgcgagcttgttcgtaggatttgccggcatcttgtccctttatgatgccctttggggcacgagccgccttggttctagcgtacggattgtctggcaagacggtgtacaccttgcccgggaacctagagttgaattgctcccagaattgtttcaagttttcttgtggcggctgctgaggcctcccgcgcagtctactgttggagcgggagcgagtcgagaggggaggagtgtaaaccatgtccgtgaagtcgtcctcgcgatccaaagtcgccatcgccgtatattctttgcgcgtgagaaggaaccgcaaattctagcttctaaagacgactaatctatgaaaagaaaacgaagcttgttgacaaagacgaaggattgcagcacggctccctcaatatataagctggtattgttcgttagagccccgcttgcccgctatggcggctgagcaaaatggttcttggagaaaagcgatctgctcaataaaccaataacgttaatacttgcattctataattcaaccaatcggcattgaggacatgattctgggtccgcaatcaagcacacgacaaccggtaaataggtcgctcagtgtttcagatgcagacaatgcttggcctgaagggtgcatggcccgccagggagtccacgttgatcagccggggctgagcacggatggaaaaaatagcaccggctcggttaccattattaaacacgagcacagaaacttccttgacatcagcccttgatttccaatgggctgccagaattcttgctgacgggctgctgtgtctcggagactaagctaaggggccaaaaagcaaaccccttgtcctagagaaggaccaaatgcaaggccaagttcataccgcgctgagaataacacaggctcgcagcgtgccggcgtaggataacatgaggaatggattcgacaagaatagtcgacaatggtccccgaataatcataagggctcagggcgaaatgcaggtgctcggacgcagcggaccatgaagccgttcgaagattagctgcagcagctgaccggttcacggtcggagcagagtttcccaacgtgtttaatcgctcaactagcgtggtttctgtgaaggccttacctgatactgttagttgcctgaggctgtgtcgaccgtcgagacttgagctgatggtttggcagggctgaacggacatccaccaatgatggcctacaccctgtgtgttgcccgagccgcttctcagaagcggctggaaaagaattgttaagtcgcctgacgcgcttcaacggcttcgacaactcaatgagcggtcaatatttatatagtgctgatagcgatagtatcgtagcgatgaggggggatgtgaaaacctgcggaagttggagcggtatggcagagggatggagcgggaacaaccacgtgcccagcgctaaaaaatgggggccattgacgcacagccagaacagacggcaggagaaggtcccgtgtcggccgtgctgggcactgcaagtgcagacgatcatcttaactggggcatctcggtatcactgaacgccttcatcgttttccatgatcaccgatcccatctcaatgtgcttacaacgtcaatcgagcaggcaacgtgggaagtagaatgcagtccttgaaatatcatatcctagtttctttcctgccaaattactccataacaaacgccgatgacaaaagaaatacaagaagtagagacagggcaaggaaagtgtatcaagacaccgggaatgaggtataagacgcgtgctggaagaacaaatgacagcccgtatcacctgcaagattcccgtccaacctcagtccaacccctgcccagccgttggtatacgtacgtagattacatgtaagcgggaaactcatgagtcatcgaattagtgaaagccattgcggcgagcgcgaccagaatagtacgagctgccgtgctggaagtatggatgcatgcaagcctgcttggctgaaatacgtcgagcgggatcgtactcgagcagggcttctaatagatcaaggccatcctcttcgaggccagggacgacgttctggatatcttcgcgcttccacttggggaaggtcggtttgaaatcagggaacgaggtgacgccaggccagatagtctcatctggagttccgaggatcctggtacatcagacgttagaagcttgcgtctagcgattcagcagtgaaatggcataccggaagatcttaaagatctcgtcaatttccgagtcaccaggaaatagaggcttgcgagtgcacatttccgcgaaaatagcaccacaagaccacatgtcaacaccagtggagtactgacgaccgccgagaaggatttcaggagagcggtaccatagagttaccacctagagcaaatttagcgacaagcccatgccatggacgatagggaggcggaggatacctcgtgcgtgtaggttcggaggggaacaccgaatgcccttgccaatccaaaatcggccagcttgagattgccatcacggtcaattaggagattctggggtttcaagtcacggtgaagcactctgtggctgtgacagaaacggataccctcgattaattgtgccataaactttttgaccatcgcatctcccaggcctagattcctgctcag

SEQ ID NO: 5961 - DNA, 522 bp, Emericella nidulans
ctttagacttcccgccatcggagataaccatagcagtcaacttcccgcccttgacgcagccagtgtccaaccccttagtgtactcctttaatgacaagcccgacttggaatcatgtccataaatgactgtcatgacaccatttttggactcgagggagagggtttgatgtttgttgaagagctacagggcgttacgttgatggtcatttgatttgataatgcaatgcagttgcgtaccttcgtccacttcacgcccttctctagtgatgagcttggcacgtgtgttggcaaatcgacagtcttcatattcataacgctgtagggatcctgcctgtcgagatcgacgcctgggataagcccggcgtgggcgacgacaacctgtcccatattcgtgatctgaccgacattcaggatgacggggcatgcgtcaagcattctgcttgctcggcggacaactgacgtgctagtcgcgggacttggcggacctggatgacgatgtccatgagtcgcagtgatattgga

SEQ ID NO: 5962 - DNA, 8523 bp, Emericella nidulans
gtgttttatgttcagataatgctttatttctttgtcatgcagctccaccgatggggagatcgacagcgacttccgtcccagccgtgccaggtgctgcctcagattcaggttatgccgctcaattcgctgcgtatatcgcttgctgattacgtgcagctttcccttcaggcgggattcatacagcggccagccatccgtcatccatatcaccacgtcaaagggtgacagcaggctcataagacgccccagcgtcgccatagtgcgttcaccgaatacgtgcgcaacaaccgtcttccggagactgtcatacgcgtaaaacagccagcgctggcgcgatttagccccgacatagccccactgttcgtccatttccgcgcagacgatgacgtccactgcccggctgtatgcgcgaggttaccgactgcggcctgagttttttaagtgacgtaaaatcgtgttgaggccaacgcccataatgcgggctgttgcccggcatccaacgccattcatggccatatcaatgattttctggtgcgtaccgggttgagaagcggtgtaagtgaactgcagttgccatgttttacggcagtgagagcagagatagcgctgatgtccggcggtgcttttgccgttacgcaccaccccgtcagtagctgaacaggagggacagctgatagaaacagaagccactggagcacctcaaaaacaccatcatacactaaatcagtaagttggcagcatcacctaagcagacagttttattgttcatgatgatatatttttatcttgtgcaatgtaacatcagagattttgagacacaacgtggctttccccccccctgcagcccgggggatccactagttctagagcggccgccaccgcggtggagctccaattcgccctatagtgagtcgtattacgcgcgctcactggccgtcgttttacaacgtcgtgactgggaaaaccctggcgttacccaacttaatcgccttgcagcacatccccctttcgccagctggcgtaatagcgaagaggcccgcaccgatcgcccttcccaacagttgcgcagcctgaatggcgaatggaaattgtaagcgttaatattttgttaaaattcgcgttaaatttttgttaaatcagctcattttttaaccaataggccgaaatcggcaaaatcccttataaatcaaaagaatagaccgagatagggttgagtgttgttccagtttggaacaagagtccactattaaagaacgtggactccaacgtcaaagggcgaaaaaccgtctatcagggggcgattggcacgttctacagtggaaccaatcaccccataaatcaaggtttttttggggggccgaaggttgccgtaaaagcaccttaaatcgagatcaccttaaggaggagcgcgtccgcgttttaagaggcttggacgggggaaaagcccgggcagggaccgtgggcgcagttaaaggtaagcgttaaacaaaagcagaaaacggaaccgggcgcgtctaggaggcacgtggacaaagtagtaaacgcgttcaacgcatgcggcggtagtccgacgcacaatcgcgcacgtcgcattaaatgcgcccgtcgtacaagtggcagcggtccccaattcggccatgtcatgaactgcgccaacctgcttgggagagggcggctcgcgtccgtggccgtccttgggctatctcggtccagactggcgaaagggggatgtgctgcaagccgattaagttgggtaccgccagggttttccctgtcaggacgttgtatatcgtcggccagtgagcgcgcgtgatacgacgctctatagggcggattggtgcgcccgcgcggtggcgcccgctctagatctagtggatcctccgccctgctggaattcgttattaagctgatcgttactgccgacctccatctatctgcaggctcttgtgcgactcctaacttatccctccctcgaggattatttaaagtccaccattggcctgacgtaccagaatagtgccactgtgcacagctcaccatggaggacccctgaacatcccggataattaagtcgagcttcgcaaattgtaccttaactactcactggtacctgacacgtacttaagaaccgagatctaaacctaccgctcgggttttaacccatcgcccaggcaatcagtcttgtcttgtgataaacaaacccaataccccgaatccattgtactcaatacaaccctacccaccaacccggcacctaccgcctcaccgtgtgtcccaacaccagcaccaccactactgtgcacagtcaacgaacaatgacactcccagtcctcatcatcggtgccggcctctcaggtctcacaaccgcgcgtcttctcacaaacgcccacattccctgcatcgtcttcgaagcctcccctccctcccgcactcaaggctacgccatctccctccgcgactggggcttcaacgccctcctcagggccctgggaaacctccccctatccagcctcacccgggccgtcgcacctgatcgccacattggcggctggggctggcttgaccagtcatggcggaataaccagaccggggagataatcatgatgccacccaaagagtcaaaagagaaaccgaccatactgcgcgctaatcgcaatgcgcttaggcagtggattgcggatgcaggtgtgggggaagacgaggagattgatgtcaggtatggacatcggcttgtcggcgtgcagctgttgagagagggtggagatggaaatgtggtaacagccgagttcgcaaacggcgccacatacaccggttcccttctgatcgctgcggacggggtacactccacagtacggacactgatccttcccgctgtgaagccggagattttacccgtcctcgtctaccatggcgacttcaagctcagtcgcgaggaatacgagtgtgtgatccggccgcatgcaggcgagtccacgatcgtcgcgggcgtgggcgacgggtttaacacgccgctgactgtctgcgacgtcacgtcaacgacagtgcacatggactggacgtactcgcggcccagcattggtgacaacgaccctctgtataatcccaatattacgtcggaggaagctaaagtcattcccgaggctttgatcgaggaaatcaatgcgaaaaagctgggagaaccatggtcgctgttcctgaatggggaggcgatgcgcaggcatcgggtgttcaattggctgacgcgatgtgtttcgatggaaaggagtgacgtgaattcctgtacgggcaaaggggtcgtcttcgtcggagactcgtggcatgccatgccaatctttggaggcgagggtggaaaccatgcaatattcgatgggattgagttggcgaagatgttggaagtggcttggggacgttccaaggaggatgtgcaggcagcgatcgggaagtactatgacaagtcttggagacggtgtaatgatgctgtgcgaaggtcaaagcagaggttctatcagcttcatcgacctattagcgagtggattgagattgcggagaagcagaagatgcgtgcgtaatttgctcgttcattaattagggtttgatcttggtacagtagggacagaatccttttctcggtacaaaagaagaattcaatcttcagcgtaaataagagcaaagcaatctaaatagtttactacatggcgaacaacatctaatcagttaattcggccggcgcgacctgacgtaccatcgcctttttgcagcactccccggctcaaacccgacttttcgatcctcagctagcttccacagaacctggctcaagaacggcgcaagagctttctcaacctcgtctgtaatctccccatacattgctaggatgatttcgtgtagcgtcaagccaccccgcccccgcccctgcccagctgctcggctctcctcgagtatcgcgtaaacctgctgcacgcggaactctctgtgcttgatgtactctcgcattttatccggaaggtcatcgatcactgccccgtgcgctgggtagcccaatggaaggttcaggttagccatctgtaccatgctattcatgtattgtcccaagtcttccaccaccgagtatccatggccgagcacattgtcgcctgtgaagagggcgttctcttcttcaaagagaaagcacatatggtcggcagcgtggccgggggtatgaacggcgcggagagtggcgccttcaacgcgaaagacctggccgtcgagaatatccttttgtccggcatcgggtcggtttttgtatatgcgagaggatagcgctggattgtacgctatcaggtccggcacaccacctgtatgatcgccatgccagtgtgtaaggagtacataggagatgtctatatccctctcttcgaggactttggcgatatcacggatccacgagggcattccctggagcagacagggagtgtgagccacgtcgccctccatgcaaggtcggtaaacagtcacgacgtacctgaccagtatcaactaggatacgggatctgcctgttccaacgagatatgtacttgtcccctgcagtctcattggtccagcatttccgcccaaaactcggatgacccgttcagtgatatccgtcaccacaggcagagtagggatagtgtgttctctgccggaaaggactcattccagaagtcctgggcaaatggtattctgaaggccatgttggtgactgaagcgccatggggatgccgagcgaaggaatgtgcgtcgagtctgtaatatcggcagaggttctgctcttcggccctatcgccctatgacgggattttaatcgggcatattttatgatccacagtagtatagaaataagacccgaacgagataaaatgcaggtccgggccagctcatgccggaggctcgagcagtcatttctccaaaagtccccgtatggcattttacacagggtcccatcacaggatggtaattccatcgcaatttgcgaaacttcccgtgcgggcattttgccctcattgaacaatagcatcaaaaccccgggtgtatcagtcgattctgtgtgcgaatgattgcttgggaacgctctgctctgatttgaacgtaatgagcgcttgagctcgaccagcagagaagtaacaatgaaagacaatacgcatagcacaaccctaatcttctttggaaatgagtttcccaacgatgatctcaaagggctgttccgctgcctgctgcggcttagcaaggaccgcaggtttcgtcaactggctgcctttctcgaggagtcgactttggtcctcaagaaagaagtcgctgcacttccacagcccctgagggatctcgtaccgcattttcacacggtattgcccctcgcggagcttggtgactttcgtcaaggtcctctaggggctgctatggagagtgcactcttgactgtgctggaacttggcatgttcatagggtaaaatacccgttgtttagttgcggacaaagagagctgatagaaaccattaggcattatgaagctgaaggccgtgactggaatttgcttgagcacaacaccacccttgctggcttgagtatcggccttttagctgctgctggtgtggccctatccaccaacttagcagaggtcgcccagaatggagcagagtgcgttcgcgtgtcttttcgactaggagtatacgtcagcgagatctcgcggaaactcgaggcgcctcaagcagacggtacattactgagctgggctcatgttgttaccggagagacaaagtccgccatccaagacgagctgtcaaaatacaactcagaatcaggcacgccagagcttcttaaagtcttcattagcgctgccgataagacttccgtcagtgtaagcgggccgccatcacgcatgaaagcctgcttcagcagttcgcacctcttgcggtattccaagtctttcgccctcccagtatacgacggtctatgccatgcgtcgcatctgtataacgaggactcgatcaacacagttatcaacagtgcagagtcagtcattcctgtctctcgtccggtgcagctttcgcttcattcttccaatactggccagcctttcccagcggctacagctcacgagctgttccaagccatcggcaaggagctgctgactggtaccatctaccttgacaacatcattgacggaatcataaaacgcattgaagggttcaacccgagtgatcttcaagtcgagacttttcgcacgtcaatagtgtttaagagcgtacgagcggctcttgagggtgagttccctgacttggagatcaagataaccgacttgatcccttgggctttcagagactatggtcctcgtctgccgcgttctttcgcccattcgaagctggctgttgtcggtatggcctgtcgtatgccgggtggtggcaatgataccgagcttttctgggagattctggagcagggacgtgacgttcacacaacagtgccggcagatcgtttcgacttgtcgactcattacgatcctagtggcaaaacagataatgctgcaacgactccctacggtaactttgttgataaaccgggattgttcgatgctgggtttttcaacatgtcgccgaaagaggtacgtcgccccatccagaccggaactcgatgcaaaaatacaggtatgctgacagatgcaggctgaacaaacagaccctatgcagcgactggcgctcgtcactgcatatgaagctctggagatggccggtgtagtccccggtcgaactgcatcgtcgaaccccaaacgcattggtacttactacgggcaggcgagtgacgactggcgagaactgaatgcctcgcagaacattggcacatacgcagtgacgggtggtgtacgtgcctttggcaacgggcgcatcaactactatttcaagtttcctgggccctcattcaacgtcgacacggcctgttctagcgggctggctgccgtccaggtcgcatgctcggctctttgggcgggggaggcggatacagttcttgctgggggcctgaatatcatcaccgaccccgacaactatgcaggtttggggtgtggtcacttcctctccaaaacagggcagtgcaaggtttgggacgaaactgcggacggctactgtcgtgctgatgggatcggctccgtcgtcatcaaacgtttggaggatgctgaggcagataacgataatatcatcgccgtcgtactctctgcagctacgaatcactcagccgaggctatctcgatcacccatccccacgcagggaatcagaaagacaattaccgccaggttatcgatatggctgccgttaacccgttggatgtgagctatattgagcttcatggaacagggacccaggccggtgacgccgtggagtctgaatctgtgctcgatgtattcgcgcctcgatcgccgccacgacgtcccgatcagttgttacagctgggtgcggtcaaaagcaatatcgggcacggtgaagcggcagcaggtattgcgtcgtttctgaaagtgctgttaatgtaccagaagaacatgatccccgcgcacattggtattcatacagttattaacccgactattcccaaagatcttgaacagcgtcgggtccggttgactcagacgaacacgccttggccgcgtctaccgggtaagaaacggattgcaatggtcaactcctttggagctcatggtggaaacacgactgttctgttggaggatgcgcctgagcgtaacaaggatgttgcccgagagaaccgctcgactcataccgtcgtcatatcggccaaatctaagaagtctctccaagccaatattgcaaacctagcgctgcatctggaggagaatcctgacatcgatctgggcgatttgtcatacacaacctgcgcacgtcgcatccattacactctgcgcgttggcttcgcggtctcgagcatcgccgggctaaaggaagccctacgcaaggctggcgagaaagaggctcttgctgaggtccgtccaacaccaggggacgttcctccggtcgttttcgccttcaccggccagggagccttctaccagggcattgcccgggagctattcgagtcattctcttacttccgtgacgaagtattgcaacttgaccacattgtccaacggcttggtttccagtccattgtgcccgtgattgacggaagtattggcgagaatccatcagcaaccgtgtcgcagcttagcattgtcgtgatcgagattgcgcttgcgcatctctggactctactgctcggcatgcaacctagcgccgtcatcggccacagtctaggcgagtatgccgcgctggtcgttgcgggcgtcctatctaccgcggacggtatcttcctcgccgggcgacgtgcccagttgattgaaagttgtgtacagctggcagccacgcgatgttggccggttgtgcataagtatcggagatcagcaagcttctaggcaatgccaagtacgagatatcctgccagaatactctcaacgatacaggtattggcg

SEQ ID NO: 5963 - DNA, 9143 bp, Emericella nidulans
gctcttcctactataccgaagcagaattcggtaagcgttggattgttcacccactaatagggaacgtgagctgggtttagaccgtcgtgagacaggttagttttaccctactgatgaaggtcgccgcaacggtaattcaatttagtacgagaggaaccgttgattcagataattggtttttgcggctgtctgaccaggcagtgccgcgacgctaccatctgccggataatggctgaacgcctctaagtcagaatccgtgccggaacgcggcgatgttgccccgcacgtcgtagttggatacgaataggcctccgggccctgtacctcagcaggctggcgacggcccccggggagaagccctcgggagccggctggcggattgcaatgtcacctcgcgcggggatgaatcctctgcagacgactgatgtgaccaagcgggtcgtgtaagcggtcaagtagccttgttgctacgagtcgctgagcgtcagcccgaccttggctcgatttgtgatagacacccccattagtgacctcggcagcgccgggggactggagggggcgaagcgcgccgcgcccggggccacccctgggagcgacgagcgtgaagacctacgtgccagttgacagacgtgtgggacttggtgatacgggctgccggtgaacctcgccgggcctggcctggctcgaccgagcgatggtgccagttgaccggcggcgtggacttggggaggacggcgcgacggctgccagctggcgggggacggggggcgccctcggtgacggcagggcgaggcggctcccggggaaggaaaggacggagacgcccgggcgaaggcgctggtgccagttgacaggcaggcgcgggagacggaattcgcgccatgagccgtcgtgccagttgacggggcgcgcggggcagcccatacacacatatacacgccgtggctagccagcctctcggggggcgaggcgttggtgccagttgacgggggcgctccgggcgtggtgggcgccgagtcttcgtgccagttggcgccgtgcgtggacttggggcgaggcgcggagtcggtcgtccggcacgcagggggggggggggggggggcgcgcacgggggcgttttgtgtttcgggcgccgagcgccagggcctggtggtcccccccggaagatcgagcgtagcgtaggtccctccggcgcgagagccctcaccctcgtggtaggcgaggtggaggtgaacccagggtgggtgctggtaggaatatatatctgcatcgcggcgggtgttccttccggacgggcgtgcccggcgccccttcgcctcggacccggggggcaacccgacgcatcccagccaggcgacgcgcatggaagcggcggcagcgcggccagagacgatgtggcccctccacagcggcattcgtcactcgcaccccccccggggggcctgtagcccggggccggcgggagaggcgtggtgtcagttgacaggatgccccccggcgggggcgccctcgccgctgaggggagagccgacgtgagaacggcccaaagacgcccttgttcggctgatcgggcgaatctgcaggcccagtttgtatgggacattttctgccaccgcctttgccccatacaaactgggcccccacgaacgactttcgcacggccaaacgtttgcatccatttccgtactccaactggggtcggtggatatatgtagggagcaagtagtctggcggccgaaaggcagccggacgaacctccgtctacatccttccatacttggcaggctacctgtccgagctgatggtcttgaacccccgcggttaggcttcagcaaggcccgtagccaagcacgtcgggatggaccctgggcctaaaccccccggagcgtcctccccccggcgtgtcaagccctggagccctagcgtgtgctgggccccaggcatggtctgggttcggtgtggattgctggccgctggccaaccttctctcccgtcccaatccatggggagcgccgcccttgagtagccgccgttcgccggcgtgactcttgggtccggtctccccgaacgaggcccgtatgccgcagcccgttgcctccctcagggagcgcatcggatcctgcgtgcggaccggtgcctggtgggcttacagtgggggcaattggatggttgctagtgacctcccggtacgccgggggcgccgctgcagccgggcgagctcgtctcgccccttccagagtgaatacctacgtgctttctgcccctccgggggctttcgggcgccgggggtgccgggtaaaaccgcgcctccgggttacgtccgggaggaacaaggtatctggttgattctgccagtagtcatatgcttgtctcaaagattaagccatgcatgtctaagtataagcaatctatactgtgaaactgcgaatggctcattaaatcagttatcgtttatttgatagtaccttactacatggatacctgtggtaattctagagctaatacatgctaaaaaccccgacttcgggaggggtgtatttattagataaaaaaccaatgcccctcggggctccttggtgattcataataacttaacgaatcgcatggccttgcgccggcgatggttcattcaaatttctgccctatcaactttcgatggtaggatagtggcctaccatggtggcaacgggtaacggggaattagggttcgattccggagagggagcctgagaaacggctaccacatccaaggaaggcagcaggcgcgcaaattacccaatcccgacacggggaggtagtgacaataaatactgatacggggctcttttgggtctcgtaattggaatgagaacaatttaaatcccttaacgaggaacaattggagggcaagtctggtgccagcagccgcggtaattccagctccaatagcgtatattaaagttgttgcagttaaaaagctcgtagttgaaccttgggtctggctggccggtccgcctcaccgcgagtactggtccggctggacctttccttctggggaaccccatggccttcactggctgtggggggaaccaggacttttactgtgaaaaaattagagtgttcaaagcaggcctttgctcggatacattagcatggaataatagaataggacgtgcggttctattttgttggtttctaggaccgccgtaatgattaatagggatagtcgggggcgtcagtattcagctgtcagaggtgaaattcttggatttgctgaagactaactactgcgaaagcattcgccaaggatgttttcattaatcagggaacgaaagttaggggatcgaagacgatcagataccgtcgtagtcttaaccataaactatgccgactagggatcgggcggcgtttcttttatgacccgctcggcaccttacgagaaatcaaagtttttgggttctggggggagtatggtcgcaaggctgaaacttaaagaaattgacggaagggcaccacaaggcgtggagcctgcggcttaatttgactcaacacggggaaactcaccaggtccagacaaaataaggattgacagattgagagctctttcttgatcttttggatggtggtgcatggccgttcttagttggtggagtgatttgtctgcttaattgcgataacgaacgagacctcggcccttaaatagcccggtccgcgtccgcgggccgctggcttcttagggggactatcggctcaagccgatggaagtgcgcggcaataacaggtctgtgatgcccttagatgttctgggccgcacgcgcgctacactgacagggccagcgagtacatcaccttggccgagaggcccgggtaatcttgttaaaccctgtcgtgctggggatagagcattgcaattattgctcttcaacgaggaatgcctagtaggcacgagtcatcagctcgtgccgattacgtccctgccctttgtacacaccgcccgtcgctactaccgattgaatggctcggtgaggcctccggactggctcaggagggttggcaacgacccccccgagccggaaagctggtcaaacccggtcatttagaggaagtaaaagtcgtaacaaggtttccgtaggtgaacctgcggaaggatcattaccgagtgcgggctgcctccgggcgcccaacctcccacccgtgactacctaacactgttgcttcggcggggagccccccaggggcgagccgccggggaccactgaacttcatgcctgagagtgatgcagtctgagcctgaatacaaatcagtcaaaactttcaacaatggatctcttggttccggcatcgatgaagaacgcagcgaactgcgataagtaatgtgaattgcagaattcagtgaatcatcgagtctttgaacgcacattgcgccccctggcattccggggggcatgcctgtccgagcgtcattgctgccctcaagcccggcttgtgtgttgggtcgtcgtcccccccgggggacgggcccgaaaggcagcggcggcaccgtgtccggtcctcgagcgtatggggctttgtcacccgctcgattagggccggccgggcgccagccggcgtctccaaccttatttttctcaggttgacctcggatcaggtagggatacccgctgaacttaagcatatcaataagcggaggaaaagaaaccaaccgggattgcctcagtaacggcgagtgaagcggcaagagctcaaatttgaaagctggccccttcggggtccgcgttgtaatttgcagaggatgcttcgggtgcggcccctgtctaagtgccctggaacgggccgtcagagagggtgagaatcccgtcttgggcagggtgcccgtgcccgtgtgaagctccttcgacgagtcgagttgtttgggaatgcagctctaaatgggtggtaaatttcatctaaagctaaataccggccggagaccgatagcgcacaagtagagtgatcgaaagatgaaaagcactttgaaaagagagttaaacagcacgtgaaattgttgaaagggaagcgcttgcgaccagactcggccccggggttcagccagcactcgtgctggtgtacttccccgggggcgggccagcgtcggtttgggcggccggtcaaaggccccaggaatgtatcgccctccggggttgtcttatagcctggggtgcaatgcggccagcccggaccgaggaacgcgcttcggcacggacgctggcgtaatggtcgcaaacgacccgtcttgaaacacggaccaaggagtctaacatctacgcgagtgttcgggtgtcaaacccgtacgcgcagtgaaagcgaacggaggtgggagcccccccggggcgcaccatcgaccgatcctgatgtcttcggatggatttgagtaagagcgtagctgtggggacccgaaagatggtgaactatgcctgaatagggcgaagccagaggaaactctggtggaggctcgcagcggttctgacgtgcaaatcgatcgtcaaatttgggtataggggcgaaagactaatcgaaccatctggtagctggttcctgccgaagtttccctcaggatagcagtaacgcggatcagttttatgaggtaaagcgaatgattagaggcattggggttgaaacaaccttaacctattctcaaactttaaatatgtaagaagcccttgttgcttagttgaacgtgggcattagaatggagcgttactagtgggccatttttggtaagcagaactggcgatgcgggatgaaccgaacgcgaggttaaggtgccggaatacacgctcatcagacaccacaaaaggtgttagttcatctagacagcccgacggtggccatggaagtcggaatccgctaaggagtgtgtaacaactcacgggccgaatgaactagccctgaaaatggatggcgctcaagcgtgttacccatacctcgccgtcggggtagaaacgatgccccgacgagtaggcaggcgtgggggtccgtgacgaagccttgggcgtgagcccgggtcgaacggcccctagtgcagatcttggtggtagtagcaaatactcaaatgagaactttgaggactgaagtggggaaaggttccatgtgaacagcagttggacatgggttagtcgatcctaaggcatagggaagttccgtttgaaaggcgccctcgtgcgccgtgtgccgaaagggaagccggttaatattccggcacctggatgtggattctccacggtaacgtaactgaacgcggagacgtcggcgggggtcctgggaagagttctcttttcttcttgacggcctatcaccctgaaatcggtttgtccggagctagggttcaatggccggcagagccctgcacctttgcagggtccggtgcgcccccgacgacccttgaaaatccgcgggaaggaatagttttcacgccaggtcgtactcataaccgcagcaggtctccaaggtgaacagcctctagttgatagaacaatgtagataagggaagtcggcaaaatggatccgtaacttcgggataaggattggctctaagggtcgggctcgctgggccttggggggaaccccctggagcaggggggcactagccgggcaaccggccggcgccccccagcaccggggtggggacgcccttggcaggcttcggccgtccggcgggcgcttaacgaccaacttagaactggtacggacaaggggaatctgactgtctaattaaaacatagcattgcgatggccagaaagtggtgttgacgcaatgtgatttctgcccagtgctctgaatgtcaaagtgaagaaattcaaccaagcgcgggtaaacggcgggagtaactatgactctcttaaggtagccaaatgcctcgtcatctaattagtgacgcgcatgaatggattaacgagattcccactgtccctatctactatctagcgaaaccacagccaagggaacgggcttggcagaatcagcggggaaagaagaccctgttgagcttgactctagtttgacattgtgaaaagacatatggggtgtagaataggtgggagcttcggcgccagtgaaataccactacctttatcgtttttttacttattcaatgaagcggaactgggcttcaccgcccatcttctggcgttaaggtccttcgcgggccgatccgggttgaagacattgtcaggtggggagtttggctggggcggcacatctgttaaaccacaacgcaggtgtcctaaggggggctcatggagaacagaaatctccagtggaacaaaagggtaaaagcccccttgattttgattttcagtgtgaatacaaaccatgaaagtgtggcctatcgatcctttagtccctcgaaatttgaggctagaggtgccagaaaagttaccacagggataactggcttgtggcagccaagcgttcatagcgacgttgctttttgatccttcgatgtcggctcttcctatcataccgaagcagaattcggtaagcgttggattgttcacccactaatagggaacgtgagctgggtttagaccgtcgtgagacaggttagttttaccctactgatgaaggtcgccgcaacggtaattcaatttagtacgagaggaaccgttgattcagataattggtttttgcggctgtctgaccaggcagtgccgcgacgctaccatctgccggataatggctgaacgcctctaagtcagaatccgtgccggaacgcggcgatgttgccccgcacgtcgtagttggatacgaataggcctccgggccctgtacctcagcaggctggcgacggcccccggggagaagccctcgggagccggctggcggattgcaatgtcacctcgcgcggggatgaatcctctgcagacgactgatgtgaccaagcgggtcgtgtaagcggtcaagtagccttgttgctacgagtcgctgagcgtcagcccgaccttggctcgatttgtgatagacacccccattagtgacctcggcagcgccgggggactggagggggcgaagcgcgccgcgcccggggccacccctgggagcgacgagcgtgaagacctacgtgccagttgacagacgtgtgggacttggtgatacgggctgccggtgaacctcgccgggcctggcctggctcgaccgagcgatggtgccagttgaccggcggcgtggacttggggaggacggcgcgacggctgccagctggcgggggacggggggcgccctcggtgacggcagggcgaggcggctcccggggaaggaaaggacggagacgcccgggcgaaggcgctggtgccagttgacaggcaggcgcgggagacggaattcgcgccatgagccgtcgtgccagttgacggggcgcgcggggcagcccatacacacatatacacgccgtggctagccagcctctcggggggcgaggcgttggtgccagttgacgggggcgctccgggcgtggtgggcgccgagtcttcgtgccagttggcgccgtgcgtggacttggggcgaggcgcggagtcggtcgtccggcacgcaggggggggggggcgagatcgccacaggaacaaaagcctatccatctacttgggtcgtcacgactcgccaggagatcccggtaaccgggatttgccctgtcaatcatgcatttaacccgttctgactgatgcggcctgttgatttcagattcggagacgggcctttacagtgctatgggtgtgggtagccatggtatttggaatccacgttggccatctgttagagacaggacactttggccttctgctttgccactacctggagactctattaaatggttaattaggtattattttgactatttgtcatatagttatggttgggttagtttgtggcattatcgctctatgcgttttaaacctaaatttattctttttatttgctatcttgttttaatttcttatattcgtttactcttatatttgtattcgttataaatttcttaatataattcttttaatttaaatttttgttcattatccgtcttttttatttttctattttatttcttttattatttcattttaatgttctattatattattttgcttaactttatttagattttttctttttgttggcttatttagtattt

SEQ ID NO: 5964 - DNA, 590 bp, Emericella nidulans
ctccgccgctgactgagatgatcttggcatggtcgtgtcttcctccgcaattggtgcatcgccagcggcgaccacaccgtactcattgagatctggaaggtcagaccagcaaatacgcgggaaccctgcagtcgggctgcgatcgatcgtgaggatcgcttttttccgaggaggctcatcatcgggaagagcgggcgggagatcctttgctctgtcttgaaggtccgaccacccatccaccttcgcaccaaggatggcagtgagggcggcacggatttctttgacttggtcagggtctttgcccatttcctggattgccgtaagatcacgccctagcagtttctccatatgatccttgatgtttgcaagtagtagcatggctgcttcctctttgatggtggctggttcccgaggaaagttggaaatcgtctctagcaatagatcctcagcggtctgatcgtacagtgccctaatcggaggattaactatcctctcgccagtcttcacaatgggtgcgaaccctctggctggctgctagcctgatcaagtggctcttgggctggatgatgttggaatcccggtagagtggt

SEQ ID NO: 5965 - DNA, 576 bp, Emericella nidulans
tattccgaagacggaggaaaaagagcatgttccatgatgcaatcaggcattgctgcacctttagatcaatgactctgtgaaaaaaaaaaaaaaaaaaaaaaaagaaattccccttaacaccctgaaactagaccatccaatatcgagacactacccacccagtgacgaatgacggtagtacccgctgtttaaatctgccggcgggttacagaccagtgtagagcactctcttcccagctggtttaccctggagtctgtgatggcgaagtcgtccttgactgagttgtcagaatggaataccccatcattccaaggcgccaagctcaacatggtagctactgctgtagtctggtagccctatatcacattgctatgtcagggtgaacttttagtcatcaatctaaagcaaagtcgctgatctggcgtttgtagtccgatgttaggagctttgggcagagagtaaggggatatctggcaatgttccacggttagacacaaaagttcctgcaggtcccatctgtcaatgggataataagcaaaacaagtgagtcaatatcttgggagaactaacacaac

SEQ ID NO: 5966 - DNA, 662 bp, Emericella nidulans
ggaagtgcaggcccctgaagtcgcgtttcggatagaagccgcagtaaagggacgagtagatcgtcagattccgcaaattggccgttgtgggttctagccagtgtgagggcagggtttggtagaactcatgcgcctcggttcgctggtagtcgagttcgccgtggaactcgcggtgctcgtttgtgatgttcagtcttagggattgtagagcgctcaggactttcctgatattggacacggctctagggtccgtctcgttgatgttgtgtagctcggccagagccagctctttaagtggctgcggctgtgctgcgaatgcagcaaaggcccgctgcatgacggcggagcgaaagaacatctcctgcggaacggggtgccagtcgtggttcgtgtgttcggggtggaaagacagggcgatgctttgcaggcgggggaggtccttgagactgtcaaagaagttccagaatcggagcggaagactcgtctcgtcttctagctcatcctcttcgccttcgtcgtccgagtagtacatatagtcaccgtcctagcaggaagaatcagatctgcttagggcctggaaagggcaagtgtgggtacagcctaccttgtccaagttgtaggtggtgatgtagagcttttttacgtactctgccagccgtgga

SEQ ID NO: 5967 - DNA, 696 bp, Emericella nidulans
  unsure (1)..(696): unsure at all n locations
caagatatgttaatgagagagggcagggggaaaagatgatcatgacatcaaacctggtcccgtcacgctggatagcacaaacaacaaaaaggagaacggtgaatgaagggtaaggagttggaggtagacaggccgaagattataataatataatgatgggtctccgagacgacgtcatgtagtctattcaaacattatattagggaaaggaaatgggtaataggtcggtgtgtgcgtcgctttttcctttgcttgagaaacagctagctggtcgaggggcgatgttcatcatcaggtgtgtcagaagcatcagatgataagacaatagtcggagggtttagggtcgggtcttctccatttggagggctagaaagtgacaaattttccggttctgctgactcgccctgggtcgaagttggttctgtcacaggggacaaaggtgtggtatcattgctgtccttgcttccacttgtggctccattgcgttttcttaaccggcgcttccttcgttcctcttctgcactttctctacgcctccgcgtgcgttctgggtcaggactgtttcttaacatatctngtagcatgcttgctgctcggtcggcaacatctccactttgcgaggcaattggtgagcttgcaccttcaagtttccggcatagtgggactaattatgctagaagtggtagcatttgtgtc

SEQ ID NO: 5968 - DNA, 408 bp, Emericella nidulans
aacttcacggacgatgtggtgacacttgttgacaagctcgaggacgtcgaccgcctagttccaactgcattcctggatgtgccgggcttcaactgcgtgcagacctcgtggactgggtttgagctttacgggtttggaatggggatctttgttgggccatacgattcaggccgtgaggtcgccgcatgtgggtgtcatcaacggtgggcaggtggtgcttccggtgttaccagatggggggatggaggttattgttggtgttgaggagagttgtctcgacagactgttgaaggaccctttgcttacgcgattcggtattgcgaggtagagctctggtacgtgttttagacgaagcttaatttcgacgaagcttaatttcgacgaagcttaagacactcgtgtgcccag

SEQ ID NO: 5969 - DNA, 455 bp, Emericella nidulans
gcgtgggaaaggttgtggagcagcttgtgggaccagacgctccagacccgggcggtgtcgccggcatggggttgtttccagtcgttcttgaagtcgttccaggatccgtcctcgtccatattgttcattgtccgaaggagatcaagggctacttggcacccgaccgcatgcgcagtgtagctgtgtccatgcaagagcgcatctcgcttctccgggcttgtaaacgcgttgaagatttcgctgctggctagggtagtgcagcagcggcaccaggcctccggtaaggagctttgcgttgacagcgatgtctgggttgacacctataaatgacgcagaggatttacggccaagacggtagaggcccgtgaaaacctcgtcaaagatgaccgggagaccggaccacgagaggtccgtctgcggctgcggttctgacaaccggtctcggatgaagagct

SEQ ID NO: 5970 - DNA, 503 bp, Emericella nidulans
  unsure (1)..(503): unsure at all n locations
atagtaataatactataaatattagacaagtatactaaatatttattccttagtattttagcacctagagagcttaaatattaagattaagctttcaaaaatattttttaggtttccctgtataaagcttcttagatagtaaattaatatattaggtctaactatcctagtaatttagaataattctaatttttagatttctgataactcggaaacttatcttagactaatattcatagttttagtattatatttaaaaaatgctctctaggttaaactatcctaatttaaaaaaaactgctttagaatattccaaaaaaatatcttatatagaaatatacaagttattaacctagtaaattctacagttaagaagttatatctaaagaaatataaagtttttactttttaaatactttgatgaatcaaagcagctatatactaatcttgatatattatactagatataggagttatggtatactaataaatatanatatatt

SEQ ID NO: 5971 - DNA, 589 bp, Emericella nidulans
ggtcgactctagaggatccccggcctactcaactgtgtatcgattgaaaggcaggaatttcccacaaccaaagggagtggttacgtccagtatgtccccccttcttcccgacatgctatggtgccccggggtgggtaggagcgggtcgagtccgtatcgccgcggacaacagccgcgtccggatcagatctatctactcggcaattcatccggtgacttcacggtcgccaaagaagccccaagaagcatcaaacatttccgatgagatccatggagcaattcttagatagcaagcactagctcccggcgcgacttcataaaaagcaatcaaagataagatcgaagagaatgaaacgcacgtagtgatcattatagcgcttccttctgatcctagaaaacgtccgaaaaaacctgctacggaaccaccgaggagaggcaaaaatacgataagtagatacataatttaatttcgagtgtgatcaaaaacctaaaatcagacaattacagagcggccagtgattgagtgatagatttctcgcgtctggagacgctcgaccgaagaaatgagtacttacaaggaagattttgt

SEQ ID NO: 5972 - DNA, 531 bp, Emericella nidulans
ccgggtacgatagctcggtgattcgccagagaatggacccaagtacttgacacggtcagatccgtaccatgggctgcctgatgggccctttggcttggcaacagtcttcctcattgtcacacggccgcttccaaggacttcagatgccgcgggggaaagcttgacggccttaccggcgaaggcaggggaggagagagccattgttgaggcggccattgaggttgagtagtgcagcacaaagtaaaacgtttaagatttgttgttgtaagccaagaaatgggtggtttggtattgatgcgattttcgctatatataatacagaaatctaaatactgtcttatcttgaaatatcaatctctgaggttgctattggctagtcatagattttttttggggtttagattgtttgtttgcttacgtggttaatggctcgcacttcgcagattcgcaattgatatgtgttttagatatctaggtgcgtttcatggattggcgaaacacccactcatgacgtgacacgtatacgaatag

SEQ ID NO: 5973 - DNA, 587 bp, Emericella nidulans
tagagatgctgtaagttgacgtaatactatgaatttacccgcattttaggtaaacttgattacgcgtggaaagagaagcaggatacacatcttcggatggccctggtccgggccgctaaaaacagacgcgagggtcttgttagagttctccttaggaatggtgctgaagggtatgggaaggatcgggatggtaggacagcactatgggagggggcgtcaaacggccatgggaatatcatcaagctgctgcttgagaacaggctgaagttgagtcaaagagtaatgatggccgggcactactatcagtggcagaattaaatgggcacgaggctgtggtcaagctgtcccttcaggacggtgctgaagttaattcagaggataatagtggttgcacaccactatcatgggcagcatcaaatagatatgaggaagcaagcaagctactccttcagaatggtgcagaagttgattcaatagatagtaatggtcgaacaccactatcatgggcagcaacatcgagttggcatgtgaatgcagttaaggtactccttgagaacagagctggaattaatttaaaggataatagt

SEQ ID NO: 5974 - DNA, 1098 bp, Emericella nidulans
gtccgacagtggtatgccacacagaaccccgtcttcttaccgaagaaccgtaagggtggcgggaaagccttaatacagaccagtgctcagtggcttcaggaacaatgggcaaaacaatcattggtgatccaggagcaggaaacggagatgaatcggagacagagccaaaaccacctccacataaagttgcgcctccgtccgagcaacaggcgtcacctcgtgctgcatcaaccaaatcggacaaggaggaactggagaagctatgggatcacgagtggacaatcgaccagctggaacactcagtcaacgatttcccgcaaaacatgcttcgactgacctcgccggttgtggtgtttcttcgacataatcaagaacgagcattgatgcggcctttccgccaaatatttccgaacgctcctacatctattcttgactcgctctgcgccgtgctgatagcgaagaactatctcctttcgttgccatcgctcagccgcaaaacgaccaatatgcaactcagtgcgcagatctcaaggttggatacagtgccagagaaggcaaactcgatccttgggatgaagttcgcacaaccacagccttcgcgtatccgcgaccaggttcttggttcccgaagcagcaaactattggaagatctcgactcaatcctggacaacctgttattcacccttcgcggtcctcacgatgaggcattgaagtctgccgtgttagttctgatgcaggtcctggagaccaaagcataagcgtcccctctttccttccattgcttaccaaaactactttcactctgatttccttttcttctacctcacagcgatccaaatctagactagaccttgccgttcactgagccatttcctatcattacctctttttgtctcccatggaatactctttcgcactcgtttgacctgatttcccctttcttgccccttgctgccggcgaagtcatctaacagagctgtgtgcgataagcacagtagttaatgtgtaattaattcattcaatactcaatacctcaataaataatagacaataccaaccactccatacctgtccaaattaacggattctgagtagata

SEQ ID NO: 5975 - DNA, 463 bp, Emericella nidulans
tattacgactcactatagggatcagaggagccggaatgggcaggaagggtccaggagcatgtgaagactttgaaccggctagatcacatactgcgataatttgtactgtaagggcgaagagcaattcaaatcaagaaataagaaacggcgggccaagtttacgcagcccggtggtcatggcacgaggttgcataaaatgcatacaaatcggtcggagcaactactgtctatgtcccactggataaggaactctggggagaagaacgaataagtatgattatagttctggagcctcccaggagtcggtgtatgttccagataatacacagggagacaagcaaggcgagaatgagatgggatcatggttgatgtcagcgcccactctggcggttgggtttacgggcagccactaccaccactccgagacgaccactttctccccaccaccatccgcaacgggtct

SEQ ID NO: 5976 - DNA, 522 bp, Emericella nidulans
ctcgctgcgtccagcaaagtcaaacatccccatggcacttaccgccttgatacaccggcagaaaacgattccaattttcggtgcgacttcaccgccgacaacaatttcaacaagccgatcagttctccgccagcagtgctgtgcttgcctttggttttatatagtctcggacaagctctgatagacagacagggagatggcgatttcagacttgctcaaccgccgcgtgcgggctgccccggatgaggatgaagaagtctattccgacgaatcggcgtcgggatcggagccacccagcgacgagggaagctctgatgaatctggctcagaaagcgggcgtgactccttgaatgggagtgacaatgatgtatgtacagttcgacaagcccgtcggcttacaacttggtattgactcttgctagtttgactccgaatcacaaaactcagaagcaagcgactccatttccgaagatgaagatgacgacggcgacgtgaaatcctccctaaacaacatctcgttcg

SEQ ID NO: 5977 - DNA, 535 bp, Emericella nidulans
cgtgttctcgaacaattgccctcggtttcaggaaattgaaccgactaccagtactcagaatgggtgcgacacaatcagggtgcgatgattctaggcaacacgttgcggcaaaagaaccggcgcgtcaccgtaggagcatcgggagagctagcacaatcgggggttgggatcgacggaatgtggaggaggcgaaaagagaggagaacaggagggagaaataaagatggaggtcagggagtggcctcgtcttaatgtaggttcaggagagaaaaaggagaggggggagactcgagaggttaagtcgaagaggacacggtgcgatctgggcaaagactccagctcggacagctccagacagcaactcccggcccctggtgcttcactaatcaaacacctggagccactccgtcaccaatcgcccctgggtttggcagctccacatatttaaggtgattacattcaatgagtactttgaactcaggtattttgggcttggctttgactacacctgcggagtgaactcatagacttgtta

SEQ ID NO: 5978 - DNA, 378 bp, Emericella nidulans
tgccccaatgacagttgcattatcctcaatttaatcagccccgtctccttccagttccaccccagcctttggagcagtccgggcaatgctctcgcgacacttactgtcatgatccccctacataaacacacggcctcgcagccccagccccagccccattcagggccaaaagcctagactgatcagcatcccactcacaactcccatgttccaaatcattgatgtgcgttgtgattgtagtagaaatgcccattcccccaatgctccagaaaactggcggccggggttcttgcccaactgtaagcgctaggctccgagataatctcttagacttggatttcgatctgtatctggggttgctgtgagatgagaggagtt

SEQ ID NO: 5979 - DNA, 112 bp, Emericella nidulans
tcgtggccttccccgcctccgcgtcgccgcagcttctgcccactttgcctcgtgcgttgccccgttatgccctcttgctgtagtagtggtagtggtatgggcaatttggccg

SEQ ID NO: 5980 - DNA, 503 bp, Emericella nidulans
ttcggaaccaggggggccggacgaattgagagcactgcatccgatgtacccgattgaagaggattttctttgctcagataccgaggacagcagcagtggtgaggatgaaagcgctgaaactcgttcctataactcacgacggcgagaactgcaacggcaggtacgcgctatgagtcgtcagtacgccatggaacatgacgattcacccaggggacatagcacaatacaatcgaccttgctcatcccgccgtcggtgccgcgttctggaccaactgcacgtccttcaagcggtggattgatgagacctcttgctcagttctttatcaagcgacccaaaagtagcgtcagcctcaagttcgatcctcctccgtgagtgccgaagttctcttgtttagatattcgtctcagtttcttctaactttttccgcgagataggtctggtcgttacattttgatcaaactctggagtccataccatgcaggcaacatagacattcagagtg

SEQ ID NO: 5981 - DNA, 559 bp, Emericella nidulans
gatctggtgctgacccgagaaacggactagcgacgtcgctcaccccattagctcgctgctgttcctgtttcaaatgtcgatgcgtcatcttgagagtcacggaagactcgttgggttcaagagtggatgaggagagtatgccagtgaattggtcaccgttcttcgtggtgacagtagtactgagtccctacaacatatataagcctctgcttgagcacagtctcaagtccgccggaggaagttgacgtacaataaaggtagtaaataggaacacaagtcggtcatgggcatgattatctgcggtgttcgattccttcgtggacgtaggagacgacgtcttctggggcatgttgccgttttgctggggaaaggacgggcgttgggtaatcggattcgtcccttgagtccaagccttctgagaattgctgcgcctgaaaaatggcagttgtcagcggcattgctcggtatatgaaaataaaagcagggtgactgtctggatataattataggaaggacgtatgataatttcaacacaagaaatacatgacatatacatatg

SEQ ID NO: 5982 - DNA, 104 bp, Emericella nidulans
gccgatataaaatgcaagtgtgcgatttggagtttcaggaggcacagtcatcaagacactataggtggacctatcacggtatcaaatacgtatcggatggcagt

SEQ ID NO: 5983 - DNA, 558 bp, Emericella nidulans
gactgctgctgctagaccaattactgtggcatagtatgaagctagctatatatcaacgctaagggcggccagccgggatttaaagcccaggagcatgcctccctcgcagaaaaaagaaatcttgccctcccactctctcgctctcctccaatctgcggtcttccatcggttttgcttttatcatcatcgccacatcatggacaatctcacgtttctcctcgccgcggccaccggcaataccaccgccatcgagcaaggctacctcagcaacaaatccatcctgacagccaccaatcctgacggcagaactgctctccacctcgccgcccttcatggccacatcgccgtgatccaacagctcatcacctacggtgcaaccctctccgcaaaggactcaaacggccaaacatgcctgcatctcgcagcacaagggtctgcgcccgccgctgatatcgtcgggctcctcctccaaaacgacagtggctcagcatggtccattcgcgacaaaaacggcaagactgccgttttctacgcctaccacaacgccaatgacagggt

SEQ ID NO: 5984 - DNA, 757 bp, Emericella nidulans
cgatacctggtgagaatacacaccgcctcagaatgggagcgtatcatcatcacgtctcggtcgcccctttgactgccgtcaacgattctcgcgtggaattcatcgctctcgacttttccaatccgcctgagaagctcgcggaccagatgcgctcccaatgtgctgatgtgacccacgcatacttttgatcctacgttcacaaggacgactttgccgagctaaacgaagccaatcgctccctgattgagaattttctcaatgcctcggtcgatgtggcaaaaggccttcagaactgtacactccagactggaggaaagtactacaatgtccacgtccgaccggttccatggccagctcacgaaggccaccctcgtcttgttcgcgccgaggaaaacttctactatcatcaggaagatttcttggctgagaaacagcgcggttcgaattggacctggaatgtaatccgcccagaggcaatcatcggctacaccacgaagcccaatggcatgaatgaggcccttaccattgcactctacttcttgatcaacaaggagctgggcgtggagggccctatgcccaccaacgctgcctatttcaacggggtggatgatgtatctgatgcacgtctcattgccgacttgaccatttacgcctcaacccacaaaaactgtgcaaacgaagccttcaacgtcacaaatggtgatgtcttcagctggcggtacatgtggccccggttggcagactggtttggagccaa

SEQ ID NO: 5985 - DNA, 1326 bp, Emericella nidulans
ggatcaacctggccgtgtaagagccaatctgcggccgtgagtccccttccgagagcccgcatgggatatttaatcagagacggtgtctaattggcttcaagaatcaggggactagatgttgaccaaagagatccgaaaattcggaaagattcccttggacaattcaaacgcacgctgatgtttttgaatgaaagcctggggacatgtttgaggtagcgggaaaagatcgcatgatatctatcacaagctacttttccacttgtgatcgaatttacgaattttactgcgagaatgttgcatgcacgcccaatactgaacactgcaagaaccacatatcaaaaagttgagggcagttactctcaaatgcctcatcccatgtcatctggaagagcctaaccttgccgctccccagctcttccatttcaagtgcatgcgatcgtttgctggatagaagatagcagcagagaaacgtacatggtgctaggcggtgttacctggttatctgctgttgtccaccggctctaggacggcacctagaggagcagaatgtcgctgtgccaggcttcctgcaccaagaagcctgctccttggggctatttccatggtcagtggcaggtgggaaatccttaggttccttaggttggtttgtgatcgcgattgtgacagtgattggagcacgaccttcattccaaaacgaaacattcctaggctggcatctcaaatatagcttgcatatagccatctgatcctgatcaggacctcacaaaactacccgtatccagtccttgttccaaagtattggcattggtgtatgttgaggatggtcacaaactgtgatggaaatatgaaatattctgagcaagcttacagttcatgcgcaatgtacaaatctatccgagtccagtcaatgcattgtccgatagcaaaggatggaagctctgttcatactcccaacaccgaattcacataactgtatgatggcgtgaatagatgggcctgccagctaacgccgatgtgttttgatcataatcgtccattggtccagccggtctcgtcatttatagtttcgactgtatatgtattatcgatgtccgaatatatcgatacctgcgtcgtcttcatcctcatcgtcctcttcatcttcctcgtcatctttatcgtctgattcgctggagtcggatagctccttccccttctcatcgtcgtcaccttgatctgttcccctgccgaggaatccctatctatacttgaacctggtgccccagatggtaagcttgccctcaccgtaattcacataattttgctcaaccggctgttaaaaatgat

SEQ ID NO: 5986 - DNA, 634 bp, Emericella nidulans
  unsure (1)..(634): unsure at all n locations
tgggatagcaacagacaggggatgactcgatagcacgagtcgagcgccagtggaccctgcaagctgtcctgcagcgatcgccaatcatgccagcggtgcggcaataccggtccgcggctcgtgtggcggagatatccatatgataccgctggctgtctgttcccatgagacgaagatggcttataatgggatcacgcctgtcgaccgtgctcagatctcgttacccctcttctacagtcctctacattcaaagcttaactgtctactagtttacctttccaaggagagaccataacaatgtcgccttctaccccctcaagcgattcccatattcattccgggaaatccacccagtccggaaccgacttgatagtaaccgcactcaacaacccccaacacatccagaaaattgtcagtgaagccattatcctgggcggcggtgccgccgcgattctcctgcaagttgcgcaccctggcgttgcaaagggggtcaactaccacagcagtttcgcgacgcgccccgtcgacagactcagaacaacaatgacctacgtatacagcatgctgtttggaacgccagctgagaagngagggatcatcgagttggtgcatagcgctcatgcgcccgtcacag

SEQ ID NO: 5987 - DNA, 480 bp, Emericella nidulans
tggttctctgcaacagcattcaagagctgcttgagttgctcctctgtgaccttctgccgcaactgtcctgtctgcgcaacgatgatgagcctgttttcaatatctgtggcacgcgactctttcacaagtcgaattcggcccagccgatctgcggcttcgggttcaaggatttggttgaggattgtagcgcggcgctcagctgtgggggtggtatgagttggtgctgattggatggcacgagtagtcttaatgcttaccttcaacttgtctgaagagtatcaagcgtcagtgatgtttccgacatgcgaaatttgtgtcaccagagaggtacgtactttctttgctcgtcttggttaccttctgatggagctcttggtggtccacgctttgttggagttgcgctagacgagctcgcctaatctataacggtactcaagtcagtctgggacaggacaacaatcgaaacagcaacaaatatta

SEQ ID NO: 5988 - DNA, 819 bp, Emericella nidulans
ctaaagtcattatgtcattgtaagaactgcaaggtgtgtacttttcattcaatctaaacataaccagacaggcgtagatcggtggtgtgatgttgacttatctgctcggagcacgtagaaagcattcggcacaaactacggtccaacagccaaagtccccaaggatgctctccaactcgccaaaggtgagacaaaaaagcatgcagcggattacaggacaggtattgttgttcatcgggagttttgtgatacttgtggcagttttatctgtgaatatggagtatgcatccattcgcttccttcccacctatatctgccgtttcttatgaaaaggggtgacattctatctgaatgtatgctcattttggggcaggatcatgtaaagaacagttcgggtatgtggtcgtgggctccttggccgacccggaggcattgtcgcccaagggggagttcttctgccagactcgggtgagttggatgccagagatacctagtaagttgttttccctttaagacaggcgttacggtactcacttagacgattagatgtatttcataagcagaagattaatgaatgagtctaatgtccatttagcatgatgaaaatgtgccaaaaaaattgagcgatcgtttaatgtataatagtggcatcaaatcagcatgaagctagtgacagaatgaggtctcaaaaaaaaaggtcactttcgagaggatattatgagggttgctgggctgcatgctctctgtcacatgtctggttgtaccattgcacttcctcggcgctcaggtagggtacagtagtagaagccaaatctgtga

SEQ ID NO: 5989 - DNA, 579 bp, Emericella nidulans
gaaggaaacaacgtctagaattatcgtgtatggagtgcactgataacagtgattgatctggttgtagttttttattagaaatcgttcggagtcggactgtcctgaatatgtactactgtagatatcttagaccaagacgtattggcgttaccaccactgtaccccaccaagaaaattaccatcaccttccggcctggctcaatcaatcccaacaagcaccgtaacgtcacatgcgctgctaccctccaggatctttggggccaacctgtttcttcatcccccatctacacgagctctatttctctggcaataatcagacctcttcaacttgtgctcgcagcgatttcgaagtacaggggcaggatatgcggcctcagctctctttgtcctcgcgcgcttcttctgacaattggaattgacttcaagttccactggcagatagggagcttcctgctgagctttctgcgtcccctgtatacttctctccggtttctacgaacatcgcgtcgagcatagcttaactgtactctttgacgtcatggcgaagaagccgtacattccacccttaattgggtggtt

SEQ ID NO: 5990 - DNA, 1144 bp, Emericella nidulans
tcttgaccgaagtagacgttaagcccgttcaagttagccatggtccactgctgcaggagctgccttgacaagcaggacagaacgtcaaccacgagggacacggtcatatatagcagactcccgtgcagaccccccacgtccatccagaccagcccctcccagttgtccctgccagccctgtcgaccactttcttcacgacaaattccaggtaggctagacccaccaatgccttgagaaacgagaatacgtacgttctgccggctcgacggccaataacctggcatgatggggcttcctgccagaggtcatgaccttggccagccaacggaatcacgctggcctggcagatccctgaaactcagtccgcagggtccgtagaagatcgggagacgcaaggtccttgattgacaggaattaagacagaaattgccagaaattgactagaaggtactcattgcgacacagatgaggaccttgaggtcttttgagcacattttttgctgtcgattcctaaccgtgcctagggcgaggacctgataggcataccctgactgccggatgacctttaattttttgctaatatttagtttatctattctgtatgcggtttctgataggttccgggttcgtctggccggttaaaattcgtctcttctcatatgcataggagagaccagtgtctgctaaatgacatttccttgcatccggaccccaactacttagttctggtcagtcactggcttttcttatgttccttgctaatgtctatctatggtagctctgtctgtcttcaagagtcttcgtaattattataatgggaactccatgttttaaattatgctttatatcgtttggacattctctatccgttgaagctttactttactcttggactaaccttaatggttatttcattatttatcctctactggtcaaagtcatgattagattgataatggtatgtttgcttctttatttgcaacgtctttttgactgttattgactgttcttttgttgtcgtcagatatacgatctctatatttgtatattaggtggtaatctctgtaggtgaatatacggttgtccacaatctgattatacattcatggtttatgacttttgctcttagtttctttgcatttc

SEQ ID NO: 5991 - DNA, 653 bp, Emericella nidulans
atttcgaaactcgtctccaaacttttcttggctctctatatttcgaaatgacctagccctgtctctcattacaacaatcttgcccaagcagctcctagcaacacgtcatggtgtccctttggccgttcaaggtaggcaaaccacatcaacctgcaatcagagcctaacagaagctaatcttccgtatcgcacagggagaagacacttccccggccggttttgaaaaagccctctccgctctctccgaaaaaatcacccagactaccacccgcctcgacctacaccgccagcatgcccgccgcttcaaagccctctggaccctctacaccacctttatctacctcctttactcgataattctcgcgcttgtcctaggatgggaaaactggggcgtgaaggagtacgccgcggttctcgggggaccagtcatgtatgtttgagcagatctggctcgtggttgcctgtcgatctctaacgggagcagcatctacctggtccgcgctggaggcacgatgtttttctgaataccggattaatcacacccagcgataccgtcgacagtttacagaagcagcgcgatgagacgattgagaagctcaaggtggcgacgaaatacaactccacccagcagctgctggaaaagtacgccggtg

SEQ ID NO: 5992 - DNA, 1390 bp, Emericella nidulans
agtggacagagagagagatcgcaaaacattattgatacactgacatctattgttctggaggcctttggtatagtttggccatacgatcgggaaatcccaggctatgggtcggatattccgtttgccgctctccacgtggggattgtggggagcatctatacctgctataagttatcggatttcccagctcttcacctcagtagctgtaattacaacttcctgttgcgatcaaaatgagttaccaccagtatctccctgatctaagtcttccgcgcttccaggtgatgcgcaatcaggatgcgcacgagtacgcggaggccttcaagaagggccgaaacccgccctggctacacgccctctacacgcactggaaagatcttgcccaggagcctttcaagggggtgacaactgacggtacttgatcgattaaattgtcagaaggagtggttttgatgctaataacgtgcaggaaacgtccgccccaacctcttcactctccaggacgaacaagtccccatcgacaccatcgtctcagcaacaaagcacctcttctctcttctttcaccagaccagcaacagacactcagctatcacatcgactcccccgaatggcgcacgtggtcgaaccccgagttcctcctcagccacaaaggcctgcgcctcgacgaagtcaaccctgaaatccgcgatgccatattggctgtcttacaggcaaccctctccccagaaggttatgataaggcgataaaggcgatgcggataaatcacttcctcggtgagctcgtggaatccccgcgcgtcatgaacgagtactcctacaattttgtcctcttcgggaacccctcaaccacaagaccctggggctggtctttctacggccaccatctgtgcctgaatatcttcctgtataagagccagatagtcgcgtcgccgtggtttaccggcgccgagccgaatctgattgactcaggcccgtacagcggaacccgcattctgcacgtcgaggaaacgctcggtcttaagctcatgcagtccctgcccccgcacattcaaaggaaggcgcagacctacgcgctcatgaaagaccccgccatgccgccgggccgctggaaccgcgacgaccagcgccacgtctgcggcgcctaccgcgacaaccggatcgtgccgaacgagggtgttcctgtcacactattcaccgaagaccaaaaagccactctctacgagatcctaaatcagtaccttctatatctccccacatacgcacgtgccctgcgaatcgcccatatcaagcagtatgagtctgagacgtatttctcatggatcggcgggtatggagacacgacccgttctactttcgcatccagtcgcctgttatcctggtggagtttga

SEQ ID NO: 5993 - DNA, 1385 bp, Emericella nidulans
tatttatgtgactatctcacaggcaacgtttcttcttagggccttctctggcatcttcattcgggccaagttccgatgccttcacacacaggacttcgcaacttgcagctgaccctcgaggtgcgcaccgcctcaggggcacgagtcgataaatgtgtattcccagcctcatcatcgaccgccagtaccgcatggagaacgaccattactgagaaaggcaagccatggaaccaaacgattcgcctcaatatccccacagatcaaattcctggttcccatatgattatgagtattgcggatgcccctgaattcccatttgcgctggcatggatgcccctgtgggacaaccaggcttttatacgagatggaccccattctctactgctacatgcatacgacaagcacacatcaaacgttgagaatggcaaaggcgcttatttgtcccttccttggagctcactgggcaaaaacgagtctacaaaggatgaggcgctcacggggcctctggctacccttcgcattgacactcatttgtgcagcactgagtactcgcaagatcaagtgcttttgagcttacttaactggaaagaacggtcagtggatgagattatggatactttgaaaagaattcgttttgtgcccgaaatcgagatcgtcaaacaattaagctctgtcttcgatgcgttgttttcaatccttgtggagcacgccgggaacgaagactatgaggatcttatttttaataacctggttacggtccttggaattgtgcacgacagacgattcaaccttggcccagtggttgaccactacacggagaaccagttcaatttccccttcgcaacaccatgccttattcgaagctacctccgtcttttacaggcaagttctgacttgcagtaccaccgcaaccttcgagctaccttcaaggttggtcgtcatctgctaaagttcataatcaatgcccgacagcagcaaaaattgaaggaagaaggtattggtatcactcgtgttcaatcaacgttcaaccgggatatgcacacgattttcaagtcactagaggctctgatgaagaatccttctcctgcgatggtgggtagcaaaacccttgttgttcagcacttccacacgtggcttccagagttgtcggctgtctttagccgagatgaagtgataatgattgcgctcagttttatggactcttgcgcagatgtgaagggaatgctagttttgtataaattggttctgattcagcattacactcggcttgagatctttggctccggtacggagagaaagagtcttgctctagctgaatcgctggctggatcctactgggggccacggggcagaattgacaaaaccggaccgttcggctggttggc

SEQ ID NO: 5994 - DNA, 1147 bp, Emericella nidulans
aggaaaagaagtagtagagtataggaagtaaaaaaaatacaagaaattgagtagtgccaagaaaaagggcacacagagggtaaaagccgtgacaattcaggtctctaaagtttttggccaggcccaggttttagcaaaaaacttcccaaggcccaaaaaaagaataggtttaaatcaactccacaggtccgagacaaacggggccctccgcaaaacctgaggttcatgtaattttcaattcaaacggcccaatttaactgtcttttcccccgatcattataaccgggttttctcaaaaagagtcaaaagattatggtcttgaccaaaacaagactgcgtcgcatcctgatccgaatatagcatccacggcatcggtatagggcggccagtcaaatatatcgtggcaagaccccttatcagtatcggcccgtcttctaagtcaggggtcatcttctcgaattcaagttgttcctcaatcgaagtcgttatgctgtcaatatcaaatagctcgaaaggccaagtttcaaaaagctcgctgaatttttggcgatctcgagtaagataatgttcaaggatggccccgtagatctctgaggacaaagatggacgtaggtcaacagggatgacggacgtaatctcgtcaaacttgttttccttgatgaaagtccaggcccaatgttcccacctagaagtggcactcaatgcttgcacgcaaactctagcggcttcctgccaccgattatctctgataagttgctctatccacatctcaccaatgcgtcgcttttcttgtacagcggcagggacatttccacggtctgttgctgtgatggaagatctatcgtcaacgaatagatcaccaagactagtctgggatctcccgggcgttattgagacattatcgctaccttcactggaccccgccgcttcaggatgctcatcaagaagcttccaggcttcagcatacttctcatgttcaatgagccacgcgagatggtctgcaagatctcttttcagtgctgccacacagtcatacgggctgtcacaaaaatcttggggccggagctttcggcaacctcctgcacttctatggctaaaggtcctcggggacgaacgccgtgacgaaacgtgctgggcgctctgttag

SEQ ID NO: 5995 - DNA, 668 bp, Emericella nidulans
ggtatgggaagatcaaccgagcccctgaaacccacccatcaaaacttttacagtgcgttgttgatgacccaccggcaattccccccagtcacggggagggcgcagcgaggtacttttttgtaaactatgctctggactttttcccttgcactcatgctgtcgtggtgatgaaggcgttatttgcaccggcgctggcgttcgggagatacctgatgtaatcgccttcttctgtaggcagtgatggacatcatatataacgatctagaaacacgcttaatgacatccgatattacatagccagctcgacgtcaatacgtgccgagagacgtgccgcgatttatattttagccacccctctaaccgttgaatatgaccagacttcatactattctgcaagccaatcctacaattcgactgcaaagacatccaaccaaggcccagtacggaccgccaatatggatctccttcgggattgattccgggtcttcggaacgcctcccggagccagctccgaaagaccataaagaacaaccgatcaacacacggcaatatacagttctctctcttatggtcacatatattactgctcttgctatactatcgagaaatttcctccaacacaaaagagattcataaaatgccatccaaaacccaaacagacgtcttga

SEQ ID NO: 5996 - DNA, 788 bp, Emericella nidulans
cccaacttgcaaactagcggtgcaacccacggagtccagagacggattaacttcaacgaacaaggcatgggtaatcatgttctgaagacaaatagcaacacagctctcgccctccacagcctcgtgccaccttccacaattcatagtagtgttctcggccacggttgcattatccggaggtggtatcataagccattggtggccatctgaagtagagggtgtggtaccggttccttgcttatcagctacatgttcgcctccctggggtgagagacagatggtggttccgtagatttcacggccgacttcgaggttatcgcattcgggggtaacccaggggttgaacttgcgtacgtcgccgcgttcaagctcgaaggcgaactctatgctactgcagctgtcatcctgttgaaggtcgtagattctctggcatgaaagtggtaggcagagttccaagcctgtcttgatggaagaacaccaccggataactctctgattgcccatgtatagtgctgctgatgatatattgttggcctgtgcaattgaagtgcatgtgtccccatcggatgtaatgtatgttttttctgaaaagcacggggactcttcgaccggtagcggatctaatggaatctcctttatctccgtcggcgccgataggccgcatcgcttattgatcgtttcaaggcgaaacttgtagaaatcatcgtagcctgaataagcagtactctgcatcattttataaagttcaacaaagcagtaggagcagatttcgtcttgcggcatttggt

SEQ ID NO: 5997 - DNA, 652 bp, Emericella nidulans
gagactccacgcgctttgacaaggcacacagaaggcaaagcgctaacggtatatatagtcggacgaagcgcctaccgcgcgaaaccagtcctgtctgaactgcagggcataagcccgcgagcacggtttactttcatcgaagcggatgtctcgctcatcagaaacgtggacagcgtctgtaagaaggtcatagagagcgaaaagggaggaaaagggaaattggattctctgttcatgacgcccggcgggatttcaattccctttaggaggaggggtggtgcgctaatcctgccctattcgattaagatgtgtatgatttatgtggaatcctggttacgtataatggattagagacatccgaagaacttgatcgcctcttcgccttgcgctactatgcccgcatgcgaatcatccagaatctcctccctttgcttgaatctgaacttgaaccttccacctcaccagggccaaactctatccctagcaggatggtatccattcacggtagtggctttgaatacggcataaacttggatgacctcaacctaaagcacaatttctccctactaaatgccctgcaacactccattacaatgacctcgttgtcgatggcccacttagccaagaagcacctaaaagtcaccttcatcca

SEQ ID NO: 5998 - DNA, 594 bp, Emericella nidulans
gcaggtcgactctagaggatccccgcttttacaactttcttagcttgagaactatctcacacttctatctccccaagcattctcttttgtttcttttcgaacaagtctgtctcttgacttactcttctcactatgcaccttcgtgagtgtaaccccaagcattctcttctgtttcttttcgaacaagtctgtctcttgacttactcttctcactatgcaccttcgtgagcgtctccccacgctttctcttccgtttctttttggacaagtctatctcttgacttactcttctcactatgcaccttcgtggtgggcgttttggacaagtctgtctcttcacttattattctcactatccacctttgcgagcgttgcgggttttcaaaacacttggcgaggtccggaatcttaccaagtaataacatttaacctcgagagacgagctcatgtaaagttgggaattcgttaaggagctgttgctttgttagtgtagaaacacttgtgtagaattggggattgttttttttggagtgatttaggggagggtcgaatcttagcgacaaagggctgaatctcagtggatcgtggcagcaa

SEQ ID NO: 5999 - DNA, 535 bp, Emericella nidulans
ctgcaatgacggcttcttcccatttccgatcaatgtcttcagcattggcggcactatgcccggagctccgccgtctagccagcaaagaagtggtttcatctgcaggagcgcgcgaccctcttcgagatcgagttgacgtagccgggtcaaggaagtggttatcggtcagcaattccctctcatcttcaatcgcctgctcccgctccctccaagtcagtctctcactattctccggctggtacggatatggaacgactgtcgcatgcgatacggtagtgaagaagcttggacgctgataagagccagctaatgagtgcggacggtgcccggctggctacgtacgggacggattgttgaattctcggaagcctcatcgtcagccgtggaagccgaatccgtaccgtcagcgtattgctccaggtcacgggcaattgcctcttcggcaagcggcgagctgccacgagaataagatcggtccaccggagcgctgagcgaacaccgtcgcgggccattactggttgggggagaaggtgat

SEQ ID NO: 6000 - DNA, 1271 bp, Emericella nidulans
agcatgtgtattgaggaccttatgggtttattaatggaaggggaatgctcaagcatactcctgggacaagatgaggttgtccttggggaatactatggtaccgcacgtgtgacgtcatttatgacacgcacgatgcagtcccagataaaatcaaaagaacagccgagctgacatacagagcaacgcgagatttgtttcgattttgcgcgtacatacataccctgccttgcttcccacaccgacagcgtggtactccacggcccccgacttttctaaaactggcaaatgcttgcacaccagtacgctcaacttcagaatatagcccagaaactatatcccgcacggccgcgggctttataagtagtagatcctgggctttcgtgctgaacgacacatctggaggcaatttgatggctgggattagaaaactgtcaggctgttgttatgaatgaccttgggtggtaaggaacgttattcatatagtcagggaaacataagcctacaccaatcattaaatggcaataggaagagcaggataaagcttccattactttagctgcaggacttgtacactgcatgggattgactctgctgtgctacaactctgacaacagcattgtagcttgcctaaatccgcaagtacatgtcctattacccgctaaacgtgaatgaattggtgttgcaggtgatccgagcgctggtgatccgagcgctggactgcgtgattagactagatcatctgtttgtgggaaacacactgcaaaactagtatcgtagctgacaaaaatactacttcaactttcgttgctgctacataacagccagtatgagggctcacttatcaagggcacttgtcgtgatacatgatttacatctctatgctatcaatgctaatgcgatgtaaagtggagctatatcatttctaacagtagatgccagaaatatggaatcaagataagtcggaggatgcgatgattcagttcatatggcgggatgtagctacccttctgtaattagagaaaaagtgagttcagtgcggtacgtactgcaagataaggactacttgatttggcgggatgtacaatcaaagataccaaaagaacacagcatcaatacgtaatgatatacatacagtatcagtccataatattgaaaacatattggaactaaacagttcatgaccccaaaacactatactttgtgctaaatctagaatgacagcaaggataaaaagagaaagtacatgcaacagcatgtaatgaaaagctacc

SEQ ID NO: 6001 - DNA, 1153 bp, Emericella nidulans
gttggctagcgaaattaaagcctcgtcacaagtgccgctacctggtaagttctgctgccaaactaattcggcttgcattgtccaacaagtgggcggacgtcgacttgggctctggctaatgacatctcaaaaggtcaagatttgcgatcttgatctgccaactccatgtttctgtgaccgctagggctaggctgagccgcgagacgatcaagcgaccaacgtcagtgtgaattgtgaaacgacccattcatgatcccagatctcaagagtcatcaaaaccgtcagttcaggacacctcttggtctcgttctcaagctccagctgcagtccgaatcgaggcttagtgggtcagcagccagaaattgacgaacgccaacccagagtttcagcttctcatccaaagcctggttcaggaacatgttcggcaacgatcgctgccgaagagctcgtggacaaacctcggaccatggtgcagagcctaaattcttttaaatcaaaacaacgggctgttagagatgttgcttctttgtctgtttcttccaatcgccgttgacaagatcctggggggctccaaggttccctggttggccccgttcactctgaagcagactaggggctgctaaacccgcttgaggagttagtccagttcgacgatgaaatcataaaggttcccaccatcgcgccaagagttagccttgcactactactcctaatagagttagtggtagtatgtatggggtagctttctacgaatactacagcattccgaggggatccgtcgggactcgcccaggccattatccaactctgttgtatcctttagagcacactactctcttttcgctcaagggacttgcctagttcgaagccaagtcaagcgtctttattactattacttcattgagagaaagttgtttacgtcggatccttcccgggttctcgcccttaaccggcctgttgatctcctgctccggattccatcttcttagacctcttcagttcttgtttctgcggatcgacagcacacagcgaaatgataatgaacatgatcgtggccatcgacagatatgcagtcatcagtagtcggtttcaatgctgaacgtacggatttctttggcagcagttgtaggtttgcgccgtcgggacgagatac

SEQ ID NO: 6002 - DNA, 744 bp, Emericella nidulans
tcaagttcaagctctgatgcaaagcacactcgatctgaaacgccagaggctcgcggtgcatcattatcttttccctctgctggtttgttttgttgtactggacggtgtagatcaccatcgttactaagctgtatgctcacgtgatactcttaagagtgcaggcaagtagagcaagcagaacagatccaatgatggtttaggcgttcacggtccttatcctggctggtttaaggatctgataaaacctggtgtctcagtgtgctgcaatagatatgcgagatgatctatgcacgtaagcgacttctccgcctccgcaactcagctatggctttgatcttctcagctgcacaatatcaatataatattgctgccatggaagtttttcttagactcttaatggccattgaacgccccaaatattatttctatttaccccaattctattatgtcatggcttgatagggaagcgaaacaaagacggccactcatagtgttgacgagtcttatgcattctctttgtttctccgtctgtgtctggcatgctttcaatactgctctaagttctatcaagggatgacctgcagacctgcaggcttgaaccgactcatcacgaattatcatccctctgtttgatatgccccttgaagcgaagatagtgctgcgcacaccgtcgtcatactttacacgttcgtctaccttgtatccctatttctcagagacatccttcagaatgttcccagaaag

SEQ ID NO: 6003 - DNA, 643 bp, Emericella nidulans
cccagtctcggatcaatgcctgctttctggagactactcagactagagtcgtgtggcttcccgggccacgcttctgatcatgtgagtcgtcacatccaggccttggaggttacaaaagcggccgtcagtccgcagaccgatcctacagtatcttaaaatagcatcgcctgactcggtgtgagggtctcaagtccatatctattgttatcgcttcgttgtacacattgacatcatctcttctaggtatcatcatcatgaactccatactaatgcaaggtttaaagccccttcggtttctgaccgagtccaccccaggttcagttttcagtcggctggcatccggcttcagagcattccctgagccacctgctcctggcgttcctgccacacattcttacccgagcacgagcataccgttttgtcgttgtcccagaccccagcgcttcgagcaatcaccccaaccaaggtattggaatcctcgcgttgaaaaggcccttccgtgctcttggacaccaccatactgcgtacaatcagctcccagattgctaccggtcgatccaagacacattggctcgttcctgtgcgttcacttccacgctttcaaagatcccacgtggctccttctgtgcattggcgccctgga

SEQ ID NO: 6004 - DNA, 1011 bp, Emericella nidulans
ctgataatctcgcgacagaaaatgatctgtggcataactgcatcatccatggctggaccaccgaaagcgctcatagtcctctaattaacctgcatgggctgattttcaccaagccaagcatatatcgcctgccccaaaaatggccagctgactgctcccgcaggcccccctgaagacgccgacttggacattgtgttcaagagtcgggtagatcctagccagtgacacttttcgtccgtcgtccgctccagttcctcgtagacacgcagaatcaccacggtgatcaatatgttgtcgtcgtaaaacccttcggctttggaaagcgctcggatgagcatttcaacgcattgactgtggtactctgcggcctcccaatcttctgacccagacatgatcgccgcatgccgcgcggaaaacgccaaaattgctttcatgatcattggcacctgaagggctctcctaggaatctcagttgagaaatgcgagttctgatcgcaaacatcaaacttaacgggtcagtgtatattccgactcgccaggatacacagacctactctgggagctagggtttggatgaacgagcggagaagagaagcctcgcgcgtcgtcatggacgagatagagttttggcgaggactgagagagctcaaagacggtgagaagtcggcccacgtactcactgatggcaacggagaaggtccgttcgcgggctttggagatatactgatggacgatatcgtgcgccgctcgcctggactggtaccggctaactgaactaacaaatgctcatgattgccaggatgagccatatcctcgcgcggactgggtgtgtgaggggtctgtgcttgtgacaccgccgacggcccatcagaatgaagttggttatcctcacgacatcgggtataacatcgaagtcgggatcttccgcagattcctcaatgaacatcactaaacaaatcagtactgatcgatagagccggagacgaattgagaacatacgagattggggga

SEQ ID NO: 6005 - DNA, 577 bp, Emericella nidulans
tctcttgagtttgctgatgttgttcgagatgagacgtagactacgagatttttattcatacgttctggaaggagagggggtaggttacaaaaacaaatgatcttgccttcgtgctcatgaatcagtacttgccagtttatttcagccgttaatcattcaacgcgaaccgtttcaaatctccttatacatcataaaagtcatgaccaccttactcggtatgctcggtatatccaggaacaaccctccaggagcaagagcttgaaaaagtaaagtgacactacttaagcttccgcaagccatacgaagagccggaggaaccatcagcggcaggcttcccagcctctgccgcctcccaatcaacgtttctaacagacgttttctgacgaagagaccgatacttctgaagcaatctcctgtatccgaagagaagaacagccgcgatgacggcagcagccacgcaggcgacgactattccggcgatagcgcccccagagagaccagacgagccacgagatgagctggtgttgccgtcagaacccgaggctgacgcgccgttagaatcagtcgtatcattatc

SEQ ID NO: 6006 - DNA, 587 bp, Emericella nidulans
cgtgtaatggatgtatacgtagagatcctacgagacccggccgcagtagatacacgtggatgtcggttcgatcgcgcggttgcctcaaccctcggcggatccgagatgtccaagcttgggccatcattcctgagctttcgccatcatacaacacgcctaaagattccgttgggctttatctattattcaacaagatactctgagatatagacacgcactaagactcaatatgcaggatggatggtttgaagcgaccgaccctatttgtttcgactacatccggaagagcacctcataaccatggatcactcacagaggcagctccgcaatccgcccctccggagcttctatcaaagctgcccataggcggtgagtaaaacgagataggacgctgcaaaagatgtcatttctgacgtcggcatttctctagattctctaaacaagaggtcgcggcggtatcataggggaggcaaaggtagatctcgcgacgcccttttccgacacaggatgcatcatgtttcgtcaagagcagacggcagaggctcaatatcgacataccaacaacaagagagtgaagaagatggaat

SEQ ID NO: 6007 - DNA, 538 bp, Emericella nidulans
  unsure (1)..(538): unsure at all n locations
agtttaactgcatccaagatgcatgcttcgcgcgggaccggacgctgcatcagatcgttacgtttgtcaatttttgcgagacgctatcggccgctgagcttgctgcaaattacgcggttttgttgaaggagcagcagaaacagcaagtccaactagccagctttgcacagggccttcgacactttgagcagaaaatgctcgatctcactgcattgcgatcaaaagacctccaatccctcgatctgttacgcatgcaccacacaggagtctccctgataatagacgtctgtctcatcaaagacccaggcgtaatccgcgatatgtacagtgaacgcttttcagaagtcgttgatctggcagaaaagataactgctggagtgcaggacagagcgcgcgaggcaggaccgcgcccgactcttatgatggagaccgcagttatcggtccgttgtattacattatccagaaatgcggaaacaaggaaattgcgacgcngcgctaagggctcttgaggagtggcgcatcgcaggggatgtggga

SEQ ID NO: 6008 - DNA, 648 bp, Emericella nidulans
taactccaacttacatgagctggaacggatgttggcgagatccagggccttggatgcgtcggaaaggtcgatagccgtgtccattgtggcaatttggttctgttcctggatgacaatacagaggggaagacagaggttgttggacagtagagaggaaagcagatggggagaaattcgacgtagggaactgaactgcggggcggagtctgaccgaattcaggaacaccgtctttctgtgttttgccaaccaggaaaagcagtccaattcatatcatggaggccaataggaagaagcaaaaatggccaactgggcgccttgtttgaggcctgacattcttagtctgttgtactagctgatgatgatggtgatgatgacgcagtcgcaggcatcccccgcccccctgctgcttacctccttctgccggcgcttggctgcttatctcttagagaatttacatgcttgagccagtcacgaacaagtcggtacattatttattccagattgtgtcacctcagcttatgctagcttctgcactcgcttgatatgcctcaccgacacagaatcggccaatgccattttatgctgacaacttcggtgagaacttcaaaagttggtcgtgtgctgctctctgccgtcggcggtttcgc

SEQ ID NO: 6009 - DNA, 1419 bp, Emericella nidulans
tcatgtcctcaagcaccttcatgttaccggttcccaacatgaccaggcccatggcaagaccaacggcttcaccattgagggcagaatcggtgtacagaacgtttcgcagatcgtcgtatataccctcatctcctgttgccatacccgcaacgccaagacccaaggcaccaccgtgttgaatcacttcttcggtagctttcttgaactggtcacgaatatagtcgacagccattccgccatggttggcatagatcaaaccaagcgcatataaggagccgccctgactatacagagatccagagttaccgacgccatcgatactgttctcctttggaaggtaaggctgcaaaagcctctgaccctggctcaaattgccacggtgaatgacgcctagagcagcggtcgcagtaaacttggaccagttaaccgcctttccaagccattccaggttatcacggaagaatttgtcctgcgctgttccagcgtacataaatccatttgagatcgttatcgccgagtggaaaatcgagttgcgaggttccaaggtgtctcgaagtttgttgagaatagctatatcaaccctgctattccgatgcaggaactccatgttcagctgaatggttttgatcccatcgaggatatcgagaatattcttaaacgcagtacgcgcctctgctgacaccttggaatcagcgttagcaccaatagatgaagattggttgtccaataacgcgtccgactcttttggttcctcttctttggtctctgagtcttcggtcttctccggcacgagttcagaaatctcttgatggactttttgtaaaaattcctgagtactgttgtcgtaaagatcaaaagaaatctgataggccaccgcaagtgaccgagcgtcgcccttttcaaccaattggcgaaggatgacggaggccatggagtgttcgttgaggtatacgacgcatttggcaatcgcgaagtaatcgggcgaaggaatctcgttgagcagttcaagaatgagtttcaggatctttgtaaagacgttgagttagctcatggctgacaagcgggacaatcatgccgtacctcattgcggaatcctcgctcttggacaacacccatacaaatgtccagcacatattccatcaactcctcgctctggcgggattcaccattctgctgttttgcatcctcgctagcgcgcattatggctgttcgaagaacttccaggtgcttggcttcaatagcaataccaatcacttggcgatatcgtttctgaaggaagcactgctcgaacaggcgctcaatgacagctttcaactggccttggacgcctcgtttgaggacgagtggaacctcgacattcgaaaccggtcttcttcgcgccgggttgggcgccgtccacccctgtactttcctgcctaa

SEQ ID NO: 6010 - DNA, 470 bp, Emericella nidulans
gctcccgctcatcctactcatcccgttctcgttcgagctcttactcatactctcgctccccatcttattctcgctctccttctcgcagtcgcagcaggagacgttcaatcagcagaggcaggtcctattcgcggtctgtgtccggctcatcgcgccgaagctatacccgaagctcttataccccctcgcgctctagatcacccgcgccgcgaagccgccgccgctcagtctcatacagtcggtctctatctcgcagccgcagctcaccccgtcgaactcgccgtggacgtacggactctcgatccccgcctccacgccgtagtttgagccgcagtgtctctcgctccctcactccacctcgacgaggcggaagagcccgtagctactccaggtcacctcccggtcactctcccggtctgtctccgccacccgccgagcatctgcccgtagacgctactcgtcagagtcga

SEQ ID NO: 6011 - DNA, 610 bp, Emericella nidulans
aacatctgtccagagaccactcctttcaacgtccctacgctgaccacaatccacaaagccaccacgcagagagcgataatctatgaccgtcgttagaaatacagccagaaagccaagccagctaagagaatggctagaagacataccgtccctagaatccggaaaaatgccgaggggagctcgatgccgatctggtaggtacacatcgcataggcgccgatggggaaggtgaatccccaccagccgatattgaacgggaacgtcttgcaccggacaatagaggcagacgcaaagaaaagccacactaggccaaacgcccacaggatcagcgctaccaagctgcccattacgtagaacgcggagccagctaggtctccgagagtgtgcgtctgcgggaagattgtctgagcggccttgcctagcttcatagctctagacagatatgtgagactgggactttacaaatgtgtgagacagctgggctggcttacccgtatccccccgagccaaaaggtcctataggcagaaagacgctgacgaacatggcctttgtgggaacttgtgcagtgtcagacggttgaagttaattaccatgaccatcaatgccagg

SEQ ID NO: 6012 - DNA, 878 bp, Emericella nidulans
caaccctcggtcaagccacgtcaggatgaagccctactcgaggaggtcataaaccacgtcgtgcccgcgatgagggtggagacgaggaggacgagagccggaatgggaagaagcagaagcagcggtctaagaagagcgcttctgctgaagatggcacggatgatcttaagaaattagtggaaaaggtgaaacggaagacgaaagcttgattgacctgcttgttgtgcttgtatgggatcactactctctatggcgcgtcaaaggcggctatggaatttgggcatataccattcgaatgactcgttttactaccgttacttgctgtttttagaactatgcttgcctactgtagagaaatggctcgagctctagatttgcttcttcttttccctttcctgccctgttctcctttcgttcataacccgcctgaaaaccaatatatgatgtaatgacagtatagctgcaatgataaatttggattctggcagctgctatcccgccgcatccatgtccgtacatgcagtatcagggttggctgtgcgacgtacccggacatttgcatccgatcgcacagtatcataggtcgttgctctaccaatcggtgtcagtaagctcaccgagaagagtgatgtgtgctgaaatcatcttctgaccttgatggaggctgcaggtccatcctttgatagaggacctttaggtggcatccgctcaccgccctttcggcgtcttcaccaacccgaagacccaaccactttccgttcctatccctcctccactacagccctcttcttcctatactcttctctttagcttacacgcggtccatagtgtggtggtgtctcaattccttctgctgttgttacttagcctacgaggtc

SEQ ID NO: 6013 - DNA, 379 bp, Emericella nidulans
gaaacgttgtttcaatccattccaccggcgttcactccggtccttcgtggctggcctacttgatagttttacgagcgttttgtcatggcgtctcatattgtactatactccgcttttcagaaatatgcctttcagatcttgtacttatctactgtactcttgaacctcaatcacaaaaattgaagatataccatatgaagggggattctcgcgtgtcacataaacattaggcaataacgcgtcaaaagtcaggtagtacgtacaatacaatagcctatagaacgctactgaacagagccggaaaaatagaaccaaatatacaactagcggcgtagaacaacggtaccaaccaaaagtattcataatgaacgaaaccagc

SEQ ID NO: 6014 - DNA, 499 bp, Emericella nidulans
gtgacgagattccgtcagagggagaagacgaaggtgtggtaaagaagaagtcaactgcggtgcttgacctagatgggcttgaagatagaggagaatcgactaaggaggaagaggatgaggagcaattgaactatcgcattgagaaaggatgcgaatggaaatgaccgctacgtctacgatgagattaacccagacgacaattcggactactcggatgtggacgaaaaattcaaacacaattggcaacattccgttgtcgttctacgatcaatacccccatattggctatgacattaatggcaagaagatccttcgccctgctaagggagaggcccttgatgcgttgctcgccagtatcgaaattcccaaaggttggaccggtctcactgatccctcaaccgcaaaaccgttggaactgagccaagacgagatggaattgctgcgcaaagtgcagaatgaacgaaattccacataagaatcacccaaacgacctcgtgca

SEQ ID NO: 6015 - DNA, 538 bp, Emericella nidulans
aaaattagaaaaaaattgaaaacatagcttacctgagagaggcatcatgctcgccgacgttgtgcgcattcagggagtctagatcaaagtttgtggcggttgggtccatggccaggacattgtcaaacatgctctcggccaattcttgggagaagttgattgagtcaaccagtccattggccaggccctcgcgtgtgatgttacgcccgtctcggtggatatagccgtggttggcaagggtgttcatcatcgggcagggactgcgggctgcacgaagataccctggttagcatctcgtagggccgtggtcccgtgaagacgtaccgtctccatccccagcagcaatccaagcatgcgggttctcggcaccgagtttggagttggaagcatgaacgtgtgggtgcgatccgcccaggttcaggtctagatggagggtggcggagacgacgccggctagggcaaggagcgacggtgcagtgagcttcattgtgagtctcgagattgtataatgattgaagtctaagcaggccaaaagagt

SEQ ID NO: 6016 - DNA, 459 bp, Emericella nidulans
  unsure (1)..(459): unsure at all n locations
aagttctttatatctaataaaatttttagaatctatctactaattatcttaggctatatattcttaataagcaagatattaacagtattagaattagttataatctttataaatataatattttatgataaattttcttttaaatttataataaaaaaaaattatattatttattatagatagtaggtagttcaggcagcttatagttatataaattatttttaaatgtagagattattctctgctagaatttcaatatataaaatatattttagaaagagaaaattatagaatatcttaattatacttaaataagccagggaataattctggatatttataaatttatcacccacaatanaatattatacgacatagtctagaatagataaataataagtttattatatatatcaatgngggattaagtacagaaactctagactagaggttattata

SEQ ID NO: 6017 - DNA, 387 bp, Emericella nidulans
cattgcacacggaaccggcacaggctccgagatcgcgagttgcaactacgttgcccgtgcatctggcgtaaagaatggcatgtggatgaaaggtgccctacaggcatgcccagatttgcgcgtcttgccctatgattttccggcctacgaggaggcgagccggaagttttatcgtgcaattctcggcattgatggcttggttcagagcgttagcattgatgaagcgcttgtggacattacaactatatgccttgaggcaggagggtcggagggcaagggcgtatctgaaggctcgatttacagagaacaagctaaggctgacgaggtagcggaacagttacgggccgccataaaaagagaaacaggctgtgcagtttctgtcggaat

SEQ ID NO: 6018 - DNA, 515 bp, Emericella nidulans
cgttactttcatcttttacctggtcacctggtacaccatactagagaagctaaaaggggactaggttttcaaacggtatccccggcctcgcatccgcactcgcagatcgctccccgatcctggtggtaacctcgtcgccgccgctgcgtgacagcgaaaataactcgctccagggcatcattgatcaggtcgtcgcaagtcggacgttgacaaagtttgcgcatcgagttacaaatcctgaggatgcgccgaggttggttagtttggctgtcaggacggcgacggcgggacgccgggcttagtttctgcctatttctcctcatgcccgtcctcagctgggactctgaatgaggctaagtatattggcgagtatgtacagggccggcactgcttgacttccctattgatgtgcttttcacgccggtgcatgagaatttgatttcgtgggggtcaattacgtctccgcgttcttatgcgccgggtccacatgttgaggctgttaaggacctgtgggt

SEQ ID NO: 6019 - DNA, 485 bp, Emericella nidulans
gaggataaaatacccagtgcttttgtctgcggacattttcggagagtgttctcgactatggtgggttcttctcgctttttttgagaaatatactaatgcagttaataggatacatgggcattcgaaagctggacgcattatgcatatgggtacggacccttgacctgaccaacagacatgacgttctaacaaagacagatatctcggttacctatattgggccctcgtcctctcaatagggatactaaacagaacagtgcaatttttcttcgtctcccgatccgatatcactccatcagccctagtgctctttcaaaacactccattccggcgaatccaccacttccttcatacacactttctcgttccaacagctctcccatcacacggccgcagacttctctgctggacattctccaaccgcgccgaggccgtggtcaccctcggattctggatccttagtataatcctctgcagtgtgagct

SEQ ID NO: 6020 - DNA, 859 bp, Emericella nidulans
ctctccccccgggctagttcctgcagagacgaggcatggccagtttttgagaacgctgtgaattcgacacgtctgaaattgggtatcgcgatgaactggttctttggacgtgtgcccgcagaggcagcccccggtgaccggatcttgccactgcactttttcgagaacagcctgcttgtccagggaaacaatatggcagtctcacttgtttttgacactgttttggatccgtcaattctgcggagttcgttggagggtctggtgaagcgagaaggctggcagaggttaggagggcggctgcggaagaatgtatggctctattctcctgccgtatcccctgactgaaacatcttctattggcaccggccttgatctaaactgacgtctctaggcctctggcaagattgaatggcatgtgccgtcagagttcagccctacaagaccagctatttccttcgcgcatgtcgaccacggcattccagcctcacaacacccagccgcatcgcgcatcccaaagccaagccctaacccggcaatcgtcggtgaccctgacgcattggagagtctggcttgggatccgggatacacgcccaacgggataaacgactatctcacttcggaccgcccggttctcggtttgcgcgtgaacagcttcacggacaagactgtcgtgacgctacagtggcagcatgttgcttttgatgcgctgggcatgcagtacgtcgtcgaaggatggagcgctatgctctgggggaaaggcgacacatcccgacaccggtctcgcccgaatcagatccgtttgacgtgcttgcgacgggagcgcggccgacaacagaaaaacacatcctcacagatatga

SEQ ID NO: 6021 - DNA, 858 bp, Emericella nidulans
gcatgtccaagttgggctcggttcgactgagttccgcattatatccatgcccacatgtagagataagaatatcttatatttgtacgatactcaaggtaaacatataaagcatacaacattgcagctggaacaagtatacccagtaagcccagagattctaacagtacgtgttcaacttgcggtcaagtttgtctaacttctgaaagaacagacggtctcactgacgaaagtgctcgcttaaacaaactatagtaaatagagtcattctcctcccagacattggtcgcctccctagctactggctgtgtgagtcggtgttagcagtggaataggcttgatgcccctctggccaattagggcttttttccattgctgagtgagaccagcgagaacctcaacgtcgtagagaaacgcttgcgacgactactgaaatagcgcgctatagtgccacctgtgggctttacagggcgattggcaattggcaagcaacgttggctgggtgcagttccactaaacttaccactgagtggctgagagacgaagattcatggcattactggctcagaaggcctgcaaatcagtcgtccgctctcgtgcctcaagatcctctcttgtcgagcaggtagactgctccatccgtattcgcacctacaaccgctggtccaggaatagcatgatcttagagcggctggttaaacaacgatatcggctgaattcgcgagtcgtctcgaaaaggaatctgcatcgaggaggaactggctaatctggccaaggcagcattgagggctgactgtccgaccaaagccttttgaggctgactgttgtatggcgggtctggaactcgttcagtgtcttgag

SEQ ID NO: 6022 - DNA, 556 bp, Emericella nidulans
aacgtagagtgaagatgatatgaagcgggttcggcggtcggttcttccacggccctgtatttctttctaaagcagagacttatcggaagaattttgcaggttgaggtttggcatcgaaaggaaggtccgtagaagaactttaagcacacatatcaccccttactgtgtggtgaatacctctggatatgaccattgacactggtcgctgatttggttatgtgtggccatggctgctcgttctcgtgtaacgcccgagacaaacaatatgaagaacagaccagatagagatccaacaatgccaggttttgctgcaggccaagctaagccgtgacgatcatgattgccaacccaatccattgtctggactgattgttgtcgggagcggagttcgagacagacaatagcagccccgtttgccagaacaatatgtaacaacgcctcaatcatccaacagtcgcagtcatgacgcagtcagtataagtgtctccatggtccatcctgattgtactctttcagatgtctcctgggaggcagtcagtaatgaagaccccaacac

SEQ ID NO: 6023 - DNA, 215 bp, Emericella nidulans
cccttaattcccgatgcccggcttgagctgtggtagctctgtggcttatatcaagagctgtctgagttctggttgcacttcggaccctgctgtttctattccgtagatacggcgtcgtgataaaggtcaagattatctatcggattctgctccttgcgctggccgaaataaagctcattttctgaccggtttctaaccgttttctgcccgtgatt

SEQ ID NO: 6024 - DNA, 1353 bp, Emericella nidulans
gtcacgctgacgaccttgggcttgtcaacaacagccggtgccttcttcagagttagtgcaacaatcctcaaaggcgatgatcaataaagacttacggccgtgctcgctttacggggcttcgcggtgttcgccttcggtctgccggctggcttcttgacgccagcattggttttcttcgtcttcggcttctcggccttctcggccttgtccgccttcttagtggctgtcttcttgggcgcagcggtcttagtggtagtggcaggcttctaaatggcgtcagcaacacagtcctacaattcacgacggcgatatgattacctttggagcgggcttagcaggagcctgcttcttggcaagcttcacgggaccagaggtgcctaagaaactacttagtctatgttcgataacaaattcaacgcacgtatgctggcgtaaaaagggcttatttcgagtaactcggattgagatcgttgataaagtgatggttgaggggtgcgcgacaaagggacggcttacctttgggctggatgaaatcgcccttctcaacaccagccttgatcgccttgttgaactggctgtcaaaggcgttctgagaagcaggagccagcttattgtttgccagcacatattttttgatagactggcggctgtgatagaaattcgaagttagcatcaaatgcgacaggctagtgatggtcggggacggtgaggtgaccgcgtcgctagagagcggctcgcactaggccgattgagaaggccattacaacatacctgctaccatttcgctctttcagctaaagcgaaagatgttagcgatcgggattacgatagaaatgacaaccccggacgtggtgttgggatgattcaacaggagggagacgtgtcacggtcgggggttgctcccgcccgacggcgtcatccaagagcggccagaaacaacgtgatcaactcacattcaggatggcatccttgatcatatctatatagaacgaatcagcatgaactcgcgacaaagacaatactaaattcatcatagcgcgaagaggtggtgacgaaagatcagtaaaaacataccacggtaggaggtgtgagttgggccagaagcggctttcttggccgtagtgggagctttcttgggaggcatcttgaagagggacggttgggatattgaaaagagataccaaaagaataatggaagatactgaagatcggatgatcagcgacagacgaccaggaggatgtggtggagtgacgatgggagcagaaagagtcgagagtcgagaggagggaaaggccgcggggcacgcgcgcctttatatagggcagccggtgttgcactggatcccacaaaaa

SEQ ID NO: 6025 - DNA, 875 bp, Emericella nidulans
  unsure (1)..(875): unsure at all n locations
ttttaagatccaggtagaacatgtcgtcaagaatgccgctggattccgagcctcctagaatgaacaatttgtcctcatggataacggcggcatggcgagctcttccccgagggacctgcccgcgaacttcaggttgcgtccaagtggaagtaggaacgtcgaagatgatcacgtccgataagtattcaccatgctcattttccccgccaaaaacgattaatttgttatcttgatagagatttgccgtgtggcctataagatatggttagtccatcaagtactggagttcccgccttaaaagaccattgagtctgcggaatggacgtacccatgcgaacacccggaatatcgccatagttgtccactagatcccaacgaagagttttcaaattcaaccgtagacatgattgtaaactgtgaattgcccaaagttagctcatatctcaaaatctgactagcaaaagcaagtccacggcttatgaaccttcatctgtatactggtcaaacccgccaaaggtgagatctgatcgttgccgcaataggttactgaggcattaaccaggcatgcgggaacatggccctgaacattgtggatgctgggtcgtgattctgcactgcctcgagaacgactcttcgagcacgggggcatcagaactgcgctctggggtagcgatgactgcggaggngggtagaggtggccatcggatgtctatgcggcacgggcgatggggagagaagtgggtctggtggaattcaggccgatacgggctaaagatgccgcgatgcaggcgagctgtatgtacaggagttcaggtaatcgactagcggctcagtgtagtcattcatgatgggtgtcaaaaccttagtcttgaagc

SEQ ID NO: 6026 - DNA, 829 bp, Emericella nidulans
ataccggctctgatggtttgcatcttaaagatactaattaagccgcaggttggccatcttacagcattactctaggttgtctgtactattcatttgacattggcggttagctacattgcttcaaggcatgacgtccggacgaagatatcctcaaaggaggaactctatgctgcaaataatctataatcgcctgtggttatagcggcatcctcgacgtctgcgtatttattaacgttctgccttggactggcagccgccggtcatgtttgcgcatcagtggaagtgagctctatgcgggttttactccgacaaatccgttttccagcacgtcaatgagctcatggagcttctcaataaccaggtctgtgtgcatatgctcctttaggtggtcgttatggtcattgagcagcagcactgttgcggctcccgccgcgtgcccggctgtcatatcatcaaggctatcaccgacctagcgcaacacgatcagttgccgctccaaccctaaggatgcaagaaggctgaggaactggcaagagatcaggagaacaaataccatgattagatttttaccaccatcctcaaggccccattcttttgctatgtgcaagatacctgccggatccggcttgggcagcaacccaggagtctctctggtgataataggcacgaagacatgctctgggaggtgattctgaagcaggtttgtgacgggcgccctgaaccataactgttagctccaggatccagccagaaccaatatacatccaatataggcagaaaagagaaagaacgacttactcaaaattcctcgtacacaaagccgttctct

SEQ ID NO: 6027 - DNA, 630 bp, Emericella nidulans
cgcatctctagactggcatttgcattgctcatggatattgtcattttttccccccctgcgcttatctcttaatgattatcggctggctgttcttcttggaggttaggtatagactgctattaggggatgttggtgtcgcctgcttttccttttatgacctcgtactttaatggtctattccctatctaatataccaattgatcgagtcttctttggttcatcaggttgcttggagatttctgatctctatcaactcccaacaaatttccgctaaaggaccctcattgccgcacagtagatacttgctacacatacttctcattcaattgctgtcgacgagacgataaatgttcatatgtctccccatgcttcccgactgaatcaaccttaacatttagtggttgattcaaatgaaaatcgaaaggaatacaaaaagggctttcagtctgtagttgagtatcaagttttacttcttcgcccttgcctgacttctcttcgatttctgaaggtagagacttttatacttcacataagatgacatattattcagatatgttctagaatgtagacaaatgagcaaattggtttaaactgcaattggaatgctttcaaactgatgcagaacacgaa

SEQ ID NO: 6028 - DNA, 621 bp, Emericella nidulans
acggaatgtcttagtagggacagttggagcagccgggacatatggtgggaccagaggtttggcccgtcgctcggaatttgaagtgcgatctgattctttgtcagaacctagccaatgttgtggtaaaggacacggtaacagacctggtagataaggaggaggaaatgagttaggaatagtccatcagatagaacatcgtcgcagttttggagaacgctctggagcgagggcagggcatggtcatagtaccgtagagcatccacgtattgagtatttccttgatggactaaactgagggccgacacggcatcatcacatggaggagctatcatcattttcattaggattatacgccccaagcaaaacactcggcaccacccactggagggaaattggaagcctcttgcccaaagatgttcgcttccaagtagccgtggcccccggggatcagttgcatccacacggcgttctggaaatgatcaagaagcgccattccgtaggtttcaagatcaacagactcggatatttggtcctccgagaaatcctgcagaggtgtatacatcattgtggtttgggcaggggtggaacctaaatcagactccggagattgtgtataactcc

SEQ ID NO: 6029 - DNA, 829 bp, Emericella nidulans
tccttcccgcacttaattctgataaaggtgctgatgactatagactggggcacagatattggtggatggagggctatttgtgaatcttcagtgatggcgcatgagacgtttgcatgcgctgaatggttttgaagctcgaattaagtgtacataaaatacaggaggttcggtagccaagcgtctatcttggtcaatcgcaaatatcaaacagagagtttatccaccaactccggactgagaactaaccgcgccaacgccttgctacacggtgaaatcgaagactaactaccctttcatagtagacaagaacgagtccaggttgtactcttcctggtactgtcggtcgtcccacagctcgccgagatcatcaagccaccccttcttgcccttctccttcaattcgccgtcaatgtcaaccatgtcgacttctttgccgcctatctctgttggtttctctgcgttttccgctgtctcgccaagattgaacaaatctagcagctgatctgtgtccatcgtgttcaggcccgcgttctgctggttgactaccgttgatgctacgtcgatcttgaatcgttgcagactaagaaagttagtatgcagcttacaagacagaagattaggattacttactttaagatcttctcttccagtgttcctcgtgtaatcaatcggtagacattcaccaccttcttctgtccgatacggtgtgctcggtccatggcctgaatatccttctgcgggttccaatcgtgctccacgaagatcacagtatctgcacctgtcaggttcagaccaagaccaccaacgctggtagtcagaagcaaaacaa

SEQ ID NO: 6030 - DNA, 661 bp, Emericella nidulans
tcgcttcccaaaaactgcgggcctgcctcgctcgccacggcccatgcggcgatctaattcgtcacggcgatcgaatctatctcggcgatccaaatcacggtccctatcgcgtctatcgatgtcccgaatatctcggtctctatctcgatccacgatgatgcgctctcggtcacgatcacggtcaagcggtcggtctctgtcgcggtcgcggtcgcggtctcgatcccggtcccatcttgggtcgcgtgacctactccggcggcggaaggattcgcgatcatccatatacggcatccgaccacgagttccccttccgcggatcggaccagggcgagaatgatggccaacgggcggaggaccatcaggaactgcagaggaccccgacatcatactgtctctggaaccacggcgcattcgcacgagatcaggctctcggcctgggggatctctcatatcacggaagtcgcgaggctgctgaggcgaacgcgaacgtcggccgaaggcaccgcggggctctctcacatcaaaatcatgggggcgacgattccattcgcgctcaatctcgcgacgatatggcggcgggccgtcgcggagatctcggaaatctcggtcgcgttctctctcacggtccaccacgaggatcgcctctagcgcacactgg

SEQ ID NO: 6031 - DNA, 516 bp, Emericella nidulans
cagaccgataatcaccgcactgggcgtgaacatgatacggattggtgtgtcgataacgcccagccagagcaaaaactcgttgagatagcctttggtgctgaggaaaattttcagcccgtagatacgaattaatgagttggtccagaacggaacaatcagcagaaacagcagcagcggacgcaccttgtgtggcaacttcgccagaaaccaggcaaacgggtagcccagcaccaggcaggcgagggtggcgatcagcgccatattcagcgagtgcaatagcacttcaaaatagagcggatcgagcagacgcgtgtagttatccagcgtaaagaccattttgacaaaactggcgtcgtcgcgggtcaaaaagctggtgccaatgatcatcaggttgggcagaaagacaaacaacacaagccaactgacaatagtgacaatcactacattctggaacttacttgtgttcttcatcagccagtacgacctccagctttctcccaattaatggcatttttt

SEQ ID NO: 6032 - DNA, 563 bp, Emericella nidulans
agctgctctccgagagcctgccgaggccaatcgcctttgaactcctgcgccagaatacaagggaaatcctgttggcagaccgggatttgcttgatggtctggagaagtcagggttccagctagactacggacccaataggcagggaatcatcggcctctatgtagagcgaggaggcggatactacattgactttggctgcagccagctaatcatcgacggcaagatacgactccagcagtgcgcaaagggcatctttggattcgatgagcaccatctgctgcttggagatgggagtcgtctagaagcagacattgtcgttcttgcgacgggataccatagctccctcgaggcagttcgcaaggtgctcggaccggaagttgcaagacggtgcaacaagcaggtgtgggggctggacgccgccggggagttcaacacggtaagtttctttacttttcgactggcacctgactgattttgcaagtctaggtctggcggcccagtggcaccctggcttgtggttcatgggggggaatctggctcagtcggagtctattccaggttt

SEQ ID NO: 6033 - DNA, 480 bp, Emericella nidulans
  unsure (1)..(480): unsure at all n locations
gacgcaatgacttgaactggtccgtaacgtccgggctctgagcgatcaacaaatagattggaggcacagaaaaaaacgatgtgatttccagctttttgttgtacccaaggaacttctgaaaatcgaactttggcatccagaaaactgtgcctccagcaacggcagggttcgcaaagtacccctggcacccagcaacatgggcagtcggaaggtgcgccagtgtgcggtacgggtgctcataggtagggtccgtcgctcgtctcttcgcaatatactcgaggtcatagtagagggggatcagagcctctgtgaccatgtttgtatgcgagatgttaacacccttcggcacaccagtcgtgccggaactgtacagcaaacaaataagcgagtcttccagtttcttagggtctgtgatgcgctccagtcaagcacctcggacggcttcaagccatctaaatagttttgtccngtggcagagtt

SEQ ID NO: 6034 - DNA, 481 bp, Emericella nidulans
ggcctgggagctgcgcaaatgagcccgccctggccagcgaatggcaggtcctgtttgacctggacgctccagtcccggagtatacgccctcttcctacctcgaccgctacacccgcgacctatatacgcttgtcagactgaagggactcattcttgctcgctgtactacttttctccgtccagaaactgtgcgtggtttgtcaggcatagacgacgcccgcgcggaggagatcgacaatgctttttggagactctggacattctgccgtatttttggatgtgggaaaggccgagagggagatgtcgttggacagatagattggttgaatggcggcgtcttggccacgagtcaacatgcctcgatcaccatgtcaataagtgagccgttcggtatgaacaacgtgctccttgagcctcccgaaggttcggccgcggcaacctaggtgggctctcacatagccagctttacgacatgatggag

SEQ ID NO: 6035 - DNA, 565 bp, Emericella nidulans
tcgttgcttttcctcttcttgctttttaaggagttcctcgcgctgtctttctaactcttgcttggccttttctgtttcctggcgctgcctgagtttctcctcgtaggctttctgcgcttcttcctgctgcctctggaattcctctgcatcaaatgtttggggagtttcgcgcccattaccacccgctcgttggtcgtgtcccttcggtttatgccagtagaccttgacgaatctgttgtcaaagatcaccttaggacttgaccaggctgctttggcggtggcatggtccgcgtaggttattagagctagttttctgtgcggctggagctggaggtctgtgatctcgccgtattgagaaaagaactccctgactgtgaattcatcaagcttgtcgtcgggaatctgctccacaacgatagtcttcatggaggggtcatcgctagggccggcagcagaaaattcggatcggcgaccacgattgttgaagccgcctctatcactgccacggccacgaccgcggcctctgtcactaccacgcattgaaccatcaagacggcgtctggaa

SEQ ID NO: 6036 - DNA, 944 bp, Emericella nidulans
tggggtaatgttcgcgagcctaaagagagtggttagctatattcggaagtataaacatgccacgaccatttaacaactagatgtcaacagaatacataccttctactgatgccgatcacagttttgctgcacaggacaaatgagagagtgctaatgtatgctcaatataacaaagatctaggtaatgaaagatttaatcgaatgccttggacgtgtacgacaaagaagacgagaaggagggggtgggattcaaagccccagcggacggggctcagcagatacaagtcggacggcgtcagggtcatatacttggagtcaagtcagacgcgaatcagaagtacattacgcgggacaaaactcagaataactgcccaccagcttactgtagatggtgattgatcctccgtgattgcaggcgaaatagatgaagtggacagcttgcctgacactccttaggagcaggtatggccggggtgattctgagcgagtaaccaacgccaaccaccagtcgagcttctaaatcatctctaaccaaacaacttacttgcgattcttcagccaatttctcctgcaacgcccgcattttcaagcatccaataacttccgggacctgcatctgacccctcgcgaccggccggggcctaacgaccccaccctgtttcgcaaagcacatccttcgcctggctacccagcaataccagctacttgattcttgagcttctctcaattcattggcagcgcaggaaatggacaatgtgccacagaagcgccctgagcagcctgacgccagcaatcacgcatcaccgtcgccctcatcccccctaactctgcctaaccgtccgcgtgtcgagaatccaaatcgccccgtcgtgaaaagtaatggtcggcgcaaactttcggcgtccgccgcggtgaatgcccactccgccttcacagaagacgac

SEQ ID NO: 6037 - DNA, 574 bp, Emericella nidulans
ccgggtaccgagactatccaccgtcattctctctctcactcttcaccgggaaatgggttttcgaggaaccctttgtctccttcttttgctactcctggttcactcggaagtaaccctaacatgatttcgagtccgtttcaagcaagttcgtctctttttgcttctgacggtgctgctgctggtgattccactggaaacggcgatttcctcgatgagcagcaactagggaactacttgtcgtttcttaacgaatcttcttcgaagaataacgacgaatctctggatccgtttgggttctcggctgataacggcgatgcccatttgcataagaggagtttctcagccagtgatgcttgttttgggtcagaggagcccggatttggtggcgggggttacaacaggttccttcacggtggtttaggtgatgattttgattctcctggtggttttggctcgccggattatgtttctagacagcaagaggagattgtgaggatgaagatggctcagagacagcgaatggctgctgctcagtacttggcggctactggttctccaatgtcgtatgagaaag

SEQ ID NO: 6038 - DNA, 613 bp, Emericella nidulans
gctcgttgttagcattgcccaagggcgatgattctgtgtgagaagaatcacaaagtcagagggaagaacgcactctgcgggcgtgggcaggaagtgaggcccaacgcgtccaagttcctctgggtagctgcagaaagcttgccaacggcttgaactccttgtcggcagaccagccggcaggaagagccggaagagttaactcgacaacttgtgcggaagacatcttgcaaggacgcgatgaattgtctcgcgcttttaatagggatggaaagcgaaggtgggatgatagaagacggtctcgaacaacatcgaaaatcaagagtgggcgaccatatttttttctgccccaacccgccgccttatcatctaccaatcagtaagtgcgtgtttcggaggtcatcgaggtgccggggccgtagacatagggacgaaacaactcctaaattctcccacgttcgcttcttctgttattgtattcttatcaatcatttgcgcctgcttatacctgtcagactaaaatggcttcacaacctgctgtatcagcactcagtgcttaccgccaagttctccgcgccacccgcattgccttccaaagtaagacccaggcacagtc

SEQ ID NO: 6039 - DNA, 760 bp, Emericella nidulans
gaacctttcaagctcactttgaagcgaccaatctttgactcaaaccaaagttcttcagcttggcatatcatccccgctggtcctagggtctgtcgattgaactgggtatgagtgcggacttgacgcatatagaaagctgccctccagtgtcactgaccttggctttctgaggaactgaactcagcatcctcggcttattgagagtaaacgttaaggtacaatacttggtctgtggcgtcatggtggataatgtgtttgggggtctcgctaacgatcctcccagactgagtccgtgcggctggcataagtaaccgagacaagtattgtgagtgacggagcgctcttggagcttgaagatcctggaccacgcctgcaaggtctaatgccttgtattgagcaagtccaccggtatccgtttttgagcttgccggctgcaccgtcctcgccgggatttatcagtgagcgtcgagcaactcgaagcattgagcactgcgggtgctagaaactggtcacttgaagttgaagcaaaggagcagcgcttcacggggccctagtgtatttgctttaagatctgtctgttccccgactcttctcacttcgctactggtcttcaaccagaatagccgtacttgcgctacaggactaatcagaagacgatggtgatgctgtccagtgattgcgcacagccattttctatttatgcgaactatatatatccaggatggctcaactgccctaacacacgctccgagccttggga

SEQ ID NO: 6040 - DNA, 757 bp, Emericella nidulans
  unsure (1)..(757): unsure at all n locations
atatcctcacattgtcgtcgcatctgcctccagaacttgcctccgcttgcatcgccaacctcaccgtacccttgacgagacctacgacgttcacgactcttctacgtttacgacccaacggcagcaacgccagcagcaggctgctcctaatcctgcttctaatccaactaattacccgcctcatcgaccatcaagcgctctcgataatcatccccgggccctacggagaacctcgcgatattcttcccgacgacccggttcggtagatgcatcaggacgcccttttcaaatagagcagacgatcccagtaatcgtccgaccggcctccgaacgctctcgtgaggcagcagcgccacgcttacctccatcggacataagaacagagggcgacgatagcgattccacgctcgacgataatcttcagcctggaaacagtgaatattggcctcgcaggtccacacgcgtctcccctcacacagcatctgcggtcctctggacgctagaggaggccattcgcaagccgtttccatttacactcgactgggacgaagtgaatgcttccatgtcggacctagcaggtggccccggtatgtccgggcttggaagtaatggccgggagtcaaatggagcttctagggctgcccaaggcccaattcccgtcaacccgcacccggctagcggcgtgcgtacgcgancggacataatgcggcaacgtcgggacagggaagctcgtaagaaagcggaacaagaagcaaag

SEQ ID NO: 6041 - DNA, 892 bp, Emericella nidulans
  unsure (1)..(892): unsure at all n locations
tttcaaagagttcgacgcaccattggccttgatcatcaacaacaatgtggccgggaatcgggagatatcggctggttgcccgggccagcaaggcgagcactagcgccggatccaagaaaacaccccaaggtggccatcaagtggccatccggagccgggtctagtgttgttccacttttcacgcagcagccaggagcgtgctagtgtctccacccgcctcttcccgcttacaagagcccttcctcgctattttttcttcctctccttcttcttctctctctccatccctttgacagtgtcctgttctttttgacacttcaaccatctcctctctttcttttctcaagaggtatcactcttagaaacagtcacaatggccagccaaagtgataagtccgttctcggcatgcccgtaagtcttttcgcacatcccctgcgcccggccagaacatcccggcaacgcgttcttgacggaatatcacttgatatttactcgatatgcatcgaaacgatatcgaaagtggtcattcaatactgaatgagttgtttttggatgcaactggtcgcgcccaagctctttcgtcgccgaattcatggctgataaaaaattttcactaggggttcgttgtcgacttcctgagtacgtcacccgcccgaatgtcatcaattgaccgaatcgcattgagaattcctcaatngattcgattcacggtctaaagttgaatgatggcctcttcgataaaatactaactaatttttagtgggtgggtgttacgctgccgactccagactgctgctgcccccatgagcgtgttaagctcctcattcagacccaggatgagatgctccgctccgtcgtctcgcccgaagtcaacggtctgatgactgcttt

SEQ ID NO: 6042 - DNA, 580 bp, Emericella nidulans
tgataaatgagccgaggaagatggtcttgcgtcgaccaagccagtttccaatccagattgtcggaatggagccagcgaaacatcccaaattgtaagcagcgacaacaatacctaaacaaattcagcaacccgtatagcactgggaccttcgtctcgcaataccttgacgcgtagactgcgtgctctttgcagcgctatccaagctctcatagtacgagccattggtagcaatggtagggaagtatttgatgaacgattgaagggtcaagagaccaccggtaacgccctggtcgtagccgaagagcagaaagtccataccagcgatgatactgatggcgagctggagcctttgcgcctggaggcccaagtacctgcgcgtcatgttgggcttgctcaccagcagcgagcctcagtcaatacgtgcagtatctccaagaacggacgttaagggtgagtacaagaacagaaatagtctgactacagttgggatgcagaggaagaagaagaggagaaataggaggatggaagtctggaaaaagaaagaagcagagatcacgctggtcgcacgaggggggagaga

SEQ ID NO: 6043 - DNA, 452 bp, Emericella nidulans
acgtactaagagatagagaattcaccgaggtagtggccaaccatctcgggcttgacctcaatctggttaaactccttaccggagtagataccaatgacggagccgatcatctcggggacaacgatcatgtcacggaggtgagtcttgacgaggtcgggcttctcgttaggcttggcctcctgcttggccttgcggacttcttaatcaagcccatgggcttgcgcttcagaccgcggttgaacctacggcgggcacgagcgtgcacgacatcgcgaacgtgttcagaggagaggtcgaggagctggtcgaggtcgattccgcgataggtaaacttgcggaactgtcttctcttcttgatctctgtcggagtaacctgtcagcgccctgattctgatatttctgcgttattcgtgtggatgtggtgtttgtgttggcgcggctgagggttggcg

SEQ ID NO: 6044 - DNA, 560 bp, Emericella nidulans
aaactcacggcttctctggtgctgatctcggattcgtcacccagcgagctgtcaagcttgctgatcaaggaatccatctctgctgaaattgagcgtcagaagcagcgtgaagcctggttgcaggatgttaagatggaggatgaggaggaaggcgaagaccccgtgccagaactcacgcgggctcatttcgaagaggctatgaagacagcccgacgatctgtcagcgatgtggagattcgccgatatgaagctttcgctcagagcctgaagaattccggcggcactctattcttccgcttcccctctgccaatgaggctgcggatagcggcaacacatttggtgaagccggtaatgacgacagcctctatgattaagttcctttcatttttttactcatcgctttatgtgtcgacactagctagatctagccgaggtgtgaatgaatgttcctggcgatagggaacgattctactcggtatactgaacgaagacattggttttgacttgtgatacgatacatattctaggtttttgtaaggttgtaagtccggcagacgag

SEQ ID NO: 6045 - DNA, 511 bp, Emericella nidulans
tccgctgcgctatgtgcttgtatgcttcgtgcgatgtttttgcggggtactcggggtcaatccccaatgctcgcaagacgggcggcgcatcaagggatccatggagctggtaccagacgcccggtgtggcggtcttgtataaggctgttgtgcgctgacgcatgggcgttgacatgaaccctccttcaaaatccctatcgaaaagagaacgcagttcacccgatcgcgcaacctcactcatatcctttcttgtaccgtcaacattcagtgtcgcagcgagaaccgtgcccagccagatagccgcgtgatcagtattcacattaactgtctgtgacgctgctggggtaccgtcgcgatcctggacaatctcatgcgcgacaacaccacacattgcatgaagagctgcagagacgagaggcgctttgatgggaccagggattacggggtgttctgagccgctgaaatggatggtctccagagggctctgtcggtagtgaagcctggtgtgctg

SEQ ID NO: 6046 - DNA, 495 bp, Emericella nidulans
  unsure (1)..(495): unsure at all n locations
cgacacgaacttgcaatgaagtcggagagcatagcgggcgaattcttgttccgcctgggtaaggctcaagaaggcgagtccatctgttctaacgtgctggcgcggcaacaaatgcagattggcgacgaccatctggatactattgagactcggcggcgcgtcgcattggcttacgcatacctcggtcagcgcacagaagcaattcaggcgataaccaagtacagcgagacttcaaacgtcttcttggggcgaatcacatcttatacttcgcaagtgtgctggacacagcagaacaagctttctaccagcgcatggctaacactgaggaccactttctccgacggtacaccggctccgacccacaaggagaagcgatcgaagccattgtacgggaattgagcagccggcttggtcggcatcacccccttactattcgcggcctgtggatcagcggcgtntgcaggcgcttgacgcaaatggcagctccacctcgtc

SEQ ID NO: 6047 - DNA, 671 bp, Emericella nidulans
tggaatgacagcaggagctgaacggagggacgaatgggatgacaaaaggggtttcccacttttcgttttctgctgtttcattagggactttttgtcggttaccgtttttaccgtttaatcgtttaccaagggtttaacaaaggttaagaaaggttaacaaaggtttaacagattcatgatctttttattgggcacagtaggccctgtcaatctcaaattaagcacaaagcgagcctgtatatagtaaagagttgagttaaacaggtatcttgaaaccagtagcctcgtgtgtcttgctttttcaggcatccggtgtggctgattatataatatatgctatagccaatcattgagcggcgtaaaatacctgctgcgggtacataccgggcgttggctctccgcacgagacttgcaggcagatctgcctccgcgccccaatattacgatacatcgcgttacaagtcttgatgaaagaatcgagagcttcattattgttcccacaggacacccaggctatttcttccctctccgtcgaagcggccaaaagagccaaagactgctgaaacgccactgagctggggggaaaggcaaggtcccatggaacccgtgaataacacaaccgcgacaggctgagagttgcttctccccctcccgcccagactcgatctcgt

SEQ ID NO: 6048 - DNA, 649 bp, Emericella nidulans
tgaacggcggatcagcatttttaacagtagcgtataatgctttccaaagcgatctggcaccgttacttgttcttctattcttgtttgcctattacttatgctttacatgtcataatggagttatttttcatgttgccctatgatttctcctataattatatcaatttttgtatcggttaagtgcctatccgtgggtatggtttacccgtacgaggagagaagatggttggagtgtaaggttcgcggatttgcaattgaaaacatcaaacatggcaacggcaacttccagtcctataggaagtttatggctattgtatactaccttgtcagccataccataatactcgtgacactggtcaggttttcaagcaacataccgaaagcccaggaggacgacctggatcgtgatgataacgtgaaacaccttggcgtaggtgtcaatgctaaaaaaaaagtctgttaggttacttgactaatctgctctccgtcagctgtagatatcgacggtgaaaactgccagcctttttaaaggccccctcgaatgattccgtccgtccggatccctggcctggcctagggagggttattcagcataaaggggcctatgcttgcacacagtaatcaacgccagctaaactcttgcttgtgg

SEQ ID NO: 6049 - DNA, 522 bp, Emericella nidulans
atcaggtaacagaaaccgaatgcggactcctccaatttgaatataatcgccactatgtagaggtcgtatttgactgggagatagccaatctgcaccaataaaggcaccgttccttccaagcacttccatttcaaacaaattcttgtcaaaattgtacgcaatcttgacgtgctttcgtgagataccccggtgtccggcaacgctaccatcgtttgttgcaggggggtgtatcggaatggtcggacatgcgtccggtgagggaaggagggccaaggcatcaacgggtttggcgtctccgttgccgttgctttcctgtaacgattgcatggcaagtgcattatagtcggtggtggcctgaagctgagcaggggttgcgtgtaaaagaccgccagcgtccccatcagaagcattagaggaacgtcgactgacatgcgactgcatatgcgaaggaacatcagggtcaaagcccatgattccacacgatcgctaactacactccctataatcccacttccttcgtgt

SEQ ID NO: 6050 - DNA, 574 bp, Emericella nidulans
  unsure (1)..(574): unsure at all n locations
gcgtggttccatccaccccctttattcaatcatagggccttttttagaagaataatccgacggccgatgattcgacgttgctcggtctcagtcttctcaccctcttcgccgaatctggtaaaggatgctggatccgcgatgagatcgactggtgccatcgatggctgaatcttcagcaccagaattgtcccgggtagacggtagaagcgatcgtcgagcccaaactgagaactgcaacgacgaaatggtattatttatataccttgtcgcaggaattgggatgcaggatctttgctgaggggcactctggcttctgcctcgtggcggatttacgcgcggcagatcacttgatgtcctccccgaagccgccgaggccgagacatccgtgcctgtctatcgaccagcgctggctcccggtcgggagtcgggtccaagcaaatcaagtcaccagcagatgaatgaggataagcacgtctcaacatgcataagcgagcagtgatagcatgatagcatggaattcggcatcaaggggccagggcctcgncaggacatcgccctcccaagtcgtgaagag

SEQ ID NO: 6051 - DNA, 765 bp, Emericella nidulans
taggtagggagctagtcgaggaggttccctttggaatcctctttggttattatctgattggtctttcggggtctatgtcctgctctttagcggtcatatactgtacatacctccatacgacatcaaagggggttcgtattgggatgtttacgagacgtgcttcttatatattcgttaaaccgctggctacggttgcattattgcgtataagacaatatacttgcatttgttttttggataactagcctgttgagaagtgtaacctgaagtgggtggctttggtttctcacactgaggattgatattttgtccctaatatatatcgcaatcactgctttgaaacctggcgcttgtacggagccaaagcatgcaaatttgctgattagatccgttgtgttgaataataatttattttgtacctaaaggcctcacgagtctggggttcccgtcaccgtatctatttgattgagaacaacactgacgtcaaaatccagattcttcatgctccccgcacttttgatacaaaaaatcaaacaaccttattgcgaacacgaagcctcagctgctcggaacaagaaccgaaatgaccatcacataactggataatttagcaacctacctactttttcttattaaaatataactctaaacggaactagcgctaccatactcatactatgacctccctaacgccaacaccaaccctcctcatcccgcacctcccaccaaaaaccctcgtcggcatcgacctaatcacatttacat

SEQ ID NO: 6052 - DNA, 557 bp, Emericella nidulans
accccgttcgaaaagaactctatccagagtcaagacccgattttccgtttggacctgccacgcctgtgtcgccaagtgttggcggtaaacttggagagaaactgcgagggctcaagctgcatacaagccagcgggaactctctgcagcagaaggtacttggcattcatgcgctcctgttgttttgtgacttggctgaccgatcaggatcccatctgctttctcctcagtcccctgacgttgctgtctcctcgtttaattcattccacagcattcagccatctacgacacggtccaatccaacctcaaatcccccttcaggatctgtgaagacggtagctcactaccccccggagtcgctccaggcgcagcagaatgtgggatttggcggtggctttgcatctatgggcgccattgccgagctgtcacgtccggctctgattctggcgaagatgttttcgcaaaagcattgagcccaaggtcccggacctcccacggagtccattctcgttcagcccgaaaccctgcatatgtgatacgaaccgttacgttcttatgt

SEQ ID NO: 6053 - DNA, 649 bp, Emericella nidulans
gcccaatgcacttggttatacgaccagtatcgctcatcaaggcccgaatcctttatagaagaaggatctaatggccaagaggaactctggaagacttcatccttcactgccgagggttgctcctcgagtcgtgttcggagcatgctctggatgtgtcggatgttaacctcaagtgtccgtttttttcgatcttccgcgaatgttttttcccgtatgtctgtgctcatggccggcgtgacgacgaccacttgagagaactggtcgtcaaacgcattttgaagtagcctggaggaatccgagtctggagggacgtcttgagctgcggttccaatgaatagaacccggtgcccgtcctttcgccggtcctggattacttgctgtagtaaattcagaaatctggagccctcacgcgaactctgtatctcagcgtagtcctgaacctggacgatgatatcacccctttgttcttgtttaggttcgacgaagtcactaggttcatcttgatcggtcgcggttggagtgagcgcctgtcctgaaggttcgccaggagagatgagtttatgcagaagctgaagccgcctctcctcgactcgatcgtaagacggttgagatgatgcggtgcctactgaaccatctgacgggccaattg

SEQ ID NO: 6054 - DNA, 665 bp, Emericella nidulans
  unsure (1)..(665): unsure at all n locations
tatcttttggacccattaggtgctaactcctgatagaaacaaaaggatactatccatgctgaaattagcaagacgagcatagccaacatacaaccgccgctggacgagacggccttcctgcaggaattagttgcgcaattcttagctcatgatggctatgtagagactgcccgagcgtttgcagaggaagttgccgctgaggcggcagcgctagagaatggccgtcaggcgcagcttaaaaagtacgaggtagaggaggacatcgaggcgatcaatcggcaaagtatgatgaccttgcagctctcgaatgatgcacgctttgctaaccatacaagaaattcgagccgctattctcgagggcgatatcgatagagccctcaaatacaccaacgcctactatgctaatgtgctgcaacagtatcctcacatacacttcaagctacggtgccgaaagttcctggaaatgatgcggcgatgtaccgagctgtcgtcgtctgcaaaaaaaggcaaaaccaccaatggtttttccgacagtgccgtattcgacgaagagatggagcttgatgagcagatgcaagaccgcgaccgatgggacgctgatggaatggatagggangagacagagactgccactaaaacgaacgagctttttactgaagccgtgc

SEQ ID NO: 6055 - DNA, 577 bp, Emericella nidulans
ttccagtcattaacgctgcatggttctaagatgagaagatggagcagtttcccctctctcaccccaacccgtgtccacttcaacgtgaatcatcagggacatcacgtgtcccaatcccggagttccaaagcccttggggaccctacagtcagggtcgtgcacgaggaggtgaacgtcaggtgagccaatcgactcgaaaggtcttgcctcattcgggacagacatccggtttcctctggctctaccgggattctaggggctttagcgaagtgagtcatggtgggccgttacgtttctgcggggagttcccagctaatcaacttgggacaggacagcctggaactttcgatggtgcctatccaagtgtgcggtgggcacagcagccaagacccaatgtccttatctcaggtaggggctcatgaggtctcccagacaggcagcctccggagagtttgggggtaggaatgggagcaaccagcttctttatttctctcttagaatttgggggcttgggggacaggcttgagaatcccaaaggagaggggcaaagcacactgcccccgcaagtctgccagag

SEQ ID NO: 6056 - DNA, 1357 bp, Emericella nidulans
ggttttgaactccaactgagaattcgcggccgcataatacgactcactatagggatcatctgccggcttcgatgctttgaccgtgccactgctctctggaacttgcggccgggacccagactcatcaggtatttcaactgttgaaccgggctcggaagaatcgcgctgccagataccaccacggaatcgctgcgccatggtatccaggaaaggaacatcatcccagaaaggcaggacaatgctctctgctaccatttctcggattttgctctcgatagtccgcaatatgataccgtaggttatttgtttcgagctgacaataggttcaatatccatgtccatattgggcattgactcaaaagagatccacgctcggttgctcggtggaggcttgagtcgtatcaacatatgaccctccagctttttaagcaccacggctagaacgatgtcaacctccctcgctttgaaccgctgtcccaagtcgatgcgtacagttgcggtaatctccacccggaagctgcccgtgtactgaacgtccgtttcaacacagcaattgccatcaacagtaagatcttttagtcttgggtttatgatgaagggggcaccatttcccatatcgatgcttcgaagccctatcttgctaatgaaattcggtttgttaacacgcgatatctttttgacaattttggtccggacaaactcctccacctcgggcgttcggtacaacgcaaggaacattcgacccagtacggcattgatccaccgtgtctgcagctgttcttctgaagaatgcaaacgctggactagtgtgactatatgcttaacgtcgatgtcttgatgcttgggcgggcctttgggaaaatgtaccatcttcgattggttctgaagcatggcaaaatagaaatcttccttgtcggacaagttctcagaaaagaagaagaatggaggagttggtcccccgagatcaccgagcgagtcgagtcgtcgtgaaagactgatagcattgcgtttcagccataattcgccctccggtatctccccttctccgccatatatgctcacatcgtgatgggcaagcgatatgacatatctgacctccacttggtccgcgtcgtcataaagcatcagatgaccatgtctggaatcctccatcgtcagccttcatacgacaaaagggcaccggcggcgggtacctaccgaagcacgatgtagaacatgttacgtgtccgtttgccgttccttgccatgttcttcgctggctcaatcgttggcgattgcttccggtcaaagagactcctatacatcgtttgatagacgcttggactttccgggccaactacctctgcgggatggtccg

SEQ ID NO: 6057 - DNA, 626 bp, Emericella nidulans
  unsure (1)..(626): unsure at all n locations
acccttacgaaagggaacccccacgggcacgacggacgaagcgggccgaccagacaaaggaaaagaagcgaataacacagcgcacggcccgaccacancaacacagtgagagaccatagaaaaccacagaaacaccgccacaagaacccgccgagagaacagacccagccggagacacagaacaacggcccacaggcgacgcccaagcacagagaaaagcgcaggccacacggacccagcgcgggacaaccaaacacggaagaggccctggcacacacaacaaagccgaaaccgagggcaagcgcacaacaggaaacgccccaacgagggaattgcccaccccacgaacccgcacaaaaaccccggttagccaaacacacactgaacgccccaaaatcaacgcggcgagaaagcacagaaccgggcccaaaggagcggacggagccgaacagccccacaatgctatgaacgcgagagagacccgacagagcaagaatgcaaaagagacgccaccagaagccagaataccgctagacaggcccccgggctggaaaagacggcaaacaaacacacccccaaatgcaaaggcatgtggcacaacacaccaaccgcgacaacaagcacac

SEQ ID NO: 6058 - DNA, 526 bp, Emericella nidulans
tgcttactctattttcagccagaagacagctattacccctcattagcctcgtgtgaagggcgtttgatcgcgttgatctgcatgcgttgttgatacgagaccgtctggccaacccgtacataaaacggccccttttgcctgagcgacgaacgataaagatagccccagcgccatcctccatcatccttgcgctgtcctttgaacggccaatagtccagtaagaccatgtcgaacataacagctcatcatttcctgcccccaataaccacactgcgccactgtgcacaggtgcatcactcattccagccatcggcgtaaaatacttacatcagcttgtatcaggagagcttgatcgaaatctggttagcgttctgtattcaaaatgactaagcaccgcggaaacggagaaacaagcgatccgggtcctcgccaaacccacaaaaaatcaccttaccgtctttttgcatctcatcccaatcaaagacacggccggagcgcacgtttttcgattcaccccagaaacaca

SEQ ID NO: 6059 - DNA, 121 bp, Emericella nidulans
gtgtctagccccgaattgcaggcctgtgaggtagttcccagtatgatagcgggccgttgggggcgaggttgatcaccgtataggaacgcggcgaattggagagtgtgtggttttagtttct

SEQ ID NO: 6060 - DNA, 496 bp, Emericella nidulans
atctccttggaggcctaacagccgggtatgaggactgacgacctcaatatcatcacgctgctgtcgaggctcgacaatagtgggcggtgtctgcgactgattcttcgtgagagacttgtccgagtttcttggagttgaccgaccaagatcgtcggtaaatgtaggtaagcggcgtaatatagccctaggaatagctagtttctcactcttcgcttcctcgtcttcaaattcgctatcgtcagatatcgcgaaggatgactggcgggagtgccctccgctgtccttcttcaatatgaaatctcccatttttgagacctcattgccgactttgccagcaatcttccctgggcctttaaatatcccgcgcagtttcgactcatggggaacggtgtctttccgctcatgagggtttgtccgccgactttctgcattatttgttgagcctttcgcagggaggggtggtagttcatcatcaacttgagcacactgtttgtga

SEQ ID NO: 6061 - DNA, 524 bp, Emericella nidulans
agtgcacagtgcttaggtatgccggcccgcctgctggaccataagcctagtgcattcatctaacgtcaaatactctctggcccgcactctggtgaacgagctcaccgtacccctggggccaagctgatgcggtggtctggctcgtgccaggagatctgcatagcggccttagatggagaccgctaacaacctagctggtgtaatgaccgagacccatatcgatgaacagcatacgggtcacactcttaactgcgaagggcacaggctcgatatgagacatgatctacatggatcgcaaaagcagacctctgctggggtgctacttgacaattgagccgtatgatttttcgcaagcctgactcgattgagacaggaatggtataatacatacttcggcgagagaaacaggcacggaatgtatagccacagggcaaaccggccatctggtcatgctatgagagataaaacatgcaggcactgatacgaggcgagggataccacttaaaggtaccatggggcactca

SEQ ID NO: 6062 - DNA, 830 bp, Emericella nidulans
tgaagggtgcacggcatagtgaaccccacagtgcgaagccgaggatcatctggttcatgttgttccagtgggttgcgccgacggcataggcaatcgtgctgccaatcgactcccaagatctgagaataccagttgttctggcaacatcgccgtcggcctgggcacccttgatctcagccatcagccagtagatgtatgtttggagcacctcgtagaagaaccggaagaacatatagactgtgaatgctgagttgaagaacgggccgtcacctaggtcgaaagcgggtggctcagccatgcgggagagtttcgtttgcatcactgcattccaagtccacgacgcggtcacgaagaccaggacgatgatgtagacggccttggatcgagtttcgcgcgagaagtacttaaggtccaggatggttcctgtggtcagatgggctgttgcaccaacaaccgccgttaggaaagatgccagggctcttgaacgaacggtgaaatacgctgattccatcagctctggtcaaaccattccatcgagatagaaaggcataagagaataagagggacgggaagaaagagagaaaaacgtggtatccttacaggttaggtagtttccttgatatgtcgctccaaactggcctgcaaggaatacggggatgagcaacagcatatatttattccgaagctgtttccaaatggcacgggcctcaatggccaggcttgtcttcttcatgtacggaatcttggtgccatcacttcggaaaacctcttgcggttgggaaaggagcagcgcaacggggcactagggacgagatagccacagcccaagg

SEQ ID NO: 6063 - DNA, 369 bp, Emericella nidulans
tccgagcgatcggcgcccaccataggagtgaagttcaggaccttgacggagaccgtgtcgaaggcgttagtgtagtccctctaatgagaacgcgagagttggaatgactgtggactaaatgagtgtgatcgagaggactttttggagtcgcgggcgagggtttgatgttcgttgaagagccaacgggagtccgttgcatggtgatctgatctgatcacacggaatggagttgagtagccctcgtcacttgaggcgcttgtctagtgatgagattgggatgtgtgttgggaaatcgacagctctcacattgataaggttgctacgggactgctgtccgtcgagatcgaagcctgggataagatcggcgtg

SEQ ID NO: 6064 - DNA, 400 bp, Emericella nidulans
  unsure (1)..(400): unsure at all n locations
ttgtgggaatacacagacgagggtttctcgtggtcttgcgatatctggtcttcaggcgacagcagtatacagatgcaagagggttatcacaattggatcgggccctacatgtgggcgggtctagatatagcgttgtagtctcatgagaatttcacggggttttaatgggtttggtctgtgggaggcgactgatgtgtgcggagtaaggcgttgaggaaaaggttgcggatcataaactgacgggcgtcggcaagatacagaatacgatcgaatggcaaaggagatatgaaatggaatcgaactacgtcgtagtcaggagncggtgagaaagttgcggggcaattgcaataccgatgagagacgcgtaagaatgaacatcgaccgagcgganttgcttgat

SEQ ID NO: 6065 - DNA, 646 bp, Emericella nidulans
agctggagtcaaagacaattaaaccagatcctatgttagccaatctgtagcgcactcgacggggtcctggagcatgtctcttaagcatgagtagccgtaggtaatcatcgacatcaaccaccaagacactacaccagcatctgacagaagaaacatagtactatcaaacatattatggtaaacttctctactacttacctacccgccttaatcatcctatggacttattttattatttggctaggctgtgtggtttaagagcccgcttacctaccgcaataagaaacccgtagtcattttgcgtgtggttgctctgcacacatatggttttggctgacgataggattgataggaatagcaaggcctgaatagatactatataccgttccaattcattgctgtattagatcgacggagagaccgtagtaatacaaatttcggctgccacaccaggtagtatacagacacccttaatataataataatattatatggatgtctgggtctgtaggatgactatgctactttccgcagtaaagaatgtccatcggccacttatggaccccgtcttacaaggaaaataaatgcttatctaggatttatttcggagacatactgactgattaatgatcacccctcatgtcgc

SEQ ID NO: 6066 - DNA, 256 bp, Emericella nidulans
gtcttgaagagactcccaagagagattagcgtgactacttggagagtggcaggtaaagaatggtaagggggtggtgagtgacgatgaagcttagcgttaatggttcggggattaggagatatcgggtggatgacttgtcagcgtgctggggtcgcccttcgggtacggattacgggagacggagtaatgcttggcggcattcaagagagagaagacgcttttgtgggatggatgaagtgtagctcgcgtttttgag

SEQ ID NO: 6067 - DNA, 482 bp, Emericella nidulans
gcctactcgcccataatgccatacgtaacgactggatcaacgacccaaaatgccatgatattctgcggcagaggctaccccctgcaatccaggctgagatacagaaatggcgccgagcatctggtctggagccgcccgaagctccgaaaaatccgccatcgcaggagaagaaagggaagcagagcaaacaccaggtcaagtcgcagcaacgcgaattggcgggaggattcgtcccggcaggaatccggtcaacctgacctgagcaatggcgatcccataatctacctgatgcgtatcctcgctgcgtactggaagaacaaattcaaaatcaccgcgccaggtttgcggaaacatggctaccggcccatgtcccagctgcagacgcagattgcctcttttcataaagacaagcatgatcctgagctgtacggggagaagatccccagcgtcgaagagttccgacaagctgccgagcgcatgga

SEQ ID NO: 6068 - DNA, 483 bp, Emericella nidulans
atacgtcaggccattgagaaccaccgacgattcaagtcagaagacttgaagctgcggtcaacccgctcccacattcacatccatattgacctggatcccgccagcaaagagaagctgtcaaagactgaaattgccgctaccagctcagaccccttcctccgcctcaaggctcttaaacgcctgcttccagacatccaagttctcggccacccgcaagctaaccgtgccatcattcgtaccgacgacaaatcggatactaacaccctcctcgtcgaaggttacggtctccgccagtgcatgaacacagtcggtatcgacggcctacgcaccagatccaacaacgtcatggaaactcgtgaggtactgggtattgaggcagcgcggtcaacaatcattcaggaaatcagcgaggtcatgaaggacatggacatcgatccgcgtcatatgcagctccttgccgacgtcatgacttacaagggtgaa

SEQ ID NO: 6069 - DNA, 170 bp, Emericella nidulans
ctacagttgagcagttgccttgcatgaaacgagtgcacgagaattgtggtaaatgttggtagatagtgcaaagctacggtgctgaagctcgcagagtagttgcagattgaaggcgattgcagtacgtcgagccacactggcgtaacgcgatgtgagttcgatactcaggt

SEQ ID NO: 6070 - DNA, 629 bp, Emericella nidulans
gaaagctaaaatgtccataattctgagattagctgttaacaagaaggcagaatactacttgctattcaagcaatttaataaggttaatataaggatgcccaagctgctgcagctgcatataatattaaatattcaatgttaaagcaccgcgtcaaagggcgtgcttcacgcgttgatttaaaaccaaatagccaaaaattcacctctacagaagaatctattctttaaaattggataatatctgcagagcaacgtgggcttccaattcaatatcatcatatacaagaaatggctcttattctacttcaaaattgtcttggaccaactgcctacattggaaaaaattaggctagttggtaggttagaaaacaaccagactttaaagccaaatatatccgaaaatatgactatgaacgcgcgaaatgtgaggatccaaagattcttaaggcttgatttgctttagtacaaaatacaattgcaaaatatggtaccttaaaggaagacatctataattttgatgaaactgggttcttaatgggaataatcgctacctgcaaggcgtgcctttggttgagacttctagattaagttactagcttcttaggcgattacatcttaggtagaaagcc

SEQ ID NO: 6071 - DNA, 601 bp, Emericella nidulans
gaatagtagattcgcattgaaccctgtatcagtcgcagcccactgatgtaggcccatttgttccaaaagacccgtcgataccggaaaaggtagaagttcgtaaaagtgcccacaaggaacgtcgtaaacggtcccgtactcagatttccgtagaaaaccgccgcagatgcaaagaagatggttgtattccagagatcgaagcgtgcgcgggggaatctacggtgcaggagccacatgagaatcggtgcgaccgctcctgcaaggaatccccagagtatagggcggaagaaatcggacgcaaagagcttcttgggtccaacgagcgcatactggataccagccgtgttgtacgattggaattcgtgccctgtccattgaacgagcggatcggttttctggccgctcacgtactcgaatttagtggcgagaacccagcgcgtcacgccgtagtttacgggcagtgcgagcatgttggcaatgatttggatcccaactacctgccgcggtgggaggtgtaggtagtggccaattttctggtcttcgagcactgtgcgagcgtcgtaccagacgttgcctgagatgatgcggtatgcgagctggc

SEQ ID NO: 6072 - DNA, 719 bp, Emericella nidulans
ttaaaaactcatctagctcaaatgcgacttcttcccagtcctcgtagctcgttgctcgcgatagttcatgacgtagtcgagttcgaggcgactttgatctccaccaggagagtagtcgctgtatagcgacagagagtcagtatgattcatggaacgtgcaggaagggttgggactacttctttccagaagagcgtcacgtccagcaccatgctgatgacagcgaagatcaaggcgtagacagccatgaggggctttttcatccagtacgaaacgagaggaccgaagtcatttactatatcaacttctgctaattcacatgcttgcgagtctgggtaaaatgggagaaagtcgcggaggtcaggagaacagaggtggagcggaattattgcatcacaagcaaattgcggagtttactcttaaatcgcgaccagcccagactcttggtatacttttgggacgctcaaaattgaacacccttagctctacattatgtcccagctatgaagaagccatatccatggacaaataaccgggaaaaaaaaaggcatatgaatttcatgtcttgaatttttggatttcgttccgctgttcgcgaaattaaaggaatctccatgacaccctaaccacccaccaagcggacattacatttattcctcgacaatgttaccttctcagacacgtacagaccgtcaaggaactagacttaggttagtacaga

SEQ ID NO: 6073 - DNA, 607 bp, Emericella nidulans
tgtctctctttgccagtttcgatatatgtgttgattggcttatttagacggcagtcagggttcaggctccccagcgctttctcttgaagggaggcttatttctttgttcagacttcggcttcttaaactgttgcccctgagccggcaaccggacaataataacattgggcccaccttccctttgggtgggcagctatcttgaagcgcttgtaaacacatgactgaaagtacaaggtgatagttttaaaagcgtaatctatacgtcccaaagatacccacgaggctgtagcatttttcttctctacaattcgactccttcatgcagtccattttaattgagaatgatgcaaggcgccagaatcccagactgggtcccgtcccctgacggctgagctccgaaaagcgtctagcgccaggtaccaagccaataacagggagatctactagtacggctgtacggtattattcttccatttctggtcttgactatgaattcattttctacctatttacatagtattacagtatcaagaatttgaccaggggggtatatcgctagtcaaaagatatggctcagtcaggagtgaaatataacagcttgttaaat

SEQ ID NO: 6074 - DNA, 681 bp, Emericella nidulans
acagccagcttactggacaaagcgtctccccgcaaaggatggatctgccaaccaacccgacagccactcttaagtctgccttcgtggtgacagacaagctcggccaaaacgtcaagaacttcctcgtcggcacagcggatcttaccccctccgtcaacgtggcctacaagaacaaagtcgacttccagtcccccgacctcaagaccgcgtgcggtatgagtggaaattatgcaggccggtatatccactacgggatccgcgagcacgccatgtgcgcgatctccaacggtctggcggcgttcaacaagggcaccttcatcccgatcacaagcacctacctcgttttccacctgtacgctgccgccgctgtacgcatggccgctctacaggggctgcaccagatccacatcgccactcacgacagcattggcgttggagagaatggaccaacgcatcagcccatcgccgtaccggcactctaccgtgcaatgccaaacatccttttcattcggccctgtgatgcagaggagacggttggggcgtacatcgcagcaatccagcacgacacaactccctccgttctggcactgtcgcgccagaaccttacgcagtaccctgctcactcctctcgagaaggcgtgcagaagggagcctacgtcttcgtcgaggaagagaactttg

SEQ ID NO: 6075 - DNA, 395 bp, Emericella nidulans
ttgatcttcaatattcgcgtccgcaattaacccttactaaagtgattaccggcatctctcaagtacttgatggtacaccgaaggacgacatgtgctaactccataactgcattaccacaaacacatcaaattgtgacggtgttttgcaggaaccttaggatacccccgaaatcttgactcataactcgggccgatgcgctggaagggcagactatcctaacatgctacagtgtacagctgtgattgactgacttacaaagagattggggtgaacgtcaacataaatgcctatgatactatcatgcacgacttaactgggcgagctttaatgaacatgtccctgcaatacttgttcaccctgcttggcgacataatgcttctcggaagttggggca

SEQ ID NO: 6076 - DNA, 334 bp, Emericella nidulans
accatcgcagttgagctggcgagcaagccgtcgctgctgttgttcttggacgagccaacctcaggcttagactcgcttgccgctttcaatagtatgttgccccatgccaaatgaagtcttcgactaacgagatagtcgttcgattcctccgccgtcttgcagacgccgggcaagcaattctttgcacaatccacgagccgtcagctgtattaggcgagatgttcgatgacctgatccttctccagagcaggcggtcgaacagtctacaacggtgaactgagaccaagattcgaccagattgattgaatactgtgagccacatggtgggaaaaag

SEQ ID NO: 6077 - DNA, 547 bp, Emericella nidulans
ggtgtctcccaatgacctgaactgaaaggacgcagaaaatctgctttctccctcatgttgtcgtctatcgccaacgtaaacttcgacggccttaatgtcattcatttaaagagcgctgtacagaatctaaccgaaagcgccgagcggcaaaatagtccgctgatgtatttctcttcgcagccgtctactgatcgaattttttctacgttgggttgaagcattcgagctcgtccatgtcggaacgcgaggaactacctgacagggcacatcgataatgtcctgatatcgccttttagtggcactcggcgtggcctcatgaaaggttttctgtgccacggactggactgctttcgcagtatatggataaagccaattcacggggaagacttttatgccgttcctgctgatatttcaggtacttgttccggcctgaaaggttcctaaatagtttgtacgggaaacccaatccccgaaggctggataagacactgagcaccactcaagacacttcattcccccgcttgtcgctcgcacaccttcaagagga

SEQ ID NO: 6078 - DNA, 459 bp, Emericella nidulans
ccgatattttgcacaagctctactacgagtatcttgtctcttcatcaagtgcagggcgcctcgagcctagtgctgtgaataatggcggaaagatgcaaactcgcattgcgcggttccggttacctgctatacccgtctcctctcgtagggaaggagaagaaccagagcccctagccccgttaaaagctatcctcgtctcaaccgcttgtcacgcgctctccccggaacttgcaaccctaaaccccttctatatcacacatccccaccgatatacatacgccgttactgaccggggcctgtcaacctttgtcgatgggatagtaaagttcgactcccttacaggcgaaacaaaactctggtctgagcatgccaatcagcgggggaagcgatctttgttgcggatccggatggcaaagaagaggacgatggagtcttgcttagtgttgtgttggatgggcg

SEQ ID NO: 6079 - DNA, 704 bp, Emericella nidulans
  unsure (1)..(704): unsure at all n locations
gattatctattggactttgctcgttcttggacaaatgtgttaagacacgctaataagacttgactcctgttacttcttgtcctcaggctcttaacgagccgcgaacaagcctggggacaactacctaactccacaaaaccgccgcgctggctgacacttgtgcctcagaatctgcttgaatcaattcttatcattcagctccgattaggaacctgacgctgaagggaagcgtcgaaagtatttgaaaatgtgcctacggccactgtccttcataagcttcctgagcctgtggcccaatatccctttttacggaaggcggtaagaagcagccgcgatactgccggcaccaaagcgcgtgctactctgtagttatcggagcgctgcgccttctctctagggttattgactctgcttttgcaaccggttaacaagtctattctcttttcctgtagtcacaattgtccttcaacgcgctcttgttccccgcttctcagcaatacccccacttagcctattttaccgcttccggcctagtcgggcccctgggcaaccnccngcccngcnccccggccccccnngcccctgccnccccccttctcnnncannnccccccccgggacagccnaggcctctttttaactcccaccnggacggctcttanaacagcttctctcttatgcaccttttctcccttttggacccct

SEQ ID NO: 6080 - DNA, 505 bp, Emericella nidulans
aagagccaatcagggagatgaacttggccttgtatcgttcagaaccagcgccacggccagtgccgccagcaagataggaataagggaaattcggctccgtcgatggcgtgcagctaaatatgacatcggacagtgccaattcagtacagagatgctcttcgtagtgatcatttccctccttcgacagagtcgtgaattccacatccggatacctgtttttcaaattagatataacacctcgttccagctcctccaacctctttcggccacgattgacgaatgtcatccttctgatatcgccaggacacagtaacaaggctaagcgcgcatgccactccgcctgccgtccagagccaaggatgacaattctctccctttgaatcccagcggccgccccagagctagtgaccctaacaaacagcgacataaccgttagcgccgtacggaacgccgtgatctcagctgcgctcagcaaacccagtagctcgcccttcggcgaaaagat

SEQ ID NO: 6081 - DNA, 468 bp, Emericella nidulans
ggcggatgacaagtctaaccctagcttgctagcgcaatgtgtcgagggagccaagatcattgagctgtgccaacaaggtgacaagctcctggaagaggaacttgccaaagtctacaagggcaaaaagatccagaagggtgcgtcttaagcctccattgcctggtcgacgacctgaaacgcccgccgaagaatgtactgacctgcctctgttggaaggtatcggtcaccccacgactgtttctcctaactcccatgtgacaccgtacacccccttggtttcggaaaccgcggaggcgagacaactctgaaggctggtgaaatcgcaaagatccagcttggtgcccagatcgatggattcggaaccatcgtttgcgacatggtcgttgttggcgcttccgaggttaccggccgcgacggaatgctgatccacgcgacctactacgccaatgaactgcttctgagactgat

SEQ ID NO: 6082 - DNA, 522 bp, Emericella nidulans
gcttatgagtcttgaacgtatccttttaccagcgtatgcttcttgtcttgattcacattatcaagaataacgtggcagtgggttgtgggcacgatccgtgcacggtgggaatattctccgattgagtaccctagagtagacccattgacgccttataaatcaggctttaatgacattcgcacgggccatagtgcccactgcctacgaatccagatcaataaatcgtcctctagtatgtcgttaacggcagaactgaataatttcctaatgttttatggtcgacattaacatgatcagcagtgagctccttagggaaatctggagttgacgcgaaagatttcgcggaactcattgcgtatgttgcaggagtaggaagtaggctgtgagccttcttaagactgtggatggactctttttttgaggtcgaagtgcttggaagcgttctggtgtcgggtctgtcaattgcgcatggcttgaaattggttgctcaaggaatgataagcttctataagcagatgtctg

SEQ ID NO: 6083 - DNA, 400 bp, Emericella nidulans
gtttcagcgacgcgacagcgaacagagagatcgggcgtgaaggggccgttgatgtgcggttctagggtagaaaggtcgatcgtgatgagctcatcgtattcggcgctggtgtctgctcggagcaggctcgaagaccctgcagaggcgatcttggccgctgcctcggcgacatctgcgcggttcgtcgccttcaggtacggcacatggttgggggagaaggggaaaagggaagttgtggcgccaacttccgcacccatgttacaaatcgtcgccataccggtggtgctgagtgtttcaactccggggccgtggtattcgatgacaaagccggttgccacgcgaacggtaagctttccagcgaggtgaaggatgatatccttgggcgcggccagccttggag

SEQ ID NO: 6084 - DNA, 777 bp, Emericella nidulans
cttttcagcccaaaacggagcgagcagggacgttccaataggaggctacagcggcattgacaacagtctgcaagactaccatctcagcttatgtgcggtgtcacatatatccagggttccgttcagctcgctgataccatatttattacaggtaggcacaaggggagcctgggcataacttttctggattagagttcgctaaaaaagctggagtggatgaaggacccgagtcatacaggatgaccttgagatatgcaacaatgttattacactactgggctattcggaatgaactctgtgattaagaccaggaggcaaacttcattcttgattatgcggtagattattaggtctgaaaagatagattcaatcacagcagacagccgagaatgataccccttcaacaaccacgagtgatgactgtccattttgaggtataaccttgacgatatctcctattcactgacccttcgctttccggatgacatcttcagccttggcctgaaagccgcagaagatgtcaattgcctgacgcgcaaatcagctttctgaccctgacgatatcgacgagttcttgaataagcccatctgtggtttataacgtacctcggccgttttcgcctttgctctcccctcatctgccttctgaaagtcagcccgatacttttcttcgtcattgatatacgaaatatgttcgatcttgtcgtcattctgagttccattctcaactattgacagtttaaaaacctggttcgcatcccgataggtcgactgtag

SEQ ID NO: 6085 - DNA, 505 bp, Emericella nidulans
gtccggggtggctggaaggtgagattgccgtaatagggggcgaatgtgcccacagctgcagtaatgagccacagagagaagaatgtaagctttatcaagtgcgccatcttcccagcccagccgtagcctgttcttacaccggatttatggcgttttgctggtcttgtacagtgtcacagagacaagcaaaacaaccaatgcgggcgtgaggggaaaccctgtctatcctgccagccgaggacggggttatgtagactaatgaacctcttgctcagtatatggtcgtcggctactccggactacgctaatctgaaaaacctaagaggcgcaccctcatggacgtatatttggcaggacgaccagcgacggatctacctgcgcttaccccagaaacaggaattacccctgattccgtgcagccgagcagcgtcgagtgtactgttactccgcagtaggcttcagaatcccagatatggttggtttacggcgggctcgggtttccgag

SEQ ID NO: 6086 - DNA, 518 bp, Emericella nidulans
atttgtgttctgccacttgtaactcttaggacggccaacgtactcaaaatggtaatagagctgcccttctgtcagtttttgatcgtcttaacgggggtaatacagcgcaccccaatcccaccaggtctcgcggcctcttcggcattcggtaaccgcataatatttccccagttatcgtccgtgaacacgagggttacgtcctccggcgggttcaatcccccggcgtagtaggttgcgacctccttgtatgtggtccagacctctaccatcctcagcatcatcaaggaagcaggttcgcagggtagaaagcaaacgcacgtttcacatctgagagattgccgtattcctccgtcagcatgtccctctgcgtttcaaaaacttcttctagcagcgcaatgggatcgggtgcactgatggcactgtcactagcaccacgcatccccagcgtaaagtaagtctcgttcttcgctgcacgtctcacgccttctcgcataaaccttgtcacctttgctttgttg

SEQ ID NO: 6087 - DNA, 493 bp, Emericella nidulans
ctgacaaatcacgtgtgtctggtggaggatctcgacttcggacgagctgagattcgtccgagcccatctcttgcgaggttgtaagaccatcccaaacaccatttgagagaaaaaaaaaaaaaaaaggaatccgggcgtagatgacatgcaacagagatatatcaagtaatctgagtagtaatggtatagcgcaaccaaaagcacactgggcagttgcctgtctgcgaagaagtgggcgttggtataagtcccctaaatacattctctttcttctggcgggcctcaaagagtcaagagatcaaagtaatagcttaaagtggttgctgagcaatgtgaaacggtcattctgtcggttatttgaccatctagcatttcgtccgagacgcctcggaccaaccactatctcagcagcgattcggacgaattcgattacgaaggagcactaacatcaagctgagtgtccgagagtatttgtcaggcttgggaatgagat

SEQ ID NO: 6088 - DNA, 714 bp, Emericella nidulans
  unsure (1)..(714): unsure at all n locations
gaaacgttccctcatactctcgcacggctctgtctcatggtcttgtagcctggagccaactacactgcatccggtgatcttgttgaagattctcagggaagagttttggaccagtaaagccgggttctgcattcaatgcgctcggattaacgtcgcttgctagttgatggacggaaaagctttccccacaccaccagctcctcggtctcggatccatttccacacggataaacccctgcgcattcatccatatgacgctcttccagtacatttcccgtacatattgccgtcttcccacttccgtctcagagctctctactcgtcccttccgctgtgttctcataccgcttatgtgagccatccaagtccccaacccatttccaagcccagaacgcaaatgaaacagaaaagcaacagcgagcgagtcagggttactagagcatgtgaccgatgcaagaggtaaactccaccgtagccctaactgcagcagtggaaatttccaacatgaccttaagtatagcatatcaggttgattgctctactgacaagatgattgcaggaggaaaatcaaatgtaacaacagccagccatgccagttttgcatccgcgcaaaggcccgctgcacctttgactctgcctacacccgaggtaggaagttctgtatccgtccgcataccatgagaacggatccccgtctcncagaggggatattat

SEQ ID NO: 6089 - DNA, 934 bp, Emericella nidulans
agctactgccgccagtgcagggctacccgcagcccccagatcgcagcacaaccctccagatttccgaagtctcggtgccctcggccgagaagccacctgggatgacttccctaacggccgttggggtgatgctcgctctccagcattcggtgaaattgacggctatggcccatctcttcacgtcgctccatccgttgctcatcgaatatggggctaccctgtttctaccgacgatatcagcaagcttttcaggcgccatgtatccggtgatcttcatatggtcccgtggtctgaaggtggcgctgaagaaaacaccagcggcctcaatgccgaaacagaaacaattcgtcctgaacttctcgctcttatcgacaagaagggctggtggacctcgcttcccagccggccgtcaacggcgtgcgcagcgacgaccccatcttcggctggggtcctcctggcgagggcttcgtcttccaaaaacccttcgttgagttcttctgcccagcctccgactttaaaaccaccctcaaacccctcctccagaaacacggacacgaaaagctcgcctggtttgcaaccaacgctgctggcgattttgagtcttctcttcccgccgaaacatcagacaccgagcccgttgagatgaacccgaacaatgtcaacgccgtcacgtggggtgttttccgcggcaaggaaatcgtcacacccaccattattgaggaagtcagttttccgcgcgtggggcgactgaggcctaccgtatctgggatgaattgcgccgtatttatcccatgagttcggcttcagagaagttcctcgagaagacaaagaatggatgttggctagtttgtgttgccgacaggattttggagctgcgccggaggtagggtcgagggagaggtattttaaaaaaagggatttgggggcttttggg

SEQ ID NO: 6090 - DNA, 488 bp, Emericella nidulans
gcttttccaggtcgcgaaaacccgcatattcacgcatatcacgttcctcgcgcacaattccttggttgcttctcaggttagcgagcatagtggctgaagagcgacaaagagaaaccccggttgtccaatccgtcagagtcgtcccgggaactagcggccagggactccatagtgtttgctaaagacatggttgcgttgcttttttatgtctcagcctagccatggcacttaagtgcactgcgaccttgcttccctcctgccaatagtcactcgaaacttcgggctctgacggatctaatgataaggcctcgggtgaactgagagtcctggcgaagcagaccatattcatgcgcattcgttacgttggggtattcccggaatgttcggaggccatcagttgaggctgcacagctcatcaatgttacacgtcaattgcaatcccgactgcacaccctctaggagatgatgtggaatgccgatacagtatg

SEQ ID NO: 6091 - DNA, 884 bp, Emericella nidulans
aattaaccctcactaaagggatcaagcacggcagactgctttaccgacctgaccgtgaccatgtggctgcttgggatgagtcgttgaatgtgtatccaaatggcactgctcgtcccaagcctgtattccgcactacttctcaggcccggattctggagagtgcgcgttggtggctcagtaagtccagcctcgttctctaaagctctttttatttttattttcttctaatttagctaattgctaactgctgattgctaaatgctgatggctgatgacttcaggtggcttcttcggcaacagtggcgccaacagctcctatgagcaatacgatcttgtagtcatccccgaggaatctggctctaacaatactcttgcttcgtatgactcgtgtcccggtgacatgacggaagggtgagaaagcgttgttccaagggatgagattaatgagattagacactgactggacgcgtcttagtgatgacgatgcatatgtattcatcccgcggtatacaaaaaacgctgttgcccgtctatcggcctaccttcccagcgacttcaacctgacagcatttgatatcctagctatgcagaatctgtgcgcttacgagtatactagcttcggcgcctcggcattctgcagtctcttcaccgaacaggaatggaaggactttgcctacaacgtagatatccagtactacggcgattacgcttacggctcccctactggccgtgctcagggcatcggctacgtcctcgagctagccgcgagactgcagaaccagcttattaccaccagcgacaccagcatcaacgccaccctcgatgacaataccgccacgttccccctagaccaaccgttctacatggacatgtcccacgacgac

SEQ ID NO: 6092 - DNA, 475 bp, Emericella nidulans
ttccttctttctttcttttttctaaaaaaaagacaatgcatatatgtatctgtaattttgaccccatatatccactaagtatattacccgtcaactaggttttgtcgtcttaacgcaaccatgaagcatggaagccagtcgttgcggccagatgggttttgtatagaagctgaggtaatggtaataatgtaattgagtgagagtaagtgactgaagcattacaagtaaatgagatttgcgagcctattataaccagaaacaatatttactttacactattcttatatatattactgattattccataagcacctcttgatgttgagtaatatcttcgatcttcgttcacttatgcttctcctttccgcttcatatctcctttgcataacctcttattcagcgtttttgaggcagcattacaatatttcagacatagctatctttcgacagcccttccctgaggtaagcctctgaa

SEQ ID NO: 6093 - DNA, 493 bp, Emericella nidulans
cgccccgctgctcagcaaccgttgccgcggacggccagcacttgacaaggatgtcctaggtcggtaatacaaagcctgcagatataaaggaggagacctcgcaattcgggatatcctgtctcgtttcctgtttccaattgtattctcagcttgagaacaagagccctgcaacttgatttgacatctatatcaatctaatttctcttatgtttgtaccattataataagtatacgtcgccaccctgccttccctaacccgttgcgccctttgcagtggatgctgcccttacggtgaacaatatacagagacaactcgcccatcacatcgcagtgtgcactatattttctgttgtcgtggacgaagtacggatcgatccacacgaagattaagtttctttcgccgcattatatattactgctgttgctgtagtgaacaccggaagaaacaactcctcagaacacttctcaaccaagtcacagttcacactgtcgg

SEQ ID NO: 6094 - DNA, 682 bp, Emericella nidulans
ctcagcttccgaaggtttgcccgtatgcaactcattcggtggttgcacagcagacgggcgctgtgcgtgatcagctgcgtctgttaaccaagatgctttgaggcgccatgctggaggactgcggatggggtgggaaccacccagtctgcagtcaagcagcgccggaaaaatggcccacgagcagttgatagagagagcagcgtgtttcatagtctcaatatcctcccaactttccttccgcttccttcgtcggtcccttcccgtgcccgcccggaatacagttttatcaaggctggaggtgctggctcgggcccttttcagccattcgcagccgcccaccaggccgataacggacgttccagatctgccccagaacgatctaaagcgacgggagatcagactgctgtcgatgcagaaccacttgaataagtgactcgtactgctaaatcaggaactcgtaccggcagatctgtattcctgcttctcaatcggcaatcacaaggaaaggcgtctctattggctttggggcacgaattgaatgcattaacctttgagccaggtattgtgccattgaataccatggttcaatatgcaatatagatgggacggcattgtggaagctgtttgatgctgagtctcgctggtttgcagttgaggatcgctggtggagagacaatgtgag

SEQ ID NO: 6095 - DNA, 762 bp, Emericella nidulans
gtgcgagttctaggagaatcgcactgaaggagacgcttacatcgagagagatcccagaaagacagttttagtaatgcgatacagggtatctaagggtgggatgcacgagtggacggcactttgcaggacgcgtatgtatgcaggtactgacaggaacgtgtgcgctgcttctatccggaaagcaagggatagtatcgcgaaagtcgacctggatttgcacctatcgacagggagaagggactctagctctcgtcgtcctgggcccctacagtgaactttttgcgcccagctccagtgagcttttggagcttgaccctgtccagctgctcccctaccttcttttcgattctttgaatctcctcttcggcatctatggccttcttgttcgcgaattccaataccaatcgcctgccgagaaggtgtgtgttcttcaaggcatccatggcattttccgcttctcgagcgcttacaaaatcagcgaaaccaaaaccccgagcagaccggtcgaacttcttgggcacccgcacagaccggagctggccataagccccgaaaagcgacctgacgtctttcttcgtggcctggaacggcaagttcttaatgatgatcttggtacgtcgtgcagcgatcttcttcgcagtgtcctcctttcttctttcctcggctgcatccatgcccttatgagatgccttactaccaatgtgtgcggtcaagcgtgtaccattcacacagcgagacagcctgggcctgggcttggttttg

SEQ ID NO: 6096 - DNA, 837 bp, Emericella nidulans
tttattatatattaatgaataaccacttaagatttataagtatattataaacttgtctactttcaatttttaatgcatttttacctaattcaaatgcaaaacctaatgttaatactagaaaaaatactaacattattactaaaccatatatcccatttgtatatgcacttaccacatacggatatactaataatatttctaaatcaaatagtagaaataataaggcaaatataaagaaagatatgctaaattgtgttctattttgtcctaaaaaggaatgaaaaccacattcaaatgcactatctttctcttgatatggatatgaggtggaaaatattaaattaacagctagcaagattattgctaatactggtattaaaaataaaaaaagttggtggtggcatgtaaatttttggttaattttttaattacccaccctatacccaaggataaattatcttacttcacatttaatttatttgtaaattaacaagattttgtttagctcctttataataaaagccttattaaggaataatccgtggttccaaatgcaatctaaaatggtttaaaccgtgcccttatgcggtttttggacttaattaggcccatataaccgtcctcctgtcctaaactgtgggtaccggcctttttgcgggtaccaaattaattttgaaggttaccaaagcggccgtccgttttaatttttttcggaaattattgtaaatgacctctttttccttaaaaattcttttgtggtagggataagctccctctacttttctttttcgtttctcctccgcgctttggatcactcatcttcatctcatttttctt

SEQ ID NO: 6097 - DNA, 528 bp, Emericella nidulans
acagtacgagaagcgaggtcactctatcggtatcttgctggaagggtgtccgaactcaccccgcgggatatagaccgcgttggaagagctgagatagtgccagtctttgcagaaaacaacaagggcagcacgatgcaccgcgtggcgccaagcctttgttacctaggagagggcgaagattacaaagatatatttgactttgtggactttggtcaagaagcaaacctcttcttgatggctgtcggatcgaaaagggagccgaccaaaatagagcttgcgcagatgatagtcagagaaccagctcgaatatcttcaacctttcaaagcggagaaaagtacctcaagctcttacggacgcttgctgaggacatgtctcttctaaggaaaaacaaagaattatggcaagaaatgaaaaggtcagctttcctactagcgagcaaagacatcacttcaaccgcacaggttggagacggagccaagaaaattgtcgataattctgatgacgaagacgaggctgaagacggtggt

SEQ ID NO: 6098 - DNA, 799 bp, Emericella nidulans
tcttctcaggatcttggtccacttctcagccacctcccatggacgcgccacgttactgatatcagcacatttgatcaacaatccacaaaccaaagtcttgtacatatcgatatcttgaggcttccagccatctgttgtccggttattttccgagtatttttcctgcaaagcccccagtcgttccatgaacttctggtgaacacccatgtctgtggccaagatagaactgataagcagcttgcgcagtgccttgtctttgaatgctgcgggccagtagcggcgcaggatctgcgagaaggcagcacagtggaaggcttccagcaccgagttgtcattgtagagctgagccagaggcgcgttgagcttgaccaagaagaaattgttcacaccaggatggccgacgtcgtggccgatcgctgctatcagtaatgtcaaagcatcaaacggcttgagcatagacgcgatcgggcagtttttatcagcgttggcgccaatcgatccatagctgggcagagcgccgatatgtagcaaaaagcagaagacggattgtaggacatctatcgcgtgtcggaaattgtggtagaggacaaatgagttataggacgcgcgacaagccagcaaaaatgtctggagctcgccgggcgttaacttccactcctccagctcgggtatcgtgaatgcatgctgaagcatcgcatgggcggcaaaaaccagttcatcgtcggtaaactcgtgcgcctcgaaatccactcgcctagtcgttccttgacgtagctctcgcgttcttcgctaacatagt

SEQ ID NO: 6099 - DNA, 766 bp, Emericella nidulans
acctcctgcaagcattgcgagaggcgcttttccgcaataatacccgtccgaaatccgaatcgagcgtcaatcgcgtcgaggcgctgacgtcgacttcaccacccgctccgctaatctcaggagcgcaaccatttattaatacgaagcaaacgactaccgcctctggcggcaatacaataacgccatctgataatgcgacagaagaacttcctcgcttgtcgccggatcagcagcgacgtccctctcccgccgacgtcgcctcaataaggcgaaaatgtgcactcggcattttaagtctgatccctcgcccaatcgcacgccgtttgtttggtgttccgaccgagcctagctctggggttatatctacgcaagttgaatctccggccctatctccgagccagtttcaggccgccgggcctggcgttagaagtgattctccttcgtcgccgtcgccagaggtgttgggcagtgacattagaagtgacgcggaagagtcgcttctcgcttcagctatcgagtccaacatccttgatctctttgcagatgagtattgcaataagcacctcgtctactcaatcattgagactgtgctagctaagctcatgcctgagttatcggatcgtagcattgctgagcttatggacgacagagcagtgttcacatctgctgtttgagcttctcactaacgtgcttcatacactttcaaagctttgtatatagttagtaacgctatcgtcttatgatccataatgataatgattgaatt

SEQ ID NO: 6100 - DNA, 512 bp, Emericella nidulans
tcttgttcgaatggtctaatcaacaactggagtgtcaatcatcagcccaagcagagaatgcgcgacctccgccgcagctagcgtggtcgtttccgccatggtgtcatagattggcgctacctcgaccacgtctccgccaacgaccggcagccgcgcagagcgtcgaggatagagaggagctcgcgggtcgtgaatccgccgggctctgcggttccggtcgctaccgctagaatcagcggacaatggttctccaccaaggggtgaaataggtacctggtgcaaaagcaggatccaaaacatcaatgtccaccgagatgtagaccttgctgttaccaacgcgggtcttgatctcctccactacaccggctacaccgagacgatctagatcccgggctttgataatcgagaagccgcagcggatatcgtttctgatgtcgcctttaggacggatgacggggccgcgaattccgacgtgaatggagttgtcgcggatgagtcctattcttgtgagt

SEQ ID NO: 6101 - DNA, 663 bp, Emericella nidulans
cgaacacaaggatgtcgtctcctcccaacatccccaaacgtcgcacccgctctcagcggcggcgcaccgactctgacattgacagttacccagctcaagaggactacgactgggaccgcgaagatactcacttcctccctgcgcccttgtacctctgcaacggcagccgcactcccagtaccgatacggagtcggatctcgacgacgacgcgacgtcaccaggaagtaaagaaaaccccttcctcgatttcgagctcctagaccgcattccacatccacctgccatgctcacgcagttgcaggaggttgtggacgggctcaaggccgaccccattgaaccgatcctggagcagctgaaccgaaatatggaagtggccaggatgattgggactctgttagatgtcgaggccgcgttgttgagaggggacgcagatacagctgagagaaagacaaactcggtgtggcctattgcgacgggtctggatgatgcggaataccttgagcggtgtaatgttcttcaggggcttgtggtaaagcttagagctttgcaggaggaggggggttgggtggatgaggcagaaggaaattggaaagagattgaacgtgtggctgagcaggaacctgaacaggaacaaaggcatctttcggctcaaataccgcgtc

SEQ ID NO: 6102 - DNA, 718 bp, Emericella nidulans
tcaccagcagtctggttgtgctgcgcctcgagtggtccggtcctggacgtcaaattttcgaagctcagtttatccctcagtaagattgggatagattctttatcgtcgttgtcggaaaatccatactcctgttcatcacatgaggagctgctagggctcgattcacggatacgcatgatctcatttaaaagagttctgtgggacgtatggacgtcctgttgagctatctcagcttgcggttcgggatcaaagtttgtcacgggggagtcctcagaacacgaagtcgcagaagatggtggaggcaaaacagagggttttgagtcttcttcctccatctggggcaggtttgattgccctaacgttggagagtccatcatcagtgcaggtggaccatgatccggagcatcggtgtcgatatgaagttctgggaatgcctctacatctccaatatcaggcggttcctctccacaaggttccacagagtcttctataactgtggctgtatcgtctggttgaacagcaggcactgttgccgcttccttattttcaatcggtttggtatcagaggacagattatccttatgttttgagatactctcaatctctgaagctcgacgacgaagctcagctgcttcctcttttctcctttcattctctttgactgtacggttgaaagcctgctggatcttttggcgtcgagtggcaaaaataacgtttt

SEQ ID NO: 6103 - DNA, 535 bp, Emericella nidulans
  unsure (1)..(535): unsure at all n locations
tggaaggggaacggcgtcagttgaactgggcgttggaggcttttgacgacggtaacgcgacatgctcttttttatactggcaggctgggcacttgcaatctcggtatgttcttgcgacgcagtccngggcgtgctctggcgggtaggcactggcgggatagcggtgttcaacggagccattacctgcgcattggtcgacgctgctttcctcacggagcggtatcgtgagaacttggcaggagttgggccctgtgccccaactcctgctaactcctgagcgtcagtagtcattatgtttgtgttgtccaatatcttcgtggcgagttggcgctgagagccgtatagagagtaatacgagaaactagcggtttgcgtgatagtcgcatgcggcttcggccctccgtttgcggtctgtagatgtagtcgactcagcgcactgcacagacgagcgattgacccagggcaaacaaatcacggttgcagaaccttctgttcaagcggtgggaagggggaataggttgagttgaattgaaga

SEQ ID NO: 6104 - DNA, 553 bp, Emericella nidulans
ccgggcgccagaacggacgaggaacgggacaaaccagactcctttctaaaacaaaagaccagcgggcacgcggggaacatacaccgacccacgcccacggcaagcaccccgagagacaccgcgggagccgagaccagccggcgacgagggagcccggccggccaagccgacgaaccaggccccaccagaacgacagccaccacagccaacgccgcaccgcgccccacgaccagagagcccgccgagccagcccaccgacgacccgccgaccaccacccaaagaaagagcagggcacgccgcaaacgccggaccaaggcaccaggcacccgcccccgcgacacaaaaccccaacacaacgcgcgacacacccaagccaccgacacgccagccccaccgacgcaccgcccaaggaccgaaacccacacgcgcagaccaacacagaaccaaccgacgcaccccagacgaaaccaccaaccaacaacacgccagcgagacagacccccacaccaagccgagccacacaacaacccgaccagcaccaccaccccacac

SEQ ID NO: 6105 - DNA, 508 bp, Emericella nidulans
catcaccaaagcacctcttacggctggaggagctgtatcgcgccttatgttaaactcatcccactttattgagacttgaggcaaactaactcacctgtttcggctgcgtatactggtacagtagcggactttgggcctatcccaaacccaagggcgaagcgcgcaataaataaagaccaccaggtactgcaacatccttgccagagacatgtcgtggccgagaagatgcaagttataaaaatggttcctcgtcggccaaaccaagaattgaatgggaccgtcagccagcaaccaacgatagcgcaacatagataaggagcggcattgaccaatcctgaaatccaattgtgtctggagatgttctcgtctgctatgccaaattgatgcttgtagaagatctgcgcaccgtttaccacggtttcatctgacacattagatcttgcaggcgggatatacgagacaaacttacccattccctgcacagcagctgatacagagcacagtatga

SEQ ID NO: 6106 - DNA, 589 bp, Emericella nidulans
  unsure (1)..(589): unsure at all n locations
agaattatagactcggtggctccctaatatgcgcataggtacattctgagcattccattctctgagagggggatcggttggtggtatagctctcacacccgcttcgaagaatcactgctaactacgagacaggtcaccagatctgacttgaacgacaatttgggctgtatttctggtcctgacatcttgacctagtgggtaaaagggcagagcactaacattctacaaggcatgtgcgtaaaaagtccgcaattgcatttttttttcagcccttcctatgtactttctgcaacttctatccctcttacaactcatctaaagagataaacggtacctctggacatttacgaagtgtctaatgaggcatctatatgaaagtttgaagaaagatgaagtcagccaacatagctcttaaactatatgagagtttctaagtatggaggcacgggtttctttaatggctgctcttggagtgcacgtgttagcttggcttgtttcaattgtgcgttggggcaggttttgaacctcagtaaaccgcctttgattgacagtttataatgttggccngatccaactcactaaaatactg

SEQ ID NO: 6107 - DNA, 530 bp, Emericella nidulans
gttcaaccacaagttggacatctgtaaaacatacaatcatgcgccacaaggcctgcccccgctcaagttcacctagtttgttctcatccatcaggaaattagtccgcgaaacctcattctggacagaactggccttgtatggctcgtggactgggcagatgcgggctcttatccccctgctttcgaacggcagctctatggtctcaatcgcaatttgtcgactttgatgacatggtgctattattgctcccgcgataccctttctaagaaccgtaattagatcttattggatatggtctctcgatagccgcactggcttaaattgtgcaggtatcccctcaataggagctcccgccgagccgagtcattgtgaagtctggcagtaggtcttgctggttgacagcgacagcgacgagcggccctcgaagcggttgtggggaatagtttttggaatggacctcatcatgttccttcgtctgctcgtgggtaagttgcaacaaatagaagaattatcaagagagcatatcatt

SEQ ID NO: 6108 - DNA, 481 bp, Emericella nidulans
taatcatcatcctcgggtaactaagtcgatgtcttgtggtttcgcatcaacgcttcgtgtaagcatgccaccagctatgactccggaacatcattgagcagtttcgcggccttgtacacttaatgcccacgacaacacgtcatccacacgcgcccaaatttgagtacatattggagacctaaagagtcttgtagtcatcattactgttgttgcgaaaacgttccgtaatcacgctgttcaaggctcgaacgtgcctccagcacttctgccaatgccagcgcatctcgctttcctcgatcggcgtccacgaggagcattaacggcaaaggtagaagaataagtatcgcgagaaagaagaacgcaggacgaatctccccataatgatctgtgataaatccaacaattgccggtccaaatacactcgagcctttgtccgttatagcgtaaagagaatagaaagacgcttcatatccaggaggga

SEQ ID NO: 6109 - DNA, 548 bp, Emericella nidulans
aatgtcctatcgcttcatgtaccttgaagaccgcaccgtatgcaccgttgcgacgtctatgtatagtcatcctcccgtgtcatgcgtctgaaacctggggttttctcccaaaagactgaaccaagtccatgaattcgaagccaatgtcgtatcggtccagaaggatctgcatagctgactgagtgatgagaagaggcgtgattgaatttttgcaacatatcgagctgtaatttcaggcgattagcatgtcagcgtggtcagaaaaatatccagcacggtcctaagcgagtcatacatgatccgcggcctgatgttcaggccttgatttgatatactccctgagctgctcctcattcctgattatgtacggctccgcagggccctttgtatatgctgaaaagcggttgatgagatttcttgttctagttttcttatataggacacgaaagactccctgtctaaatcaattagagaaacttgaaaattttccggccccttagagaagatagagcgtcctccatttgaagtgggtaccttcaaggacacta

SEQ ID NO: 6110 - DNA, 504 bp, Emericella nidulans
ctacaaactcgagatcattctaccctctgttacatttccaatcgacccgttctgttcgtcgtactggtacaagcctcccaaggcttcagaacccgggctgaccaacgtcaacggtttgggaccacgtccaatctggaatcatcacacggtgaacccggtaacacgggacccggcatccatggccgtgcgagtgggaagaaggtgcctatcaaccctaaacgggcttttccgccagaccaactcggagaattcaaggctgttgttgaaggaagtgatctgacgaagactggcttgatcgaagtcctgaagaaacggtaagagcgaggtttgaccctaagcgaacgtaatcagctgacctgcttccctagattcccgaaggtgtccaaaaacgtcctcaaggacactttagactctgtcgcaacgcgggttggacaaaaggaagccgacaagaaatgggtctgcaagtagaatctgattcgtctgttcaataaaaacaatcacgat

SEQ ID NO: 6111 - DNA, 740 bp, Emericella nidulans
  unsure (1)..(740): unsure at all n locations
gtactgctgtggtgaagataacctaggcagcattgtttggacttgcgcttgtttttggaagtaatgttagagtcgagccttctttactgcgagtgagatcggtgtcgatcgcgagagaagggcatcccatgtcgtctgccaattcagaaagaaccgaagtcgtaattagagcgcagggctctatctcgctaatgagctgcttcaacctatttttagggtggctgggatcgagtggaacgaatgcagccccggatttcagcactgcaaggacgacgactgggtaccaaaatgatttgttcattaagatagcgacccgctgctcagggcgcgctccgaaagtctttagttgttcagccaacaccgaagagagtttcgacagccctgcatataaaagcgctccatcataagcgcagataccctactggccgggtcgcgcgatggcctgtccctagatcaaatcatgaatgcatcgattaactttagggcaatcggctcgttcctgcatagtccaccatggcccgcattgtcatcttcaacnttcgtttcaagtgggatagccgncgcaacctgtttcaaagcctgttccatatattgttcgagttcctcggctacctctccaccctagcggtaaaaagcgaatcgcgcctgcatggaagcaattgccctcgatggcattgataaactctggacaatggctttcattgacccatcgattatcccgtattaataaccggttgaaa

SEQ ID NO: 6112 - DNA, 533 bp, Emericella nidulans
ataaattaatactaatataatttagctaagagtaaccagccaagtaatactaatactattattatataaaaatcttaattatttattatcaattattaaagctttaataatagtaagatcctataaatagccaaactaggtatattgcttagctatattttagataatattatatttatatcttaagctttgaaggctttattatttacttgaatatctagttatatattaattattttcaaacccagaaaaaaaaatctttctatttaagaaataatctttgttaaattttatttatatagaatttatttttaatctagcttatttgatagaaactacaagcttatctagatttctagattaaattagtaaaaactaattacttattaagctactagaaaggacttgatcttaatcttaattaattttatttattactttatagaaaaagataaaattattattaatagttctaaaactctttgatctaaagctcctctaattttttagctataagattaaatagcaatatt

SEQ ID NO: 6113 - DNA, 876 bp, Emericella nidulans
tgttctcttttgcgacagcgcttcgaatgaactacaatctattttcatcaatcgtttcttcgctggcttctttggcgcttccccgttcactcttgctggcgctgtctgcagcgacatgctgagcgcgcaagcttcacaactagcatggttggttttggtatcactgtcttctctggacctctcctggctccaacaattggcggctttatagtcatggaggagcaccttggttggcgttggacacactatctcgccggtattcttggggtagcttcgttcattttggttctcttttttctaaccgaatcctatgcccccgtcatattagtctcgaaagcaaggtgtctccgccaggaaagtaggaactggtccatccacgcagcacatgaagaaattgaattaaatttccactcaatctttcaggattacttcgccataccgctcaagctgctcgcgctcgaccctatcatcctgtgcatatgtgtctttggtgccttcgtgtacggtctgctctacctctcaatcacgacatatccaattatcttccaacagatccacggcatgaatcccggcgttggcggtctcccgttcgtagcagtcattgtgggccaagtgttcgccgggatcgtgatgtacggcagacaacgttcgcttagccgcttgattcaagaaaacaacggcgagctcgttcctgaatggctacttctgacggccatacctggttctgcggcgttctcgactggtctcttctggctcggctggacggggtaccgaagtgatgttcattggatctggcctactttgtcaggaataccacagggttcggtctcatcactatgttcccccgtctgtgcagtatgttgtcatgtcaggagg

SEQ ID NO: 6114 - DNA, 665 bp, Emericella nidulans
aaaacatgtgaagctgcaacgcgtgggagagagtctgagaatcgctcaaatcgactcctaaatagttaagctatgtaaggatgtctaagtgtgaacggcattgcgccaactcaccgagcttctggccacgctgggagaccggagaaggggaagccgccggaatatgtgaggtgagggacgacatagaactttgggtctgaagctgcgacgcggccatgggacggtgctgttcttcaagctgaccgcgacgctcgcgcttctcgcgttcaatgcgtccgcgttcctggagaggaagcatctccttatactcaaccctcagcttgcggccctgcaattcaaagtggctgagaacctcgatcacggtcgcagtttcctccgccgatgtgaaatttgcaaacgcaagtccgcggaaaacaccattgacgaaatggtagttgaatgcatacggcaggtggagggttaactcggtcatcagctgaacaagctgctccttcttcacagcaaaggggatgctcttgatcacgaccgcggtgggaatcagctcgtcatcagcctctgagggacctgcgtctcgcatgagccttggagggagctgacccgagttggagaaaggctgggaatcctggccgctgatctaccatgtatgacgggagtagggggctaga

SEQ ID NO: 6115 - DNA, 978 bp, Emericella nidulans
attgatagactcgtcagataaggcactaagaatagaggtctgtggcactgttaggcgctttattttgttgggtctacgcttcttcttggctgcactcaaagcagcactgtgagcgcccatcgccaatcatttgctgcgggcgcttagttacagcctcgttctaaagagcaccgcatgcaatgatttgacgagaagcacgctctctctcacaggcagggctgaatggccagaaaatggttgttgggctccttgcaacagaggtcagattatacgggttctagcccaattttatgctctttcaatggcaatccaaccatattataagcccccacccccaaaaaccgagtctggtcaaatatcatcgtggaacgaataagtggatgattagatatactctacctcggctagatcgagtacgtgaatgtagtaagctcaccccgttttcgtgggtgtacatggccatgaaagccgttctgagtctcgcatgaaatagggcagtatattagcatagctaggcgcatacttcggccaatacaccatctggagagtcataatcctgttcaggaatactagacaaagatttgttggtcattccatcccttcgcgccaaagacgactaaaggcccgtcacctctaggtagtgcagccttgcatatctctggctcatggaacctcttttgaataactcacttgactgtccactcacaatgatcaaaacgtctaccattgctctacctcgacacaattcgtgctgggttctgcccaagccggctgcggtacgtaaattctcgcctactctgttattgttctaacgctaaaagtcagactctcccagaaatgttagtatctctagttactctgcatcctccactacacagcatccatctggtacgaagattatataattaaggctatggtagggcatggaacaacacgtgactgtgaggcagaagtgcccgggtctcttacgctgatgga

SEQ ID NO: 6116 - DNA, 795 bp, Emericella nidulans
ttgctggaatatttccggagagtggcttgcgcacggttacgcgaaagatactttcagagtctcttgcgtcaggacgcaggtttcttcgatactttggcgcctggagaggcttcgtcacgtattactggggatatcagtacgatccagcaggggacaagcgagaaggtgggaattgtacttaacagcattgcgttctttgtgacgagttatgtggtcgcgtttatcaaggatgctcggttggccggaatgcttgtctccctcgcgcctgcgtacctgatcatgtcgttggccggagggtattttgtgcggaagtactttgggcgggctctagagtgcatggcggctgcgtcggccgttgctctggaggcgttcagcaatacgatgctcgtgcatgcgttttcggcgggtgggaggcttgaagagcgcttcattgagcacctggggcctgcccgggtcgcgggtattcgcaagtcaatcgcgacagtacgcaggccggcttgctgtacttcattgcgttctcggcaaatgcgctggctttctggcaggggtcgatgaagattgcgggcgcggttgagggacgtgcggatggggtcactgtggggaatacgtatactgtgatcctggtgttggttgatgcgagtttgatactgagccaggttgcgccgttcctgcagagctttgatgcggcacgcgtggcgtttaaaaagttggagaaggatatcgagaggccgagtccgattgatggaaccgctgattctggccttgttccggcagcagcaaagatagagtcggata

SEQ ID NO: 6117 - DNA, 565 bp, Emericella nidulans
aaatgaaagtccgtgacatccttaacaagtcactagaatccatcgttcacaaccggaaaaaggaccaggaaactacgaccggtaaatggttctcagccctggtcagcgagaacccctggtacaaagacgttgtccctgatgtacgcttatacctcatatgcacacatatggcttactaacaattcagttcaaaaaccttccaaaagaccaattggcgcccggtgttgacaacgcgcaggtcttcacctcagtctgcatcaacactgcggtatatctaccctggctagtcggccaatgccgtaagaacggcgcagtgttcaagcgggcagtgttcaagcatgtctcagacgcagcgaatgctcaccattccgggcaacccgccgatattgtcgtgaactgtaccggcctagcatctaaaaagcttggcggtgtccgcgacgacaagctctacccaggtcgtggacagatcgtcattgtccgcaacgatcctggtaaaatggtttccatgtcaagcacttatgacggtgaggatgaacttatgtacatgatgaccccgtgcagctgg

SEQ ID NO: 6118 - DNA, 200 bp, Emericella nidulans
  unsure (1)..(200): unsure at all n locations
cataaagagaggccacacatgttttgttttattttaaaggagaggggggataatttccccccaaccacanaatgacatttaaaaccgacatgtagtcctcatagcttcagacctgctagtcattagagtaaatggtctcaccaatttgtttacattcccttttcatacattttgtctttgctttccctctgcaagcattt

SEQ ID NO: 6119 - DNA, 550 bp, Emericella nidulans
acccctcgaagcccacttgtagaagtagtcgctcagagccatcgattgccgccgtctcctgcagtcgtcactgaagcgattgagcgacaaacgaccgagtggcgtaagagcatcggcgacgcttgggaaagctctggtgtgcaggagggttcggacgcactacggaaagccctcagcagcgtcaaggccgtcgaagtcatcgtcacactcctcgaagccttcagcgtcatcagccaagtcgtaccgtggggctacgctgcgacgattcctgccatcgatgccattcacacccccgcaattccagtcaaggttccagatgtcttcatcttagtcgacggcttattttgggcaccagtctccctatggctgctgactagcgtgctgctgcctctgatagctgcctatttcttcaacatcagccttcaggtggcgcggtcgaacaacactggcattcagacccgccgacgcagcagtatcggcaactctacactgacaacctttgacctctcagtttcaacatcgctaaagctatcatctcgtaacttgttta

SEQ ID NO: 6120 - DNA, 502 bp, Emericella nidulans
tattatggtagacaggacggagagggttaaagacgcactttgaacggccacagtgagtaccgcagatacggcacattccagagtatagctattactacaacataggcagccatcacgccgagagttaccgcttgggtgtggttgactgtgagatcgcgcttgtagagatgagagtgggactctgcggcgatgcctcggtcggtaaggagggcatagtagggtgccatcgctatgatattgcttggcctaacttttcctgctgaaggctcccaactcaaatgatgttataaagacattcaaagagtttttgggcaggtttattgctaaataaattggcgcctagtctacgcgtctgctgatgattctttgcctggaaaggtttagcgtgtggctgggatatgtgtctagcgagctattttgggatagcggggtgtggctggggcgggtcgaatttcaacccaatcagaaggtgggtcgatctatacagggctgacgctaatgt

SEQ ID NO: 6121 - DNA, 1377 bp, Emericella nidulans
  unsure (1)..(1377): unsure at all n locations
ggcaattctcactactcaactacctttaatgatctaggtattccaccggaaaccgtttctcccaagtccttgatggctcaaaatccgttcgctgaggcctatgccactcctccgtctatgacttcggtgggtcagcagcccatgctgggggcacactcgcagagcagtatgttttcatcctccatggcaacaagcggagattctcctaatcctttcaacctacctttcgcgaatagtgccctacgaactcaccataccccagcctcaaccgatacctttaccgactccactcgacgggctttattagccagcatggcgcagcccgcatgtttcagtcaccgcaaatactctcaacctgcaaccggaatgattcaatgtcgcgatctctactcccgctcttcttccagccccacctccaccaaccaactgcctagcaccgcagatatgcagcgattcatctccgcctacatcacctatttccaccctcacctgccattccttcatatccctagtcttaatttccaagcacccgagtatacgaacaatttacgcaccccgagcggccaccttaatctcagctccaccggtgttgttggtggtgggggttgcttgatcttgtccatggcagcaattggagcattatacgaacttgacacagccgcctcaaaggatctctttgaagcctcgaagaagatgatccagctttatctcgaggaacgtcgtaaggctgacatgtcaaccgcggtttctcggtcctccaagccgggtgataattccgttcacaacactccgctttggcttgtgcaggcaatgctcctcaatgtcatttatggtcatacttgcggtgacaaaacctcggcggatattgcaagctctcactgcgcaggattggtcagtcttgcgcgggcggccgagttgactgccacatcgatgcaaggaccttcccaggatacctcacgctgttttgcagaaaaggccttccaggcagttctccgaaatccagaggcacatcggccgcaaagaaagagcctgctggttgaatatgcgggaggaagacctttgcatttgccgcctgtcctatccggcatctccctgttactatggaccccgctccccgaagagttggctggtgccccgaaacaaggggttcttaanaattgactctttctcccccttcctggtggcaaaccctttctcacaaaagccacttttcgttatattccaatttgtttactagcgcgtgggggtgcgacggtgctagcctatcttcttttattgtatcggttagtgaggatttctcattctggttcactcgcaatgctcgccttatatatccttgtgctcctttcctttctttgactgtctatctcgcactta

SEQ ID NO: 6122 - DNA, 497 bp, Emericella nidulans
ctcagcttctcgtctggcatcccagagttgcaagtcctgaccgacctcccctcatacccgtggaaccacagcatcagacactggtctgagtctcgccgcaatgccgcgtaccgtaagcgcacgcaggagccgcatgagctgctgggcgtgctggaaccgggcacgaacccggacgctgcctcgtggaggcatatcatcaagctctccgaggcgccgtggctgcgcgaccacgttgtccaggggaacatcctctaccccggtgcaggattcgtgtgtctcgccattgaggcaatcaagatgcagtctgccatgagcgggacgaatgatgtgaccggtttcaggctgcgcgatgtcgagatccatcaggcgctcgtgattgcggacagtgcagacggcgtcgaagtgcagacgaccctccggtccgtagaggcaaggtcatcggcgccagagcgtggaacacgtttgagatctggtcggtcagcgcagacagcgagtgg

SEQ ID NO: 6123 - DNA, 445 bp, Emericella nidulans
  unsure (1)..(445): unsure at all n locations
ggagggagactagataggaatgaagattcaaagacagtgtnnatggtagccggatccaagctgaccccacgttgttcacatttaacgaccaaaggggagtacccaacatgtcctcgtttaaatcgagggataccgactgcttgaaccttgaacgctaccactgagtcaacacgctgttgaaggttttagaaaagcaggatgtaggaattaacatagggcctctaaaaggccccccgggggattttgacacacccaaggtgggtaccgccttttttttggcacgaaagggattttgaaatgtttactctaatagcgctggggacgcttaacctaaagcccttttgaaggcattgttaaaaaatacccaatgttccaaaattaatgctattaaacctaacagggtatgccctttggggccttccccgataccccttttaaggactgc

SEQ ID NO: 6124 - DNA, 431 bp, Emericella nidulans
gtctgatcacagaaagtcggggatctctctcccagtccctcctctgtcaaccctccagcaccaccaacacactccgtgaccgcctcaccggtaagctccaaatgcatgccaccaaggaagctgcctgcggccttatgtatctctaacgcctgcttcagctcagaaagaatatccgagaaatgtctcgtcttgacaccattgggagtggagcgagtgttcccgtgcatcgggtcgcattgccagacggggatatggccggaggattgaacagcgctgatgtgtccagggagatgggcggcgatattggcagcaccgtagcgggaggatgagggtgactttgccaatttcgcgggttggattgacagtatcgaggagggtgactagctcctggggggtcatggaggggccaattttgatgcccatgggggttg

SEQ ID NO: 6125 - DNA, 724 bp, Emericella nidulans
ctgtgaggctcgaagacgagcccgaaggtccattctcgtcattttcaccggatggagtaaggtggtagagctcaagagagcccttcccgttgtattcaccacatgcaacaatggtgtgtgaagacgggtatctagggctagagaagacaggaaagcgaggagcaggaacagaagcaaggccgcaaagccgcccgcctgaatggaccgtgctttgcaactttgggaaatagcggcggtcatactggagtatactcggaaagcggcctgcaagaaatattgtattcacatgcgggcccgggggatgcaggactgagaggggacccggctggaacagtggtgcatagttgtcgctcgtttcagagggatcagggcttcgaattcgatgcggtggccttccgttcggctgaatctgtaggagtggtgagtctggtggagtataaatcagagactctggaaccaaagagatcgttggctgctcgcaacgtagattgatcgcctcttcctcctccgtttttgagagccgcccatcatagatatgtagactcaaggtggtcgctagagtcaacggtacggagtagtcggtctcctgagacaaagcaaacactgaccaaggatatcgttgttgagaaacaactttgagcgtctcaagatagacttcattcacgacatgccctacagccaggtaagccctttgcggatgaatccacgacaacattgcgctttg

SEQ ID NO: 6126 - DNA, 524 bp, Emericella nidulans
caaactcacatccccggatatgccatctgcatcaatctgggtcacgttggcgttggagagaaatgtttccccggttgggtttctacacaaggcagaattcactatcactgacttgatgcgagtgggcacgagcaaggtgtagagctcgccatcatcgggagctccaatagcgccaagcattgtctgcaaagtgcaatcgaggagtgcagggtgcagcagaaaacggcatggcttaccatcaggaaggacgtcttgtatctcaccatgggaagcgtccttctgccgatacaacgagcggatgccgcggaagacgccgctatatccgtatcctactttggccaaaaatgcatacagctcatcgacatcaacggcactcataccagcacttcctgacccactagactgtgccaaaaggtcggggttcggcgctccccaggaaataatcatttgcccggacgcacgaagttggaacgcgtcccctgtactggcgtgtatgtgaaaggtccagaagtcatttcgtcagt

SEQ ID NO: 6127 - DNA, 1013 bp, Emericella nidulans
ctgtagtatatccgctgtgccgaccagtccggctcgtactcgaccttcctcgcgaaacggacgtgcttcgtcaccatatcagctgcaatatttttcttctgcggcccaagcgtccatttgttggttgtcttggcccagtgctggcgctcgttgcgagaaaggggctttggttccttagggaggtaggtgggccctgagaacgttttgggacgtgggatgaagggctcgacggttctggtgacggctacgagcttggccattatctcgtcctcctcgcccttgacttcgacgggtggctctttttcggtaagagaccatttctccgtcatgagcttggccagctcgttgtcgtcgcggcgagtgtatgcctgcgccgagacgcgaacggtcaggttccgcgggagacgagggagtctgcgcacctctgagactgcttccattcgcttcgtcatgtcggcgcttttttggagtcgggtgcgcttgcgcggaaatgctttgggcaacccgacgctgagtcctttgaccgggagggtcgaaacggtctccttgcccatcccatcacggtactgcaggtacgtactcgccgtccgctttttcgagtaccctttactgcattctagaggacgtgctggccgtgatatcgaggatcccgctcgtttgcctttgggcttgctcttgtacatgcgccggtgcatccgacggggaaggggggcttgtgccgatccggagaggcttcatgccatgccaggctataggatccgcttattccccaacagtggataagtcaatggttagctttgacccacctttgtccgtgggatggcctctttgaatgcgccagacgtcccctctaaatagggtccctcgcgtcgaatgctaacctttactgttgcagtaaattctggcaaccgctggattttgtccatccactttccctttctggggccatccttttgtcaacctccgggtggatggtcctggccttaccagggattctcctcgtctcctgctta

SEQ ID NO: 6128 - DNA, 1046 bp, Emericella nidulans
taagcatcacccggctcttcaccgctcgttcctcgaattcctcgacctctacggctatttctcatgcgaggatctggaggaatccgaggaagaaaccgtacattgagaagaggagacgcagcacgaagcggagcgaaggccgttacttgggacacagaggcacagacggtcgcgttcgtaccggcctggtgatgcctcgaatgtgaagacgttcttcaccctgctcaaggcgttcattgggactgggatcatattcctgccaaaagctttccgcaatggagggatcctgttctcgtcggtcgctctggtgacggtcgctttgatctcgactctgtgctttcacctgcttctcgagtgccggagacggtatggcggagggtatggcgatcttttctagccattcgcccgaatccaaacacccgggtattggaccttgagcattaagtatcccaccatattccaaaaatggggtttagcattcggggcatatggaaaaactcatccgcctggaccgtccgtacaatcatagtgggtcccactgtcttaacacagtagattttctcctacccagatcgcccatcacgtgatgcgcgatcgctcaccatggggccacgacgagagagagctctcccgctgcacccattatttctacactatctcgccatccgccaatggcatcacggataactaccgacgccactatgattgatctattgtcttcctgtcctctccttaccaaatcccgtaatatccgtctccctgaagcaatttgtcgtcccctcctactagtccgaccttatcttcgtgtcacactcgcggaatctagggctgtatgagcggcgtgagtgctgcgactactgccctacccgcactatgtctcgtcccatccgtcgttgcatgactttatcttctatcgttggtacctgatcttgtcctatatgagaatctccccacctatatatcacggtcttctccatttgccggtccaacacgctaacatctggacttcattgtaccgcggtcgccctccatgtgcatcagctctt

SEQ ID NO: 6129 - DNA, 422 bp, Emericella nidulans
tgaaacaagcgctgctcggcagagtagctacctggcccatctcagctttcagcttcagccttcaggctatatacggtgatctttttgcttagcgtcgaagaggctttggccaagcatttactgacacaggaaatggatgcaaccttgatctcacttgagagtcgagactggcatatctgcggatcattgccgtaaccgactgggattcgtggccggcttggggatcttcgagctacggagcgacaactgtgataatgcgaacgggctccaaccagccagaaaggggtctaaggcgggtagacggcagcagcgtccagagagcattatctgccatggcatacggaaatactatgaaaccgataatactatgaaaggttcttatgaaaatagacgactccagacgttagagaccaaggcataag

SEQ ID NO: 6130 - DNA, 241 bp, Emericella nidulans
ttggaggagtctaagttagacttcgacaagatttcctagctaacggagctggtggaaaacaatgcagtggcgtttttacaggggaactgcaccgtgttatgggggctggttaaggatagtgcttcgagtggcaagacagaggatgtcgagaagtatgtgaaggagaaggttggacaggcaaaggatactgctcagagcagcgggttcaatatcgatctggataagtggtctagtctgatcc

SEQ ID NO: 6131 - DNA, 420 bp, Emericella nidulans
aaaacgctcatccttttatccgtccgttaccagcagattcttttactattgtctgctaataaaactctctgtccgaatcggtgcttacatgcgactcggcgtctgctgacttgaaagtgcccggcgccttagcctggatctagaggctgctggaggctgcggcagcctctagcagcctcttattcaccaggagctagctggattgcgggccagagctagactcataatagcagtgccaagcctcaaggcgctcttatgcagtcacagtgtctcacttcgccggccgaattggtccctgcggctcaacccggcgagtaagacttcactataggctcttgcagacccatgctaggaccacatgctaaacccagtttggggctgtgctctgggccaggctactttgggccttagcggtgttgc

SEQ ID NO: 6132 - DNA, 518 bp, Emericella nidulans
ctgcaggcgattacctcgcagtgctgcctatcaacccgcccgagaccgttcgccgagcaatgcggcagttcaagctgtcctgggatgcgcagatcaccattgcaccctcggggccaacgactgccctgccaacagacgggcccatagcggcgaacgatatcttcagtacttatgtcgaactctcccaacccgccactcgcaaagtaagttagcaccgttgtctgctcaaacaccaacagataaccaacactttttttaggacttgaggatcatggccgatgcgacgacggacccggacgtacagaagatcctccgaacctacgccaacgaaacctacacagccgaaatcctcaccaagagcatttcagtccttgacatcctcgaacaacatcccgcaattgacctcccattgggaacattcctactaatgcttccatctatgcgcatgcgcaatagtcagtattattcctctcattccttatagcccagtctaacagcgagtcaaaacagttccatct

SEQ ID NO: 6133 - DNA, 503 bp, Emericella nidulans
tgacatctcgataacaagcattcattcattgctctaagcatctggttgacataccatgatgatgctctcgtcgacataaagtggccaagcaggaagcattcgaagaaaagataaaattgaagaaccagtttcgcgccctcgatgaagacgaagtcgaatttctcgattctataatggagtctactcgagctcacgaggccactgtgaagaaggagactgccgaacaactggagcagttccggcggcaacgagaggaggcggagaaggcctacctaaaagacacatcgccagaaatccctccagctgccgaagcagaagattggaagattgcgtcgcgcaagaaacggcgcgagaaaagcggtgcgacacttattccaggtcgaaaacgaaagtcgatgggcgacgttactaccgatcctcctatgaaagagacggaaccaaacaaaaggaccaaggaactcctcgaggagaaacgaaacgtgactatcccagccacagaggag

SEQ ID NO: 6134 - DNA, 994 bp, Emericella nidulans
  unsure (1)..(994): unsure at all n locations
ttcttctttcacccgtaagaagtcatgacaatggaaccagagagtaatccagtataatatgcgctatcctaatataccaacatgcaccaccgagttctaagggattcttttgtacttgtggactctgtgttttcttaaggtgtttatgctaacacttctaccgatgcctatacaatattcattcacgaaagaagccatgatttgaaagccccgccatttctcttcataccaataagcaacatctagccagattatccgatcttgctgaacccaacgagacaagaatataactacactcccacgaactggtacagtaccttccgtcacggagctcctacattctcagcagtaatacttaacccatcattttatcatagaaacatcctagctaccagatacagctgaggctcagctaattcgagtcaaccacgcattattcttaccagcctaccatcgccggattcgacctaacaccaagattcatcctaaggcgaacttaaagtgtccgtccaactcattagactacgagaccaaccgtgccaaacggcctaaactatcccagttaaccacccgccctgcgcagagctgttatcgggcctacgagcggccttggccctatgtctctcgccctgttcgcctcccttattatgttactgcttacaaccgagtgcatgcgccgggttcttatctctgtcgatattggcaatgcgtcggcgggcgacagcgggaagtcttgatangatatcgtcgagggggacgtcgatgacgatattgaggcncgtcttgaggctgtgngcggatcaaaggggtcctatgcggatgggtaccttgggccacactggaatgagggggnagagtccnagtgggactaattccagttttcgtaggaattncttttgaattaaggttggggtctgtttgacggggctggaactataacaggttaggggctatgttggggaaacaagagaaaaaaaatcaaaagactggccca

SEQ ID NO: 6135 - DNA, 791 bp, Emericella nidulans
aatggagaacgcccttgaaattgcgctcacttcagcctcggtgggattcagaacgtccagccaccaaacaccgccttcgggtccaagttgaaaaagatctcggaaactgtccccaggaaggacaagatcccctaattccgccgcatgtacggtgctctgtgattcggaagaaaagaagccaaagcgagtcggctcattctcattcttcagcttgtccagcaactccttctcgtttgcttggttgaagattttgtcattgaacttggacggcgttgagtcatcaaaggaaacctcggcgcttgaggagtgcttctcatccacccccggtagcgatttcggtgcttgggcgaaggtcgcggaaagcccgcgagtatctgtcctgcgaactcagactatgtttgcgctgattgctggaaggctttgtcttctgattcaaagctacgaattcctccaattcctcgtagtcgatcactggaattcttccaggttcttcgaagtgcggcacgcacgtatcctctggagaatccaggtcacctggttgaggtcgaataacactggcgttgctgaaagtcggtcgtctggtaccgcctgaaaccgtgcgctgaagaatggcctccaaatctgggggcccatggctctccaaagtatttgcgcgctctcggcgacgaggatctgcaaaggcgtcgacggaatttggcggcgacgaggatcgagccaaaacggaactctctcgtgatctgttaccaatatcctgatgagtacggctatatgtcagaccgtggcgccgtagt

SEQ ID NO: 6136 - DNA, 464 bp, Emericella nidulans
agacaaggctcagcgagcaagaatgcgacttgacgctttcacgtctagtggatatggatataaccgggataggaactaaacgaagtgatatatgattcgggaaaaagcgtttcacgtgggtatcatgatatatgagattcaaaaacaacgccaatgggatgtgagtcaggcccaagtccagaatccctagtgcaacgcaacgcaatgcaagtaactaaacaatacaacgatataatcagcaaatattgatgtagataagatgtgaacagagagagaaaaggagagtggggaagaggggcctcataggtctattcagctaaactttccctcaacaacccttcatcgatccgctcagcatgtatagagataggcgggggaggtggaggacggagacccataatcggacccttttggttaacacccggatgacggaacccgagtggcggtcgtttctatggctgagg

SEQ ID NO: 6137 - DNA, 518 bp, Emericella nidulans
gaactgtttgtccagggggtttagactttggacttccgagtactctgaggacgtctccaatgagccctgtccagagtcaaagctcaaaagccatctcgtctggattgctcaagcgtcaagggtaagaatcttgccagaattccccagatacagtgcttgtttccgactcccatgtgctcaactcctcacgcactgtctcacaaaccaacaaggtcgactccaccgagcacggagtactcagtagtaagaaggacgggttacggcggaggaaggaaggatgggcggcccccgagggttgatcgaccccacaagaaggacggagcggacgttttgtgaacttcttccaagccaactaactcccatgcagcatgcaggaaccggttagcctcgtgtctcgatctggttatagcagggcttggcgcgactctgcgagggagctgagtaccggccctcctctcaaaaaccggagaatattcgcgttgctatggtgttgaggtacgtatttcgatgtttacatg

SEQ ID NO: 6138 - DNA, 658 bp, Emericella nidulans
agttatgatgccaggcttcagttcatcttccttctcgatcgtcttgcttgtcgcgggctacctcaataaccggtgcgtgacgcctccaaacgagaccacctccccgcataccaccagacgcatccgctttcttacaacagcaccaccgcttctttttgcgcacattgccaacacctcaattctttaccaagccttagtgaccctattatcgaccggatgaacgtctgaccacgaaacgcttgtcaagctctgcccctacccgtcgaatctcgaccccagcggctcaactgtatcctggaaccgtcacacgggcggatacctctccctcgtcgctatcggcgcatttatccgattaggcgcctacggcggtctcgggcgcaactttacttaccagcttgcgaagcctgaccggctgatcacgtcgggactatacaagcatctgcagcatccgagctatacgggaattgtgctcttgttggctgggtatggcgggctattggtcaattcgcttcgattcgcccattacttgtcttttttagaacctctacttaggttattgaaaggtgggagctggttcttctcttgttagcagctcggactggtttgtccctgttggaggatccggttgagagagaacccgagggaaattttggcccag

SEQ ID NO: 6139 - DNA, 568 bp, Emericella nidulans
acatatacggcaaatatatataatattgcttgcctgaatacgtggcggcaaaatgaacgctctcggccatgaataaactatcaagcttaaagcttgataattacttcttatatcatctatagtagagcttactatgtgttgtaaccctttcacaagtccttatggcgaggaatgtgtactatggcgcgtatactagccatcgtgatagctgcatatcaaaatgtcaagcgcagtgaccagttagggctaggtgactcgaattgatacggatacgtttattttaccatttatagggttaatacataactagcggtaataatatgtcacgttaacctgacagaattaaaaccccagcacagccgcgcgccaaatcaatcaacccggcgcagttgcaaaatgcctcaataatcggtaaaaataggatctgtctggcgtctaaatacatgtcatctgctggaagccggtctcacagtatcaacaacggtcggtatagcggatagaaaagtctcttcatgtgctctagcgaaatcaatttagcactagagtaaacgtccgacagcgaggccgc

SEQ ID NO: 6140 - DNA, 519 bp, Emericella nidulans
gcgagataccttccgaccctctcttttgcggattccaaacattcccgttggctttttgaaagtttcctatccggtttcccgttgatgaagcggtcatcttcgaatcgccttttgcgatgacaactgctaatgaccggacagcggcggtgatgtcggtcaccgggaacgacgtgggggccggttaacctgggtccgaaagtctccacatctattccgttacccgtaagcgtacatctgtactcgtctccgaagtaggtacgagtagggcgcctggcttggttaatgcttgatttatagtttcgttgagatggagttatcggtcgaatgggattaactgcgatgagcaaagtccttctcctccgttaaatccgagacctgactccggcaaatgcatgataaaatcggttgttgctagcactatagtgcatatgaatggattgcggctcccaggccactctggctgatcaccatcactgtcgggaacagcaagacttgacccgcccgaaacaaaaggaggga

SEQ ID NO: 6141 - DNA, 445 bp, Emericella nidulans
tgagatattcatgtagaactagctattcatccttagccgctcgggtcaactgttcactgcagaaatgtgagggatcaagtaatttatctgaggaaccggggattcagcttcctgatcagccgggacagatcgatgacatgcgaaactgatgtttgccatggacctgggtcgtttcacggtttccgttgagctacggttctcgcccactaagctggacagtggacacgtctccaataatcccaagctagcggtaagagcaccaacatccagagtccagttctgtgggactctagcgacctggttaccggacttgaccccctgtttagatagatagaccggccctgcggagtttctaggttcagcgatgatctgatttctccgcaactcgagccctccaacaaacctaaagctccaacatcgctgaatcacggacgagtactatggt

SEQ ID NO: 6142 - DNA, 512 bp, Emericella nidulans
acaacttgaagactatcagatcgttagctttgttgagggcaaagaagtgtttctagggggcagtgggccggcgtcagtgagccatgtaagctccattgcgccccctgatatcagttctggctgaccataacagcttgttgtggatgaagagtccgccattcttggcctaccgggacaacgcgaaacaactctgaagctagacgcggaccattcgcagatgtgcaaagttagcggtcgaggagcgatgtacaggctgatttcagggaacatcagagatattgcagaccaggtcctggaagctgagcgaggatttgtcccacaaccacctaactcaccaaagcctggccctccgctcccacctcgaatgcattttaatagtagtacgccatacgcaggcccccctcgaaccccaaacccaaatgaggcccaagttatcgggaccatttaccaaccggccgatagagatcacggtcgattcaagtagcgaagtatatgaatgagtggaaatggga

SEQ ID NO: 6143 - DNA, 914 bp, Emericella nidulans
gttgggtttaacccaaacaaggctttcccgttagacaagttctggcagtaagcgaaatttcactcaaagttagcaatctaagaaattgggcttcctgcccttaggtccgagtcagaattcccaacggcatttttccagacgtcgttagttttagcatcaaaaacgatgaacagttgagtgtaattctgaagtcatacctcatctgttctttcagctcttttgcaatgttgtggctgtccctgtgatttgttgccatgtccttttgtccttttcaccgttctctgtttagtctctgcctgttcctctgtagagtagcatcgagcgctagaattcgaacaaaggacggaggagctgtggttggaactgtgatggctgacggatggccagaggcgctgtgaaagcggaacggacagagaacagagcccgggaggcctgagcttgtctgaggagagttcgcttgaacattatgaatttatgtgatttggagattataatgattgaaggtagaggaacagggttggtgctaatgagacactcggcattacagcagaaaatatgaaagcttcgacgtcacctgaccgcgccgaaggaaaaacatcccaccgaactatacatgagatgcgacgcgtatcatactttgatgtcccaagtaattgtggaaaccatacccgaggtcaataaatgggtggacttccgcagatagattctgtctggagtattaatcaagtgttttcaaattttacagttgaggagctattcgccgttattagccgggtccagtgaggtcagctcctccgaagagagcacggatggcactaattgagagacagccttactgttagagatgacaggacacataacgagtagcttggacaagcgctcaattcaggataaattaagagcggagatgccat

SEQ ID NO: 6144 - DNA, 858 bp, Emericella nidulans
  unsure (1)..(858): unsure at all n locations
gtctattacagggggaatccatgcatacaggtggacataacgcataatatttctcaagttctttactactcagactttacgtaacacctggtacacgctgcgggtccagaacctgaccaatgaaactgttacaaaaacggcaagttgtaccacttgccatgcctccttaccgtgccacttggacagtgnatctggcacagaggccaactccttaaatgggggctcaactcagaaccgttcgtagaggtgcccgccacactcgttacatgcttaaagatgaagaggtgcgtttttgatcttgacagccaggccgagagcaccggccgttacgactatagcgaagagctgtacgaccaaccactacagatgattatgccgtctcagggatctcagaagttcaagcgtcggcatatgcgtgcttggactgaaaccttaggtcagagcgagacgaaacatcagggcggctcatcgtccttgaagtcttacgtcttgccggcgggccattggattccctaaacgccgtttcggacgattttcttaaccctgatggaaaacgaatttgcgccggttaacagttgttggatcctcaagacgcaaatccccaaactgaatgaggggctaccatagttgctgatcccctaaaagagagctaacttgggactgatgatctgtgcatctattgccggcgtactgtctataaacctgttcaacggttaaaatttccctttgggtatgttgtcaagtatcttggctattatacccacctcgtggttacatcattattcacttcctctttctcactatcttttttcctctcatctacttccataccttacccctaatttatctcctctcatc

SEQ ID NO: 6145 - DNA, 524 bp, Emericella nidulans
gagagctcggaacgcttctccacgagaggaacatcatacgccaagaccgtatactgtttttttaccagataggagaccagctcccgtatattggcagtccagtactcccctataatatagaaccccggaaccttcttctgaatatgctcaacaaatgctcgttgaaagccagtcgacatgtgctttgcggcatctagtcgcatcccgtccagagacaactgctccgtgatccaacaactccagttgaacatatcagcgcgcacctcgggatgagacaggtccagatcggcaaacattagataatcgtagttccccttttccgttgagacgtcgtgcgcccatttcttatcctgatttcccacttctccaaggataaggtatatgccgccttgcttgctgttgtcgtcccagtcaacaccggagaagtgctgactatgatacttcatgctgctgtatgtatcttcacgtactcgcaaactcgaagccagtccaggcagatatcgacgagggcttagagatggcac

SEQ ID NO: 6146 - DNA, 528 bp, Emericella nidulans
caccctaagcaatggatcaacttgcgtcaatacaatcctttacctaccatccccttctccattcatcgcaaacaatatcccaagcccatcgcaacacgcataaactcatcaacatcgaacctcctctatctacatatctttcaagaccacaaccacctccttcctcccagctaacatagtggtcccccatcctaaatcccctttggtgaacgtgtcccacttatttcccctgagtatatccagccgaactcaatttccatccaaggccagaggataaaaaggcagctgacacgagttgagcggagaaattccccacagaaccccgtcctattatcataaacttaggccacagggccagatgacctccgctccctcaaaccaatcatcacttacttcgttcgtggttgggtcgataatatacttacatcgaagtgaatggtccaaggccgaagctgctccttggtagatatgaatgtaaatgaacgaccttagtggaacaatactccgatggtgcggagaactcagtga

SEQ ID NO: 6147 - DNA, 451 bp, Emericella nidulans
ggggatgggagggtccaggacactgggtgaccggtgattgtggtgctgttgagcgcatccagacgtaccaccactacgttgagagtggacctgaagccgcggctgcggcgctgaatgccggcgtggacctggactgtgggacctggcttccaagctacctgggggaggcggaaaggcagggcttgatcagcaatgagacgctggacgcggcgttgacgagactatatacgagtctcgtacagctggggtactttgatccggccgagggtcaaccgctgcggtccctgggctgggacgatgtagcgacgagcgaggcggaggagctcgcaaagactgtcgcgatccagggcaccgtgctgctgaagaatatcgactggacccttccactgaaggcgaacggcacactggcacttatttgggccctttatcaatttcaccaaccgagctgcag

SEQ ID NO: 6148 - DNA, 1002 bp, Emericella nidulans
ctctactgtcaaccacatgacacgggagccaatattttcttccgtacccactatctattggtcttctctcacaaattcccatttcgcccttcggcggccctttcaattccctgcccacattcagcactactgcatggccataagtttctgcttatagtggggatttcgcaaacaaatcagcagtcgcaaaatctcctacccgactcgcatttcggcactgtgccctaactgcttctcaccaggatgatcattgatcagcaagaatggctctttttactccatatctacataccacatttacatcatatctacatactaaacatcactccatgtctctacccgtggaaatcacctccaatgtgcaacaattcggatttacaaagaaacaaacccgatagtcgaactttggccctgcagcctcattacttcgagctacgtaagccgagttcgcacgcagtggggtttctgggcttttgataattgactaggtatggactgcgtgcagccccggcttgtgttcggcgagtgccaagactgggagaggtcaaaccattaaccacaatcactaaacccgatggatgggatttgctgcaattgggaaaagctttgggggggtgggggtattatgtgggtggttggccccatattccttttgtattactggaagcggttttggtagttatgtctcatccctatgcccacttatctttacttaaataactccggccgttggtctcattccttcttgaatacttaaagcctccctctcgattttggtgctcattttccgttatgcctaaatttgttataagcggcatgtttaataaatcctggaactttatattaacttcttttttaaagaactaagtcttttctcagggaggcttagaggagttccgttgttatatacacctctcatatacataattaatcatttttcattctaaatcatattcttaatatatattattattattttttttttattccacttattgtata

SEQ ID NO: 6149 - DNA, 509 bp, Emericella nidulans
ctataaatatcagccacctgaaacctctctagatatcttaacatcttaaaataaataccaagctcttcagccaactagaatacagtaaggatcatctaagtgtacgggcatccatgctatcagacttacctggccaaaggcatcctgatctaaaacaactctactcttatcagggccaggcccctaggatacagaataagttaccgcagaagacccaggaaaagcgaatacactactagcttgaacaagatctaatattcattcacacaaccagacctgggtattgggggactgctagcttccccagtccagaaactagactactgaatagctcctccagcctcaagccgccacatcagattgtccctttgaaagataatcagccgaccaagtagtcgtaatctcttgccaaaaccacgcataaactgggctgtgtgagaataggttataaaggtaaaaatattattgatccttacatcaaaatacgctgtataatctaaagtggtgac

SEQ ID NO: 6150 - DNA, 465 bp, Emericella nidulans
gctgcgggttggttgcagggtccgccacatcccacctatagtgggcctgacgctctctgggtgctctttgtgttaccgatgcccgaaaccggccgggcggagtccacggtccacctgggccgggcgggggtagacccaaggcacaaaggctcgtgcttgggaagcttcgtgctccgcgtccacccattgtgagagactagctcacgaaaggtctctatgagatcctgccctacatttccgcacctgaccaccgtaccatgtctggtgatcggacgatcatcataccgactctgcggaatgctgtgaaccagtacccatatcctggaggcattctgccactctgagattccctaattagcgagtctcgatatgctcagaaacgcgcaggcccttcatggtcgcagagatccaggcatcgaggaccgtgatgagcacctgatggatggcaaccttgttacacaggac

SEQ ID NO: 6151 - DNA, 532 bp, Emericella nidulans
gccagcaccttctcaagatgaactgacgcgtcaacggggcttctcaaatgccagccatcggtcgcggtcgggctctgcgggtcttctaactacagcgaggcacatcgccccggcagtcgatccactgggaagagtgtatatgcatcccctgccaggcccggccaaatcggtactttctttgataattcaagcccgagcgagaccgaagatgaagggtataggccggtttcgcgcgatgactactctattcatagcaaccaccctgctttccgctcccgaactccatcaaggccgacaacgccaactgcggaagagaacaacaacactctgcctgaagtgcggttctcggatttgggcgacctgaagcccatcgcagagcaccgggagagcattgccgagcagggtagcaacaccccggccagccccgagaagcctccttctcccaccatacctgcaggactcgacaatcagtggtctcgtgcgtacacatctccgacaggacagtgaccaagcttcatcatgacccgccgtc

SEQ ID NO: 6152 - DNA, 490 bp, Emericella nidulans
gctgtccgatccacagaaatatgctgcgataaccacatttccttcgattctggactacgccggctacgtgctattcttcccgggcctttttggcggtcctgcgtttgactatgttgcctaccgtcgatggattgacaccacactttttgaagtacccccaggcactgacccgtccaaagtgccaccaacccgaaagaagcgaaaaattccacggagtgaactcctgctgccaagaaggcagtgataggtctggtatgggttgtggtttttcttcaaatgagctcgatttacaacaaagaggctttattggaacccagtttccgggactattccttccttcgacgagtctggattgtgcacgcgctgggattcacacccgcgccaaatattatggcgtgtggtcactcaccgaagctgcatgtatcttgtcgggaatgggatataacggctttgatccaagacgggtaaagtattttggaacagactgcaa

SEQ ID NO: 6153 - DNA, 485 bp, Emericella nidulans
gcgctggtggcgatatgagagacggatttgtcttcagtgttgttaccagcaccctcattgctattcgttgctgctgaagacgtgctttgcccggcgggtgggtggataatctcaaccttcatcacaatatcaaagttcccttccttttcgtccttcaggtgctcttcaagttcaaccctcggttctggacctgctaccttgaacggagccagagcgtccgtggtgacaatccagggcgagactgtagtaccaaaagcctttccgttcaacggtcccagagggaccatctcaagaccctggatgtcgcgggctgcagccatattagtcctagttgctacactgtctcagagaagcgggaaattgaacgagacgcaccactccaatcgttaagcactacgaacccaaaaacataaacaactgcatcagtagcaggaattccttatgcggatccccatccgaaaggtcgcccaacgacaacaacaagt

SEQ ID NO: 6154 - DNA, 490 bp, Emericella nidulans
acaacatgttgcccagattctggtgtgcacctcatcagtggtttgcttctgggagcgatgtagcccaagcgtataggcaattctaatggcgatccccagtgtctgccacgccaggccctcttggtttctgccgcggtaagcgacggtgaacagcagcagcgcttgaacagtcggcagatagggcacgacaattacgtgcgccagaaggccggcagcagcatgaagatagcgttccccttcctctgttgggtattgggcgcgttcatctaccccgatactcatgagcagatacgcagaaacaagtacggggatgtcatctcttgagatagtcgacaagtcctccactgcagcgagctgctcgagacttgctgagaacgcagtaaaattgaatataggatagaggggatatattcgtaatcggaatacagagcaatattctttccgtctctctgcatccggaagttcaggcagcgtcagagccagcgggata

SEQ ID NO: 6155 - DNA, 699 bp, Emericella nidulans
cgaacagggatgatagagatacgatcagtgatccatgatcaataatgatcgcgaagatcagagcgctactacagagaccgcctggggcaaagactggaaaggagaggagtgagagccaaacgctggagtaggaagctagtacgaagtgagactgtgagagcctgagtggaagcctgagagagcctgagagagcctgagccttgcccaggagagaaacgaccagtgaccagaaaggaaagtcagctgccgggcgggttacagcggcagagaaccaagtactactaagactactaagtacggtgtagtgccaggtgagtacggacagaatacagaaccaaagtgaggcgcccatacggaagcaagcaccactgctggatcagtcatctggaagactctcagactcccgtatgaatcgcactttgttctgattcgacagcgtatcctcttggccatgggtgatggggcgcttatacggctcgctcccagtgcggtcagagaagaattctctggactctggagtaggtcaggtatgccagcccaagtccatgtgagggtgccaggctgccagctttcaggccacccccgactgaattaacactccccctcgactcgccggatgccacgttgtcaggactctgggcgacacccgttcgggtctctaccatttccacccccccgcgtccttatataaaacagtga

SEQ ID NO: 6156 - DNA, 715 bp, Emericella nidulans
cacttccgatgccgcgcccactgccgttactgctgatgctccaaaaaagcaccatcgccttttacccctaccatcgcggacatctctaaaagcagataggtcatcaacgtctgataggactcaagatggaccacatgacggatctgagaacacacttcgtggttcgcggaggagtcttctgaggggccgaagggatagaagcagaggaagcagcatgcgatccaaagagcaaaatccggacgagcctagtctggaggaaaataagactgctagccctgatgtgcacgatcaaacgagatcggacaaggcttctaaaccctcgcgaaaactcttcgcctttctgagctgctgttcgtcatctgatgtcgaccccgaggacggttctattcctccgaagaagactcccacacggctatccgttgttcagactcagccaacgccggagaaagcggatgtcaatgccgccgactcgagtatggcggagtccaagatgtcgagttatttcaaggacgagaagcccaatatgacagtgattcccgacaaacaatcatcacatgaagagggtgctgcggaaccaagctcgcaatatgatggaacaaaaacggcgccagttatacctgaatctgttcaaaatcaaccttcatcaagcgcggacaaagaaacccgagtgccggacacacaatcgtcgatccagcggcgattgtcgcactgagcc

SEQ ID NO: 6157 - DNA, 519 bp, Emericella nidulans
gagtggatgatccgctcagatatgcgggcgagccctatccttgcgacagagtagcctcagttcgggaagtccagagcccctttgtcacccagacctgatgggtctgacggcagactaacctcaatctcatcgtcagaaatggtgcaaggataatcaagctttgccgtccacatgcggtcaaaggtgtacgctgtcctgaagatgcgttcgcggtgttcgcgttcgcccgcgtcggacaattgggattcggggatattgggattgaggcccatgatgatggcaagacgaatggcagaccggcaagactgtacaccgcgtgtcgtcgattgaggtagagtaagtacaatgatagaagcaattgaatttcgaccatgtccacgctcggccgctcgctcacaatgcgccggatattggtcgctttacagaagtaccggaccccaggaaagaccttgtgagggtttgagttccttgatgtatacatctcacctatcgcaaacagagcccagagtttgcttttgt

SEQ ID NO: 6158 - DNA, 681 bp, Emericella nidulans
agtatagttagaactggatcacacaggccattcagattttcggtacttacgagctggtattccttgcgggtgacgttggggacatccatgttgtgggtggagggggacagatcttcgtacttctttccggtgaagatgtcgatggcgacaaggtgaaccttggcgtgaccgtgcttaccagtcttggaggtagacatgtcgacgatcttgcaggggcggttcttgatcacaacgaaaccgttcttgcgcagagcggaacactgcatggggtaggtggccgaggcgccagcatcggcggactcgaaggtaacctcgtgagcctgtaacggaacagttagcgctggtgcccatcgacggccgcaaagtgcttcgttcaacggatcgaatgggaggtatatttgcacgtttcgttgcgtgggaagtgatcagatgcgagtggggtaaggatgctggtgcctgtattccggctcctcaagaccagtgactgattgttgaggaacgtgacaggaatcaacctagcctagcaaatcaggaaattttcataaaggaacggtacctcgtcagccatggtgatagatgctaaagcaagatagactggtagaacagaaaaaaaaaagaaggaggagataggactttgcttgttggatggaggaggagaagaagagaattttcgaggagggg

SEQ ID NO: 6159 - DNA, 676 bp, Emericella nidulans
acaccacgcagatttccacgagaccccagcttcccagccaggggaccaggtttctcctcccaccctttccacctgctcgaatccaagcaattgcaccagcacccaacacttcgtatcagatcatatcacatcctccactcgactacagccatgtccaccacaatttccctagccaagacccaaactacccgttcaactcttatccaggcaatctcgacagccgcccaaatatctagagttgactctgcaatatgggcttttctctggacggcggatattccaaacctcgaagccatgttggataatgccaaatcgaatccccgggtggtgtaccgacagctagtcaattgccatcaggctagggacgcaatcaggaaatgtgagtaagtcatatgataaacctcatactgataccgtgccgatatagggatggtcaggactcaattccctagcaatgaacagcatcgagtccataggctgaaggagaaaaactcgagatcgagttcgatgtcgatgacaaaagaaagatccgccaatctagactctgtcctctcctggaacgcggccctctgcaagacacgagacgggaacaaatgcgtcatcccgaccgcaaacgcatacctgcacaccaatccaagtaacaccggtaatgatagcgacgtcaaagtcacacctc

SEQ ID NO: 6160 - DNA, 444 bp, Emericella nidulans
tgtaatcggacatcagcaacggaaaaggaatagtctcgccctaagcccatgacacttaccctatttcagagtatggcaatatcactggtgctcctcgccgtatcggcggtcgaacgactgccctgaatgttcgcgccattcacagtacactccatgagcggaatggcgcccctgagactgcctgggcgcatatatacttctgtgccaatgaagggcactaggactgtccgccactcacctatccttccgaaccgcatcgtgaagagcgcaccatgtcagcgccacggcctgagatccctgagaccaagaatgacatggactatggccatgagtcgccatcgcccatcacctccgtcaatggccctgataaagagcagggtgatgaagagacggacatcacgtatgcggacgccctgcgcttgaccatcatcatgtgcacgctga

SEQ ID NO: 6161 - DNA, 477 bp, Emericella nidulans
atggccttacgcctggcgctctggactccgcaaaacccgatcccgttctcgacacataccatctggagcgacacacaatagctcagcaactcatcgatttcgaccgcgctttctcctccatgttctctggcaagatcggctccggcgacggcatcggccaagccctaacccatgagcaattccttgaagtcttcagcactggcaatggcttcacaagcggctgcgggatcgaatatcctgcaaatatcacagtcgagaaattcactgacaaatctacaagaaggaaccccatcaagggtacggactatctcagtgggattctgtgtccaggacggagactactgaatgtcaaggtcaagcgctttgctgatgggaatcggagggacctacatgacggtatgcaattctttcctctcctcacctcatcacaaccctaggctagccatggagaatgagtgttacacaatatgagcagac

SEQ ID NO: 6162 - DNA, 708 bp, Emericella nidulans
gaactggacaaacgagccacgaacaatgccgaccggctaatgagtcttgacatggccccagattcatcgatctgcgccactcgcaacctacatcttcgcgtccgtattcgcccctgcatcaccaatagagttcatattcggactcgcaccgacagccaagtccatacacagaagattaagctcggtcaaagggacacgagatcgatcatggcgcgtagcaacgacattcctgtcaattcccgataggaactttgaagacctactgctacatacagcgtctgacgaagaggactatttgaaactgtggaatcgggacaagaagccttcaaaggaaaccagggatgccctgacctatttaataaggctttctacaaaggagtcagagcatgaggacgcgtcgaatagcattttcgactggtacgaactcgagattcgtcggcattttttgcagaatttcaaggaagatctgtccattgtgagctccgcctcgcacccagacggtctcttgagagagaagtttcccgacgtatttcagtctatatcgacttccttcgatcgaaatagcttgttggaggggttcctcgtgagatgtcttctgttgatgcgccggatttacttcactccgctggttcaatacatgcttcctgtcctagagcgaagggcgcaagagaagtgttttatgaagtttgaacgctcattccacttgat

SEQ ID NO: 6163 - DNA, 502 bp, Emericella nidulans
gtgtccacgctgatatagaaacgtctgcctgttgtatgactgcactcagttcgtactagcgttgtcggggtgtgccaaaaatcttttgtatacagattctgcaaacgcgcgcaggcagtcattaagcccgtggagcttcttcacaccatgtacaacgagccgagcttgatgcagcgccccgaagtcctgttacggagcgacaaactggtactcgctgtgcgaaaggatatcgttgaccttgaaagccttgggcgtggttcatgtggacttgacgattttcaatgcacctattgagtcggagattggcgagtcgtgatccctgctgcttcttgttttaggcaaaaccgcgagtggaaaaccagagggctgcagttcgagaaggagatgacgaatctggttttgatgcaaaagaagacaagaggctttcggaaaggttagctggacccatgaaggccggtaaggtgcttaagttggttttcgactagaggttacatgtgcgatg

SEQ ID NO: 6164 - DNA, 632 bp, Emericella nidulans
cacggcaccagcgccacacaacagaagggggggaggggggaaagaaaaacagaaccgcaccacccacagcgcctgagccatgagcaaaagcccaaggaggcggacacgacactgagcgcaacacacgcgcccgcagcaacctcccaaaaagacaggcagcagcatacccaggaaccgcgccacaagacgagagccgggcggaaacaagagccacacgcgcaaaagacaacacagctgcaaagcctaccccgggacaaaggccaggcacagagacagaccaagaccgaacggaaaaaagcgcaggagccgccggccaagaacaagcacagggggaaccaagacgtggaacaaaagagacactgcgataaccggacggccagcccaacaacagggcagacaaccggccacccgcatgaaaaccccccgacgggaaatgaacaacaggccaaccgaggaaggaaccgagaaaggcctcaccgccccccggaggcagagaaacgaccacagcccccgggcaagccccaaaacggcaaaaaccaaggcggcccccaaaaacgaaacggggaaaaaaacaagccccggtccccgcatacccgccccaaagcaccaaagaaccgaaaagagggccgcat

SEQ ID NO: 6165 - DNA, 2174 bp, Emericella nidulans
ctcaaatagaacgcagggatactcaacccgcatctctgctaagagcacacgtaaaaagaagacatccgcacaccccgcgagcaaagtgaagaatgccactgaaacgaccagtggttacactacgagtcgagctgcgaagaggaaaagccaaaagagcgaggaatctacagagacgaccgaacgtcgattgaggaggtttcgccactcccccccggtgagctaccaacaacgtctggagcgtgcagtcacccaacggtaagcactaaaagcatgatatctgcacctgctaacagcgtcttatagcatgttcgtcgttggacaaactgtatctggcacggatgtggtccccgagctgaacttcgacatcgtcggctcaactggcaacatttacaagacgaccgtcgggaaggtgccgacctgcaactgcccggatgcaaggaaaggcaaccagtgcaagcacatctgctatggtaagctatcactgtttcaacaactttacgcctcaatggactattctttcctcctgctattattatccttggcatccttatacctatcgctaatggccaatgcagttttagtaaaagtcctgaaggctccttcgcatctccagtaccaactagctttcctatcatctgtcagtgcgtcaaccaaaactttgggcaacagactaacatatccttaggaactccgcgaaatttatgaaaactctcccctccgaaacgtcaaagacaaagcggaggaccacgacactgatgggaaacgtaagccagtcgaaggcgactgtcccatctgcttcatggaattcgagccggacaaggaagacatcgtctggtgccgcgcagcgtgtgggaacaacatccacaaagcctgctttcagaaatgggccgcttcgtcaaacaaccagggagtccgctgcgtttattggtatgtttgcgcttagtcctaccctcgactcacagactaaccaattcccaagtcgctcaccgtggcaaaaccaagacgccgacggtaaagtcgacgttaccctcgaacaactcgtcgctcagggtcgagtcggcgaagacgggtacatcaacgtggcaagtcaaatgggcctatcgggtgaacgcggtacgagccatccctgtagaagtccctttcccctacttttttatgcgaggacactaatttgatgagaagactcttcaacatactatcagcggtgggtgcaccggcgctcgtattattctggctggcgtgacgcgagactacgtggactactactagacgcgcattggatgttggattatcaccgcgccgtcaaattttcagcacacctacagcctcggcgttcaattgggagtttaaacgggtcatcagagggttgtattgggtctacctagggatctttggcgttcggctcctcataccccacttagttgtttggagtactttcgattccttgaattcatccttgttggtatgactacggatggtcgcgtcgtagatgaccaatgtgcaccgcgacctactgtgtgtaggcgcagctcgtaatatcaaacgccaggtccctgtgcaattcgtggtgtcttatgaactcagccacaaggtcggatacgttgatagtcattccgccactgaatgggattgctggttaggccggcgacccgtgctcatcatgcattcaaccatccagttgaagatgagcggttaggatccttggcatgatcctcagtctgccgggccgtagtagtccaggttcgaaacctaccaaggttacaaagcatgagatcaaacaagacgggttggaatcccccaagaattcactttgttcatccatcatcattgaccacccgtccgttcctcaccacagccatactgacgccttcttctcccgtcatccaagatggcatgcgctcggcgtccacaatgccaagttccgctagcttgcggatacccgatatgacgtccgttccggtgaacgtgagtgacagcgtagggccggcagaatcggtccgttcctccaccgcatcttgggtaccgcttggtggatcaagaaggcgggcgtcgagacggtcgagaggcgcagaggatagagtggtcccggatgtcccgaagcggaattgcacagtgagtttgcgtttcttggatgagcgttggtctgtttctggatctcgggttcggcgggaaag

SEQ ID NO: 6166 - DNA, 558 bp, Emericella nidulans
ctcacgcccgacgcattccaggaactggcgcaacgtgtcgacgttattgtccatgctgcggcctcagtcaacctggtctacccgtacgcagccctgcgcgctgcgaacgtgggtggcactcgcgaaatcctccgcctggcgagccaaggcggcgcgaccgtgcagtatgtgtcgaccaacggtgtcttgcccccttctggggagaaagggtggccggaggacacaatgttggacatgaaggacgtgccaacaaagctgctggatgggtacggacaaactaagtgggtagcagaacagcttgtccttgaggccggtcgtcggggtctccctgtaagggttcaccgcatcggcacagtcagcggtcacagtcagtcaggtgctgcaaatgcctgggatcttctcactgctttgatcgtggagtcgatcaaattgggcgaataccctgatgttgagggctggcgcgcggaaatgactccagtggactttgttagcaaagctattacccacctcgcgaatcaggctgcagtggaacagtctgttttccatatcggagaccct

SEQ ID NO: 6167 - DNA, 447 bp, Emericella nidulans
ttctgaatctggatacttggatacaggacaggagcttccacagagttgaccaaactgttcaacaaaagaaaatatttccagcctccctcaccaacttagagataatcgatggtcgctagtgttcagcgcctaataggcgtagtacaagcgggtctcgtcgttcgactggcgtatctttttattcaactgcacaagccagagcttcatcacccatgcgccaacaagacaagcgatgctaaacgctgcgctcgatgacatggcaatcgtataccggggcccatcggaggatggccataggtactagtttgaggggctgaagtcagcagacgcataccgaaagccagagctcgcagattcctggcagagaacttacaggggtccaaatgaacgagatgttagcaatggtgttgactatggcgagtgaggatgccttcttctcattcgtct

SEQ ID NO: 6168 - DNA, 484 bp, Emericella nidulans
ggtatttgaagaattgtctctgcagttccattacatcaatccacatgttccattcaggtacaggttcacttccagaatatcctgccctcaaacaatctcctcgccgtccgaaatactgtcgcaaagtccagtcccccgtctgctccaaacgtagcgcctacaagaatacttccgctcgcgtggccgatagtaatacctgtcggatccacggggtccgaacttgtcacatctgcaaccgtactccctggtaaccgagcagctgtcgccaatgccagcgccacagtgattggaacagccttgtggggctgaccgacggagagtgctcgaacgaccaggtcaacacgcgagtcatctttaggtatcgaaacaattccaatcttggggacactgccaggaactgcctcaggtgaccgagcgaggccatcttcgcgccagcctgacggcggatagagtctaagcgagccaggagacgggagtagcagtg

SEQ ID NO: 6169 - DNA, 600 bp, Emericella nidulans
gaggtcgtactcgtttatacagattccgcctacttgttttcgcttccttattctttggtttaggtctcttgaggcgcagaatcctgcctagggcgtataaccatggactgtcacccagtgtgatatattgctgctgcataggatttatgccgcaacatgtcttcatattcaaggaaacaacaaacattgaacatataaacagatgaaataatgaatggcggaaagaaatagcacggagatgaaatgggtacgcaaatcacgtaagctggcatgggataaagacagtttgcggcgtaggcaatacgtggttgaactatttagagtattcgatatctgggtcatctttagaggtgcccgagtaggtccacactcgacctcactataacaacagaagacacaagaggaactcttcgttgatgatggatgactttctaagaatttaatgtggcggttgacgatagcgatccaagagttaggtggatcagagtatcaacagagagaatgacgcacggtccggttattgactgcacggagccaaccgtgtcctttactagatgttaaaaatggcagacagtatccctcacgaggggcattactagt

SEQ ID NO: 6170 - DNA, 516 bp, Emericella nidulans
gcgtccaacccgtcggatccagagcctgatgcatcgcccgagtaccgacttctgggatcagagcaccaaagccactgggtgagaaacgaacgccctcgacgcccgtcgtctggacaggccgctacggtacaggtcctcaaacctcacagggactggtgaccaccttggtgcttcagttccctatatttcggacagtagacggcatctgagcagcgaaccaggactcgatagaccagaagacgagactcagactggggtgagcgaggcgtggatgtcccggcttgcaatcgatgtcgaagagcttgccagggcgattgaatgcccccgggagtctgagcatgagcaggggggcaatattgcagcaatagtgatactccggacgcccaactttcagacgcggacccaaactcaggaccagaatcaggaccaggagcagaaccagggccaaggcggatggacagcaaggccacctctcgctgcaacttggtatcagccttcgacgggtcagagcttcac

SEQ ID NO: 6171 - DNA, 475 bp, Emericella nidulans
cgatgctacggaggaagaggatgaggaagacgaagaggagagaggtgaagacgaggaccttgatcggtggaagacctagaccgtggtgctcaggcacggcgcttggtggatcctgatgcggctggtgatagtgatagtgacgaagaggggccaggaagtcaattacggggggatctagggctggggtaattgaaataagctcaaaatgttgagcggaaatgccatccatgttgaaaaatggcttgatgtgattgatgtacatacataatacgagtaaccctaccacatggacactgatgttgtaatgcgccgctaaatatgctccaaacagtaatatatcatcgccttgtgcaatgaggagcgccttctaacgccttctgaactcctgtaatccgtataatcatccgacgaggcccagcttcagccacgaacgcgggaaacgccaacggcatatctatcagtggtatctcaaata

SEQ ID NO: 6172 - DNA, 677 bp, Emericella nidulans
ggaaactctcacgcattttctggttatggttggcaccatttgccgttgccctaacatcgtcctcgtcgtgagaatggtcaacctcgacattgagtttatattccgcgtcaacgacgaaatcctcatcttcatatgatgtccaaatctcctgctcgttcaggataccctgagagagcgcggcactcttctggaacacaaagagtgcatcaaacaactgcttcgagtcaagatttccctcttgacgcagcgtattctgaataattctcagcggtgcatgctgatgtctttgtgcttcgacgccatccctttggagccgttgcgcaagagcgcagttactcataaatgtgggatcaagcgttattcgttgcgcgacagtgttgaataatggtcctaatgtacggtctgcctcagggtgaggcagtgttcggccggctaagacttgaccgaacacgacgtcacgggttccgagaaggtgcgcgtaggcctttgcgtaggaaagcagggagacagtttggattgtgacggacatggtcttgcaggattctgtgattgagtggagggctaggggattgcgctttttcgaggttagcatatttggagtgctgtcgagcttgggtagtggacagatctcaacaggtacatagtctctgaacctgtccagccagaaggcacaggat

SEQ ID NO: 6173 - DNA, 553 bp, Emericella nidulans
attaaaaaagaaaataactctgagaatggagtcaaagtcactataacgacaaataaaaggcaattaaccagcgtatgacttgaacgtagggagcttttctctggaggggaagtcaagaaagcagtcggagaaactaaaatcttcattcttctcactgttgaaactagcgctagatgaggaaaatgaccagaccgaatatgtctttgggtcgttcatttattgtctcattgagcgtactagcatcctccaggtaccctctaagctgtataaacaaggggacgctggcttgaggcttatgtcttcttcagatagcggattgcctaagaacgagtgaagcatgcagctgtacttacactttctacctgggacaactacctttttaattgtcgagattgccttgaggttggtcgtctttactccagttacactgtgacagtcaacatagataatgcacggtctcaaccatggtctcaacagactactcttacattccggggagaaaaaaaaacagagacaaaagaagagcacaggagtacaaatacttagttcagag

SEQ ID NO: 6174 - DNA, 535 bp, Emericella nidulans
ccatgccgtggtagtgctggcttggtacaacgccgaagtcctagacgaggaggcgcaagtaatggccaattgaggttaatatacgtcacgtgaaactattatacagcctgaagcattgctgactcagcttgttatgcgctgcagttcatcttccactactcccaacagcacgaatcaaactttggagatgaatcgatcctggactgtccctccatgagaggtccagaaatccagatacgagcaattgccctgggttgagatacttccttgggtagagactcatcgtctacagccatacggtccacatcagcctgatgcaggggtgcacataagactcaaggctgttttgagtccagcacacttcatctttgtaggattgggctggctggtatccttggctctcgtctctttactcacactcagtcagtgaactattaatcctatgagaagagggtcggactgccgtctatcctgttcgtgccctcgtaaccggcctttaaagccgctttcaattacggctgatgaatgcactctt

SEQ ID NO: 6175 - DNA, 750 bp, Emericella nidulans
cttgcaaagggcatcgattttctggatatcctcatcaaaggcgccattgaggaaccacgcggcttcaaaaagcgctagggtcagataaagatacgcaaggatgaccagcgatatgtttggtgctatgtccgggtctccgagagttgcaaggaactcctctgagagcgcttgcggccaccccataacggccgcatcctccatgtcagcctggagttcgatggatgtgcatttctcgtctctggaaaattgcgctagatagaggattctcatgtaaaccgactcgacgagatcaagcccatctttcagtccagaggggcgggattcgggtgagtcttcagctgacgaagacggcgttgacccttccaaggcctgtagacgagccaaagctctgtatgcaccctggcagaatctggaaatcctgggagagcatccacgaggtatgactgtagtggacatcttctcggggtacattttccagtcctcggtcgccccgggatactgcagcatctcccttaacggacccatcctcaaactcggccagcactgttcgacgacggcggtctagccacgaatgaggtatatccagtcgagccgcggttttctcagcggcggcagaggggatgtatgtgaatcattccagttcctcattcgtagcgacgcagaagcgtaaccaacgagccctaatgacccggagaaggcttcatcacaaaaggagtcagacaggccgaatagatggttcctaaacccgta

SEQ ID NO: 6176 - DNA, 448 bp, Emericella nidulans
ggggtgctggtttggggggtgctaactctggaggtgccaattttggaggcgccaacttcgggggttctggaattagggctactggctgtgaaggtgccggtcgtggaggtactggttgcaggggcgccggcgaagcgtcactaacggaaccgtggaataagtggtcggccatgggctcagcggcggcgttggaagcaacgagaccggagaagagcctatcaaggaagttgaactgtacgtactttcgctggccagtttggtcacagggttagttgtcgggaatggccgaggcagcgacgacgcgacaggggaggtcctgattatagttgtcgagtcgggtgcactttcgctaacagcggcagagctggttgacgtaggccacggcgtcaacgaagccgtagaagaaggaattaggggagtcgaagtgctcctcgctgtctctgtggag

SEQ ID NO: 6177 - DNA, 453 bp, Emericella nidulans
aggggcgttggttgcgtcggattgcgctattgtcccatagtataaaaaaaaaataaataaatagatagcgttcttcaaattgagagaagattaatcagaaactcatgattatctggtagaggttgaaatcgtgatggtcagtttagagacctgatatagctggtttgcactgtttgtcttggttcctaatttggtaatagctcagaggtactaggtattatgtacctggatatcaaagccgacggtgtctacttatatgataatgctacactcgtagtgtaagcagatataggtcgtactcgtacgctagaagaccctttgtttctttgaggctcgtgtttactgagcggcttttgtaccaaaccgccagatggttggctgctaagcaatccagcttactaatatgccactcggcgccaacggcattatcagcgctgtctgatgaaataatac

SEQ ID NO: 6178 - DNA, 417 bp, Emericella nidulans
tccgcgtctcggttgatgaccttgggatccctggcgtacggatgaacccacgcataccccgaggtttgtctacggggacgggtttttctgcggcggtgacccttatgtctattcgttgtcttccgccggggatattcgtggcgtgtgccgggtctgaatgcactgtggattgcgcgtttgacttttcccatgaattttgactcgcccgacgtaggcctgaaggcgagacaagcggtttggtgtttgtcgggagccttgccctggcggtgatgagttcgcctgcgctgcgagcaacaggctccctgatgccggaaggtttcggtaggtgacatctgaggcccgtcatgcttcaccatagtacgtgttatagtgggtgtgataatgaatacatcagtcgcccttgagtgcggtttgtgg

SEQ ID NO: 6179 - DNA, 846 bp, Emericella nidulans
tagaattctacttcagcgcgccgacgacatggaaagatgttcgcttgattgaggtcatacgcaggctgaatgccgaggcaatcaaggccggggctcctagaccactgggcttgtattggactcacagaggctgaggcggcagcggtatatgcctgtcgtgagtattatcaggttggttggcttcagcattgacgcaaaactggttgagttgcgtttgacatacccagaccggtgattctatcctggtttgcgactcgggtggagggactactgtgagattgctcctatggattcttatgttggtatgtactctaaccgggttgtttgacccgaacttactaatatctttcctacgaccttcgggagatcctcaacttttgttatacacccctgagtcgtccttgattttgccctgggcttttttcctcctttttcgtttcattttttaactttttctacttcccaatttaccactacccacctctgtttttttatcatcaggcctttttcccacttcctctctcttaccctcttcctttttattttgattctcttctttccattcaccctctatcctcattaactaattctctttccttccttttcctctattactccccctcttctcacccttaatccctcacataactgttttttattctcttttcattgcaatattttcttcccccctccatccctcctttttattctattgctcttttttatcccctcctatatcttctcctccctttatcaatcttatatttttttccctaattatttctttttcacttcttaccttatttctttttttcgtatcatctctcttcttttttctccttaccc

SEQ ID NO: 6180 - DNA, 528 bp, Emericella nidulans
  unsure (1)..(528): unsure at all n locations
cgtctatcggcattgcaacggaccgtgaaagtttcctgtttaatcagttcaaccgggcgtcacgcaggcatcagattggctcaagactcatcgaaaacccagtcgaattgcacgtcgaaaggagaaagacgtagccaaggatttgaataaagaagagcggaagaaacaagacagcgacgaggtcgacgacgagccgttgttcgtcgacaatctgctggacatcggccaggagacggacctgctcgctgaagcgaaggatatccgtgacgagctgaacatgatccgcatggtcctgcactaccagaaaaacgtccttgacgacttccatgaagttgtgggagagatctatctcagccagggccaaagccagagagatatcaagaagcggtttggagagcagcagcgcacgatcgatatacacctgaaggacattgaccgcatggacaagcaagcggcggantctactcgtccatcacagaccttctcgacctgaagcagaaacatgccaacgcgttcgaggcgcgcttt

SEQ ID NO: 6181 - DNA, 592 bp, Emericella nidulans
accctgagcggtggtgggggcagtcgtgccatctcctgaggatttttctctgccacgtctgccgtgcgctgcgcgtggggggtagatttctcctcgggtagcgcgctaggcgtaatatcctcagcctcttcggtgatgttggcgactaattcgaagtcaccgctctgctcgagcaccaggcgagctttggccatgcagttaccagccgctcgcacgcaatcggttgccgcatcaaccaggcgcttgccctcgtccggcatgaacaccagctcatcgtcgggcgagttagcgggtcgaaaggcatcgcgagcagcaaacactagttccgacaaccgttcatacatggtatctttggcctgttccagcggagtgctgccctgcgcatcatgttcgcagacggcttcaatcaccgtcagcagcgcacggcaagagcgcactgcctgctcggtcgtgataactagttcagttgaagagcgagattgtagatgcagaccaataaaggagcctaagacccccaggaacgcatcgtacgtggccgtaagaacgctcgaggcgagattttgttttcggcggtggccgcggccggccactg

SEQ ID NO: 6182 - DNA, 379 bp, Emericella nidulans
actagacatgatggaaagcagtttatagcctccacataaaagagtcagcaaggtgtgaggaggagtgtgagaaggcaagaggcgctgactgtgacgtgggaaaaaagtcgggaacgctctcggcggttatatcatgccaagccgctacccccgatcagtatgtccgaccccgaccccgaaccccggacttccagtatagcccaatctctggcattcccatttcacctcacttcatctatatctaaggtctaacgtcggcatgtaaatttgtatcttatatttggtcgctatatgggcattatatagaggtcgttttgacaggtagtggactgggttgagccacggatttgctactctcttacatcctgacccttatgaa

SEQ ID NO: 6183 - DNA, 889 bp, Emericella nidulans
taggcttcagtagccccatgagaatcagacagcttctggccagggctctctccctctccgctcaccggccccgggaaaaaaggagctttaactaactgagcgcaaaacaagctactgatttgggatagaactcgtcgattactggaagctacgtggtaccccagtacggataactcagtatagcggtccgtttcggagtactaggggttagatttgtagtctcgcacagttccccgtgcgtagctagagctccggcttgtcttggagggggggctaagtcaagaggcttcgccgaggatctcatgatgatctcaaggccacgcaggtttgcgtgagctctgacggccttgggaacgggtggcgttgagttgccatttccgatcagtttttatccgcaactgagtcctgtccaacttgcgctatcatcaaagatgaagagctgcgagtgggtaatatcgagccgtagttggcccggccgggagcacaatacgcctttgacgttgttgtacgcctatactgctgtgctatcaggctcaaacctgtctgcggtaggtaatcgcacatatgcacggagtataaatcagcaggtatatactgctcaaggacatggtttcagcttattgcctagctgtcgtacctgaagagggccaacccgccatcattattggcccggcaggagtagaggctataagaccctgagatatattaggaacccattggtttaccaacgacggccggtacgtaggggcaactgaccgcaatccatgtcagaccgggctgacagctgctgatcagctggaacagaagttgcctatctgtcaattcagctgccattattattgaaacaatggcatgcaaacggccaggttttgactagcttgaggcaagg

SEQ ID NO: 6184 - DNA, 453 bp, Emericella nidulans
tcagccccgcgatcccgatatctgccactcctacaacactcacaagcggtgtcaacgtcgaatgggagttacggttcgaattcgtgacaacaaacacccggggtcagctgggtgccgggccttcaggtgtgcgactgctagagacggtatctgaggatgaacggggcgctactatgtcggctctggagcatgtaggctgcgagtcgttcgaggttgcaattcccatcacaatatatggagaaactgtgcgagagcgcttgcctgaggagaacgaggggtaccctatataaattttaaatgtcttgccgtatgaatcatgaccataagttgtagattataaagtataaggagtatagtagacaagcttggatcctgattgtgtgctccttgatcgccggggcaacgagcgggccatggcccgatcgtgggggtgatcatgcaataagtcgatat

SEQ ID NO: 6185 - DNA, 546 bp, Emericella nidulans
agttctgtggtaattggttgaagccctggtggaacagcttagatgtgcatttagccgccgttggcgatggtactaatgtgctattggacaatctgtacctctcatgggctgtatcggccatggaaacaaaccaaggacctcgcggtgatgatatgtgttctggatttgggaacaatcagttattggcactagggctggctctggtggaactgccccttgggacatccctgcagcagttgttggccctgcaagaggagaatcaagatacgctggtggcaaaactcaagtctgcatcatggcttgtcaaattggtgtacatggagagtgggacaaactatgcagatgcagtggatagctgcttatattggtctgctttgtgtgtcgagagaagtttcgaggagccggtcatctacagtattatttcatttctccgttgctgattgacctggttaatttcgagggtatagcaaagtatcaatagactagccgtcaaggaaataaaggtggaaggacaggttgtctcaggttggtgacaacatacaggca

SEQ ID NO: 6186 - DNA, 820 bp, Emericella nidulans
gtaatgcacggcacgcagtatttcggaccgggtggcttgtttcttcgccgagaacgtaactgcgcaggtagtcaagaagttccgagaaatggacccgaacttccagatggaagcgttcctgcgggagatgcgtgaatacatccttcccgaggtgctggatgcttacgttaagggagatatcgaaacactcaagctttggctctcagacgctcagttccacgtttatgaagctctcacaaaacagatcaccacagcaggtctgaagtcggatggtcgtatccttgatatccgcggagttgatgtcatgagcgcccgtatgctggaccccggtgatatccccgttttcgtggttatgtgtcgcacgcaagaagtccatgtttacagaaacgtcaaaacaaatgagctcgccgctgggatggaggacaaggttcagttggttaactatgtcatgggtctcacccgaatccctgaagatgtgaacaaccccgagaccaagggctggagattgatcgagctccagaaggctgctcgggattacatctaaacgaacagcgttgattacttctatcgcgaacattattgccgcttcctccgaactttgatgacatactaccacagcctttttttccggactccctcccattactccacttctcgaatgtctgatatatccgactgtactatattacctattcgaatagaggccagttggactggcgcttcatgttatgttttagtaaccgttcggtatgggtatctttccatgattcttgattatatgccagttgtggaaacgtgtattctatatatcttaatatgt

SEQ ID NO: 6187 - DNA, 542 bp, Emericella nidulans
agctaaaaacaaatttagggcgacgacctcggacacaccgaccttcaggaggacctcgagttccacccatccagtgagctcagctcctcataccatcactaccaagtaaactaacaaaaccctattagacttcgaaaacgaccaacgcaacgccaaatcccatcccgacaatgccgcctttctaggcagcggcggagggtcatcctcccgccgcaacaggtctccaggaggcacaccaaccaagcacgcatggtggtcaatccactactacgagcaatatttcgacgtggacaccaatgaggtcctccgccgctgcgtggcctctgtctacccgcgtacaacatttctcgacgtcctcgaaggcaatgcagacctctacggccctttctggatcgcaacaacggttatcgtgatcctctttcttacaggcacaatttcacaatggctctcgaacaacgacaaggagcacttcaagtacgacttcacgctgctctctggggcggtaggctatgtctacggatacacatttgccttgccattgc

SEQ ID NO: 6188 - DNA, 840 bp, Emericella nidulans
ccaaagggggggggggggggggtttttttatttcttttctccccccccccccggggtttttttttgggagaaataataaaagagggggtttttttttttttttataaaaaggccctttcttggaaatataatggggggaagagaaataacaaaggccccttttttaaaaattggcccccccccggggggaaaggggaataagggttccaaacccccccaaaccttttagatttttacccgttaaaaccctgtccccaaaaccttgaagcctcaatcctcccacggaatggaatccttgtatccagcggtgggagaatgcttggcattctctaagggtttagcgtggtttaaacttgtagcaatagcgcttcacaggaacaggatatttggtaaatatcctagatgctacgattcttgtagacatttataggccccctgcggtcgcagaatgagaactacttccgccaagtttagatgacaaaggacattgatctgcgactgcagttgaccaacatagttcatagtacataggcaacgtgactgccagatgctaaagaagctgctgatctaaccaacgaagtcaggtgccgtttattaccaagaaagaatccagaatcttttcctcttctggatgctgctggtcatggcgtatgagataacttgcatctgaaggtgcaagttcttccggctcgtcactgggctcgagcatagcaggcatccgcatatgctgtttgttgtgacttgaaaatgcgctgctacatagtcagcccagctatgcatttggtcatgtaatactgacggcctcgaagccaatttgcctaacgacggcaacggaatgtg

SEQ ID NO: 6189 - DNA, 484 bp, Emericella nidulans
acgaagtacttccagaaaaagcagcagtccgaaagtccgccacctaaacgagctccttcaccccctcacgaatatgtgttggccgataatccagacattgccgtaagttttactatttctctaatggtttcttagtcctaggatcgtttacacaacgcgtccgtgggctgtttgcggacgttaagctgacagtcgcaatgcttagttcattgtaatgttccgcgcgcgtttccacgaagtattcccacgatcaacaccacacttcgggccacaggacatcgaacgaggcgtgtcggaatctcccccaggtgaccacattgaaagacttttgtgtgcattgcttggactggtattgaataggaagaaggacgtggagtaagctaccatatctgtttcctgccatacctctgggccgatggggaagctaccaagttacataccattatgtctctagtcatgatgctaactttgcttgcgcgatgtg

SEQ ID NO: 6190 - DNA, 504 bp, Emericella nidulans
  unsure (1)..(504): unsure at all n locations
tcacgtcctcagccaacgcaaagtcagagtttcaatccccgtctgaaatcacagacatatcactactttggtcttcgtttgtcgttgctttctgggctgcttgctgagctgcttgctgcaaggactcagacgatttgcctccgcatttatgtgcttatctacttcccctgttcggtgtcgtgacagcgtcatggaacgcagactcatacatcgagacacagacgcatacatcatctccacaggcagatttgtcacgctgaccagattcctaggtgggccgatctcagttccctcgtatcagcctgaagatcggttccgttttggaatccggacagagaacacccatttttaaataagggtcgcagatgcttgccgcgcagagcttcgtcagaagaatccaggccaagacggagaagttgtgggcctgaattgcggcacagtcaaggcgcgcaagatngcttgtagatcacaagtcacaatccacccccactgccaccagaaggg

SEQ ID NO: 6191 - DNA, 891 bp, Emericella nidulans
aatgtaaagaaagaattataatagaatagtaaaaggtaaataatgaatatgaaagttgaagaaagataaataggagaaaaagagagaagtttataaagaagtagtttacttatagaaaggtaagagtatttgaaaaataattaaatgataagtacagacgtggagaaaattaatagggaaaattaaagaggaataacaatagagaacttagaaagatatgaacttaaaattactaaataccaaaaattgagaggaaacaaaaaatttcgcaagaagatttcaaataaaaactaatcaatcaaattatttttatattataaaatgtacaaagtcagaggttggaaaataagtggatcggaaaccaaacaatccaaaaaccggtggatttgaggacaaaaggtatttcaaaatcaaatcccgggctctccacaaaagacataaacaaaaccattctcctcatcgaacggtcatgaatcataggatccatgggatttctatatggatcaatcgtacctaatgcttgtgctagaaaagagaaaagcaacgcataattctcaagcgtatacgtaatacctcaaccgctcgtcggggccatcctctcatttaccctaacactcgggttaggctagatacgactgagtatttaacaaaacagaaacgctggcgagtcagatagatgacccttagaatgagagtgaccactactgcattttcttggcgttcggattcgggttgttgttatccccgagtccgacctcgaaacgtgcactgtgactatgcagagcaggcggacaggcgggagacgcgggtactggtgccctgcttgaagtagacaggttataccgtcctaggaatatgtgctcaattctcttccgagacaagactcaagat

SEQ ID NO: 6192 - DNA, 462 bp, Emericella nidulans
tagccagaacgccggtaccccctccactagcaacaccaccaatggcgagggcaacaccgtttccggctccggctcttcgagcggctcgtccgaccctaccgacgacgccgctgctggcctccacatcccaagcatgaccatggcccccgtctttgttggtctggtgaccgtcctgtcgagtctcgtcggcgctggtgttgtctttttctaaattgatagaagctagtttgtcttatcgcatttatttctctcggagttcttcttttctgacaggccggatggtattgtattgattttgcccggaccatcgtaccctcacaaggccaccacagttgtacagttggatggtacctttgttagccacttttagtgcctgagtatagactcgtaataaatgcctcatgttcattcagacttgaaccgcagccatcctgggattttgttataacggcagaatagaat

SEQ ID NO: 6193 - DNA, 504 bp, Emericella nidulans
tgttgattaattggatttgttgttaaatagactgtactagtctccaacattttttgttttttgtcttttaactgagcaatattgaaaacagtatttagaggtatgtccaggattgagaaaagaattagctagattcagctatctataaagcatgccaatagacctacaggtgtctttaaaaagaaatttgacattgctttggagaaaaaaaatcactaatggtaaatgatgattctataatagttttatttctaaataatagatatatttacgcatattaagttttattctatgtcaccaattttttagtgtgtgaatcatattttgttagttttttagaaagtctttgaggaacgtatctggcaggtcttttgctttttatctacctaacctatgggtactctttctttcctctgacctgattcattagtactctaagtctgtgggcttgcagaactgttaagattaacaaatatgaactgcatgcaaagtgtatgattgatg

SEQ ID NO: 6194 - DNA, 629 bp, Emericella nidulans
gcgcacaaccataagcgctttgcgtgtggactcgggcccagccgcgtatgggtaaaagtatgccgtggcttggtcaattgggagacttcgatggcatccgctttatgaagcgatatggcgtgttgctgggccgtggtacgatcaatagccacgtagcttgtccattttccaggtacggaccatctcagcccgaggtgctgtgcttcctgctcaagaacctttccaaatcctgttggattggaggtctggagggttggattgagcgaatgcagccagctttgtccggtttcatagtcgttcatcaatgctttcgccgcaagatggtgaatggcagattgttcagctaccgcctgaattggcagccttgctgtgagcttctctcccttccctgttgtcgcggttaaactgataaatttgggcaacgagtctaatccactctccagcatatagtagagcgtgaaatgtgaggaggcattcaggacagggatatggtgcggaacccgaacctactctgggcgctgcactcgtatacccggcaatctgccgctcagatgtcttcacggtaggatcctggccaagatctacattgcactgaaggcgagatggtgcaacgctgcttcaacatttgt

SEQ ID NO: 6195 - DNA, 528 bp, Emericella nidulans
ctggttcacgtacccaccaaagtcgcaatgtggacccatacaacccctctgccggattgggcttataagcaagccgagattaacggtaacaaaaacgtcttgcagagcagcaacatttggtatgtggaggctattgagtctttagaagaggatagccctcgtctcaagaaggaagagcgcaaggtcaagcatttgccgttctggaggaagtacattgagcttcagcgtgccatgttcttccacaacaacgccctcaccagcagccacccatacgcgagcgagccgttccagtggccgttccttctccgcggtgtcagcttctggacaaagagtgacacccgcgagcagatctacttcctgggtaaccctgttggatggtggatctccagcagtcttttagctgtgttcgccggtgtcatcggcgctgaccagctctctctccgccgcggtgtcgatgctgtcgaagaaagtgagtctatcccatatacttcacttactgtaacgctaaccgtcctagtttggggtcgg

SEQ ID NO: 6196 - DNA, 391 bp, Emericella nidulans
cacgctggcgatggtgggaagggaggtgagtgccgcaagaaggtgacatcccaggctacccgtggcaccagtcaccaggacgcagcagcccttgggttcttgatgtgccagaggagcagaaggagacacccctgttgcagctccaaagccagcggtcatctcctgcacgtacctatcgacgactgcttgtcgcgctgcacagtcagcggaggcactttctagaggtcggggaatgtgaagtctttcatacctcccgcctgatgcgaacgcgatgatgagcttctcgagcttgttttccggacgtacgccatccgttcagtcgacgtggccgtatccaacagcctgcaagtccttcgcccaccgggactcgtgagtgacggcgtgggtgcgg

SEQ ID NO: 6197 - DNA, 708 bp, Emericella nidulans
cagagaaggcttcggattcttcagtggagtactcagtttggcgctgcaacatagaatcaatagacttctcatttagctcttctattggagtcttcctgtcctgaagatcgccgtgcagaattctactgtcattcttagatcgaagggatatatccacatgattagtttcaggctcatccggagcagtaagtctctctggctttagaacgaggctcccctccgtcgcggactcatcaaatgaatgcaggtcacgtggatgcacttcaatagactgcaggggatcgacttcaccggagactgtcactcgctcgtgtggaaaatacactgcagaagagatctgctcgtcttcctcatcatcgagaggacctgaaccgacatggggttcttctgtatccgaaaagggagagcgtggatggaaggctttgcttctttctgagtactgagtagggatacttctcgagaaagacgtcccccttgccccgccgggagtaaggtgaaagttccgaatttcttcaagaaggctccgcggcaaccttttctgctcagatttagcgggaacatgctccgctgtataatcctcttgagagtcgccacccgcgaacggcttgatcattgggatattagcaagcgaaagctgagataaacgtttcgaaccctgaacctttggtcgcttgaacctgtccgcttatattggtcgtcccgagagtg

SEQ ID NO: 6198 - DNA, 691 bp, Emericella nidulans
gcgtctcttccaatgctagggcctacatccaacagaagtgattagtatcgagtttcgtatacagatgacaaccacgaagagaaaaaggcatgaagggttcaagaacgagtagactcaccagagcagtcctagtcggaatataaacctgcaagtaattcctcctcccattccattccatatcggttgtaaagaatctagtcccctgatcgatccttcccaagcccccaaacgcctggtcatcagtgtcaagcacaacccgataagtcccagcttgttctacaccgaccctataatcggtaaaactctccgtaggatggaaattgaaaatccatagcaaatccgcccgctcaaagacaagcactttatctccttcgtgcttgagagaaatataagcctggggcgcatggagccagccgtacttggattctgtcaactgcatggcgcggtcgaactcgttaaggaatctgtagcgtagaaggtgatcttcggtcaggtttagttggcgacgtgcgtaccagaaggagttgttgttgccggcgcggggaaagtcgagccattcggggtgcccgaattcgttaccttcgaaattgaggtagccctccccaccaagggcgtgtgtgacaagccgaaaaattttgtggagtaccatgcagcgttcgatgacgggggtgaactctgtgaggatgttcat

SEQ ID NO: 6199 - DNA, 803 bp, Emericella nidulans
gttcaggtcggtgccacaaaggaatgtgcggcttcgtcggctaagctgatagcctttatgtttatagttgagagtgagtgagaaatccggggtatccgggttatcgaaggtatcgaaggaaaccccacgctcgtacgttcttgtaacggagtttattaactaggcacttaaacggaattgggcaacttactggggcggtggaggggagtaacctcgcccatgaaccttctgatcccttccatggacctcagactgaagattcttctggcccgttgtgctactagggcgcgaaggaggcgactcgacctgttcgatgttgaactggattgaccttctatgaggattatcggtcatgctcatgctcccggagcgggataattccgagacactggcggtccgctcgtgccctggtagtatagagccatcttccgggtcaggcgacgtatacggggatatggaggccatattgtatgcaatgttgtgttgggtagatggttaggcaggaagagcgtagcgaatgtggtggcagatgccggctctggaagtcaagggagtgattcgatcacgtagttcagacaatgattggcggctcaaccgccatgaagcttctgaagttcttctgccggtcgtacgatgcaggagctgcagatcatggtttgcgataacgcacgagtcggacaagagcttcgggtagatgcagtgtcatgcccctgaagggttaagggcggagtcaatgaaggaaagaacgctttaggctcaagatcgtgagagaagattgtttccagctttcatatagccaaata

SEQ ID NO: 6200 - DNA, 616 bp, Emericella nidulans
ccaacttatatccacgcccggccagctactctgccactagaatttgcctggcctgagagggaagcgatcgtggactcacttgcggtgattgctaagcttcgatggccgtaagtttctcgaactcttctgaaggcgacgctaacagttgcagggcgtttgtctcgcctatacttcacccggccagtcccaatgtcttgcctacgggactccagttcatctcgcccataactggaccagcacatccatcaatccccaatttatcatgtgccctgctccatcccagtagcccaagctgtgccacagctttcacgcaccacctcctcacctctgtatccgccttggggcagttcttcacattggtagcattcgcgcggtcggcgctcgatgtaaaaggctggctcactcagccgatcaccacgataaacgaactctcaagacatatcatcgcaagcaccgcggtcgtcgcagcagcggtcggatcggcctggggaagcttgtgcctgtgtaatgcagtgctgccccggtcagtatttccgacgcagcggatcaaccttagcggcgcacttgcgggaataccgttcgccttccttgcaaaggaaaaaatagccacaacgtg

SEQ ID NO: 6201 - DNA, 635 bp, Emericella nidulans
acgacagaccccggagcactgtcaatacatggccacaacatacaagacgtctgttgtaatacctatcccaattagacccagcggaagctataggtcacgagtggcgatacgaagcctggcagaagaaaacgacctgaataatcccgaccatgtgcctaccattacagacactaagaaatcatgtccatagaacgaatcccatttacgacctacaatggacaagtgcacctttcaatgaagagaccttctaaaacttccagctatctgagcataaatcaacctatacaaaaaatgctaattcacatcaggcacatacatgcacttgaacggacagcaagggtgaagagcttttagactgaaataagagaaacgcatatcctttatagtatacccgatggaacgctagcctacggctggagctcccacacacaggcggagctgaaccgatgctaagggctagtaatgctcatgatgctggaacgctgttttaaactgggggtatacatatgcgtaccccgatgtgcctgacttggctctaaatgcctaagcaattcactgggctggtccaaccatggggttgtgtacttgtgtcgcagtactggctgagtgctttcacacgaaagggatacttcaga

SEQ ID NO: 6202 - DNA, 480 bp, Emericella nidulans
ttcatggcctgcgctttatctatatccttcggctcgaaatattccgcagaaggttctgcgcaaggccattgtcgaatcagcagtttcgccagttcaacaccctccttctcacagttcgcttcgtagccaagcgcggagtccttgtaaacccgatgtctccttgaaatcataggtctggcagggtaagacatcctgataagcggtagcagcgaatcaacagtaggcttctcgtccctagcgaatctaacaaaagaaggaaagtgaggaaactgcaggccgcttctaaactctggaaacacgaaaaaggatgcaataactcgcagtgccgtcatatttaccccatcctgaaacgctatcacgcccagtttgaagataagattgtgaacgtcttctttcctcgactttctgctcatgttaacgagacctcacactcttcggcaacgtttagcgagagatgatcgctaatgttgtagtaagtac

SEQ ID NO: 6203 - DNA, 1021 bp, Emericella nidulans
cggcgtttttttcatggaaatggcattattcttggatggagctttttcggagtatttctcttcccgattattgcttcaaaatcttttcaaaacagaatttgtctttttaagaactcagtagaacgttagtctcaatgttatcttgtccattctcggtttggggtcggtgctggtaaacaacagtcttaaaaatttgttgtccgcggtaaaccgagtaatcttgttcgtgtctttctgtccattttcacttagaaagaccctttcttggccgctcattcaatatgctcttctctgcgattttgttgtctctgacttttggccgcgtcttcgcgaatgctggggacgacgatgatttgatgtctttcgttacggtatgaaattgcggtcgtgtcagcgcatcagctgctaacttcttccagctcccgaaagtacgagcattaaagttcgaaatttcctaccacgaccgtcaggctgtagccccggggtactggttcgttgcaccctacggaatcattgagccggaagttcctaccaagcaatggatgccataccaagtaggaccgtacatctatgatggagacggagtatgtaccaacggtccaaggcctaagtctaagctgatgttgtaggttcttgtctgggccggatcacccatgtttgataaccggaatactttcgacttcaaagcggctaacaacattgacggtgaatctcatctttcatttatcttgcagcatcagtaccacgatgacggtacggacaagggctacgggtacattttggaccagcactacgagcaggagtataaagttggtgttgttaacgacctaagtgcgttcaatatgcacgaatttaatgttctcgatggaggaaagactgctcttgcttgcttgtacaagtccgagtactcggatttatccgcacttggtcgcctcaggattttagctggatcattgccggtgggctgcttgagcttgatacagagacgggtgaggttttgtttgaatggagctctttgaat

SEQ ID NO: 6204 - DNA, 456 bp, Emericella nidulans
cctgtgtagtaaccattctcttagccagtccgttgacctgtccgttgagctgcttcttgtgttggggctagggctgcttgcagctggtgaagggcctttcatgttttcaggatttgtctccgggcttcttgagctttccagcagcgtaccagattttttctccagaccccgaagcctcccctctaggctgttcggacgtttttccaaagagtctggattcttcgcatcggggctttcgataatcttaccgggtctgtcaagattcccttccagactctcagaaccttcttccgtacggtcgagtctgtttgttggatctctagtgctctgatccacactgtcatattcccattcggggtcctcgaggctcttctcgagaaccctagcactcttccccaagctctcaggattcttcgcatctgaactgccaggattctcttctagactatcaggatg

SEQ ID NO: 6205 - DNA, 489 bp, Emericella nidulans
gttggcagaaattccacatcttcgcccaccgtttgggaaagcgccgattccagcgcgattgacccgctgtcacaagtaaggtcgtcccgtttttaagtcttctgcagtatgtgagcactagtggctaaccgcgttggcttgcggccataacagcacatcatcaaacgcaccaacacccaaaaatcgatcccgctgaaattattgggaagagcgtcttacgaggctgaagctggcggttcggacagatatagccctgtcgaacagggtcccaaccgtggcgaccaagcgccgcagagacccctcaaagagaagaagtatgtccttcttgtttcccctgaagttgggcctgagtacgcgcatcggatttcggttacgttcatctccgagctgcgcatataatatttccataatgcaccccgctttgtttcatgctgcgctttgggccctcgtcttgtaaagactgtttaaactgacaacaacataggaaag

SEQ ID NO: 6206 - DNA, 239 bp, Emericella nidulans
  unsure (1)..(239): unsure at all n locations
atcgcctttttctgttttggtctaggagaattagctacactccgatggatatggatagcggggggttgtttcttttaagnaactagaagaatttttccaaaccacatgccgagctgaacatccatgtttgcatagcgcaggtaaggaccaaaatatacttcgttagtcggcgctaccttgtacaattccacgccactacttgggggggggccactaaaccccgcgacagctggtgactg

SEQ ID NO: 6207 - DNA, 805 bp, Emericella nidulans
  unsure (1)..(805): unsure at all n locations
attacgcgcctccaataggcactaacttaactacaaaggcaacaaggatgcgaatgcctgattcgcgcaattgctgaaacaatatggaataatgattaatagattggcagcctttaaaagaggggcctagaggacgtagccatggagagaagggtgtttctctatacttggtcaaaaaatatataccaacagaagctgtacgtacgtacgtaccaaaacagtgacgcctttccacacgaacccagcagaccaagcaactcgacaacttgaatagtatcagaaaaaacaccattacattcaactcgaatcgaaaacaagcacaacgcgaccaatcacccaaaaaagcaaacaaaacccaaaccagtccaagcccaagcgagaagcaagctgaactcagccgatctagactaccaaaactacctgaatttgcaagatccatacattgcatgacgcgtatagataccacccgcgccagagccagaccacaacaattagcaaaacgccagtgtgatgactccaattgacaaggtgaatctgacataaaaccaaacgggaaccaaaactcgacgtacccccttgtaactgtagcacgctgatgtacaccgctcaccctttttgaagaaaggctgatcccggggcaactgtctacctactcaggatagcctcataccatgtttccgacaactcccatagcggaaccaggntaggactcccgggtacttggaacgggatccgacgcctttgacccgtttgaagcggcgtggctgggaaaacataatttccagaagtggaaaaccgtgccgca

SEQ ID NO: 6208 - DNA, 566 bp, Emericella nidulans
aatgtgctcgcatgatgtactatatgagttgcggagggaggaggctctgcacgggaaaccgaaagagggtaaccttctgactcgtctggtgaagtacctgatcgaacagcgccacttcctccccatcttcccaccttcatcaagagatgcgcttccaaggccaggatttgaaggcgggctagcgacgggtgccgcgctggacgtaagctactccaagctcggtgaatggtggaacgtacggccagatatattgatagtccctagcatgctgccgccgtttgtcaaggtatgatcctcaattaaatctcagaggtgatggtcgctaatgactggcaggtggttgacagtatcctcacaattaaccctggcacgctctccaagcgacgagcagcgggaacctttgcgcagatggccatccatccgcgcgtcgtgagcgaggaagaacgggaacaaaagaacataagccacaagcgtatcgaacggacaagggtagatataatctggatatgaaagatcgtattgtaaatttaggaagaggcgtcacgtgtaataatgatatgataatg

SEQ ID NO: 6209 - DNA, 454 bp, Emericella nidulans
caattgtcttctgagctgcatcatcagcaatatcaaggaatacgactctgctgccctgtagcgcaaagagcagcacagttgcggcgccgatgccgcttgcgccgcccgttacgatcacagttttgtcgtacaggctagggtagatcgcgggcggcgtggacggcatacttgactaggcttgttatgggtctgaagtgtgtgtttgagaatggatcgtgtagcgaaaagacatgatgatggcacgctttttatatagccggggcggggttgatatcggagattctccgtgtgattcagcatacatcacacattgggcgaggcagcaatgatacgtaggcaaattgattgcagcctctattatcgctgctatatacctccttcatcttattcacatttaattatctctatcaacacgcattagaccattatcggcaagactcattcagtaatggat

SEQ ID NO: 6210 - DNA, 684 bp, Emericella nidulans
  unsure (1)..(684): unsure at all n locations
ttcatggactggacatttctccaaggattcctgccatcgaggccgaaatcgacctctcgaacttccccaaaggaaaagtcgctaccgttggccttggcagagttatactggtacgccgtgaggaagagcgagcactcagtgatgttgatgcccagcgattccaagcctgaggaacggtagatgccgaagcgggcgagttccgggaacgtctccggcaggtcagatattcctaaatagtctaacagggacgtggcattcatgtagtagttcgtaccggaggcagtaaagacatactggtacgataggcccaatccgccaggtgtggtcatgttgcactgtcctccgacgccctctcgctcgctgcaggtggcagtgcgcagagtctcctgcgtgacgttttgacaggagctcttgaacccgagcgagacatatgaatctggccatctacaggcccctggacagctgaatttcgtggccgtggtgatcccgtaaagaccctgtacgatggcggactgcattccgggatcctgtgggatgctntctgagaatccgtcagctggtgatgcttataatctgagtactgattagcaataaggatgtcttaccaacacgagcaagtcgcattcttgttcaagattccggctgagtcgtgcgcgattcaaaatggcgctgacgtggttttca

SEQ ID NO: 6211 - DNA, 443 bp, Emericella nidulans
cctcagccccgcttgggtgcagacttttgtcatgacattccttggcgaatggggtgaccgtagccaaatcgcgaccatcgccatggctgccgggcaagattattggttcgtaaccattggcgcgattactggacatggtctttgtactgcagcagcagtcattgggggcagtgctattgctggtaaagtcagcatgcgtgtcggtatgtatctccgttcgaacccttgttcaaacgagaaggtgcggctaacttatcgaaagtgacacttggcggcgctgcagcctttttggttttcggttgcatttatctgctggaggcgttgttctagaatcggtcatcttggtcaactgtaccttgtcgagtagatctatcgatgtagagtagggaataaaactcgtggcagggatatctccgttcacttgattgccatgtatggtttga

SEQ ID NO: 6212 - DNA, 525 bp, Emericella nidulans
ccctgtccttgtttggtaaagccggcaccgccgaagagcaggactgccgtctgcgcacactcgttcaacaccattgccccctttgccttggccattgccgtgatcccaccaagctgacggtccgcctcttccttgggcaggttcgtcagttggtagagtagctgctcgacaaacgcccacatcgtctcaagctccgcgcctgcttttgccagccggtgtcgcaccacaggctggtccatgagcgtcttcccaaacgcctcgcgcttgaggcagtaagaaaatgcagtcgagagcgcaacacgtgcttgccgtgtgaccccaacggcgatggtgagccgctcgtggttgaagttgttcatgatcatcttcatgccgtcgccttcaaggccgatcaggttctccacagggaccttgacctcgtcgagctcgatataggtggtgcaccggtaatctgtccagagactttcaggcgctgcatcgtcacgccgggggtagtttttcagtggaacgacgagcaaaggagag

SEQ ID NO: 6213 - DNA, 237 bp, Emericella nidulans
aatcctagcttggtttggattactaactttactactacagatgggcatggcagcacccggtgggtcttcttgttctctctgtacactctcctagcaggaacgctctgacctcccttcactggatgaactatgtttatgctgcaaagtagcctcaacaaaaaactgactgtcggtcaaagtccagagctactggtgagcacaaagacgctactatgaaactgacctagaggataccgt

SEQ ID NO: 6214 - DNA, 543 bp, Emericella nidulans
agatttccaagtctaacgtggtcgatgacatggttgctgccaaccatattctgtacgagaaggatgagcaccctgaccactgcgttgtgatcaagtacatgcctggagttggtgacaacaagcgtgctttggacgagtactacgccgagatcttcatgggcggccaccagaccatcagcttgttcaacatctgcgaggattcgcttctcgcctctcctttgatcatcgacttggttgtgcttgccgagatgatgacccgcatcacctggaaggctgatgatgctgccgagtacaagggattccacagtgttctcagcgttctcagctacatgctcaaggctcccttgacccctcctggtactccggatgtcaactctttggcaaagcagcgcagcgctttgaccaacatcttccgcgcctgcgttggattgcagcccgagaatgacatgactcttgagcacaagctgttctagaatatcacccttctctgaaggataaacccacacaagtgatcagtcaaccgaggccactctttaatggatc

SEQ ID NO: 6215 - DNA, 628 bp, Emericella nidulans
ctcctccaaccccacatggtcggatgtcattgcggcacccgagtcgtcgccctccttgacgtctgttttctccccctcattcggtccaaagggtggcatgcaattaccgcgaccaagtacacagcatggttatcggcgaccgtccgcccactcggaggacaatctctctccggtcccttccgtcgcagacgagggggctatcgcggaaactgtattgcacgaactggcagaagaagacgacattccgcaatcgagagagtccgcacgacgcagtgagcgtggttatccgaacggacccattcaaatctacgactctggcgtttttctgtacctggaacctacggcagatgaagcctcgcggttcgatgtcgtcgtcaacgtggctaaggaagttatgaatccgttcagcaagacggccgataactcccaaactgtgatgagcactttgcgcaatgggactgtcgattccaaacaacagtcctgttcaagtccctatcaggcctattcatgcgtgtcaattcagtgagccctggaatatcagccagggctcaggtcggattccatgtccctctgtcatccatgttcaaaccagtgctcgcatgcgttgggatgaaactgaaaatgtctc

SEQ ID NO: 6216 - DNA, 1002 bp, Emericella nidulans
caatacttaaaacgagggagggtccgtttaacaggtgacggttcctcatcataattaattaaaataggcccattccggccttatataaatgaaatgcgcggacttaatccgtaaaaaatcaaaaatttgggaatttttgcattcaaagccccaagcagagcacagttttcttaaataaataaacgggctaatggaagttttacccacctagaaccggccgtttttttacgaacatagggaactgggaaaaatgaaaaaaataggccccacattcctagttaaaacttttaatttctgagtaataattataccctcttatagagaaaaatctcacgaagacagtgcagcaattttgacctatatatatatcataggcgttgggtaatcctgttttgaagtttgagtatgttgggttgaaattaggtttatgatatccgcatgctgactaataattgactaagcagcacaccgccttcttgtggcccatttagtcaaacattgtcacaaattcatcagtcaatttcttgggtaaaaagggctggtggtctataagctaaaaagaaacactggaggtcaatgaaataacaaaataagcagctagagcctactaggcgaaggtaaattgtacaagacaggtcacggtcacatgatagatgctgaaggatcaggcgtggctgagaggaccgaagaaatgatacttcagctcaataaggatgcagactgacacttgcctagttacattcaagccacttgaagcaaagggacccaactaagaagaggataataagagaattaaaagtatcatgctcacgtataacagtcgtgtcaaccggcttgtacattagatgaaaacgccatgtctgatgcacatgcccttattgagacattagagtcgcagagcatccaaaatctttttcgccatctctcggtattgccacatgcctcctgacaccttcttgaattgaatcccgtggagcgagaaaagcggcactttgacaatga

SEQ ID NO: 6217 - DNA, 642 bp, Emericella nidulans
agatagataataatagcaagttttccagtcaaaagaatgagaattagggatgggtggtatattagttgctggcagatcgttagtatcagaacaccaggatcagcgtttgcagcaacttactatatttccagaggagaaatttggtcaagggtgtaaagccagtttccaccctgttcttccttctcgagcctatattctccgtaagtacacttctgaatagaacaatgatgatagaccacgtaccaatcataaggccagaggatgaggtggccttggacctggttgaggaggtcctcagctgtctgcttgtccataacctcgtcagttgtaaaatcacgttttgagcccaatgttgtggctctacgtctgcggtgccgtgagcggttagtcgcgttccggttcaaagcttcagagtagtcgacttgaggtgcttctgaacgctgcttatcggggtcatccccagaagagacggcatcctcgtatcgcgaatggcgctcataaccagttccaggtatgtcggtcggtttcagagaagacttctcgttcgccggcaaactgagttcttgggatgtttcctggttggcctgccagactgtggtcttccgttcgaatttggtcgttcggacttttcgtctattggcg

SEQ ID NO: 6218 - DNA, 604 bp, Emericella nidulans
aagggcaccgggaagtgggcgcctcgcatctccattactggcgggaagcatagaccatgatgaccgcccccgacgaccaagacattgtgaccctccttgaatggcgacaagtcgacggcgtgccatgcgaccgccagtggttcgatcatggccatggattccggcgtaacattatcaggaatggggtagaagtgttctgcaggcgcgactattttctcggcaaaaccaccgccgtaacctgttcgcattgggacgttagcttgtccagatcgtacagcttgcttgattctgaaaaagagcataccagatagtccgatgaagccaatattctcgcagcaatactcgtagccaattttgcatggggggcacttcctgtcgaatatggtcgggcgcacaaccgccttctgtcccggcttgaggtgtgtgatgccttctcccacttcctcgacgactccaccaaactcgtgacccatgacaaccggcgcggtagctttggtgatgctatgtgctcccttcggtattaagacgggtccggaggtatactcatggaggtcgtgccgcagatcccgcagtatgtgtttcgcagctgagaagcattagcttt

SEQ ID NO: 6219 - DNA, 535 bp, Emericella nidulans
gaacagttaggtcaactactgaaatgaaatagggacaaataattttatatcctaacaaccctgctatgtgagggaatgagtgctcctagatgggtcgcttgggttcacacagactaagtgggtagttctgaatgccgcccttgattaacctcactccggatcatccttccttctctcagcaccatcgatttcaaagctatactcataaggtctcgcaccatgacttaccaaatctctatcctaggtttcaactcaagccagcaaacaaccttcacgaaagcccaggagcgaaagatctgtcaagacagttccttgccggcgcggagtgtccctctgctaaccccctgacagggcgtgaaacctgccgtggtgaaatagaaacatcatagctgctttaggagtttacatctcagcctgaccagctttgacgctcctcagcttgtgcaataagaaaagctcggaagctataacttacaatccgtaggcgcaataatatacatgcacgatcagaatcacaaacatgacaaagattagg

SEQ ID NO: 6220 - DNA, 586 bp, Emericella nidulans
  unsure (1)..(586): unsure at all n locations
taaagctcgggatgaagtttgatatcgatcttccctaataggccacggcgaataatttgccaaatgagacccaggataagatgctcccgcacttctataatgtcgccgcttccaatatttacgactgagcacccaattcctttggctgagttgatgactatattattgttttcagtcatgtggaatgcgttaagctctttgagtttcctgccaggtttgttcagaacgcgctcatcaatagtatcggggacgctgtcgttgataagttttgcgagaaccagaccgtccttgcacttatcgaacatctcgaatgtatcggtagggaaaggtagaagatggccaatgtctggatcacctgctaggacagcattgatatgtctcgtaaattcggtcctttcatcttcgttgattgtgtgcgtgacattcgaagaggaaccttggacatgaatcttgcctcctacactacctttggagacatgtcgtgcggctccgggggccgctgcggaaacggggtcccgaacaggcacgctctgcgtngaaccgagagcgactgtagcaatgagctgtgagccatatttagctaatg

SEQ ID NO: 6221 - DNA, 811 bp, Emericella nidulans
cagatccgggcacccgaagtggtcaatgcagaccttaactccgagcttggggattatctcttcaaggtgaggcatcgtgctcatgggcgtgtgcacctgaatcatccagcccaggtctcggatgagccgcgctctcttcgagagccatcgtctagttgttgatgaacgggggtgacacctttggacatgaagttaacccgcacaccgcgcacacctagtgagtgccattctcgcaaggttgacactttggtttcgcgcgggtctatatcgaccacgcctcgcccgcgggaaggtccaacgcgccgaagggcgtcgagaagacacgaattgtcggttccgtagatggatggttgaaccaggacgacgttcttgattcgcagagttgactcgaaggccatggcatcgtcaatcccttggcctggtctcgtttggtatgcagcccctgcgacgacaggatatttcctgtctgtaacatgcatatgacagtcccaagctccagacggcatccatttccttaaaggcttggactttgtgagtctcatagacgattcagtgcccaagaacgacttgggatgcctatagaaatctagtcttgttttcatgggtgcaattgctggagttaaaccggtcctgagattggccgatgccgctggaaagcagtgccgcgacaccatcgctgagaccgtaggcatcgtgtacctcggatgattgcgataagatatcctttggctatactcacaccaatctctgcctgcccaggaaggtcgaaaaatgtgacggattacggaggatagcctcagggcccagacag

SEQ ID NO: 6222 - DNA, 526 bp, Emericella nidulans
agaggggccgatattcggccgtcaacaaatccactctagtagactaccccagcaatcccgcgatgacttgcaggttgcaggcatcctgatgatcttaagatgcactggccatcgctgttggtgtccagtatgagtccagtatgagtccagaccagctaggagactaggaattgagcctatccctgtccaagctggcgatagatcgaataataatggttgtaagccgagacttctccggcacgacgctcggagagaaggaagagaaacagagttacagaagtgtgggagcttctctacagaaggcggcgtgattcgaccgccagcaggagagaaaagggcccttgatagagagtgggctccaatgagagcgatagatctactctttcgacacaccgactcaggtgttcgttatggtatcgtcgctttctgttagaataataattaattcaaaagcaccattcactttttgtccttggtcgcggcaattagatcgtttttaagatcgtagtaatcaagaacaatgcga

SEQ ID NO: 6223 - DNA, 208 bp, Emericella nidulans
atcctggtgtgaccaacacactcgggggggtgtttttatatcgggcggtagaggttctttcatcgcgggggacaactcgcggaggatcggcaataaccacgatggagtatgtgctcagtccacactgccagacgaggcgtgaaagggaggactggagagccaagactcatagtcacggtgtcaggctgctgaaccgctgtaagcggtg

SEQ ID NO: 6224 - DNA, 729 bp, Emericella nidulans
accataaagcgcggcatcgaggttggtgacgtcaagttgaacctcgagcagatgatggcggccaaggacacctccgtcgagggattgaccaagggtattgagtttttgttcaagaagaacggcgtcgactacgtcaagggtaccggtgcgctcgttgacgagcacaccgtcaaggtcaacctgctcgagggtggagagcagactctccgcggaaagaacattatcattgccactggaagtgaggctactcctttccccggcctaaacattgatgagaagagaatcatcaccagcactggtgctctatctctgaaggaagttcctaagaagatggtcgtcattggtggtggtattattggtctggagatggtatgctccctctccgctatagtccttctagtactgataatgtaggcctctgtctggtctcgcctcggttctgaggtcaccgtcgtcgaattcctcaaccagatcggtggtcccggcatggacgccgacatcgccaagcaggcccagaagatcctgcagaagcagggcattaagttcaagaccggcaccaaggttaccaagggtgacgacagcggtgctactgttgctctcagcgtcgagtctgccaagggcggcaaggaggagactttggatgctgatgttgttcttgtcgccatcgcgcgcagaccatacactgagggtcttggactcgagaacgccggtattgagaaggacgagcgg

SEQ ID NO: 6225 - DNA, 234 bp, Emericella nidulans
ctaagatacaccgcaacggcccacaaaaacaatgtcacactggcaatgaggtagtcccactgcagaaaactggccataccctcttccaggctcggaaaccgcgtcacgtaccagggcacggggggcaggaatacatctgcgggtcccaggtccgcatgaagcagcgaggctatcagcgcaccgtagatgggtggtagctgctatgactagggcaaatatggtaatcgtccgacg

SEQ ID NO: 6226 - DNA, 498 bp, Emericella nidulans
tttcaacgaccagcactaggaagtgtactagaaggtagacctggaccggctgagttatgcactgttatttcttccaaagagttcttattaatttcatatctcgataaagatgagagttcaccgatgccaacgaaaattccttttttcatttataaaaaaaagtcctgtctttgacgataaggaccagttctctttatttctggttgatgcccagaagagcttactcagaacagatgaaacagtatgaataatcttatctctgtggaggatggtgacaaagattcaaaagttcttcaaaccggtggctatgctattgactatatcaatcgactccgcgtagataaggtctggtataaacagtaagctgggcattcccaagtatttcataacgcatcatgaacaagacataaataaacaaatctttcaaaataactacaacgttcgtagcagtcatactcccctgagcctcttctccatccacctcaacggcacgtacag

SEQ ID NO: 6227 - DNA, 705 bp, Emericella nidulans
ggaacgcacctctcatagctcgagtctccagaccccgagcccgagccagagccggagctggagccagaaccagagtctctaaccagcggtttcagaggcgacaggagtgacagtgtagatctcagtggtggtggaggtgagggttgtgtcagctccagagccaacggcgtctgcgccagtgggagtctagatttatagtcaacattgcaccttcattttaacagcaagaggaaagtggatacgcactgcgtagacagtctgggtgcgagtagaggtcttgtggacggtggttgtaacgacactggtcacagtaccctcagtcgcagtgtaggtgatagtctcatactcagaggcagcgccagtagccgtgggggtctggatagtgccagtgccagtggcggtgacaacactcgtcgacgtggcaccgttctcggtaacagtgacagtaataacttcggtggcagcactagtagtcgccgggggctgggcagtggccgtgacaacagtagtagaggtaccgccattctcagtgtaggtgacggtcacagtttcggtagtaggagcaccggtcacgtaggcagtgctggtagccgtagccggacggtcaatggtggtggtcaaacacttgtaatagtgctgccggtcaaagtgtaagtaatagtgacgcagtcgtcggtaggagcaggagtaccactggccgagtga

SEQ ID NO: 6228 - DNA, 448 bp, Emericella nidulans
gtacgatccagatcgcgattcagctattcaagtcgacggacttctagctcttctgggcgaggcactgccttttgtacatcgtaggtcccttactgttttaaatttaggaaaacgcgttactaacagacaagaatcttcatcaatcctgaacccctctcagcaatttgctatcctctccgccatcgaagatctggagaccgttacaccccgcgtctacgcccaatgcgaggagtgtttccgttcgacccttctcgagtactactccaaacaagccggcaaagccagtgattcctacgttctccctccgtcaccgcgcgcactcctcaaaaaatccgtctcgtcgcttacagcttcaagcacattctccataatcggcagcgacatgctgggtgcgcgcaccgctcgtcatccgggtctgcggaagggtcgggagtgctggtgcccgaga

SEQ ID NO: 6229 - DNA, 1340 bp, Emericella nidulans
ctgccctttggctcctctttggattaccgcattgcaggatgtggatcgcttcaactgagtagacagactccttcgtggcggcttcagggaaagccttaacttagcgcaaatggaatgggggagggtcggtctaccggatcgcgctacgttcgtcgccttcgtcgtaatcgtgcaacatcctgtgcgcgaagaaccaatgcaaagagttgattcttggaaactcggcatcttcgtacctttgtccattagagctttgacagtctactacaattgcggaattcttttcctcttcaaagcttttatcacgatgtgattgtgcggactgccccattttcattgcggcttgatagcttctattgtgttgcgcctcgatagccgtctcctattgttcttgcagcccatttacgtgaatgatccatttccatctcaatctactgggtggttttcactgcaaatcagcctgggtgtggcgcgcgcctcgtcagacgcggcatttcccagtaaccagtgatgcttgcgctagccattcatccattgcgcacatttcagggaggagaatctatctacttagtgaatgaccagttctactattcactgctgccttctgttattaaaaggtctcctcccagttttctgcctcttctttccttaccttcggagtttaacccggctcgcctatccttcaattttaatacaccctttttaaccctcctggatgccaggctagttgatgcatccatcacttactcaccctccgatcttcaagctgtctacaagctttcaccaagttacatttagcctttgtgcatttccttctttacttgtcaaatcaggaccctattagcagcgcagccatggcgtttaatgggggcaacggcaagcttcctcgtgggatttctacttcatggctcttgcccagttgggacttcgttggtgagatcattccacctaaagagcctttctgaggatatactcaactttttctttatgtccgatcacgggcacctataggtgagggcaaattcgtgggatcttacccaggtaccttaatacgtccgaaaatcccccctttcattttttgatttcaaccccttaatgggaacattcacacattacaatttccaaaggtcaaatgcttttcaaaaacagaacgcccttttattaacactcttgttctatggccgcttaccggctaaatttctttttctttaggtttgtactttttttatctttctttaatctatttactctctcctctatattcctccttttcctctctattgttcttgtctcttccctcttcttttcttctaactccgatttttttcttcttctccttc

SEQ ID NO: 6230 - DNA, 483 bp, Emericella nidulans
  unsure (1)..(483): unsure at all n locations
accttttaagcatggaatgacgacgcccaatattctagtacccaccagcacggctctccaatgactcgcagtctttcttaatgtctcagaaactcatgcacctagccggataattagcagactgagtcatgctctctcctctctgatgggttcgaactaccccgcaggaaggattcgtcggggctatacaaaccctaatataggccctctcggccccgatttccccgagctcccaatcgctagcggagagaggtccgtgccagatatcgtgcctcgcatgcagactaactatggtgagtagctgttgtggacaatcttctcctctagctgctctattacccggtatccccgagtctttggcgggatgcagcggcagtgntacagctacgtcagcaagcgagacaccccacgtagcttagtgatgatttaaatcagacgtcgcaagcaatctcctaagaccaggaagcgcggagtacccaagga

SEQ ID NO: 6231 - DNA, 545 bp, Emericella nidulans
caggctgacatcacgattcccatgccctcctgcctgttgccacgcaccggatgctctatgctcacggacggcattccttactgtattgtagctcagtaccacttgctatgtatagcatttatatcattggctaatagggacccatccaccagtagcggcgtattgcaattaccatacaccctcgtcctctggatcctctgattgacagatcatcttccatctctttctttcacagaactcagcaaccaccatttctcatgctaagaacgcaatcagccgagcctggctgtctcgagaaaatggccagccttgaccgaaagagtgcaataccacataaccttcaatttgaaatagcaaaaccgaagctgcgcggactccgccacaaaagctggttcctaagctcacggcctcacgcaacccctcccccctttctgttgcatgggcatgactccaggttgctcggactcgaacagtcgctgcgttgctgcgtcgctcgacgccgcaacgcagacgcgaggcaggaggaggaggaggaggaggagggg

SEQ ID NO: 6232 - DNA, 237 bp, Emericella nidulans
cacaacaaactttgctttcgtttataaacgcccatcgcgtaatccgcagcgaatcccaacccgggggtgtttttttttactaagcctcatattgcttctgcacctgcacggggcttagctacttgtgcgaacgtacgctatattcatacccatatccagtccaatatcacgcgcgggcttcagaacccccttatgccggactcgggagctgtacctatacctgccgaaccctagggg

SEQ ID NO: 6233 - DNA, 435 bp, Emericella nidulans
tcactctcctgcagggccttggcattgtcgttttggactttttgctttgtaccaccgtgtatgccctgctcctgaatgaggttcaatttaaaatacagcgaggggttctagaccagactcggcagctttacctatcagatcggcgccaacacagcaacagacttggcatatctagctcggaaggcacggtaccagacgcagaaatccccagcagactgggtccacgtcgaagatgtgacaggcggcacatgcgccattggcctttggggcccacgcgcaccgaacgtcctacactcattgcccttacctagagagacagacatctcgaacaaatctctcccctacatgcgcgccaaagccgtcactaacgcaagcatccccgtcacgttggtccaggaagtcctacgtcggcgaatacggctgggaaatccagac

SEQ ID NO: 6234 - DNA, 513 bp, Emericella nidulans
tcctggagccgtggaggcttgtaccacggtctatcccgctatttccagagacagaggggaggttttctgctatcatcaagccaaattctgaacagcctgggctggacctggctgggagctggagaagtcttttacggaatgacgggagtgggatcgtcgagatcccaccaaacacacgcacagcagtgatccttgagaacgagtccctcatcacggcctttttggaactaagattcagagggggcgctggctctaccgtcaccgtaccgtgcgccgagtgcttcgagtacccaccgccagaagggaatctgaacccctttgcacggaacaagggcgacagggccgatacttcaggaatccttgttgggccagaggactcgtatactgtttcctccagctccacgacagagcaggagtggatgtacgagccattttggttccgcacattccgctatgtccaactgaccgtgtccacgcactcgcaacccctgcagataaccaggctgacatacc

SEQ ID NO: 6235 - DNA, 1069 bp, Emericella nidulans
aagtcttagcaagccggagccactgccttaattcgccatctccattgactctgcacggtgggtccgcatccaaaagaagctggtcaaacagtgtgtactcacgcttcttgaccatattgaaccacggacatattccccatgatgagggcatcatgtgtctcgccttcagtcaggcgattaccgacccaggtctgggatttcgtcgtgggtgccaatttcatgatttaacatggtgaaacctttggctatcgaacgcaagatcttcttgtatcgcattttgaagggacacggcccatgacagacctcattgtgtttccacttagataccatggcaacgaagccacaatccgagagaacctcattgcgcgtgggggattgtgggaatgctacaaaggtatccactacctgcaatacgatggcattggcacaggacagtccgagttccatggaggtaaagcaaggcgtattgtcaaaagccgcattgtgattgacgtaagaggatataactccttcaatcccgattacgcggtctgaattggggaccttgtcagtatcgtgggcaatcgctccaaggcgtcaggaacgagaataatacgaaggccccaatatagaagcgacggtcaaaatttatatagtcttcctgctcaggctatagcccccctaccatcccaggatatatgagactcccgcttccaacaagataaaagccattttttctgacgagcagcgactggtgaaacccccatacttcgacggggctacaggatatctcctggaacaccaaggcatttgatttcttagtcctaccacatgcccagcagcacctcaagaaatttattctagggtttgcccgagcgcaatgtcggcgatcggataacttcgacgatgtaatacacggtaaaggtcgtggactgattatgctcctgaagggccaccaggagttggcaagactctctcagcagactctctcagcagaaagcgttgccgaagccctcaaggtgctctccttctgctcgacgaacccgatgtctccatggaagcgcgcgacaagaacgatatcaagaggaac

SEQ ID NO: 6236 - DNA, 557 bp, Emericella nidulans
gactcaacatacacatagcctgtgtaataaacgcttaaacccacgtaaccatctactaaactctctatggatctacggccggcaaacgtgtttagcctgtacgtctatgacactatgaacggtttaggaaacgctagcggggagatgcatccgatgggaggacataagcatcagctatgtcaagaggaaacacaatcactgtcactaaacatggcaggggctaacaacctgacagaaagctatcaacgtagctaggaataaaaactccaaaaaacaccaaaagcatactacgatgatgacattatcgaccctgaaacaaacctaattcctagataaataaagaaatattataattatagacattaggcataaaccacaccatattactagtatgaaatgacttatagacaaactactaaaggacctagtacaaagggactgaatgatagaccccatagactgactaaaaagactataataccagttgcaactgttctgcctgtgtaacctattgaagactacctacaacaaacaaaggcctatgtactgtacataag

SEQ ID NO: 6237 - DNA, 428 bp, Emericella nidulans
tgaggaatataggcctactcgctctttacctgtttcgagcctggttattccacccgggagcgccgcatcctggagtggggtatgctttcgtgccataaccgcgcgcatgcgctcaggatgcagcagtacatgcgtatgggcgggatgctgaagaagagcgcgcggacgaaacaaaggctgtttccgtacatgacgaacccggtgctggggcatgcccaaaacccatcttacgaccatcaggtcaagcacctccatcgtgaaaggcaagggccaggctacctgcctccggggacccaaggccaaatcgaggaaatcgacgacgttgtgcgccaggttagcgcgctgcatgacttcaagcgcctcccgcatacagttctgtatccgcaaatgctaaagtactgtatggatgtgaagactaactctctggg

SEQ ID NO: 6238 - DNA, 675 bp, Emericella nidulans
tttcggaaaaccccaggagattagataggaggagctcaccccgaattgacctttttctgccgagatgacggggtgggctatgggggggaatctgctgaaacagaaacagggggaatcgtccggtagtagcggtgagggaggctattaagatagacaaggttgaatataaggaaatgaagcatcttctgtggacatttgaccgcaatttcaccttgtagtaaaagaactacggaactagaaacatcgaacatccactaaagtatactagattggcaaggtggatttggggccgattattgcgacccaccaagggaaggcaaactgaaagtcgcgccctcacgtgatcgagcacccttttggcccaagcatttttcacggtctcgtaaactctttagcccatcgtcttttctttctacccactctcatcactcattcattctcattccccaacttggccaattctcgccagtgcgcatgttgggaaaggctgcagggcgtcttgtcagtctggattgacaatatcccattgcgaggctgttgagcgttttgccgcaatttgttgattctgtttctgcatctgcgtcgcatataaatgctttactttcttgccttcgccttatctccatttaattcttattcttaatcgtgactgttatttatttttaatttgagtac

SEQ ID NO: 6239 - DNA, 548 bp, Emericella nidulans
  unsure (1)..(548): unsure at all n locations
ttctcagtatagctattcgctccatatagcagattttgtgcatgctctgtagagaagattgaaaaataaacaattcagcctgccgcaaaagccatcttcttcgccccggcaactcttccctgacatagaccatagaccaatacttcgagcgacaaaacctacgagacaacaaatccccgcgcaaacctcccggtaaatgcccgaattctctttccccacaggtaaatcggaaccccacaaaggcccaatgctgccgttaagcccgcaaatgttccaaatgcgccatcatacccgtgagtctccacgaacgttgcagtaccatagctggtgccgaacgagataataccccgaaatgcacagataatgacgagcagaggacctgcacgagcagggtaactatccagtaagtaagtgatcgcaacgatattggcgccaacgaagcagaaatagtacgctgcgacggcccagacatacacaaaccagtggtacttttccgggtactgtccagcctggccgtacagaactgcggatntcgtaccgatgacgat

SEQ ID NO: 6240 - DNA, 525 bp, Emericella nidulans
cctccgacgagctggccgctgggtccgatcacgaccaagagcgacgtcgcgtgagcctgaacgcctacccgcccaaacgcccatacccccgctcccgcagcttcagcagctctgaaagcccagatgagctggcaatggacgcagatgtgtattggcgctcccgcaatcgcggtcgcgacgattcgccctgggctcgctcagacgaggaaaacgatgagaacgaggccgacgaagaggagaatgagaatgaggacgacgagcacgataatatgaacggtgacgataatggcagggaggcgaatgggagtcgcgaacgcgacttggatgaaatggatactgtgggggagaatgagccggagacagatccagatcgctcgccgacgcctgtaccaccgccgccgccgccaaagccagagtccgtgaattatcgccagaagttcttgctcagagggcatttacggggggtgtcggctgtgcgattctcgccggatgcgtctatgattgctagtggaggttcgtaatttt

SEQ ID NO: 6241 - DNA, 347 bp, Emericella nidulans
cctcatgggaaaaccgacgaatcgaccaacaccaacttcccaagtgcccaaacagctcagagaccggggaccgcttcagggccagcgtcctttgtcagagagtcaacatagacccttcgtcgggcatggtctctacaatgacgtacggggcatgtcgggctatcctcagatgcctatgccaccccaaatgcatagcatgcaaacaggccctaggcagatacaccagcagggtcctgtttcttttcacccgccaccagaaaatgtgatgagggagccatcatatccggaagaagctgagcgaacacataatgctcccagaagtcaaccaacgccggcgccagttgttc

SEQ ID NO: 6242 - DNA, 745 bp, Emericella nidulans
cgaacatatggcctgttagagtacgagtgcggacgtgatcggcttggcaaccgatgtagggatatagcaatcattaaccccttgcgaactctcctggcatcggctccccatgaactgaggaatatgtaacttttcacgactcaagcagcgaggactaccgtgcattatgggacaaaggcccataataagtcaacaactctgccaccttttaggcgccaatattaaagctcctggcactagaagaaatgcaagccgccaatcgcattcagaaagccctcaaagcaggcacacccgcttcggtgcctggcagatgctccccggcacaaacctgacttgcaccatttgccggtccgcaccgaacatcgactggctgctcgtcgacctggagtacggcaacatctccgacgatggcataacacgagatcgttgctgcagcggcggcttgcagtacctcgccgattgttcgcgttgcagagggtcagctttggattatcaaacgtgccctggacgccggcccgcacgggatcatggtaccgatgatcaaaaccgtcgatgatgcgaggacggtcgtggagtatagcgtgtttcctccgcgagggaagaggggtttgaggcgctgcttgcggcggatatattcgtttccaccgccacccacgggcagattagacagctgaccggcctagagaatctgcagctggctgatgaaggcttggtgattgccattcagattgaggcgaaaagcgcc

SEQ ID NO: 6243 - DNA, 956 bp, Emericella nidulans
gggtaaaataaatgaaagagaatgatattggaaaataaagaggatggtgtactacaccccccagcagattttttctatgaaggagagggatttgtccattgaaacctcgttttgatcgtcttccacaaaatgttatttcaaaaaaacccagtgccaggtgaaatctggggggttgagccgtaggggaattgcatcccaaaataaccacatttctgtggcttgatcaaaaaaccaatttccgcgactttatgtttaaaccactcacccaaacgctgttaggtcctgttcgcgctcacaagcgattctgaagaccgatgccaaaggcatcccgtcattaccaaggtacccagaacttgagttctcgccggcgatcttcgtaactaaatgtcttaatcgttcctgggcatggtcgggcacatggatgtccctaagctagcagctgccagtactcgtccaggtatccgccccgggaaactgcaagcccatgccgatgattgcgatgggctctaaagtctgtattcttgctctcacagcgttcaatggagcaggcacagttgcaggtgagttttgcacgggcacgtccagtatccgctgcacagaaagacgagcctggcgcaggacggaagggggaatgcactcaactagactgaattgaacgacgcttgtcttctctccgttgctgcgcttatgcagagccgttgagatagacgcataccaatcgcaacgctgaactagtatggactgaagcagcgtatcgatgatagaatccgaagagagaagctgcccgtcgatattagagtatacgggagcgagcaactctgagtgggaaaactgaaagaccgggttcgacgctaccagattgtacagacccacaagagctttctgatgtgcgggatggtggaatcgacctagccaatcaaatcgataggcggaaagtccgtttgacgcgagcgact

SEQ ID NO: 6244 - DNA, 806 bp, Emericella nidulans
  unsure (1)..(806): unsure at all n locations
tagctgacaggcgttgcggcgagagctgtggggatcttgaaagagcatcgggggggagaagccggtgaacaagggactgcctccaagccaggctgggttctcgcgcggattatgctgagggaagggttccttgtgccattggagcaacggtaataatagccctgtccagtttttcccttcgattctattatcagacgctgacatcaatgcatagactcaacgacactcagtcactaaccacgtcaataagcaaatgggacccgttcctgcaaatggtcgcagaaggagattcctcgtttctcgtcacattggcagaggcaatggttgatgaactcgcattcccagcgtcaagtttaaaatcagatcccaaatcagatccaaccctcaaaggcatctacacgtggctggaccatatcctgcactcgccgcagtgggagtcgcaccgtcggttaatctcgctttcttatatacgggctatctgtgaaaacagttcgagcaggaaccactggatgacaacgctgaaagaaaggattgtgcaggttgaaaacggaaagaagaaagggaaggggaaagggaagagggaaagcaacgcgggcgatttgcctgtggttgctcccgcaggcgaggcatctactgcaggtgattcttctggtttgctgaatataaatcaggaggatatagagacattaagaanggttgggtgggaaccgctgagacgtctgggtgggatagtcgggccgttgggggtggtggtagatacctacagcatttctaattttagtcagtcacatattatccttatacta

SEQ ID NO: 6245 - DNA, 971 bp, Emericella nidulans
  unsure (1)..(971): unsure at all n locations
tatcgtgccacaatggcgttgttcttgactcgtggagtcttgggaaatatccggcagcctgcggcgaagctgcagccaaggtgcattagcttaagagttggatgaattctttgtgagtttggctgtaagtctgtataggcaacccttccgctaacgataacgccagagactagtcccacgctcgcgagcaatactggcccggtggagtgcagacggcactggacgcagatattcgtgagagaccccgtctctgggtctgcggcatgctagaggacgagattgacaggtctgatattgagctaatctctgatcgtagtgctccgtccgatgcctggtccgtgagcaggggtgcgaatccctagggccttggccctgaccccgacataactcacttaataacagtgcagtgaagtggccaagattgatgaataggaccggcagctagtgaagatagcaatcaaatttgcctttcttcaaccctttcttcggcaacccggtcgaaaactcgtcacagccggatgcatgttcgctggattcgggccctgttgcaacgagtccacgaaaccgcgttcgggagatttcaatcgacgatcactgaccgggacggaagcccgagagtggagcaacaatctcgccttgtggagtggtgagcaaagaaggaccagccgccgtttcactctgctctggacgcgggcttgcctgagccctgcgagcgctgccagccctaatctagtcctactgcttttcctcggggctgttccgcaggccgactaagataacacgggctggatattaacgattccttccttcgtgtacttgtatagagaacgagcaatttctttccaatggatactccagaccggaaatcttcgttcttctggggagaaatcggtgctcaattctggtccccaagactgcttccttgcacgggcatgccggngtatacccggaccaacgacaggttcagaatc

SEQ ID NO: 6246 - DNA, 684 bp, Emericella nidulans
gcatatagcgatgttggccgattccttgcggtccatcgagaatacgggtgtgttggttggagacagggctcggttgtagagcgaattgagctggaacttggcgaaatggtaatgaaggaccactcccttcgaagggtaggtccggacgtagggactgtcggctgcagcgagggtcagatattctgtaaaaaaacaggttgcggtcgacttaccagaacgtggttgccataagagccgccattgatctatggctacattgaaaacacgcagttgaccaaagtcctcttccgtcagggcttgttcggtgtcgcttccaaacgtccggtatgcctcggtcaggatcatgaaaagagcgacctgggctagcatccgaatatcgacaggaacaaccattggcgcctgcaggaacgtttcgtagtttttgattcgcctggtcctcgaggatgacgggcggtcggccgtacgctatactgaaatggctgatcacagacatagagtaaataccagagctgggctctttcgtactggtcgctgtggtcgatgatcatcttctggtaactctggtggaggcccagctgcggagctattcgtaccgcatggcacgacaggtttcagctcagcttcgacagacgaaacgccccgacacagagcgctcggacgttattcaagagatgggcacgggta

SEQ ID NO: 6247 - DNA, 671 bp, Emericella nidulans
atgttttttgcaaaaggtgacaaactcatgcaataccgggcttggtaatcacgtagcatgtgtagatgattattccaaagagaaccactggagggacgcgggcaacggcaagattgatgcgccggtcaggttgcccagccatttcacgttactgacggacgccgcaggtgaagcggctccgcattagggaattacaatatgatggagtatgttatatatgcatagaaaccatgatcggaccgcgataatcctggactacagagtagagggtgctgacgtcgcggcgcaagctgagatacttggctacagctgcaaactatacaaacaatgcaaactcaggagcacgtgatcatagacagagttacccagctcacaggccacggttcgtcccgtctcctccaagcttccagcggaaccagttcatgggacaatgtcccacaaagcttagaaatcaatgcaacgcaacaggcactgagacaatgtgacagtgcgtcatgaggatagatcttctcgacctttacgagaaatcacgatgcctggaaatgctttaaaaaggactggcactcgggttctcgcggaaacgtatagtcgccagctagctttgagcttcgggtatcgcacttatagagaagatctacttagtgatactggcccaacgacgatagcatgaa

SEQ ID NO: 6248 - DNA, 673 bp, Emericella nidulans
  unsure (1)..(673): unsure at all n locations
gacaggacagacggctcgtgggcctttgatgaagaggaggagacggagttgtggatgtttgcttgcggctggagatggggttgggggggaagggaccagatgtcgataacagaactattcgaagattcctcgttaacttcccatcttaaagctggggctaaggtaatgaatggtgcttactctgaagtccgctggcagatagcctcgagggcctctcgctctcgccttacgtagccggggtcaggctggttggcttgttggttgtggtttagtgcgccatagctatagccgggttggtagatgtcatcttcgagtagccgtgatgattctggctggagttggggatatttatgttagcgccgatttctatgatttgagctctcgcgatcccggcagcttagccaccagaccacaccaccgcgaaaggccgggctcggagacaggcacggataactcacatcggtactgtctcgacgaccaccaccaagacaagaagagcagacacccatttatagcgttgttgagcgagtcaatcgtggagaagaatgcgcacgagacatccaattattcaagggcggctggaagagaatccggtatgataacaacaatccgcttcggtccgggaggtgaaagataggtaaggactgatgtgatatctcaanaaaatcgaaga

SEQ ID NO: 6249 - DNA, 573 bp, Emericella nidulans
cgccggaaattctttcttttgaaggattgagaaggaaaggttttctgagctgtttcttaagactgtaagcaacggtctgtgttcggggctgactcgctggccgattgggatttctaagcaaccgtagttgggttcattccttggattcatcagataagcccgacttgacgcgaccaatgacttggagaatttcatacattgttcaagtttccatgcaacgaaccgacaacctagactgcttatgtgccgccgatgccgtcatcatcaccaaccggcccctcgactctggccttggattcgctcatccacggcttgggagtgacagcataacacgaaataatccgcacttccgtgaagcctaatggcagcattaggctttatgttatctcatacggggaccaaattgtagcaaaagagattgtactccattgatgatgattgaatctgaggacaatagctctgagcgtgtcagatatatataaatggaggcgggcgtgaaatcgggcggtctggaaattcgctgcagtaatcgacgagtcgtaccattgtaggtaagagacagacattaaactt

SEQ ID NO: 6250 - DNA, 388 bp, Emericella nidulans
  unsure (1)..(388): unsure at all n locations
ggaaaccgcgggagacacaacggaacagagggaggcgccacgggcggaacggcaagaacgacgagaagaagcctaaaaaagtgccaccagctgacacgagagcccaacaggaacaaacaacacgangcaacgacacatctgatgaacaaaagagccggacaaggcgaaaccggaaagctcagacgccccgtcgggacagccgagaaagcgaaagaagggcaaggacacgacccggatgaacaagacagccggggaaaggggagggaaatcgctgcctggggcagaaaagctatggagaaaagaaaaggaaagggcggaaaaacagaaagagggaatgaactgagaggcagaacaacgtaacgcacttgcaaaaaagggagctgaaaag

SEQ ID NO: 6251 - DNA, 694 bp, Emericella nidulans
  unsure (1)..(694): unsure at all n locations
cgcgggagttcccagcgaagggatcggcccgggtaggagtcaaaggcttctcggtttaagcggcgtttctggtaatcaggctctcgagcggagatcctagcagccttttcacgtccaagaagaatgtcctcttcttcgaccccatttccccgggcaaactcgtcaatctggcttcgcgttgcagtatactgcccaaccaagcggtgtccattatccgcgtcctccatgtcttcatctccatcgtcaacagcgatggaggtgctataacccgcatatttatcggcaccttcacgatcgtagagggttgtatcgaatgattcggtcaaggaggcctttgtcgagttgtcagtgcgctggttagacggatcaaaggtcctagaaccttttttcgcggccgctgccgcattgcgctcagcctggagctttcggacagcgtcgaaatccgctgcagccattattagcgaagcttgcgatgatttcagaattggagtcttaccgtcagacatgttgtcgaaggaaaagagctaaagacgcgatgtagagcaagcaacctcgggaaaaaacagtagctgccgctacatccggataaaaagacgtaagataaacgccacggcgatggtttggagtcaggaggtggtatctgagggtgcaccgngacgtgaaaaaggatgaagtcaagacaaagtagatgact

SEQ ID NO: 6252 - DNA, 603 bp, Emericella nidulans
  unsure (1)..(603): unsure at all n locations
gttgcttgtcctggtctccgtggtaaatatagtttgtacacggttcgtcgacaccagtttgttgtcgcggggtcaatcatcggaacactgaatctgtatgggaacagtttagggttgggcttcgcgtcgactgttgaggtgcagattgcgaagacctctgggaacaatattaccgggtaccgcgccgcgttatatttcggagtcgcgattagtgccatcgcactacttcttgatgttgcatttgcgaggagagtcaaggacgagcgagaggggtgggaggagggagaccaagacggagaagcgattgagttggctcaggctgccacgacgggtgctcaggtctcgaggctcgaggcgggacaggggtcttctgtcgttcaaagagtcgagtaatctctcaatgacatcctatccggttaataattgatgtgatagccctgatcgacactgcgctgatgccaaatggaaacatctgctacaacgctgataacgagaatcgaggctggtgancgacaacattgggttagcgactgttngacacgacgatacagattcatatcgcgaaggtgaagaacatgcggagactggcaatgcaacgttcaa

SEQ ID NO: 6253 - DNA, 488 bp, Emericella nidulans
tgggggctgtacgtgatcggcagtgtatgttttttgacgggctgttctatacagactgacagcgagctcagcagcgctgtgctggactctggacaggtcaagagttttactcgggatttgatcctaccagacgagcagctgtacaggcagcctgaggggacctggcgcgtgcggtgtgctgtctggtcatgtagggttgctcaggacagctaccaggctgggcaaggacacaacagggaagcttgtgctcgcgattgcggaatctccatcggatggagtacagatattgatggtattgtacgctggcggcgaacgactggtgtacggtgcatagatctgtgtacagagatgatgtggactctgccgctaaaggtctgcatgctagggggggacattgccgctgggctgatgggatgtacgttcagggaggctggatgacttcttattgagcaaattgatatcgaggtccgtgatctaatcagacctta

SEQ ID NO: 6254 - DNA, 764 bp, Emericella nidulans
ggagagaaatgagcccatagctccgtcttaaagcgcgagcaatattgctcacgcttagataaagctagcgataacgttgtctgaggtaaatgacgctgggcgtccttcgctggtcaaatcaaaagatcttactcagcttaagttttgtgaaacgacttgatatctaggctcgtcagggtatctgactttaagatctcagaagaaaacaaatgaaggaggagtaagtgtgagtaggggttgatgtgtttgttgtccttgctcttctgctcgtctttctctcctctaaaccactacccgctgtccagcccctcactttgtccgcacctaaacccttcccaaactctttgccattctaatcgtccgctctactttctcttgttttttcggcgccactttgcctctcctttccttttaccttcccttctcctacatcgtcttcattctctcgttttctcaactctcttaactaatcacctacttcctcgacaatgcgtcatttccctatctctatcgcctcgtccctcactcatactctctttattccctacctatccctcttagcatcctagtatctctctctctcctccatctctcctcgctcttcctactctctactcctaccttctctactctcatcatctctctcacatccttattcacatacctgttactatctcctctggcctctcacatctatcctttcctttcatcctccttctatcactttacatcttccttctcttcctttcccatccccttctaat

SEQ ID NO: 6255 - DNA, 637 bp, Emericella nidulans
gtacgccataatgcagagcatttgcagtctgatgtgcgagcccacagatgcaaacgattatatcgcttgcatattagatgtcttggtccttggtcgtatgatggcatagtcggatctatggatatctcgttgggcgtcaggcttctagcccgtcggtcattgagtgagcgtggctcgaggaatgattgcttgaccctcgttcctgaagctccggtagatgaggtcattaccaacagcagtccattgatatagcttgtatcaagagattgatgttagctttcccagcggactggccgtgtcgacacctgcaatgcgctcggttacaacgtttaaaatatcctgcgacacttccgccaaggacttcccagcatcaattattcgaatatcggtagcgcgctgaaggtcgaagatggtattgaacagctcgcgtacacgagtttgcatggcttcgttctcgtagcgctctccaccgaatccaccacgctttgcagcctcttcgggagatatgctgaggaacagacatagatccggctttggtaaaccaacttccggttgccatgcccataccagtgaaagagaaggattggccttcgcagccgagtagacatgcaccagagtctctgtatactaccgtcgc

SEQ ID NO: 6256 - DNA, 522 bp, Emericella nidulans
  unsure (1)..(522): unsure at all n locations
tcccggatacgatatgctgcatgaggaaatcaagcaaccagcgttgctctggttctttgaggccgggaatcttggtaataaattcgccgttgaaccatagacatttttctccagttacagggtgaatgcgcacaagcgggtgaacggtgtcgacggggtctttacgcaccaagccaccagtaaggcgggcatggttgatcatcttcgcggacgagtggactgcgcttagagtgtcgagccacgagcagagggtagcggacaaacgcctgtactgcagcgttagctctgcatatacgggactttgcacgaaaaatacttaggcagactcacttataagccaaatcggtcgcagcaaaaaccgtatcgcctccaactttgggtccttcaaggagtcccaacatgacatagccaggcggttgaatttcatagctcacatcttgatgccaaagggtggtgagttgtggcgctgttccaaaaagcgacagattttcttcgcggtttccatcngcggtggaatgataa

SEQ ID NO: 6257 - DNA, 804 bp, Emericella nidulans
tgtaaccccgtgtatgcctgagtttcggatttgttaagtttcgcttccttagtaggtgttcttataggggacttcaccatagagggacttttgctactgtttcttttcttttctgggcttattccgccgagttttctctgatcccaggaagccggagacccgctctggaagggattgtcgtccgtaaaaacactttcgctcttaggctctgccttgaattccatgtcccgagactctacctgcgtgggggtcagatctcttcgatgtctattcgaggtggatggacgaggcgtgactgtattagaaggcacaggagtcgtaagatgctcatcagtaggttctgcttctgtcttttgcgaccgccgtgatctggtagtccttctgaacgacggagtggcggtaacactagcctcctttgtatcaacagttgatgcgcgtgcgctggctttagaccgacctcttcgcccgtcagtagacaccgacgatggcgttggtgcgatgcgatcccgctagaagtcttgttcactaatgactgacgactagcgacttggcatgtttgtgattccttcgctggtccttctcactctctcgcgctcccggaggagttttctcgcctgaggaagaacctcatcttccagaatgcggataagctgggcctttttggccgatgcgggatacggtacgtcgtgactgacgaggatagagcgaagacgtggcacagtcagagaattcaggtcgaagtccggagacaaataatcgaaaacgtcggacattgtcgaggacacgatgaccacagtaagaggc

SEQ ID NO: 6258 - DNA, 712 bp, Emericella nidulans
atctcaatgcatacaaatctgaattctcatctaactcccgcgttgaaatcaaagatcgcacatactggacgatatcaggacggatgggcgagttgaaaacagccggcagggggcaagtagccccggtgggcttgccctcaccggaggcgatagagactgtaggacgagaggccattgttgtcgacgtgaggctggttgtcgtctttcgaggttgcggatcaaagtcgctcacgaagttggtcgaaattttcgcttagttgatccatcgcccggcgtctgtgcggcaaagccctagccctgcgatgaccggattggggcagttgtcttggcgggtactgaggcctgctacgtcaggcaccaacggctgtttatcgttcaagaacactaagttcgacgacaggtttattaacgggagattgagtggataatttagataagtcgattacacacgtggtagtgctgggcgaagtctccaagctcggggcaccctgctgttcgtggcggattcatgatctcctcgggtggctgtgggtgacaactttgttaacatcgcttctaacatcagaattatggccttaccgcacgggatgaaacgctcaggttatatgagattgagtttccttgagcgagcccgtttgttgcatgaaaggtgggggctcgtctagaagatattgcctttcctaaacatcttctttattttcgaggcgcgatt

SEQ ID NO: 6259 - DNA, 569 bp, Emericella nidulans
  unsure (1)..(569): unsure at all n locations
aaccactaccctatacgntttttcttggcggggttttttatgaccacacacgggcacatggaggggtggatagcgcaaaggatacatatgcacatgccccggacatcggctaggagagcctaaggcacatggaagtcacagttgcaaggagcgctctggcgtcaatggtcgcaagggcagccggtatatagttcagaacggggatgaggatattccacacaaacgcaactgcacgcggtgacgtatatggtgtgtctatgctgaggtcccaggcaaattagacagccctaagatcgttaagttaacacagactgatcagaggaacacaggccagaagcttgctatacctttgcaggttaccttgcgagcaggaacactatggaaaattacagactaggtaccccttttacgacttgatgcactcattactgcatgatgctagccaggagcacacttgatacttcgatgaccaacataaaacacgtgagaccgttaacctgatcacttactgtgtagaaggattgtatatacggtctttatttagaaacagctagaacacctgcataagg

SEQ ID NO: 6260 - DNA, 523 bp, Emericella nidulans
ctggaaaagtacgccggtgactcgcccaaacccagtcgctcgaagggcggcgaccacaaaccaaagccggagaacaagcgcaacgcgtctggacagcagcagcagcccccgcaaccacagttccatcgaacgggccttccccctcctccaaccgccaatatccgccggccagtcccgccgcctccagagcaaccaccatcgccctacccctcgcagcaatatcaacaacctcgtcctaatatgccgcctcccgggctagatgagcccggcttcgccccgaatgccttcccgacgcagcagtacattgagcaatcccgctggtatgacaggcttcttgacgtcctcctcggtgaagatgaaacacagccgaagaaccgaatcgtcctgatatgtgctgcgtgtcggctcgtcaacggccaagcaccaccgggcgtgaagtctctcgaagaaatcggccgctgcggtgcgggggcttcggccatggaacggcgaggatagcgctgcccgaaaagtgctggcagat

SEQ ID NO: 6261 - DNA, 612 bp, Emericella nidulans
cttatgcttattgtccctgagccgacattgctatcgagctggtcgtggatccccgtgcgcgccgtcgtattctccgccacgggctctgtgaatgcgggcaagctggccggaatctcgttgcggatatgcggtgcgcccggtgtagggaagacgtctgggacgggatcgtagtgccagaggccgccgactcgatcacggcgctcaaatacgcgaattctgctgaaggttccttcatcaacgagggcttttaatgttgagagacccgagggaccagtgccgataacggcgacggaatcgtagcggggagccattattcctcaatcttcggttgggaaggcttgaggatattgctggcgcgtaatatattgctgaagattatttaaggctcgcaacgcgagtcaagtgttgcgtggtcatgtatgcccccaaaaataatgtgtcgaatgcaaggctggaagccgtgaaggcccaataggccaaatcacctgagaactgaaaaggcacacaaaagcctcaattaaccggcaaaggactaaataacaacggaccgtataaaatagcctccaatgtccaaatccttcagaactttgatgaccactacctaaaggcccc

SEQ ID NO: 6262 - DNA, 494 bp, Emericella nidulans
tggggaacatccgaaagcgcgatctgcggataatcatgacggtttcgacaaacattctggacagcacccacctgcgacaatggcggactcggattgcaaagtgaggcacccacaccaagaaaccggcaggcaaactggacacaatcgaagggagatgctacggacacacagcgactaaaggcaacgcggggcgcttcaattgaggaaggagctgccccgacgagctatgaccgacgcctgacatctgtgttaagacacagaaggaacgacctaagaagggccgtaccatagaaaccagtgggcccgtattgccttacaggccctgtggactgcctaaccagcaaggcaccattatatgcatcttcgagatcacaaatccaggccaaacaggcagcccaatgataggctggatcaggccccagaattatatgagacacatggacccgagacccaatacggcagcggccaaccctcactcctggaactgcaaatat

SEQ ID NO: 6263 - DNA, 588 bp, Emericella nidulans
gttaaaacaccgcatagggcgataacccttttaagggatcttttttctcaatatcttgtcctatggcataacgggaacacgccgggggacaagctgtgccccaaagcagctggacaggacaccaggaggtacatcatacgttgcgatgcacatttttagccagtatcaaacatctagagtataacagacatagccccatacatccagcgactatacccttaaacaccatctgcgccctattacacatcataatgcaataggacgccgacataaaaaccctctacaaacaagctggccgcctccaagtgataatatgtgggcccaaaagatgacgaaaatcaactgtaggtcagtacctactgaatcacctccttagaccagcacctcaacctgaattgaactacactaacaccgacggaatcgacttactagaccttgaccacggacaggctgaattattgccaatgggccaagtctatctagctcacttacgcttcaatgttctcagtctgtcattcaagcacctttctttgaataccgagcgcgaaaggacaatcatttccccacaccatattatggctacattcc

SEQ ID NO: 6264 - DNA, 625 bp, Emericella nidulans
  unsure (1)..(625): unsure at all n locations
gccgcatagtacgactcactatagggatcatggcactatcgcctcctaagttgtaaatgcttttcggaatccctaatgatggcgggaacctccattcaggcggagctttcccgggggttcaaggagcatctgttcaccaccaaagttttggtttaacccgtttctttaagggaggcagccaagagggggaaattgtcggcggatggaccccccttaatccaacggccgttgaaaataaccgggtccggtcaaccttaaatggctcggtggggggtaatngccgggccatcttcaaggacccgctatggcgttgatcacccggagataacctgggattccgttagccaacccccgttttaattcaatctacttttatttttaatccgaccgttactggtattttgtttttaatctatatttttaattttaattcactattcttttatatcgttattttttatttcccttcttcccttttccttttctcctttctactttcttttactattttttttttttatttcacctggttttttttctatctttctttctctttttcattctttttctcttcatctctacttctctttttttattatttgttctttttttcattattatttaa

SEQ ID NO: 6265 - DNA, 979 bp, Emericella nidulans
ggagaggaggggcaggaagggacaggggggagagggaaggggagagcgcccatagacagagagagaagagtattctaggaagagggagtggtgaaaagaggtagagggtaaattcgagattgctgaggggcgagaatgattagggatttgatgttaaaaggtcaggggaaaaaccagtgggaaaaattgagacaatgggtgattaaggaagtggtaggagctatttgtcaagactgaggggggcagaaaaagttaaggttttaaggaagataggtagggagaaagcggatgtggtggaataaggaatgcggcgcggatggggtacggtattgaacgccgggggatacggatttaaaagacgcggtctgcatagagaagtggttttttcccgagctttgcaaggggttagatgaaaagaggatttggggccagatgatgtctgcaggtgaatctggggatccaagtgtatgaatacggggggtataatgggacgcgaggagacgctaaaataagtgggaacccgtcagaatgagaagaattttgggggttccggtagacgttgggggcctgggtagacgcgcctaatcgtggacgatggtccgaggaagcagcggttggtagtcgccctggctcgaaaactgagcggggtccctgcgccgataaataacgagactggtctcgatgggacgaatcaggaagatgatcgcataccgcgtataccggaggaaagagaggaggagcttgttgattccgaggctcagttcatcatcaagaccggccgacaaacagaatgaaatgaacctgaaagccgcttcggagggacttgaagaagagcctgctggccgcttaccgcaacgaaccccaacaaatgcgtcggtccagtcctccggccaactaagcaaggatgataatagatcgcgaacggtcacttagtggagcgcatcaaacccttcttatgaatgcaatgcaagaacggggg

SEQ ID NO: 6266 - DNA, 705 bp, Emericella nidulans
acgctgcaggagggtaaggatataaccgacgacgacatcgatgcaattttgcgtaagggtgaagagagaatggcggaacttagcaagaaatacgagcaactgggtatcgacgacttgcagaagttcaactccgaaagtgcctacgagtggaacggtaaagactttactacagacaagaagaaagacatcggaatccactggattaaccctgcgaagcgtgagaggaaagagcagttctactccatagacaaatactaccgccaggccctggctactggtggacgaacggctgatccaaaacctaaagtgcctcgagcaccgaagcagatcgctattcacgactggcagttcttccctcctggcctccaagagcttcaagacaaggaaacggcctatttccataaagaaatcggttacaaagttcctcttcccgatggacctgaggaactcacacaccgtgaggcggaacgtgacctcgagcaggctatgattgacaatgcggcgcctctgactgaagcggaacaggcggagaaaacgaagctatcagagcaaggtttttcagattggaaccgtcgtgatttccagcagttcatcaacggatctgccaaattcggtcgcacagactacgccggcatcgtcactgaagtagacagcaaggacccaaagcaggtcgaggagtacgccaatgtgttctggatgcgttac

SEQ ID NO: 6267 - DNA, 966 bp, Emericella nidulans
taataaaaaagaattaaaaaaagcccgaccctgaagataccctaaaagctccgggtcatataagtgttagaaagcacaaggccttctgggttcaggtgcctatatagggacttttttttgagaaaaacactgctgtgccggttcagtttaaaagaaatccagccagtcccgggggttctcctgcgtgcgcactgttagctccccaatttcactttagcgggtaggacaaaaatccaccttagggttgacgagccctttatacaatcataattatttggcatacattgtgacaggtatagcccatgactcgcgttaaattcgaaatccatcactaaacaggtattaggtactcggcaggtatcattaacttcactcgaatatcaaaagacaagccacaaaatctacttgtatatctgttagccgaagtcttctgcattcttgtgcggcaggaaacgtcgcaggcggccggtgctaattgttggcttgttgggttattaagggcctgggctggatgaagtctttgtcagacttgttgttttcgggagcgtgatacaggaagggtttggatctgaagtgaaaaaaccggatagggtttgcaaagtcatgatggtggttttgttgtgtcagataatctctgcacgtgaaggcttaagctaggaaagaactccaccccagtgtaagcatctgcaggctgatcccccacagcctcacagcccaaatctcctttgggtatggagccacgctagttaatccttaccaaagtgtgggagcgggcgagatcaaccgccgaccggagacttggcgggtggtctgaccagccactggcatcccgcccagcttctttttcctaactgccccagggacaagccagcagtccacaccttatacaaaggttttatgtggtaataatgacacacacatgccattcatccagagcgaggttaattatcatcacacagaacagac

SEQ ID NO: 6268 - DNA, 216 bp, Emericella nidulans
ttactggcacgggatcgacggctaaagttcctgctttcttctggcccgtggcactcttctattcttgtatttagcggccttcttgtaggctcaatttctattttacataccccagcgacgcccccagccgtcgcagaattttattgcacatatcatacatcattgtaatcagaaacacgtttcactagttgacttgtggcgttgttcatactagcg

SEQ ID NO: 6269 - DNA, 580 bp, Emericella nidulans
gaatgcgttgtttaggaaacggctatcatagacatcagttcgtaagttggaggatgcatggacggtttatggttccttcttgcgttgggatgaggcgtctgtttcagtctcgccgtctgggtctgagacgcagatggccgagtcgcgggtctcggactgcgagtctgaaaatgagagcggcggtaggggcccgtagggctttccgtcctggatttcgagtttctttcgtagaattgcctcttccagcacccatttctggcgaagtttcgtcttcttcgcattgagtgcttgcagtatggttgcttcttcctgctggtgctccttctggagctcgcttagttcggccgcatgcttcttggtcatacagtcgagttctctatccatccgagcgatcgcttcctgcagacggatttcttgccggtctctgaggacttttattttggcggcgtggagttgagacatggacttcgtaatcgtggtattcctgcgccagctgggctttgtgctgatgtgtgaagctgcggctaggggttgtcagatcggaccctgagagggagggcgagcgctagtcttgggggct

SEQ ID NO: 6270 - DNA, 498 bp, Emericella nidulans
cgcagacttttttagatgacctctgaggcatcccaccctgttgctccccgagctcctttaccgccactttctttcaaggatccaacccagacagtaaaggcgggatttctacaaaaggatcatgatgtctgccctgctcgagcttgcgaagacatcgtacaatgcgatcgactttggagtgaccacgaggtgccgagcagcaccaggctagcaccacaggcctgtgaggagaggatcacgatgatgaggctggtgaggattgaaagggaacagaaagaactgaaatgcttggggaaacaaaaactactggcggaatttcatagctaaacagcttccgtctatctggctacggatagaaagtcacttactttcgaagatacaatacacccattgtgtccgacaatgccttgctacgcgcggaataactctgatgcccgcttaactgcaggccacaggaacaggaggatgcagtcacagatattacctacgtgctagcta

SEQ ID NO: 6271 - DNA, 676 bp, Emericella nidulans
gcgccagtttctgctgcagttcgcaagcggccgctagctcgacatcctttttagctatatacaccttctttagtcgttccttgatctctgccaaatcttcctctcccagattgcgggccagaagactctcatagtcctgctcgagattagccagcttctgctccagttccattctgcggctgtcctgcagcacgttcagttcgctccgatcattcacggtgagttccgcctgtcggatgaagccctgcgtctctgaaagactggctcggagttccagaagatcgtctggtgcgatcacctctcctgcctcggcaatctggtgcaaggaatcaacgcgttggataagattctgaagcttccgctcgctgtcagaaaacacttctccgccaagatcgaagccagccatcattttagccatcttctcagcctttttcttctccttctcgtcaagcgctgctgcggtctcctttgccttcatacctacatcgaggagttgttgtttcacctcgtataactctgctgtcaactctgagttggcttcccggagactgtccatggttatagcagcttccttgctttcgtaggatactttctcgagatgcatccttacttcttgacttcggcattgagctttttgttgtccttgcccgatcgtgctgaattttctttgagcgtc

SEQ ID NO: 6272 - DNA, 549 bp, Emericella nidulans
acgtctgcccctccatttagccaaatagtggcggaataagaataaaaagcaagctaaatctaaggcttgatctcaaagagcagcatagcggtctgcagttcccgtattgtatccgctcagaacctgaagcacatagccagcagccttgtactcgtcaaacaagttttggaaagtcggcgaatccataccatgacgggcaacccaggcgccagatgcagaggtgtcccagatgccagcatagtacaccgtattaccaattgaataaccattgacgttgatcaagcggtatccgtccttgagataagtgtcgaacttcttctggtattccgccgcggtcatcttcgcccacgcccaccaggcggtcccgtcgttgatcttctcccacagtgccgcaaagcgcgcctcgccattcaccttgtacgcactgacatgtgtcactctgtacccctgctcgatataggtattcggtgtacttctgcagggaagcggcatcgatgttgtggcgcgccacccacacgccaggcgcgggcgacttgtccagactgcggg

SEQ ID NO: 6273 - DNA, 1042 bp, Emericella nidulans
actctcacgcggttcaaatctcaaattgtatgatcttacattcagggctgttttgtaagttatactcttcccaaacccaaaatccaatagcgaggttccattatctgtaacagaaatatataacgacatatcattatcccgacccttcccattccactatttctccaccaaacaacacagatgcagacgcagactaactttccgtgatattcgtcctaagaagcctgctcagctcccgacgcttctggccagccaagtccgccaccgcaatagccttcttcgctctctgacgacaatcttcatccgcagaaacgaggaagaatttgaccgcctgagaaacgcagtcgttgcaagcgactgaagatcgtcttcttgacatgcagctcgagtattgaaatgtgaatccgaattgctcactgcgggctagtaggaaggcttggtcgaggattaactcagggggtggaggcatctgaggaggcgggggatgtgctttttgttactatgataatgcttgggaagtaagctgatgataacggcttagcgaaggacagtaatagggctcttttgtgatatattcccggacccacgttgaggaactgggccggcccttaagactgggcctgcaaaacttaagggaaacgttggggaaaccaagaagatggcttggacgagttcaactttgataaattaagcccaatcagtggggttaccaggaacccgggtggtctttgaccagccaggttcctttgccaggatggtgtggccaagcttttattgcccctgaaattttttcagatgggtaagtattctcttatagggacttcggcccaccctttttggttgggctttttgtacgcctcctttccacctgggaattgctttcaacctgttcaagggcttcataagagccagttgtgctctttctggccctccgcgcttggcttctttgtgacatgtggaggcccttccccctcattcgagaggtaggttctctctgtgttttacccgcgtccgtttacctctcttctacttcctatcttct

SEQ ID NO: 6274 - DNA, 465 bp, Emericella nidulans
cgcagtctgcgacgcctgtggtttctaaagctccaacgcccgctaatggccgacgcccttctcagcaggggtcacatagctggtctccacgctcccaatcagccagcgcagaggcgtcccaggtgtctccgcggtccgctcctctatcgcaatcatcggggtcatctattcccaaatacggctctggtcatcccattctccatcctcatccaggagctcctatgtctcctttgggtcgaacgcatcctcctgggctttctccatccaatcctccagggctgtcgggcttagttccgcgacctccaatgggccatgagttacccacatatcctccacattcaagtccctacatgaaccagctccggggatttcccgcccccaatggtattcctgtacttccagggatgaacggcacacgcccaatgcccccaggtcgaggattccctcttgatgcgcccggttttc

SEQ ID NO: 6275 - DNA, 543 bp, Emericella nidulans
agaaagatgtggttccagcacagagctctgagcgcggccgcatcaaccatgcctaggctgagaaaatatagtaattctgtacctttatatggcagcacgacgtccttattcgtctcaacgtcttggttttgcagtaggcgtagatccatagttttgttccttcgttacgtgattgttgacatgtagatgtgaagatagagattgtccaaaggaaagacgacacgatgtcctctcaagcagcccgaaagtctcccgatctagaagaggagtttttgaatcgcgaagcgagtgagttgcttcaaggctccgcggcaaactagacagagtataaaggtatcaacatgccgttcattgacactatgtagactcacctgatagagactgtgtctggtcttggaacctgctagaatgctttttccctatgccatggcattcgggtgaatcttaggaaggatctgaagtaccccggtcaaattgagcgaatatgagaagaataccatgtcgataagaaaatgaccaccgtcaaggtgtagatacacagaa

SEQ ID NO: 6276 - DNA, 585 bp, Emericella nidulans
gtcaattattatataaaaaacagtacaggtcatagaactcttctgtctgctgtccacgtcacaagacagggctagtaaggccataatagaatcgaataagcgcagagcaaggccacaccctacacggaccctagatcacctgccatcaacgatgtgaagtcccgacatttgtgcagctgatcgaaaaatttagcgattgcactcggacactctcgtcatgattagggccgttgttcaggggccatcgattggccacatcctgccgtaatttacgattcagggtcgagacccttaattctggggaaccgatatacctgaacgcgggggcaatcagatacaaaccaacccagaccgctgggcgtggtatgagatgcgagcatctatgtcggtgtaccttctgaatgacaatgaatgtattttacttctcgaaaagaatcccttgggcactgaattgtgcggagaatgatgccctgatatgatacaactagcttccgctccgtcaagccacaagggtctgggcagctccgctataaatcaaaatcgcctgcacgaacagacgaataaccaataaaacgcccgagcgcg

SEQ ID NO: 6277 - DNA, 502 bp, Emericella nidulans
ccagagaaccccgggggacagaaatcatccaccccactgccagtctccaccacagctttctacaaccctcatgacaccttcaccgtgggggaaatttttaaacactgaagggccgacatccccccacgggacgaagccaaaccgaccaagggactgcatagcgcgcacaagaggggatgatcaagcggccaaggcacacccatgcccgaacacaggcaggggcccaaccgcatagaggcgcaaattaacagaggaccggatcgaatgggaggaaaagagcgagctacacgcccacgacaaaggaagagccaaaatcgccgccactacgagcgcgagacatgaacaggaaggctccacagcgcgacacagagacccgaatcctgaagacggaatgaaagcttcaatagccccgaatgaaacaagcgaggaagtgcacaaatagatgaccctggcggtgccaacccgtccagaaaaggcaagccaacaagatacgtaaacaagc

SEQ ID NO: 6278 - DNA, 568 bp, Emericella nidulans
gagaaccggtttgattttgccgggcttgagggcgtacaggcgggatatcgggtcgaggtgctggtttaagggtgagtctatcccaggaccaatcaccctgggagtgggtaagctgacaccgcggcatactagcatggagctcatcgaggccggtactctggagataccggctctccgggccggagagacgggggagatccccttcccttcctccttcccgtccaaggcgacggcagggggcgagacgtggctgaccgtctcgttcacgacaaaacacgcgacaccgggactggatgcaaattatgagatcgcctggttccagcaccgtcttggctcaacggccccgtctctgcctgcgttgacgccggcagccagcttcccaatccagactcactccacgaaggccgaccatatcataaccggcgcagacttcaccatcaccttctcacgcacgaccggcctgctgacgagctggcgtatccatagcagagagatcctcgccgactccacatcggccggactgaccctgggcttctggcgcccaccaacggacaacgagctcccgtac

SEQ ID NO: 6279 - DNA, 652 bp, Emericella nidulans
tgtcggtgacggggggggtgacacggacttcaacaccggagtagcctctcctcagcctgctttcgctggaagaactcgttcaactcggcagggaagacaccgtcggggacgaactttctgcgcttcgaaatagctccctggacagcagccatatttgcgattctgctgatttattagttgtcgaagaaacggccgaggacgcggtgataggcggtgcaccaaggttgggaagtcgctcgaggttcaggtcagttttgagaagttcggcgttagtggggaattttgggtgtagggctttgctttcctaatctggtcagggcaaaccctcgcttgctctccgcctacacttttcctgtttaagttatgccaagacatcaatcccaacaaccatgactaggcagtaaggcagtaagtgtatacttcgagctcactttaaaactgatcaatgaaattataggagtttcaagtactaaaattttatgcagctactctcacttccaccaactaacgctatcatttgtttcattcatcacagacattcggccgtggctgatagtatcacgtatatctacacaacagtatcataacgtaatgtagaagcgaagacaagacagagatcttatactgagggtcgctggaaaaaaacaagaaa

SEQ ID NO: 6280 - DNA, 561 bp, Emericella nidulans
gaggataagagcagaagcaccagcggtggaggtttcactactcttaagagtgtccttttatgcttttgtcatggtctcctgttccgaccgattagctcaatgcttccaggacaggtctaatatttgtatcttgaatctgggacttagtgattactttttgcccacaccggatgttcctgggatgtccattcaactggaaaaaccctcgaggtggtcctgacatacttgttaaaaatgcccatccttctgcctctcggcatcctggcggcacttacctacttgccacgatggagcatgatgggtgacccaatccatattgacttgctagatgtacgttgcagtctgttagctatagccccctgatccttgcatgggaaacttaagtgggagcactattccctggctaacagtcaaggatttcacatcaagcttcttggtggtttatgccgcccagaggaagctgctagttccttgagtgatcctacttctcaggcccctgtcttcatacataaggctgcgccgcttcgtatcccctaaccctggttatcttagcgaaaatgt

SEQ ID NO: 6281 - DNA, 571 bp, Emericella nidulans
tggcccgcgatggtgccgggtccgctggtggtcgcttgtactgtttttgtgcgacggtgggttgtgcctccgcagggtatatatgaacagagccgggtgccgggactggcggcggagctcagaacgcaagacagacaaaccgactcacgaacaagctgccctgacaccgaaccagctgaagctccgggaccagagtcttgctatcaggatccctgtggcaccacaacagaacggaactgagacagctgaacggccgaagctcacgaaaggacgccacgcggtgggagctgactaagaagctttgtgtgatgcccaggctggggcacatgaccgaacggctgcacactagccttggtttcgatgggcggcaactctgatctatacatacaccctcgagcccattccggtctggccacagaaggtaaagcccctaagaacctcacgatgaccgaccgtggtgtaccacgatacatagctgtgggcctctggaccgtacatgagctcagtgtctacatgattggtaatagaagatacaagaccgacttgagtacatcagcccaccgacacaggc

SEQ ID NO: 6282 - DNA, 969 bp, Emericella nidulans
agggaaaattatataataaggaaggttgaagaagtagatgaagtgatggaaaggaaaaagagtgagagagaaaagatagataggatatgagaggaggagggatgaagggagaaagaaagagaaagaggatgaggatagatgtaggagagaatgtgagacaggagtaagagaggtaattaaaggtccggagggaagcagggaatgaggttgacgagatgttgggaaggatgtttgtggacaagacaaagcctggtcgaggagaaggggggcagagcaccagagagaagaagtaaggtccatgataagtcaagggtctggctaatgcatgcaggcatattgtgggggaccaaggctgtatatggcagttgattctcgcaaaaaaacgacgtcacaagtcccaagcgtaaagccaagttttgccaattaaagcgtgaacaattctattgctactgtaatatatgcaaagtcgcgtataatctgattgtttgagagatatatcatcggaacagccgcagtcctccaacactgcctgcactccaagtaaccgaccccctggaccccccaattccccagactcagccctgagaacccgacgcccccgccctcgccatctcgtttataccgtcggagcgcttctctgagatgggaagggagcagctgcccgcggtgggggttgggcgggagctttactctggcgcttccgccaggtgccgaaacccgaaacgcaccaacagtgttcgtgtccgtgttcgtgtctaccggctcttgtttcactgccggatgagcttcattattggcggcagcatcacttgttccgtctgccgccgcttcttccttcacgagccttgccaatgctgcttgatcatgtgcctcggcccattccttctgcactgtacgtgccttttcaattatctctccagcaaacacctttgtaaatccattgatagtagtcaccaagcatggccggga

SEQ ID NO: 6283 - DNA, 922 bp, Emericella nidulans
catgaattttgatgaagccccaggtatggtggaagcgaggctattaagaggtgttcggagacttcctacactaacagtggagaggctagccaccgaggcgtaccttcgacggagtccgttgatgatgcacctggagcctcgcgcggcggcagcggtggcatgcctgatctttcttccctcgctagcatgctcggcggtggccgcggtggtggtggcggcggtggcatgcctgatcttggatctttgatgaacaaccccatgtttgccagcatggctcaaaacatcatgagcaaccctgatatgctcagcaatctgatgaacaaccctcaactgcgacagatggcagagaattttggccaagggggtggcatgccggacatggcaagcttaatgagcgacccgaacatcgcaaatatgtaagtcttgtcgtgctagctttcttccggcccagagcactaatcatattatagggcgcgtaatctcatgggtggtgccggacgtggtggatcccaatagtctgtgcactcgttctattgtttaatacctgcgctgacgcccgacctttttttcttttcgatctgaaattgtctcggtacatgtgtttaaagtatgactatgatattgagaagcatatagatatggccattagccgccttctaatgattcaactctcaattccacttgattggaataatctgtaacttaaatttgggtaagaaatgcaaaaaattggcatgctgggacaaggggccttaatccaaactggtagaagaggtggaggtggattaactggccaaaaaaaaaacaccaggcccccaggccaagcagatgaattttggttcacccctttgggcatctccaaaaaatccaggatttggtgggccgcacctttaaatagatgaattccttttccaacggaatt

SEQ ID NO: 6284 - DNA, 303 bp, Emericella nidulans
ggggaaaactccgaggggttgcgcccgggtcataaagttacgactttgggcaccactgtctttcacctttacgggccaaacatatagacggggcgctttgatgtccagctctgagaaaaaccacagggggtcgtcactcttaaaacacgacgcttgccacaaaggggacacggactcatgggggacaagcgtaacaccaggcggtaggtaatgcctgcactcataccccggggtcaggccacgcgcattggccaccagggcgtggtcactattaataaaagtgccaaccgagctgtgaacgcg

SEQ ID NO: 6285 - DNA, 705 bp, Emericella nidulans
acccgtgacgactaccggcttcacgagtaggagcccgcctcatcgaggacgacggagagcgacccgagcgcctgtttgaggggaacgttttcgagtcccgccgcagcgtgatcaagactgccgtggtgcagcaaagctacgaggagaacgggtttcccattgtccacggttgggtgttcaacctgaaggatggactgcttaaggatcttaatattgactttcctgggatattggcggacatccaaatgatctacaacctcaccagggttcttcatagattatgttaagagtgcaagtggtgttctggacacggagtagagggcggattactgggttcaacgcgcagagcgcttgttattttgcacagtcaaattagcagtctataattcatcgctgatttccaacgaaacctcgggagggaaacattggctggcggctgtagaacgttatcgtgctcggaattcgacggatcctagctcccaacaagccatcccgtgccttgaatttccgcgtgagccgtgttatcgctggagatctttgggcagcacatattcaagcgctgtaattgggtgtagagtgtcccgctatgcccgtctgcgctgaaataaaatcagccgatgacgaactgggtcccaacaatctccatacaacggctttctaatccaccaataaaaagaagacttaccgcttcgggttaattctagg

SEQ ID NO: 6286 - DNA, 867 bp, Emericella nidulans
atcggactattaaaatcatttctcctgcgtgaaagttaacaatttcgcttcatcccccataatatctttgcacatcaagatacttttggtaacctaattgcaggggtttaagcatgagaaattctaggttaagataatcccctggaatattgcccatggcatccaccattaagtcaatatctactgcttcggctcccaaggtacagcctccccgggcgttcaataaagtaccgggttgttcaaagtccaccggagccaccatcaccaccaaatttttaaccttatccgggaatagagaagcgtaacacaggctaaatgtgcccccctgacaaactcctaacaacgtaattttttcttgctgggagcgttgacaaataatatcgacacagttgttcaaatatccagacaaataatcttctagggtcaaccaacgatcgccccgggagggataaccccaatcaattaaatacacgtccaaacccagtttgaggaggttggccaccagggagcgtccttcctgcaaatccaccatgtaggggcgatttaccagggcgtaaacaattaaaaccgggataggtaagggattttccaccaccggttggaaacggtaaagaataaccttatcttcctggtaaactgcttctttgggggtaaagcccacctggatgtcatcttcattcaaaccctgcaaattttccaagccagagagaaatttttcagtaaaatctagggtttcatggagattttcttctaaccccacctgagcaaaaaaaggcaacataatttttaaccaatgaacgataaaaaatagtaaaaacattgatggtgaattaactatccagcgggtcctctacagtaacctgcagc

SEQ ID NO: 6287 - DNA, 916 bp, Emericella nidulans
tcagagcaggaggtctggttgaaatgtgtaagtgttacttgtcggtgctattttacgtgtcgataggaacgccggatgcgcaggcttctactatatgagactaggaattagcactaccactacttgagatacccaacctgatggcacgaggggggaaaggactgagactaacggaagcagattgataatctgatggaagaaaaaacagcacacgagggcttcattaacaatcgtaggaagcacagttgtgatgagcaggttcacttccgtaaagcctttgaacggagtcgacggcgctcagggccggaccatgtgcaaaggcaggggcaagaacaattacaacgtctgagtcgagctcataggacagggagcttgccagtgcggctggtgagatttcgggaaaggaactgagctgagccagatatggccagcaccgaaccggcaacatatcgaggcggagaacggaaaacgaagaacgaacttgcaccatgaacccgtgaggaacttactgtcaaccctaagccagtgcgggcgatctggttcttagcggcgtggatctaaaaagatggagatatgacattgacaaggtggggtgaaaaagttgatgaatggacacgcctagtatacttctggtgaactgatagcatgacaaacagccttagagtgtattcccgttcgactaggatcgaagtgagatgcaagaaaaaagtgacttttaggctgagaaatgcgatgcgactcgaaccctagaccaatatgaaatacatgggtttgacttgtttaatccagccatcgttttctgtttgacacgattttaggtttgcctatggtaagcttaagatcataactgaaaaacttctgaagccgaagatagtttggcttattttcttatccatgagtgcggtttcaggtggtc

SEQ ID NO: 6288 - DNA, 657 bp, Emericella nidulans
acctggctgcaagagtcgaggcgagtttccgtatgacaacacgctccccttcattgaccaggaatacatagtgatctatcagccgcccaataagctcgtaagcatcatggtcggctaggttatgcctgtagagaagtgagaaattagtcaaagcggctggactaagaagaaagggcataccaatcatggttaatttttacagtaaaggttagcgcaccgaagaacctgaggtctgggctctgttcggtaagaagacagttcgcgatgacccaggcatggggccctttttgcaggttctgaagaagctcctgaatctcattgatcttggcggggttgcccgtgtttgctgggtcataaagctccaaaacaagctgggtaaccttcatcagtccggtagcctaactattcaaggggtcataatcttaccttctttgccccatcaatggcccaggcctgatctgagtggtccatggacatagccgagcacctggggaaagtggacaaaaacctggagaaatgacgatttgaggccggtactactccagtatagatgccgataagaatttcagatcacgtgctgataagaccatggaggggaaacagatcctatctaagcgggggaagcgagactatcacctttagttaactagtgggtga

SEQ ID NO: 6289 - DNA, 571 bp, Emericella nidulans
cgatgggtgtggcctctggctttaggcagctgggacaaggggatgtgctcaagcggattaagtgagtatcgcagggtttacccagtccgtcgttgtatacaacgtccagttattcgagctcggtcccccgggatcgacccagaattaacccccctcctgcccaactggcaacaaattaccgggcagattaggcccattttgcttttattagccggcaacggtttatgcctgttttacagcaccctagggttacccctcacccttttactgttgattgtgcttagtttgatgtttttggctaatcccagggcttaccgtcagggtttcatccgttgtttccccgctttttatcgagcacgggttgatgtaattctgaaggaatcggtaatcttgctagaagattggccccggttggtggtagtcagtcctgtggtggtcccccctgccacttggttcggtttagttttacttcaggtgctgcttcccctggccctagcccttgtggccggtattttaaacgtcattcccgtcaattggcccccagattagtctagtcccccccatggcgatc

SEQ ID NO: 6290 - DNA, 513 bp, Emericella nidulans
gagaataacccccccacagccgaggcggaaccgcgcgggcctgcttgacatgatcgacaggctgcacacagcgcggaaaagtgactaaccttcttgaaactgccctgatctcccctaacccagaacctcaactgctcttcctccggactcacaacgcccgccttcgccgtcaccagcgacccgctcttatagtgcagcagaactgtgaacgagtcctgaaagccggaggtattgacctcgcgctgcgagcccacgaaccccgtcacccgctccggcttgccgagcagatacagcgcctgatcgagcaggtgagagccaagatcgtggatcgcgctgccaccgggtacaaccttgttcttccatttcgaaacggtaggagcgggttcttcagggcggtggcggtcgaagtgggtttcaaattcgacgacgcggccgagctggccggattaaacgagcttggagagggtgacgaagtcggcgtcccagcggcggtcgtgcttttgtaacgatctt

SEQ ID NO: 6291 - DNA, 654 bp, Emericella nidulans
cctgcgtagttggcgatgacgtctcgcgaggttattccagaggggacgcctctgtttctgcgtatcattgttttcggagtggatcgaggatcagcctgctgctaaagactttggatcctgggatttaaaggccagcatcgagctgctgaaggatctgcctgagtttggagtggacttcttggatgtgagctcggggggcaaccataaagatcagaagtttcatttcttcacggactaccagaccgaaatggccgcgaagctgcgcaaggagctcagggcttctggtgcaaggacacttgtcggcgctgttgggttcataacgcagcctgatgctgcggcccagattgtccagggagctgatgaggagggcgttgaggccaaggccgatgccgtgttaatagggaggcagttcttgcgtgaaccagaatgggtcctgaacgcggcgaagaaactaggtgtccaggttaatccccctattcagtttggtcgcgcgatgtgattgaatatgtgggtttttttttcctagaggaaatatccttttgggagtacggctagaaatggtgtctcagtaaactgtatccagacaatgaatacgtcacttgaaagacaacaactattcttagcacttgagcgtctgcgcccatccatggaagg

SEQ ID NO: 6292 - DNA, 482 bp, Emericella nidulans
caccgacgccacccttatgctcttgtaagctgccagtgtccagactcttcagctcttcattattttcgccatatggaaaataaattttcagtaaccagttcaaatgagccgcctcatctgcccacctgcgacacggttatgaagaatgacgatttccctcccggcctcgtcccgactatcagttggatgacgtgtgttgactccttatcgcaagtggacacttggagacctagtgaggcgcttatgggactagcgcccattctgggcgtcaggtgatcgtcgcatgcggttcccccgcttttcgcatccggtccttgcgtggagtcttgtcaacttgtcaccgaaacaataatgcttcgccatagatacagggaagaaggttaaaccatcttcaacttcagaggctgtacgtggatatacgtacctcactacgtaagatatgcaagggaccccaatgcggcagaaccaggtttgggctgttg

SEQ ID NO: 6293 - DNA, 599 bp, Emericella nidulans
  unsure (1)..(599): unsure at all n locations
aacccagtcacggttcatccccttgcgtaccagtttcctgaactcactacaccccactgccttactcctgttatgctttttactacgctattgggatcttgcacgtggacgaatgttccacccctcgtatcgctatgagccccgcattgctcgggccgcttcccagtgaggggctcatctgccagcactactggtctggtttctcccgagaatgcacataaagcattcttattggcaggcttacatactgatctctgatcgaactaccgcaggcccggatatcataggatgtacagacactggtgtacccctaggacaaattggcagctaatatcgccgcttttgttaggaccagtgaattagatccatctacctctgtacgacactggcaacaatatacggaaggtgcagagactgatgcaggaagctcactgcatctaattgaggatggtacatcattacttaccttgtggttngcatacagccctgctagcgctagcagacaacaatctccaaggatgcagatacacctcatagatatgctacgatgcgcaacaatatcatctcactatccatccagagcaagtccatagacggtc

SEQ ID NO: 6294 - DNA, 533 bp, Emericella nidulans
ttcatatctcgccactctcagcttcgggctccgtaccaggctgttcggagatcctcgttttcgttgatttttccggcgatggtgccggcacaattgaactcccacttgggtcctctatagatgggcgactgggaacgtcctgcaggagatcggtctcctccctggctttgacaggtcgtcctttgatcgaacagcagtcgaccggcagaagaacggttttccgagcttggatgctatcactaggccaaaatccattcacctttctaaaaattgctgcttgacatccatatctaatagtgactccggtgatagtgtccgtgggttgaacttgatgtacgtagaccagcgcctcttcatcttgatccgtatccgctctggactgaactgtccggtcattagaatctcgccgcttgtgtcgagaattaagattccagctcgggtcagtatccgctagtagcaatgcctccatctttttcgcatgtaccatggcttgtctttcatcttgagtgccggcgccgatctccggtgtggtc

SEQ ID NO: 6295 - DNA, 480 bp, Emericella nidulans
acggccgataatacgactcactatgggatcaagcaacaaacaaggaaaaggtcctccaggatagaaaaggacactgcacaccaccaaagcgcagtaacatattgcgacaggaacgagcacacatattacacggcatacgatccgagcacttataccatggagaacacggcgagtcttatgactgcatcataccaatgactgacagacattggcggcctcaagcacagaacctgatatatttgttacaggacagcatgagcgacgtgtctactggcgataggttctacactgatctttgcctgagctgttactgctgcgcaaagatctctgacatcgccccgatggcatagcagcgcccacctaactattggaccgctcatgaacgagcgaaactagctactactgcgtacagacacacattgccttggtcggagcagagagctttccgcataggagagaatgcatgattgagagcgactt

SEQ ID NO: 6296 - DNA, 1139 bp, Emericella nidulans
ttttacttcatttacctttctatattaattcatacaccataatcttttctatttttatctttaatagtttaaataattgcacatttattttagaatttggttgcgatgagcgccttaaccattactaatgggatcaatccggttacctcgaaatagactaatcctaaaagacgtagtgctggcgcatattttattgataccgatcggtttagcggagcctgtgatcctcttacctgtgtcgatggcaatcccaagtgcactcggccgccagaattactctgtggctgcactttcctcctgacttgacttctgtggaggcagagcttgagacttttactattcgaagaggattgaacttaatgaggaggttgcaattcgggctgaattctccataccctgtagataaccggtgcctaatttcaaccctcactacccatagaaaaagaatgtctctattccccgcctattctcataatatttcgtgtacttccgaatatgtggaataattggcttcttgaaaagagtcccgagcgtttttctggcccatcgtctatgctgttcaatactttctgggaagttctagcttcattgttgggtgtatataccttttacgtctaggagcccttttggtctttacaatgtggcatgataaatggttggcttttgttatctttgggccaatgaattgggtccatatcccatataacctgtttattttaagtttggtccgtctttttgtaaatttcgaaaacctaactttgttatgtgttaatttttactccttaacaccttggcgtggacgagctcaataaatattgttcctgtttttgtcccacccttttttggagtcattttttcctgttttttccaaagtgatgtatctatcctagtagttttcccttaatacttaatgctcactatgttatctttacgtttttctctgttacagtggttttgctttttttatgttcttctttatctttccgcttctttcctgggttcttctttttctctaggtgtatcttgcgaacagctcataataattttgcttgtggctgtttcttactgatcattgtcgtgtggctatatactctcatttttttatgttaaatctttttcatatcttttgttaactattg

SEQ ID NO: 6297 - DNA, 611 bp, Emericella nidulans
atcacaggatgatgtgcaatgagatcagacatatagcactacatgctctgtacgctaaacgaggaatcaacctttgagacggaaacgcaatactcgacactgtgaggacatactggatctcacattggacatatgtgcgcacgacattgcctgacgttgatatgaacccgattgacgacctaggcacgtcagggtatatcgactacaccctgcgaggcggagaccgactggcacaggcgggcatgtatcgctatgcctgtgagtaacgcagcacctaaaatgcgcaaaatgatcgccatagagcatcgtctaaagcgccgaataccaacgaaaagtaaaactgcatgtatgcggatatccgaccttgtcttactgggctgactgtcacatggctctgattctgcaatgtgaaggacatgatctgctgcaggctgtggagccgtggcagcatgatacactgaccgactcacagaaggatcatgaagctcatatagatcgacctaatatcgaccatgcacagaagctcaagctgatgatacctagcggtatgaaaggactgctgtttgcacgcaaacaaaaggtgcatatccttgtcgatggaatgcacatca

SEQ ID NO: 6298 - DNA, 522 bp, Emericella nidulans
aactcagaggctctcagccaactggtaaacctggcttttccaactgggatttgtgccgctgggacgaagctgcgaacttggggtcctttttactggttacaggcctggtggacctgggtccatgagcgtccagatacttctagtggtacggtaaatcatgggatcaaccaactggatagagggctgatggcacgaggctgtgatgatggggttgcaagtctcggagacaaggaaggcagctctgggttctgagcgtccaaatactataagtaccatgggaaatctggcattaccctactggacccagggcctatggaacgctgtttggagggcagggttgcgggtcctgagcacatggagagcacctttgggaacagcgcaatcagacactttaaagagggtgcggaatctggtgtgaaccagctggattgagggctcgtggaacggggttaaaaagttttaattactcgcacgggaaacaagcaaggacacactcggagctgtgcatgctaaaccctgacc

SEQ ID NO: 6299 - DNA, 944 bp, Emericella nidulans
  unsure (1)..(944): unsure at all n locations
cgccgcatatacgactactatagggatccacggatcgttgcagacagtcacaccaggtggatgcttatgcttagcgatctcctttttgacggccgggtggctgaggcagagctgttcgatctcgatgagttcatcggtgtcgacggggccctggcacctgtcaataaaactctcaaaaaaaaaaaaaaaaaaggccctgttccgtttgctctaaccgccgatgggggaggccaaaaagaccgcccaagcaacttagtaagttccccaaaagtatttgaggtctaattacatacaccctaatcagaggcccctgtttccatcgcgtgaaaccagcccatgtgtaaccaggtgctccttctaaataaccggacgggcatcccaactctttcgggactcgggaacactagaatgaaaccacacttagtgctttttccccaacccccgctcagtcacaacattaatgagtcgtctttacttcaaaaacgattgtaaccatcataaaccttccgcaatatggaaaattgctatcaacaatattcttcacacacccttgaatgatgcatcattctttgaaaaaaattccccttattaatacaaacaatctagccgccccggagtttttaaactaattttctccttaaaaaaaatactggggttccccacccccgttggctaatccccccaaaaattttttaaattgttcaccccccccaatttttttggggggcctccaccattttcttccaccaatatctcttattcataaaacattctcctctctctctcgaaatataattcctctctctaaaaatttttgtgattttaaacacatctcttataattaaaaattccccccttcttacctgtgttaattttaatcctatcatatttctattccccccctcttctttagtccttttttatattnttattttttcctcttc

SEQ ID NO: 6300 - DNA, 844 bp, Emericella nidulans
  unsure (1)..(844): unsure at all n locations
ctgctatatatgatcttgtttccagtatccaaaagagcgaggtatcacctgcaaccttatatacgccaatccccggtccatttcgtggcagatagaacttttgcgccgcttgtcaaatggcaatgttcgtattgatggcttaacaataggtgctggtgttccttccctcaccgtggcaagcgagtatattgagaccttgggtctgcgacacatcagcttcaagccggggtctgtggctgcaatacgaaaagtagtggaaattgcacgagaacatccagattttccagtcatcttacaatggacagggggacgcggtggtgggcatcactcgttcgaggatttccatgccccgatcatcgcaacatacggaataattcgacaggagcccaatgtctaccttgttgctgggagtggcttcggagatagcgatagtgtttatccttatctcactggatcttggtcagtagcaatggggcacccggcaatgccgtttgacggtatattgctgggcagtcgcatgatggtggcgaaggaagcccatacctcaccggcggtcaggagaatcattgctgctactccaggtgtgtccgacagcgagtgggagaagacgtattctggaccagcaggaggggtaatcaccgtcacgtccgaaatgggtgagcccattataagatcgccacccgcggtgtttgtctctgggcagatttggataagactgtcttcagcctctcgcgaagagacaggttgacatatctggcgcaacatcgtcgctcaattattcaaaggtaaacgccgatttngcgaaacatggttggatgtaactccgaggtgaggccgcgatcta

SEQ ID NO: 6301 - DNA, 594 bp, Emericella nidulans
caattaaccctaaagggatccagaatccaaccaagctaccaatctggtatgcgacttcgaagaacccggtgaggaagccccggatcgacacgattgacagctcggcaatatagctggggacggtcgcggtgatagcgccgcatgcgatgccggtgagagctcgtccagcatctgctctagttaacaaccttgactactacggggatatgacttacatatataggaaaggtgatgtgttgcagccgtcatcacaatcgcgccaataagaaacagcagtgtgtttgcctgaagggcccatttacgcccaattttgtcggtcacttggtccggttagccagtgagaccgtctctaacggcttcactcaggcaagaagcagaagatggcgccgaaaaatgcgccggcctgaaaggttgacgtgatattgcttgaaatatccgccgcctccgactcgacgatgttgaaggcatcaacgaagctttggcgggcaatggtagttcccacaaaagccgagtcatagccgaacctggcggatcagttggatgtttttcgttacaacagcacctactcacaagagtgtaccagtggcaatgatg

SEQ ID NO: 6302 - DNA, 537 bp, Emericella nidulans
ttcagcaacataacacaacgtgatcttgacatccgtttcatggttgaagcgcctagcacggtttttgccaattccaaatatgccgtttctacctggtgaagctctgccggcacgtctcgaaagatagaataaaccacccatgaagaggagtgtagggccaaaggacagcacggtagccatccatgggacttcatcaacataggaaacggggatacgctcggaagttggaatgccgagctcaaattgggcttggtcgagttttcgctcgaaactctcaacggatccgacagtgaaatagtagtagaagtttggtgaagctgcaggtgaatcagggtacgttcgagccaccgcatcacggttcagttcgacacgaaccctagttctgttggtaacggtcaatctctccacaagtcccttatccaaaaatttgctcctaaactcctcccatgtgatgtccttgctattgtcgccagggaagatgctgcggtagatgtaataggcgatgacagtcctgatcgaggtcgtcggtatcgagta

SEQ ID NO: 6303 - DNA, 343 bp, Emericella nidulans
acacccagcttattagaaaacaccccggaggccaaaaaagaaagataaaaccccaatggcccgacagattttccccaaccagaaagaaagcctcccggggaggcattaaaaactccggacgccttaacaaaagaccacaaacccatcttgtcgcacaaccagcacataaaaagcgacgaagagacaccaagcaaggcaacccaaccgccctaaaaaaactggatcgatatcccgagagatatcaactgatcgcccaaaggaaaaccaggccccgatcaaccaaacagataacccctcccctaaaaaaacaatattcgaaacctgcaagaacggaatgcccaag

SEQ ID NO: 6304 - DNA, 869 bp, Emericella nidulans
ctcgtagttgtttcggtagcttccggatccgctctgcgacttgagcttttgtctcgcgatgtaggagctttacttgtggagacaggcgcagatcagtccaatgccggcttcggcattgctatagaaataggatggttagcacagccatctcgtaaggtcggcttggattgttgagtaagagttgaagttgacgcaacatacgctgtcaaaacacagtgaatccagaaccatgtcgtatccggcgtttgcgactcatcgatcatcatggccagtctccaaacactgaaccctgtagccagcccaccagcccccaagatcccaatgactcgcaacttcttactcaggctcattttcagcgaccatagcattgggataggaagaacaaggatccagaagtcgcttatcatgctgatggtggagtcggcgataatgaccttgcgttggtcgaggcacgttccacccgtgacctcggcgccaaaccagtacgtggagataggcttgcagaagaagatcttgatgaaaaggtcggggatgtagtagaggagcaggacgaccattgtcccctagaccatcatgaccttctggcggtcttgagcgaaaatcccgagcatgacagccaggaaggcagtttgttacaaaaccatgggccctaacaaggttttgctcagagccctgagagcgggccagggtaaggggttctttggtgcccgtgtaggtgctaaaaccttgactggctttgttttgacccccccggggctcccgaatgcacttgtttacatttcgaggagatgggaaccttaatttccaacccaagctttttattatcttccggcctccgggttccccaagttccacccgctttaataaat

SEQ ID NO: 6305 - DNA, 495 bp, Emericella nidulans
tgtcctacgacatcacaagaactagccaaccaactcggcgcatcgaagatcatcctgggaggccatgactggtatgtccgcgctttacacacgcattactaggattcacattctaactcgctgggaaaaggggcgccttcctcgcctaccgggtcgccctctggcacccaactctaatcacgcacctcttcaccgtgtgcgtgccgtacagtccgccctacaagagatacatgacacttgaagacatggtttctaaagtggcgccacatttcgggtaccagctacatttcgttagcggggagattgaagaggctgcgaagagcaaggaggactataaacagctcctgattccactttatggctggaagtctcaagatatagaacttgcctttgattgtcatatcgtttttgatttcttgaaactgtttttcccttctctactactccttttctttcctactgtctcctctcatttcttttctttacttcattcta

SEQ ID NO: 6306 - DNA, 547 bp, Emericella nidulans
tgagtatctagatggacagtctacagagaacacaaagcccgcgtctgtgccgctcttcgccccggtggcacagcacggggcgaatgcgttttggcccaagctcgaattttccgaggaggacgatactagcgaaccggcattggtggaccatgatcttgagtccaacttttcagggccttcaacgtatccagtcggagacttctcccagtggaccagtaacaatacttcggcagatcatgagcagccaaggattccgcctgcgagcggacgggaatgcaccatatgcggcgctcgatttacgcgacgatcaaattgtcgggaacatatgaagagacataaccccagcaacagaaagtcatatgcatgcgaaatctgcggaaaagggcttggccggaagacggatctaaagaggcactgtggataagtgtatgccttcaaaacctttacccaggttccctttgtaggcgttaatgaatgaaccaggttcatcgagggatttggaagtattggatgtgaagaagtgtggaagccggtttacttggcaagg

SEQ ID NO: 6307 - DNA, 656 bp, Emericella nidulans
gatgccagcatccagacaaacctggacacgacgcatgtcgcctgtctccgtatcttcccaggtatcaagccggagatggtggatgcggtgttgaagctggagggcttgcgtgggctggtcctggaaacgtttggcgctgggaacgcgccccacggccaggacaatgccatgaccaaggtgcttgctgacgcgatcgcgcgagggatcgtcatcgtcaatgtcactcaatgtgagtaacccatagcgtcagaagaaaccgatcaacgttactaaattgtccaggtctgaccggtagtgtcagccccgtgtatgctcccggcatgagtctctccaaggccggtgtcgtcgcgggattagacatgaccacagaagctgccctaaccaagctggcttacctgctggcgctccccggggcggaccccaagctcgtggcgagcaagatgtccttctctctgcgcggtgagctgacccgagtcggtgcagccagtctttccccatccggatggagcttttgccgagccgcgtcaagctgttcactatattgggatactcccatcggcagggggacccttgttctggttgaatagcttttggaaagcgagcattactggctgttgaacaatgttacttttttgaacaattcaatggtaggtttt

SEQ ID NO: 6308 - DNA, 639 bp, Emericella nidulans
cgacaagatcgaaaataggtgtagcaagacaataacccgagctttattctacttcgttgcccagacgccacatagcggtagaaaacagtaagacaagccacctgaaggtctcttaaggaagagaagcaacgcaggagttgaagataatggtaaaaatccagggtatttgtacagaagataaaggcgagaaaacggggctggccatcagtagtattcctctctctctaatatcatgatcaattcggtcaattccttgcgcagcgacctatttcggtcccatatttcgatgattttcggccggtggctcaagaagtaggccttcttccaagagagaccgttgaaacccggcgcaatgccgttgggtagattgcgagcaaggttgcgaaggacaagtgcagccttgtatgcaacgccgacgggctctcctcgttcagtgacaggggtgtccaagtaaaaccacttccgcacaatacgttcctggagtaccggacgttttgagctgggcgcttccgcatcggcgggtcggtcttctggaaggtgggatgaaacatggccggacaccatggcggtatttgcgctgggtccagagggagcggacttggtgcagttatcccactgacaagtgtggacaggcgtttc

SEQ ID NO: 6309 - DNA, 577 bp, Emericella nidulans
ctggtggtttctcttctggaacttgatagcggcgtcatcaccttttgttttgtccggatggtgcttcaaatcgagtctcttgtaggcactgttgatgtccttcaaagatgcatctggtggtatctccagaatgtcgtagcagttcatcattcgtagtcttgacgagctcgccattgtcaggagttcggtgggtgttataaagcaaatatgggagagaagcgcgggctggtcaaatggaattgttgtgagtgttgccccataaggtcatgccaggaaagtgaggagagcagggttcacttcagtgggattcaaggaaggtgtgagtggctgtttgatgacatgccaatttcatcctagggagtaaagaataaccgagtgatttccagacagttgagacctttttaaggcggagtattgttaaatccgcaaatatgtagacagctaggacgactatattacagagctcatgcgagaggttaatagtgaaagggctgagtttagatcatgcagttgcagctatttttgaggacaaacacaagtcatggtacaaatgaaatgtagagagatagattttaca

SEQ ID NO: 6310 - DNA, 211 bp, Emericella nidulans
acattgcacgatgtgcatgggggaggagggaaactggaacatgcaagcagatgcgccaggggaccttgaggacatggtctacagaaggcctttaagtatctgggagctggggttcaaatgagaaatcttacgtggtgagagcaggcaggggttggcttagaatattctgtcttgagataaagagctaccgatcacacggggagtataagca

SEQ ID NO: 6311 - DNA, 582 bp, Emericella nidulans
cgcgtgaagtatatcttcttcatggccgctcgtagtgtatctagttatttatcagactagactagaaacctgtaggaaacatcatcaatacccaacacccaaatactttaccaacaataatcactaacgcacctcatggtacctaacaacggctagagtagctgagggaggaaaggaattagctaccccaataatgcgaaaaaccagatattcagttcaaacagcttatgatattctactggtccaccagtaccgaagctctcaaaataggctgaacttggcacagaatagcaagtgtcatcgccgtatccacccctgatattcccgaccggtcgtacggggattcattgcggacgtgtcgagaatcagagagtcctttttctgatgcccatgaacgccttagaagcagcaaacgagcatccaaccattttctgagtgcacattctcttgctctttcagcagcacgcggagaatagagattgatgatcgtattcgtttactcactcaggtaatggagaaaccgacttgacataaggcggtagggcggtatggaaaacatgatgtgggaagactgaactacca

SEQ ID NO: 6312 - DNA, 770 bp, Emericella nidulans
gaatttttaaaccaacagccgacgctttgagaatagaggaaacacgtaagattttatctctatcaatattatccattaatcggttatacactaaggtacagtatctatataagtatcctaaagaacacaagaaagcaagaaaagagactcgctgcagctacgaataatgccggctataaccggggagttgctttttcttggtcatctcatctcacatcagatggttgatgtttggtgtatgccgcatcaagtgaagtcgtaagtcattcatagcgcgtatgtgcggttttttgacatgtcctggagcgggatttgattgtacaaatgtatgcatatgatgtaggtatgtacgttgcaaggcgagggacagggggtcgattattcacacactccgcaggtttgatccgaggtaggagtaataagaagccccaaccgacatctgtcaccctacagcttgtggtcgtatcaatggcttttgaggctacctctgtcggagttgtcggccaccaagctgcggaacgggggttccctctcggatgatcggtctcggcggatggtcaagcagttaattccgaggaaggtcgtgatgcggttgattataagaaccgcccagtacatatatgcgacgaaggcaaagaggaagtaggtgcggaggtataggagctcaagagaggcgctgtctgcgggaaggccacagaaacgggaggttggcgaggatagcgccaccaacgagcggtgtctgcggcaccgccagatgggaaaagcgtagt

SEQ ID NO: 6313 - DNA, 1401 bp, Emericella nidulans
  unsure (1)..(1401): unsure at all n locations
cacctgctctgagtgtacggactggcgaatcaaccacgggtcaccgcaggccagcccgccaaaatttactttgtaaatgttttatgcaagcgagagctggatggaatccgtcggaactcctaccaccaacgaaaagaatggagccggcgtcggccccgggcgaggtcgatccttcgagtaggcagatcccccgctaaggaaataataggcaaatttagaaaatcaacaaagatttaatgaagaaaataacaaaattattatggttattattaggaatgctaggaattagaggaattataggaattataggagtaaaagtaaatgtgaaaaagatagaataataaattggagcgagaacgcattcaggacatgcaggactgagggctttaaacctaacactctgccaatactagacgatgccgtgccatgccattcaagccatccaagccatccaagccatcctcggctgaccttccttgccggttgccccccgacgagagggcagccggctagactgggtcatgtgcctgcctctacgcgtctgagttggggtcttggcttttaggaggctttgggctcgcgataccaatcctgccatttaggctctgcaacggagccgacagggatctgagctcccaactgagaggtgtttgggccggttgggtgggttttgggttatgcccttgctccgtacctcgtaaatgggacatccagtgagcttgtgagtggtgaagagtgaatgaggggggggatagactggcatgctacatggactcaaggcctagaccaatggcggccacgccttgaacgcagtttgctggttttcagactgttcttgtctccctgggctacctgatggctcaagtccctgggatggcatgtgaggtcaattgttgcgcgcttagttattgactcttccttaaggtccttctgagacgggagcacggtctaagagccttgggtactatttttttccttggagctctttgtatttgcctactgcatgctcctatcccagtatagtggtctcggacttttttatcttctccattctttccattactgtacacgttatcccttttgttcctaattgccttgcatctgttacctccgctttttaatttctcaccattcctttttttttcctccccccaaccaacttttcctatttgcccttggattaaccataatcttttatccattcactccaatctattctctatctctttaatttatatttgtttggtagtaaagnnnnggggggggggggnnnngnnngngnnnnnnnnnnnnnnnnnnannnnnnnnnnnccccccattagangggnnnccncctccccccctccccccccctttatgacgttttttttttatttcttcttatttcaactcccctccccc

SEQ ID NO: 6314 - DNA, 896 bp, Emericella nidulans
tccagccaacccgtggcttttagttggtcgactaggggattgatgcagctgcgagagctttgcagagatcggaaaaaagctagtgatgaaaccctatttgccttttccaaaaccatctctagcctttgttggatcgattgctggaatacccgctgtaggaattttccaagaacctgctcataatttgggaaagcccgccggatgatagctgactcttcttgtaccacaaccctgacttcgtcaaccagagattggaggctcggttcaactccagagggttctgcatctgggtcggcaagtttctcccatgactccggatctccgccaacttcctcagtgactaattggctcctatcaatgaagaattggtgttgattcacaaatagtgcaacaacgctcgccccgccattgaaatcctggagaacagtagcacaatccttcataccttcaaagttagccttacgataaaaatcatcaaactgcctcaaaaggtctttttccagcgtctcggagaatttttcgattatttcgcgcgtattccatcgaaacccattagtcccttccatattgttgctgtttggtgccagatgtccgtcattgtacggttcagtgctcctggactcattccagctctttgggtcaagtctttgactaatcctgaggagttgccgtgcaatatgtgctgaccgcacctttgctttacctgaccctgatcggcttagattctccaaagaatgatttttcccctgtactacaccatccagcatttagcgaagtgagatcgagccgcgggtcttgcgatcaagtcttcagcctcttccgttcaccgcattattcgtgccaagaaaatcccggtccccgtcgaaggtgttcagtttgaacactattgttgttag

SEQ ID NO: 6315 - DNA, 578 bp, Emericella nidulans
agcccctgctgaggttacccctgaaactccagttcagcaagacaccattcgtgattctgctgctcctgagatgctcaaagaaacaaccacagatgacacgtccgttgcccaacacgaagataccgtgcgtactaccgacgagcaggaaattactacttcgtctctacctggagagccaacgccagacccagctcagtctcaggagcagcagcagtcctcagagcccgcagaagaaaagcagacatcgtcctcgaagaaaaagaacaaaaagaagaagaagaagagcctgtcttctacttctgtggatgagggtcccagcactgccccgcaggattccgttagcgaacaagaagtggtcgaccctcaagccatcacgattactgctgaaggggctgctcctgatactgctgctgcggttggagagtccttaccttctgtgcctgaatctgctgaaccaaagccagactctccggagcccgcctcccagcacccacctgaatccaccactgacacagatattaactttgagccaaaagaagttgctactgctccgccctttattcctgaatccaccgagg

SEQ ID NO: 6316 - DNA, 1013 bp, Emericella nidulans
  unsure (1)..(1013): unsure at all n locations
ttccgccgcatatacactactaagggatcgaaactcaatactttacaaatagccgaaagggcaaagaagtttggaagccgttttttgatcaactacagaccaacggttatctgtatgatgggctgcccgtcaaatgtgagcaacatcctcagcggacggcagtgctccaaactccggaggatttcaacaaattatgtccggatggaggatgtgaccagccctggtacgttttccatttgcttttaacgtgaaacagtggcttattggtttcagtgggaccaaacttaaatgcggtctccacgactggtcccaacaaatggtattaaactttcgtacccattccaagtttaatttttcggtaaggttatattacctgttaccttgaccccgggatccctttttactctaaataatcctctcgttttctacctgacttatatttctttttatatctttatttttttattccactcttatttttctattttcccctctttttctttcctatctttctctccttctctttccactttcattctactttctatttcttccatctcacttctctgtttctctaatcattgttctactcactctccttcatctttttaattctctcattttatattcttctgttctttactatttctaccctccttattcttatctctttcttttttcttttttcttctcatatctctttttctacaatcctgtcttttttcattttatctctcttactctccacttctcattctttcttttacttatcttctattttcctacacttcttatatttatctttcttttttctttttttatctatctttcttctctttcctcttattttccttttcttatgttcattttttcgtttttctttcaccactctttatctttcttctttatctcattctctctgccataggttccacatcttttcttttagttacctgtttttctttttattntttatatttttatagttttcttactttcttcttctttcatct

SEQ ID NO: 6317 - DNA, 1003 bp, Emericella nidulans
ctacagacgcgtttgtaatgaagaagagatctaaaagtagtcactaacctgtgcacgctgagctagtctttcatggtccttctcgattaagtctgaaatctgctttgtgagctcttcaagagactgctggatggcctctgaccctgcacctgtctgttgagagatgaactgcgcgagctgttcctttgcctcttcgagcggtttgagcatctcttggagaagtttagccttgtcttcttccttcatcgccagctgctgctcgtcgttttccttgttcagttcttcccctgggccttcctcaaccctgctggtgaaatctgtatgctcttcctcgccaatagacagtgtggattcctcaaacccagcagcttccaaatccttttgtaggtttccttgaatacccggtgtcaacacacccgttgtaggagtccggctacgaggagtacccgagtattcgtcgtctattccttccagctcaccaatcctccccttcaaatcatgaatctctttttcagcaccctccagtctcctccggagctcttcgttatccaggtcgacgttgccctttgtgatggacatctcgcgggcctctcgttcggatcgagcaagggcattattgctctcccttaattggtcattgagtctctgtacttgcacatcgtactccaacacttgcttcttgagctcctttttctcagcctcaaggttttggttcttagtctgcaacatctcgatttccttcgatttctgctcggccgcaaatttagcattgcgattcgcattggcatagttattcttctcgatgtcaagcttatcgcgcacagcttgataatcctttgcctcgcggagtagttcatcaattcggctcgatagcttgccgttctgttccgagctatgaagagctgctcctcaagtgctgcaatctctggtcttctgtcgagtctcgtttgcaaacccaactcgccttgccagatttataaccttgatgcgctcttcatgaact

SEQ ID NO: 6318 - DNA, 943 bp, Emericella nidulans
  unsure (1)..(943): unsure at all n locations
ggtgattagagctgatgcttcggtagctgttattggattaacgaagctcgtatgtcctaccctcccaatatgatatcccccacccattaatggatctacgattgatggatgtaacgaacaggacgcaaaaaactacgccaaagacggtgtccgcatcaacgccgtctgtccggggtaagtccattatacttttattttatatttccggcataattccctgcttgttgcccatgtgtctgtctccacgggcgaaatatatgcctaaacccggtaccagcttcgtcgacacgccccttacccaccgcaacctcgaagaaggcgtgctttcacccgagattgaaaacacggtgctgaagcgcccggcgaggccagaggagattgcagacgcggtgctgttcctgacctcgcggatgggcagttatatgtgtgcggcagctttagtcgttgacgggggttatactgcttgagcgcggctaggcgccgttcatgtactgtatcgtatctgccctgggctactagtgccaggactgtatgtactgcggtggggatgagagaatcnngngtgtgcnnnnanaattcttcaatatccatcctttttcgcttaaggatcataaccgttcataagaaacatgtgttgtgggcagacctttgttatttcacacggaccctaccgtaagaaagcacggctttcaacggggcttcatcgatttcaaataccgtcctgagtagagacagtttttttaacacattgaactattgcatgcatgtatgccccaagccccgaaatatctatacccttcaatccctccacctttaaattttgtgtgggaatatccgctctatcctccttggggaatttcttctacaccactttttaacttttgctaaaaataaaaattctttcacttttttgtcaaatccgcatacatgtgacccttttcat

SEQ ID NO: 6319 - DNA, 967 bp, Emericella nidulans
ctatgggcaagggtgctagcgctatcaccaggctgagctggacatcgcttagttaggctcgaatttcagagaattatggcttcttcttggccgaaggctgctttcggcggtttctgcttttgctgctggtgggtgaactgctccggtgatagcgtcagagttttgaggaggacgacaagctcctccggaataatatccgttagcgtatcgttaggcgatggccgagaaatggcatagccgtcgtctagaagttctagactttccagaaattcgagctgtgacggatgtcaatcaattgagcagagtgatgagggtttgtgtgacatgtgtattacccgtggctgattttcaatgctggaatcgctgaggccggcagaggagcagagcgtgtcgagagagagctcaatgacatcgtatgaggcatagttatcggtaacatagccgtaccgtctcagaagatcagagcgaggaatctctccatagtcgttgaagatctcctcaccagcccggatgggcttgattgccttcattaccaacgattcctcttcttgaaatagacgggcctggaaaaagtcaatggaattaatagaagagaaaaaaaaaaaagggggggcattgcctataatgctcacgttatttctgtacgcgtccgcgttcagcatatcagccagaggcaccatgcccttggaagactgttcttcctcttcgtcagtgaggtacccgtcttcgccttcccgctcatcttcattctccggtgtctcaatgtcaaatgcgtaggccattattagagaccccatcgtgtgagcgaggcccatgagtgcctgagcacccacatcaccatcatacgaaggcagccattgatcgaggaaaaaagcagattcgtcgacaacagaatgatgagctgagaaagacttttagttcctgtttccaatttttacaacagcgtttcctgaactcttcaagtttc

SEQ ID NO: 6320 - DNA, 652 bp, Emericella nidulans
gtgctccctaagtcgcgcatgtatcccagctaaggagcttatcaagatgcattgtggtcacacgcgcatagacacaaatcttaagggctgcattgcgcggactggtaagcggcaagctcatgctgtggacactctcgaaacggaccggtgtctcattaaaaccgctaatcatctgtgttgtggttgcaccaccttcttcagagatgcctggtacaaacaactgggcgtgcacatccgttccctcccactcagcaaagccggccatgtcacgcatgacaacgttgaatttgagcgtagacgacggcgcctgcgccgacgatggttccaaggacagtcgtatgataccgaccacaccctgtgtatagggtgagatgacatcaaccgaaaagtcctgaactcgcgtctcgaatacagctgtgagcggaatgtcagcgtcacctacaagagagtactgaggcgagcatggctcggagaacgggttttcaagcttaaagtgcttaatgtgtccggcctgcaatgactgtgcatttccttatgactaacacgcgctgaacttttcattgaccaaatggttacaattgttgaatcatgacacaacggacccaaggttttggatttaaattaattctttttcaaatgcctcaaacagatt

SEQ ID NO: 6321 - DNA, 1189 bp, Emericella nidulans
cccaggtatataccccggataaaactctaaacgccgggcgatcaccacaaagtggacccgtaagcatcctgcattagcgttacaatggtagccaatctaactgcgtccctggaaaacaaggtctgggcatccccccatcggatcagcgtctcgcatatatccgacctcggatctccatccagctcccccaggttcctttcacagacatcagccacatctagatattgtcgtattctgcttatacgacggacaccaatagcaccatggctgaaatgaatactcccagctctcttcaacgtgataggcctatcatccccctcacgcatatgccgcagcaggccaacgtctggaaggcagacgatgactggaccggtgtcgccgatcgtggggagaggaggaagctgcagaatcgacagaaccagaggaagtggcgtatgcacactagctcctgtttatgctagttttaactgcagtgctaatggagacacctgatttttacaggccagcggaaaaaagcaagtgctcgagggttccgaacaagcacgtccccattagctcggtggcatcccatttctatgaagacccaaccgagacagcaaagctaggagccgaggatggctcagacgtggtttgtggccatgcttcttcccaacgcctcggagtacttgcgctcattcgaaggccacctgggccagagtctacttaccaactgaccttaagttgattacttggacgggtttaccttgcttaaatggggacaatggccttagaagaaaatattccgggccttgtgttgacccttgaatgggccgatttgggaaattccctttttaaatttaatcttttgccccccggttctaatattaatttaatcccggttccaatttattccccccacatagaactcaaagactggccccccacgcggttggatatttcccctccttcacggggacactatttttggacactttctataacagagtagccctacctcggcgtaggtactctaaaccccccacatttttctggtatatgtcccccctttccctcaccttttttatttctctctttcttccctcctctatcattagttaaagagcccgctccatctctttctctcttctacgttctcctccctcatccttcctaccctaaccttctctcatctcgatctctattcctcttt

SEQ ID NO: 6322 - DNA, 516 bp, Emericella nidulans
aggaaatcccgggaggggagaagtttctagtctagttcactgatgactcccctttttctaacacaggacctaactcaatattgggggaatgaaagggaatgaggggggcaagcctcaaagagactaaggacctagtcagaatttcataattaacaaggcaagtctgggactcaaagccaggtcttgcgacttcaagtgcattactgggtacactgtgcaccatatacattccttagctgctctctggccctgaggcctgagttgattgcacagcctctcaggcagtacaggatagctctgcagagtggctgacagaccctaggacaggaagcaggcagagaaaggaggaaccacgaggccaggctgaggctgaagggcgagtcagctttctcggtaagcctatcaggaagctgattgcttaatctaactgagtctgttggggcctgcctccgggctaataacacaaatgcattgcttccgaccctataaacaagaattggcaagaggttaaattgt

SEQ ID NO: 6323 - DNA, 602 bp, Emericella nidulans
ctggttacaccggagaggacatgtaaagcaaagagcaaattaggcggataactctcacagactcagcttcacatcttccaatgctttccacacttatctggtgccatcgctgagcttggggggtcggcgagcatttgaggctccgataccttcataagactaatcccaaagaggaaacgatggctctcctccgaacctcgcgaccatctcgactcgagtctttcatattctcctctttcttgctctcttcctctttctctctcctttccatccgaacaatctcagaccccacctgggtttctgatttatcttctttaacgtactatttcattccttctgatatttttcgtctgaggatgagccgaaagctcgcccccgaagccaatcggtaagccttaagatacccctcccagttcaccactctacgataagaaaggtcgagtcttgcatcgcttggtcaattgttcaatatcaaagctggtagctcagacttaacgtcgctaaccttttttaggattctctttgtcaagaacctcagtacgtgccatttttagatgacactctcgccgtgaccttactgtcgtcgcgtggctgaatgctac

SEQ ID NO: 6324 - DNA, 590 bp, Emericella nidulans
agacaccgcaattctctatattgttgttgagctgatggtaagcctgtgcgcagggagttcgtcggtatataatgtaccggagctcgctattggccaacaatctgcattcattaagccgaacgttgacaagtcgccatgacgaccatggcttgcttgtagttgataggcagaagtttggacatgtaccttgtaccgacgtatggggccgagaactagtgttgctaatgacgcgcggctgcgcttttagagggcccaggttctaatccgcgactcccacattaccgatcaagcgcgtccaaggccccttcgggcgcttctcagcctgaagcctcgctgaagacctagttgagcgagcttcatgtgcccatatatcgctgtcgttcttttcctgggcaccctcgagagcctgctcgaggtcctgggtcagcagtttatagaccttctctagctcctgatacgccccatctgcatgttcgctaccatcttcaacctttttccccacatactccttctcgttagatccagccgcataggatgcgaacgcccatgcctcggccaatctgacaatttcgttctcttcgccgaatctg

SEQ ID NO: 6325 - DNA, 544 bp, Emericella nidulans
  unsure (1)..(544): unsure at all n locations
ggggtaccgccgagtccggtttctactactcgacattcctgaaggcctacagcgaacggacgaggtacttgggtagagttcaacgactccgacgttacgcgttttgacccaggaaggattggggagcaatgcttcggcggctacagcgattctctccactccacctcggcgggacaagtccggtttaataaagtctggaatgcttacatgctgttctaccaacgcgtttcaagtatgatatcggctaagtcaacttaccacgcggcggagaacaactatccagtgcgcgttcctctgcctctggcgcttgctaaccatattgtgatggaaaacgaattgttcgtacgagcctactgtctgctggatccgtatatagcgttttcgttcgttaccttgtctcacaactcaacgaggagaaactcgccaagagcgaaccgaggaacanattggataagtcggtagttttcatcgcgcttgacacgctggaacaactgcttataggacgaaagaaccgccgggtatgagaatttcggtaggagattta

SEQ ID NO: 6326 - DNA, 545 bp, Emericella nidulans
ctaaaccctggcgtgttgagtacttttgcatatgtgagagcaagctcgatgtttgggtgtcgagtaaggtgacctgcccgagccattcccgccgcggggtaaagccttgactaagcggatgccccataagattatcctctggagccaatgacgcgtatttcgtctctaattgtttttatataagaatttatatattctatggattccatatacttgcgatatccttgtctgcatgttcttcatatccctttacccgcgtgttgctctttcattcaactgttttcgttatccatctctctatgttgacacattcgtgcaatgtgttcaggcttcataccgcatacagcttgctatcctaggaaaaattacgaatcgacccctgccgagacgaaaaatctttgcgatcgggatccatggttaccctctgcgtctcaaagtcatctccgttcgattccccgtccgcctccgagatttgagaatgattccaactctcaaggaccgctggaagggtgaacggatagggaaccccacagtgcgaagcccag

SEQ ID NO: 6327 - DNA, 218 bp, Emericella nidulans
gtcgaggatggggttaggactccattgacacactggggaggaggaaaatgagggggatgcggagggagcctgggggagtgggagcatctctcagagcatctctcagagcacatggagacagggaaaaggaggctgggattagagaagaggataaacacttcagtggggtcagaagttggaaaccccaggggaggcctgcctgccaggattatggggaa

SEQ ID NO: 6328 - DNA, 560 bp, Emericella nidulans
aattaaccctactaaagggatccgttttcttgaccaatctaagattaggctctactagcatcgcatgcatcttatctaccccgacatccctaaaggcctagccgcgtccctgagtcatagcccacagcccacagcccacagcccacagcccacatagccacactgcccacgctgcccacactccccgcttgacgagagcttaagagtcaacatccccttgacttctaagaaactcaataccggtaacttcacagccaacgtaccgatgacaatcactatccgccccgccgtcccctcagacgcgccgaccctggcggccatcaatatcgacgcatttgccggccaagggttcgtctccaacgccttccccaacctcggctacgagggtcgtttaccagctcaagacgaatcggtacctgcagaagatcgcacagccacgggtccatgtcctggccgcggtggatgaagactctgtgccattgtgggatggcaccgggggcgttttcggggctgtggccgtaccagaaccggggacagaaccagggcaggacaacgacagc

SEQ ID NO: 6329 - DNA, 536 bp, Emericella nidulans
ctctgcaggggttcgaggtgattaatggtttgtacactacagccacattttttgcaagaaagccatgcagattctatggggggcttaccaaaccctgcagcgcgatacagactactaccaaacttactgggagatagaacgtgagcaaattgcttcacatgaactcgaccataacttgacgcttgagctcattgacagtcgggagagctgtactgatgaacaaggctggtaaaagtgcacaaggaaagtaggtcattaggtggacctccttgaggtcagggcgtgccaaagtgcacccctgaaaatgtgcgtgaggagaaaagtttatactttgtaagtttggggtttcgttccaatagagtgcaatttaggtgaacaaatggatctgagatgcaatggttgggcattctaattccaagtgtttccaaaacctacaagacttaagagggtgcaggatctagaactgccaaaaaagatctttgggtagacctaaaattttaagagtttctaacaaacttgttatggggaacaatacc

SEQ ID NO: 6330 - DNA, 922 bp, Emericella nidulans
ccacgtttcccggccgcgtgcgcgaatagttcctgtccattcttgtcgacgatcacgaccgttgcgccagggatgccagtcttagagtcggaacaggcggcgtctacgaggtcgcgaagagtggacacggtctgttcggtgaagggcatggtaatggtggcgagtctgtgactgtctgtcaaggatttgagatatcaaatagaggcgcgagagggtgtggggttatcgaactgctcagaatcaacactgcgtagatcgccgagactggagtaaagcgtggtattcagctgctctttatctagccaacatttagatccgatgacatttgctatgaatccaggccaattcataccctctatggcatgcgtcacctgtgctactggtccactcagctgagccgagggccgcacgctcttccgcgcccaactgggtcacttatggacttgttgcgtgaccaagtcataactcccatccttacagttggaagggatattgcatgcatccccttgccccaatttgtcggcacttacctctgacaaggccgtctttgccccaacctgacaaagaccctttgatgccatttgttctccctcccccaaaaccctgaccgcctcttcgccctccgcaggaacccaatccaactttttccgaccacttttttttgccaggggacaaaccggtgtcccgcccttctttttggttttcttaggttccagggtttcggttcggccccccttttatgggaaccgatttttaacccatccgaaaagcccgttaacccctgaccttttaaacccgaatttcctagaatttaaaatggattttttcccctttttcgcccaaaatttaagcgttaaagctatccggtttttaaggggctgtaaacaattccttaatcccccacacctcttggcccttggag

SEQ ID NO: 6331 - DNA, 672 bp, Emericella nidulans
agggcattcttcgagcaggcgagatagttcaatgattggaagcattgtcgggggatcagcgaacaagacatcagtgcgaatgcttcatatccctgtcatctgtcatccatggaatgtgtacatgctcgagcacggcagggtagtgtatgctcatccttccagcaatagaaaggggaattgggagttgacggaagatggcgaggagattctcaagaagtataaagggccctgaatccatcggtctagtcattggtatgcctgttttcaaatctcctctttaaagtcctttaactcaagacaacaactcagagcggatccattaagcgcaatccatcagcatgaaggttcaacttgccactatcctcatcggcctctgcggcgctacccttgcggcgcccacccacgtccagcaggagaaacggctgtggccattccacttccccggagaggaccacgagtcaggagcagagccatcgctgcctttgccatgctatcctttcccagacgagtccgtcggtccaaccggaagcgacagtctccggttcatcccgaggcccccatgtgatgaaacatgtggtgcatctactctacacagcatgagtgagggcgaagactctccacaggcacgtccaaatatggaagggctcctgcactgcgggtagtatagagtct

SEQ ID NO: 6332 - DNA, 529 bp, Emericella nidulans
caagtcgtaccaggtcagcatacagaccggttgaaaacccatcctctgccgttccggaccagaccccaagcttgaagctggacagggatcgcattgcctaaatcgatgatctgcgttgcaggagagcttgtgtgccttgtatccgttctccccgcggaagggggctccaggtccctgtgaatctcatgcaagggttacgcgatgaatcgaatatggatgggtcccgaagccaggtattttcttcttccttccgcctgaagaatccatcctcgccagaaacggtcaccgccatagactccggagactttctgcaaagacgcgaatatacctgagctcttcttccataagaaaaagcttgctttctcgtcctaccaacctgcgcacgcctgctaatcgagtctccaggcatttcgggtgtgccattacgaaaagcaccgcatcactccctcatgccttgttttccatcgtcgatgcacataccagaactcctcattgtttaaaagaagacaatacagcattaggtccatac

SEQ ID NO: 6333 - DNA, 535 bp, Emericella nidulans
tagcatgccgagtgatagtccaataatcagtctcacatctctgtacagggccgtcgacagtggattgggggtcgggttcgatagtcgctgtgtcattctgctgcgacaagcacggaactacgagctaggcatgtccttgtatgcaaggtggatggactgctgcatggagactacagctacacatatcagatcctgacccgcctgggtgaccaatattgaatgaagaacgaacggtaaacgcagggcgaaccatgaacgttgactcttctattgactcctgctcgaatttgacagttgacaactttccgatgacgaggcggtggggcacgtttgatgagatcgctttttattgaaccctggaagagctggcggaaagggggcgtgggctcagctcgaactggttgacggtctggattaaatctggaaaggaggtttcagacaaatgtcaaatgataagtcaataggtaatgaatacgatgatggtatattttcgggagattctaggccaaaaaacatcagcaggcataaacgctat

SEQ ID NO: 6334 - DNA, 557 bp, Emericella nidulans
taggggtggtcttgtggggattttttaattcactggagcttcttctaaagcgacaatgcgtataccttctgaggtctttaaagtgcccgcgttttcccaggtcgcagaggttgggacagacttcatcggtggctttgagttgctcaataactcgagcgggaagagccttgtttcccagagtaaagtatgtgggaagtggaacagcgatgctgccctgcaatagggccgtcatctgttggagctcattgctctgtggagcagtcgccaaacaagtctccagtgatgatagctaaagagagactttgcttgacatgaagcttttcgagccttggtgaagacctcctggagcttgcagttgaccctaccaatgccgatcctgaaactatcaggcccatgcttatctctgctgagtcctactcacaattttgaggccttttgttaacccctgggcagtacccgctggtttattagaggcatgtcccgtgatgcactactactcaataaggcccgaatgtgccatcctttcgggggaggttcactctatccctcaggaattc

SEQ ID NO: 6335 - DNA, 815 bp, Emericella nidulans
ggacactcccaaagagtgactcctaacctaacatacactctagtacctccaaaagccaagggtcgtaaacgcgctctcgaacccgaaaagcctctctctggcctggatgtcgactctctcctacatcaagaaaagcgcgtgcggatctcaccaaacaacgcaatccccgaatttaagcagaccttggcgcaagctgaaaacattgagacgatgaaggacgcagtcaagcaaatgcgctcgattctcgaggaccagatcaggcatagcttgggcgatgcgaactatgaccgcgtcactgagggtttgggcgttgtgcgtgaagaacttatagcctatgaagagcctggcttgtacaatgatttgattagaaagctaaaggaggcgctactgaaggagaagctgggtggcgatcagagagagctgtggtggcttctcaaaaggagtaaactggggttgattgaacagcgggagtcggagctttctgaggttacagaagaggaggcgaagaagtttatgtctgcttgataggagtaatgttcctaaggagtcttattctagaaccatgtgttcctatgagaatgagatggatgaatctgaaaaggcggggaatcaaaattactggcaaagaactgggtatactatgtgaagacctgctacggtagaaaccctgaagtgccggttggcagttctacagactttccacctttttccaaataacctttgcgagccttaacattaattagcagagttactacgcctcttgaggaactaccggggatctatcacatcttaaattattgaccccaatctgtaat

SEQ ID NO: 6336 - DNA, 554 bp, Emericella nidulans
atctacttctgtgttcgccattttgctgaactggcgacgatagtaattgatgacaaaaccgcggaggtgaagtcagctggtggaagctttcaaaaggaacccgttgctgcggctctgcggacttccgtcggccaatcgataacggtgttagacgcgcgcctaaagctctcccaaggttgagcgtagtagaccatttgcgcagtccatatatagtgcccgcgctaggagaggttttggcctctggggaattccagctttgagggatgggtctccaaacacagaatgccatggcacccggccttgactccagaccaactgtagaggactttcgcgacgatagtccttgggtgcggttggccaaaacacattggctcgatgctgcgaatgtccgcaaggtgaaacatgatgtgatcaagaaggatatttgggatcctctggagaccgagagctttagcttccgctcacttcttattttggagaatctgaatatacttgaaaagtttgcgcacgtcacctttgttcacgatggattgaatttgctaagctcaaatagg

SEQ ID NO: 6337 - DNA, 976 bp, Emericella nidulans
  unsure (1)..(976): unsure at all n locations
gttgccccgtactctattcgacacgcatcccggggccattttcccgctgctaattaatattgtctccactgctttccggaccactgggtcagtcaaacaatgttccccagacttcgcttccgtcttgttcgtgtcaacaccaccgtgaattcgtcaagtcccagttacaaacagcttgaggcgcgataccctcgtcttgctcaagagctcaaaaatgtgtgaaacgcttcagcctcgaagtgtcttgtaagtggcttagcttgtgctgaagctgacgaatcttatcctctaacctatttatgtttagcttcatgtccccctcagtcggctatctcggagctggaaattcgcagaaaacgcgacatcgcacacgatcagctctacaaaacccgcggttcgtccctgcaatccgctattattatctgattttccgctcccattgcagaaatggccgataccgagaagacgtttcgttcctacacatcagaccagggcagaaactacgcccagaaccggctcgattaccatcaggacctttacaatcagatcgtcgagcaccacacatcgacccgcggcaaactttgacactctgatcgacgttggttgcggtcctgaaattgtccggtaaatctcagcaagcatttggttaccattaggacttgatccgtcgagggatgaatgcacggccgcgcctaaattcaggccgccgtgacagggcagctcccttgagtctcccgccgagattaggtccacccttcccctattgcgactttaatagataatggcctgcacggagcactgtttcaagctcttttgcccccggtgggtttaaattgcggttctattggagaaaatcctcctccctcctaaacaataaccatctctgtattttcttgggtacctctctcttttttttttattttattacatctttcctcctatttcttttcttctnnctcctcccctcatcttaaaa

SEQ ID NO: 6338 - DNA, 774 bp, Emericella nidulans
tgggattcgacaggaggaaagaccaattctctgtttttgaagactcttgacgaccgcttttttctcaagtcgttgtcacccatcgagacccaggcgttcttgaaatttgctccagcgtatttccagattatgtctgaagctttgttccatgagctcccgtctgccatcgcgaagatgtttggcttctaccaggtcatcataaagaatccggcaaccaacaccgagttcaattggttcctcctattgatggagaaccttttctatgatcgagtgccaacacggattttcgacctcaaggggtcgatgcggaatcgcaaggtacagagcactggtgaacggaacgaggtcctcttagatgagaatatggtggatttcatctacgagacgcccttgtttgctcgagagcactctaaaaaacttctaagtcagagcgtgtggaacgatactttgttcctgggacgttagaacgtaatggactattccctcatgatcgcgatcgacgagagtcgctccgagttagtagtgggtggcattgattgtatccgtacatatacctgggataaaaaactcgagtcttggatcaaagaccgtggatccgctggtggaggcaagaaccggccacggttcccagtccgaagaatccagggcctggcacccaagtttggctcgtatgtgctgaagcccaaggccggaccttataatccagcttggaccttaacgtcttgccagtggtggagagttcaagcatcggttgtgcgttgatccccaggcttt

SEQ ID NO: 6339 - DNA, 529 bp, Emericella nidulans
cttagccgaagaaaccttggtctgtttgatctctggaaaaaaggtctcgcggaggacgtcgagctcgtcctgcattcgatacatcgttgtggtctctgtaaagcaatatgcgataaaggggcgttcacgaagcttctgttggtagggaaactgagtccgacggtggctgaccacagcacctcaactcacctcaactttgtcctcgagttcggtcgaatttccctctacagggtcctagagagctgtcgtcgggatcttcttcttctcgttttttattcattagtttctttatcaggatttactctcctaactggtcagatatatttactgagttatataaacacttgagatctgcatctcacagcttgcggttgcaccacttgatgcgtcaacgtggactatagagtctatatcattggcgttatatattggggttatcttgcaatgatgtcaaggttttgcttcggtgtgagcaggacgtgctatgacagttgtgatcgaatatccacggaatacaacctgcgtaagt

SEQ ID NO: 6340 - DNA, 836 bp, Emericella nidulans
acgcatgttgtgcggcctttcattcccaaccctggaaacaaacctggggtgggaatgtgctctcggagattcttggctgtggcgacactgaaaatgagttgaactacaacctttcaaggtgagcagatccgcagttgagattgtatcagcactattcggcaacagtgcgatctggaagcaaaatagggtgagggggacatggagccgtgttaattgtgggagccttgatggcctcaaacctgaagacgtgatctgatcgcgaccattcaaggcctggtctggacaccacaaccggtttctggccacgggaagagagcggcccctgtcagcggcccgttgtgattggcggcatcactcccgtgacccgccacttgcgcccctctgtaaccaacctatctctggtatggcggatcgcctccgatcataaggtgcatacataaaagttaaggatttacgatggagagtagagaactcagtgagtttcatgcatcattgcgcattagttggctccaatcatgcttgtatgaatgacaggcataccccagattttttttgtctaagagcttagctgttttccctagtgaatttcatgtctcgtagcatttatcatgaatctagactctagaggctgaaacatggaattatgtacacccaaacatatcttatgcatccaagaacaaccgttacgccttatccaaaggcaatcattagaatctctccatcaatttcttgcgcacagtccacatgcgagcccgcttgccgaaaatatacatcggaatagaaaagagcagcagttccgactggatgacgcccagagctataaagacccgtcgtgc

SEQ ID NO: 6341 - DNA, 332 bp, Emericella nidulans
ggaaggacccggacactcatacctctggaggcaatgtgcaatttatgcaaattccacagtattagcttcgaccccatgacgagagccccatgaaagatatagctaacctccacaatatgtgatttgccgagcttgggtttctgcgggtggctgcgagacctctgccatattaagatcgttgcgcgcccgagctttttatacgtagaatcccactgaagaataattggtagaaagtgcggaataatgagtaggtgtgctctctgacattaccaggttcagatcctcttccgagtcgaacgacgcggggttaggttcgccgctaggccgttcct

SEQ ID NO: 6342 - DNA, 623 bp, Emericella nidulans
gcatctccttcagcgcacccccccgccgtccactggcatgggtggcaaggatgatgcaagcgatattctatcggagcctctcaccgaccagactgcgatgcgcgccccagatatgccacctttattgtcgaatggaggtagctctgacccgtccgctccttcgcgcgacgaccagaagggctcagcgcgcaaggtcaatgtagacaggttgcgcgaaactcttgaagctcagctgagccttgaggttttgctgaaacataacgaacttcgctttatcgaccaagagatcgctaaatgtcaggtcgccttggagcaactgcgccgatgcgccgaaatcccttatcccggttcgcacgctactggtccatcgctttcagtcagcaacggaacaggaatgtcggtatgggctcctggaaatggacctgcaccgcgttctccagcgccttggggcgtcacaaacggcccttacacgcgccactactctcgatggttgttaccagatccccgttttgatggtggccaggttgaaccgatgacacctatgggcatgggcgcgacgactcctctggaaggccgttcaacgcgcggaaatcctatcgacactgcctattggctggaagcct

SEQ ID NO: 6343 - DNA, 1520 bp, Emericella nidulans
  unsure (1)..(1520): unsure at all n locations
aatataataggaggaagagcgaaagtaaagagatgttgaagaggtggagagggaagaagaagagaagaagaaaggagtaagaaaaggagaagaatagtgatagaatggaggagaaagaggagaaagagtaggagtaaaggtggaaagggaaagaggaagggtgaaagtgggggaaaaggaaaaagagagagaataaagaggatgaagaattaatagaaagaaagaagtatgaggataggggtagagagtgggaagatggagtagaaaagggaaggaaaggaataagggtaaagtagaagaaaagagaagataggtaaaaaagaaataagagaagaaattctaaataggatataagtagagagattgaggaggaaagattagggttagatagaagagaaggagaataataagatgaagaggaatgggtgaaaagagaaatagataaggaaaaaaaaggtagagaagggagttaggaggatgagacggaagagagcaaaataggagaagaggagaagattgatcaaaaggaagagagtacgggcagggagatacaagagaaagtaaagagataagaagaggagggacagtggtgatcaaggaacggacagagttggcacgaaatggaggagtccaggcagagagcgcaagaacgcatgtcaaagcgcttgaccggccaaaggcaacaagatggagtccgatccaagaatagtaaggataaacagcacacactggttttgaatacagtgcactgtggatgggttctgtccccgatacgttgcaagttctcgaaaagctagttagaggacaatggacctgaacatcctcatgccacgcgtccccgtcgcaagatatctggccattaatacgtttgcctcggggtgccgttgtcgctttgactgccgcgtgcgtaaactatggcggcctgctcgtagtccgatttttgctgggtgtcgcagaggcaaccataacaccggccttcatgttcatcaccaccacttggtatacacgcgaagagattcccgttcggaccggtatctggttctcaggtaactccgtcggcgggcttcttgctagcattttggcgtacgggatcggccatatcgaccaccctctccagccgtggatgtggttattcatcatcctcggaactgccaccttcctctggggcttcgtcatcctagtctctttgccagacagcatttcgaaggcagccttcctgaccgctgaggagaaagcgttcctgtcaagacgcgtcgtcattgccgggacaggacgcacagagggaactgtgtggaaacccgaccaagccgtcgagtgcttncgcgaccctaaaacatggcacctgcttggaatcgctgctctaacccagatacccaacgggggcattcagaacttctcgaatctggtcatcatatcgttcggattcacagccttggaatctaccctggtaaatatcccggtagtatcatcagcgctgcacgatcacccttacggatggctcgcggtcgtttcaggtctca

SEQ ID NO: 6344 - DNA, 575 bp, Emericella nidulans
gcggtccactggagcccgcagggggtggtttaagagacgggtggggtgtgcctaacactgaaccgcggcccaaacgtgccgtgtgggaatcagccccactgatgcaggttgctggcaacgggggcggccggttcagagtctgagctcatactatcaacatagcacgagttagacgcagctgactccacccctctcttcgtgggtaaggttcccatgcatacagaggaggctgcacctgtaaccctggaaggtgagctggtgtacacggtttattgacggggggcttaacggcgggatacacaaaaatgggtggttagccggaattaggagatatcggacccgtgccgtctctggccagctataatatcctacccctcaggccaagtcatgtcctttttgtgggaacctagttccaagcttagtggtctgaccgtgcctggttccctatatgaagcggccaaataaaaacatggggcctagcaggctcttccccttctgttagacgttctaagacatctgtgccagctttaatcccaagggctttcctctccgttattttacgaggacggtggata

SEQ ID NO: 6345 - DNA, 548 bp, Emericella nidulans
ccattctgacatcaagggggtttttaaagaactaagggctctcaccccctgcttctacaacatcacacttagctctgcgcaaccttttccttgcccttgcccttgccctttggtgtactcttaggagtagtcctcatgtgagtctccttatccttcgcggcccccacctttctcttctttgaaggagaaggggtcacaggtacagcatcaccagctccttttccatcctgttgggtctgatcatcattgaggtcagcatcgtcgttggcattaccagcgccagaactcatagtgacctttgcatcagggaagccactctcgatcttgctcttcaggcgctgtcagcgcatgcgcgtcggactggctctgatcccgactggagaaccgacggatttaaagtcgtttcaaagccagccactagtgacttctgattcccttttctggggttaaaaataattggaataggagaaacttggccggacttgctttctgcttaacgtcacaggacaaaactggtcccttggtatatacaattttggtgcccatat

SEQ ID NO: 6346 - DNA, 583 bp, Emericella nidulans
agggaatgaattgatctagataatcggtgtccgaaggcgatatgattatctgcaagtaattggcgttagccagctatgaagcataatggtagggtgcacttacttggttcaacacatatagggactcacttcgtgacgggaccatggacggcatgttgccggtgattataaatctgcaagtattaccgctctgtcatgaggagacttagcttgaagcgctgaattactatgcgagagttctcacgagtgataataagaaagctgtggtaggggagcagctagcttgtccacgccaaggactgatggccccccgattccgcgaggttcagtcaccccacgccgataacgtttctgcttatctgtggaaccttggcctgcccacagccgcgctcatacctagatctgactcgaaaacggttcgacctatctcgctagttgggcgtacttgtttactgttgtctgattttcatccggcctatatccataacctttttggttcagccaggaaatggcagccttaaaaacttatatctgatgtgaagcgagattacctcccttctacacagtattctagatgaaaatc

SEQ ID NO: 6347 - DNA, 583 bp, Emericella nidulans
  unsure (1)..(583): unsure at all n locations
ggcgccagcggccgcagggcggcttttagagaggagaaggggcnataaacagagccgagcaacaggacagcgcaacaacggcaagacccgcagcgacataacgcaccagccgaggcagaccaggcaaagagaagcaaacacacgcgccacagagggaaacccagccgccgccaaacaaagcggacgcaagaatcaaccaaagganattcgtattcggtggcgttaagcttatggcaggatctttgaatgatccttctcgctatttcggtggcctccagtggcatatgaaagcctgggcgctttggtttttcagtccgtaatcatggccttcgtaccacttttaccggggattgtggacaggaagatgcctctattgggcataaaaagggctgacacaaggatgtagccttatccgtatataacttacccccggagttcactttgagcctgttgtagatgccctcagcaaactccttcagttttggggaaggttttttggccgcggtaggaagcccggtagacagccatatggtcacctcattactgcaacccatcctctggtgttgctcgttccgcaaaatat

SEQ ID NO: 6348 - DNA, 939 bp, Emericella nidulans
  unsure (1)..(939): unsure at all n locations
gcagcatcggcacgatcgtcgaggattgactcgcgctgcaaaggagtgttttcggctcgagggagattcgtcatgtatgacttgtccaggtcgagactcggagatgctgcccggcgggcagcccgcgagtgtttggagggagctgaaaataattgttagaaagtacttagcgttatttaggagatagactcacgccttgctttcgccatatttaacgtggtcgtataaattgtgttttgcgtagaatatttttgtggagaccgctatcgataaaacacggttacgggagactacaccggccagaagcgcaactggggcgcttacatgcaggcgatctgcaggtgcttcctcctccatacaacgttttctgtagttgcctgtgctccagcatcgctgtctctatgcgtcgtcttataactcttcatcagccatgaatgctcgtcgagaggggattgatttcctcactcagagttactactcagatagaaacagccataatgacagcttctggcaccacttgcaagataacgcctccttgacatacgtccttgtcacaacagtatctgtgctttttttcttgaaccactttagatcaattcctgcttcatttgccagagccttgtgggaccttgcncgctacttaactcccttccgcatcatcggcattcttgattcgaagtcgacgaattgtttggacgaacctttggcggagatgacacttcagctaaaaggagcgaagcagcgaatcttgacttaaccagcttacgtttccgcgttttcctcagctagggttttttggttaaaacccctgtggaaaaaaacacttcctccgggtagaactggataatcggctcccaacacataattaggtgcaacttcccttgggggtttgggcgaattattactggggaaaattttttgcccaacttaaaaatattg

SEQ ID NO: 6349 - DNA, 625 bp, Emericella nidulans
gaattttctatgaggcagtccatcgaccggtccgattgagctcgtatagcgccccctgttctgcgtcgtatgtcgcgttcgagtacgtatacgatagaagctgtgttggatcactcaggttcgtcaattcctgcgagccgtataggactgggtggtcttggaagttctcgccgacggcaggaagatcgataacttgttcaacacccagaccatggaggacgtctgatgagcctattcccgagagttgcaggatcttgggcgtatgtatcgcaccggcggccatgatgatttcttttcgagcccgtaccttgcggcgctctgcgccttggggtataacattaaaggtcgggtcatatccagggacgtattcgacaccggataagtcaggcgtaagtctagtaacgagggcttctagcagcacgtgataattctgtctctcatttgaaagctcatggtaagttgttcgtccgtacgaacgctctcgtgtgactggatcaagcgagttcggactccagaaacctcctatagcattggcagagccatcaagctgaattgaaaggccagcttgaaaaaccgcacggataaatgactctgcaatagttagaactggttctgtccacgcaat

SEQ ID NO: 6350 - DNA, 625 bp, Emericella nidulans
ttgcggaagagcgatacaccgttgatggagttgtgttcagcaatagtcaagtcgtgaattcccagaatggatgccggatcaagacaaatgagggggagactggcgaggtctcgaacatcaagtatgagaacatcagcctcagtggaatcagtaagtacggtatcgtggtgcagcaggattaccttaacgggggcccgaccggcgagccgagcaacggggtgagcatcaccaatgtcgaattcaccgatgtcacgggaacgatgagcggtggaaaggattattacattctttgtggggatgggagctgtgagaactttacgttcagtggggtcagcatcacggggggtagtgatgatagctgcaattatcctgactctggatgtccttgatggatatcaagtttaagcgggaagcagtgtatctacagctaggtagcatgttcgaatagcagtccattgctgagcctaatctatttctagcggttaccaacccaaagaacctattgagcctggttcttaggagccggaggagccggtccctcatggtaacgtacgcctgtcattgttagcttaaccgatattcgttgggctggtgagaaatgtaccttgttatgcaccgtaacaac

SEQ ID NO: 6351 - DNA, 325 bp, Emericella nidulans
gtatgtcagggggcttggcacaagcagtcagcacatgtcagcctttgttactctgtttactacttttattgttaataagatgatgttcataaaggcttagcacccagtattgagtattggagggcttacaactgcagatggggatcttagctctgcacctttgggataaataggaatgaatgacttaggctcctggacctctgtgtttttatttgtgaaatgggatgacaagggtcatctcttaggtgcatcatatcacacctgtgagaagctggcacacagtcggaagtaaccagaagaactttctagcattgggtacgtaagg

SEQ ID NO: 6352 - DNA, 582 bp, Emericella nidulans
cccgcgggggaaaccgcacggaggaaaccaccggtagaccgcgacggggtttgccggccaacgacccgccgacagcgagggggcacaggaggaagaccggggaaaggcaaccacgcgggcacgcggggacggacaaagcggaccccagggacccacgaagaccgaacgcaggaaggcccgccacgaccaaagccgggagaccacgagcgacgagcagaggcaacacgcgaaggagccgacggagccggcgcaggacaggaaacccgccgcggacacggaaaaccaaaggaccgaacgaccagacaggccaaggccaaaaaaagaaacaaggccagcggaacaactaaccaactacgcgcccacgcacaaaggcccccagaacggccacaagagcccccacacaggacgaggcccccagaaacggcacacgccccagggccgcaggacgaaaccagagccagccccccaaagcaacgaaaacggggcaacgggcacgcagggccacctcacagcgggagacggcccacaaaacccaacagggaaaagggcgacctgccaacgggaaggcaccaaccgacaaca

SEQ ID NO: 6353 - DNA, 323 bp, Emericella nidulans
  unsure (1)..(323): unsure at all n locations
cggggcgggggagggggacgccctgagcttattacacccccggggtgagccccggcccggcgcagcccacgggggggatctgttgaccngcagcgggaggacacacaagccgacccaggaaggaaccccaacgccggcagaggaacacaganccaaccggacaaccacgagaagcagggacaacccgacggaccacacgacccggcagacgcgcacgcgccgcgagcggagcggcacccgccgcaggccacccgaggagacacagacaggcccgaaaagacacaggctgagcgcgcgagcgcgcaggagaccagcggacagac

SEQ ID NO: 6354 - DNA, 716 bp, Emericella nidulans
gctagtcaacgcccatggctctcgccattccgcccatggggcagcggtaggatccttggtgtattaagggggaccagtggtcgcgctggaggattagcgacgaatactcgcggagggtgaaaatcagctgttcgtacagtcgcccagtgtcaaagccagcttccagatgcgggaagaaatcgcgggcgaagatgagctgtgccgaactttctggattgaagtcaatataaaggaagtcgtggtagctctgtccagaggcgatggggaaagaactgccggttttgaagagtgaggacattgcagcgtttgatctgtcattcgagttctctggagagagtgctcggggcccttgtccttcaacaggataggcgatgatccagtggacgagtagcagctgcctatggaggcgagaatctcctcgtgctgaccaaataattgtaacgactgagagaattctcggttccgcaagatagaagcgagaaagtctggattctgaaacgcgtccgtgaaggtatctgccccagccgtcgggtcaatagtggcagaagctaaggtatcccacgctgcaacgtcgttaaccccattcagcggcgcagtctctgtatagggtatgctctgccacagtgacggctcaatagtcccggctaagcccgccgacgacgtcaaaaagaacaatgactggtttgacgagacctgcccttgatgcgtgaccggca

SEQ ID NO: 6355 - DNA, 533 bp, Emericella nidulans
ctaacagtagccgtttgattccctccacacttcccgatcccgccagcgccctgacccgttaacaccgcctttttcatcccagcgctcaacaaagaagctgcggacgccacgaccccaaccgcgtacttcacggggaatatcctcgccacgccaaccgacgtaaataccgggagcatgtttgaagagttccggtggtgatgaccacttgtatgacttaaactgccaggtttgaccagtggtgaagacggcgacgaggcgctgccagtagtccggtttgaagttcgcagtgctgtcgacgaggatgaagcgtggtgggtttgcgggccgtggtggccttgagaagccaggggcgcgggaagacgaagaaaggtgtcggagatcccgaggagtctgttggatgtaaaggatggttgcttgccgcactaattgggaatagccagagataggggtgtccccggctgccacgataactaccgttggccaaaaaatgaaccggacaattgacattccgattaaaaaagacgccgagggga

SEQ ID NO: 6356 - DNA, 611 bp, Emericella nidulans
ccgggggagggacacgctgcaaaacttgccttctttgacacgcgtaataatacacggcgccacgagcaatacaacagggcacttttgacagcaaaggggggaaacacaaacgccatcgcaactgccgaacacgacccaagcggcgtcatttccttgaatatgtcagcgcaggatgagccggtgcctggcaactggaagaaaaaagctgatgatgaagtcaagatggaaagtgctcaagagcctagacacgtacaccaagcgcgaatgcaaacgtgagccgacaacgtacaaccactagaactcaagctatcccagaggggctcaagccacctcccttgagctgatctgtaaagactggacagaggagaagaagaaaaaagctcgttactgtatgctaaacaagcgacgtacgtccaagaaactccgatagccaaaatacgcacggcacttactaaacgctgacaacaggatgcaaatgcagaaacgacagcaccagggtacctgttaagcacgtcaagccggactgggacataaccatgctatatttatacccggaaccacctatacctgaccttatggaggaacaacctggtcgagaaactggccgtcct

SEQ ID NO: 6357 - DNA, 563 bp, Emericella nidulans
  unsure (1)..(563): unsure at all n locations
tgattcaacattatattatcattcggaaggtgggatatagcagtcgaaggatgcggagggcctgcctgtctggtgcgatgcttcggggtggcatttgaggatcccctgcggcggattagtatccctgaagtttcgacaaaaactgacaatacctcttcgcggccagcaattacaggatcattgaggggagacacgcaagcgcatcgtcctcttaatatccttcaagctaccagtacagctctgctgatggcgatgaagctgccctaccccttccaaatccacagcatactgcccctgttgctaacccaaatgcgtgtgtggaagcgctgatgctcccacttttgtactaggccttcaatgttattgtgttatacttatgcttccggagagttgattgctcgagaaaaggcagcgacatgcatctgagattgtttagcttgatgnggagtatggtgtgggtgatttttgaggggcgctgcatgcatttctctggtacaatcggcaagccctggctctggggagatgtcctagcagctgcatgactgaaagatgtcatcaaaaaa

SEQ ID NO: 6358 - DNA, 863 bp, Emericella nidulans
ttactacatgtcagtctcccagactcagagcgacagactatggatacttatctgcaaatacccaggcttgaccaggcttccccagacccgctcttatcgcacttagtgagctctatcgttatcgttatcgttatcagtagtgcggggaatggcggctaaggactgacaggcggtcgatccgccatcattcggatactttccggatggtcgggcgatgaaggctgtagtaagttgtgggagtatgggggagatagagaaattggggttatgctgctttcgatgtgaaatcatgctgggaacgaacacttcctaacccttaatcaattcatcggatgacggtataccctgtaaatatttaaaccttatccgagtgcaacaacacagttcccacgccattccatgggggggagtcttctttcaaattgtgtgggttctgaccttccaatagcaaaacaatgttggtgctggtctgggcataaatcaggcatgtttcgagggctcacacatggccgacgtgggtgctccagcgttcgtttgacacagggatggctgcagtgagctggtctgcagggtcaccacgttcgggagccacagcgcctggagttctaatgggatggggcattgatctaatgcgcgactggtacacttgaagcaatggtttgggccctctgaattggggtcggaatgaaacgggcggaacaaaagagacttgccgctgtgcaaaggtgggatggagtccaaaggttttccaagaccctttgggttattcacaggtcccccggtttctttttatttaacttaattttttttttcctggtcgcgggtattttaaacaaaaaaaagggggtggttttatatttttt

SEQ ID NO: 6359 - DNA, 116 bp, Emericella nidulans
tcattaatgggatctacccggttgattgtacagagtatggtaatattggactggggactgtcaggtaggtatatttttgaaattctttcagaatgatacaagttagaggttttagg

SEQ ID NO: 6360 - DNA, 638 bp, Emericella nidulans
agggggcatctggttatccgcacgcccatcccgctgaagcttacacccgcgttcatatggcgatgcgccatgtctgcagcttgttccgtctgggagtggctctctggcgcagataatatcttcccaatttccgtttgatacggattcagcaaaagcgaacatcgcctatacgcagaatctcgttaaagtcatccgttatgctcctgaactccaagccgatattctagctctcatcactgaaaagctggtgaagatcgacgtccaaatccaggttgatatggaagacttggaagatgaggagggcgaggaagtcctgcacgccatttctccagaggctgtgatgtttgctgaggacctggacgatgaagatgacgatgacaacgcttccgtcgtaagcgacgagtctgttgagccggaatctcgacgtttgaagactatcaaggagaacatcctcaaactggacggcatgattgacacactgttcgaatactacgcaccacccttcacatcaggcacccttgacgacaaggaaaatgctctcgacctgctcctcagccatttctcaactatcattctacccacctaccgctctcgccattcgcaattccttctttttcacttctcacaatcctcaccaa

SEQ ID NO: 6361 - DNA, 492 bp, Emericella nidulans
gactccccgcgcctcgttgcttgagcttacgtccgtgcgtttggacgaatgatgttgacgaccgaacgttttatcacctaggttgggcctatatcaagtcctggatccccacgatccctctctctttccctttttttttcttatttcaccagcattgggatgcgcctggacttcattctctcaccatttctttgcttttcttcaattccccattgtctctttccttctaactgtatcttttcctactgccggagattgcgcgttgagtctctgtgcgtttttaccgcgctttgcgtgaaattgcgatgtcaaagtatgtaatgtgcaaagacctttgaggttgtcgttttagcagccgaattgaagttgtcaagtcggttttcatgtctgcattcatatgacatggtcgtcttacgatcaagagccttgacgcggaaggccagtgtaaaattctgtagctggcttagtagatttatctgaacaacccgccct

SEQ ID NO: 6362 - DNA, 828 bp, Emericella nidulans
  unsure (1)..(828): unsure at all n locations
cgcccacacgctatgattgactcgctcaaataccgatcgtttgcttctcgcctttcccgcgcaagctggatgtctttctccgtttcttcgtccagattcttaggtgattcatccacctcaacgggcatatcggcagcagcccgcgagtctcgcctcaaagatggtggctctgccatagcagcattgcgactgacgccgtcatcctcggtttcatcccgcccccatgcctgcgcaagccgtatatgtttcattcgcagattctcgagtgcttcggaatgcttctccccaaatacatgtccccggacagccgcgctgacttccacgtcagaaagggcgctctgcatttcctcccagagcgcatcggagccatctacctcacccctagactgagtgcgggacaaaaacggagagagaccaggtgcgtcgagaggctttggtgaagagcgcctgcgatgcaacagagggatttgcgacccattttgatcacctccagtagtaactaccgaaggtacgggcggttgaagcgatagattcgatgcattgtgggacggcggaccctgaaaaagggccggaggaggcagacgctgggagctcacttttctcaaagagtcaggggaggggggggtgtccatgaatacggaaggcagctggacaatttgcagcaagcttctcacattctcccaataacaaattctctcttatattactcanagtaaaacgagatggaacactccaaatgcagtaactcgatgctatggctccttatcgttatcgntatcggacaagcggggcacgtttatccgatccggaactcagactcgcttagct

SEQ ID NO: 6363 - DNA, 644 bp, Emericella nidulans
ctcgccgcccccacagagcgcatcttattcgttcccgccttcgatgatggagattttcgtatcccatattccgagcacgttcgtcccgccaacctggcacccacatgtgctacaaaagtacagtttcgctccgctcccaggcggcgtgtatgcagtaagattatcccagcttgagggggctataaaggagggttttactccttctggaagtggagcgtggtacgaggcggttgtgccgtgggttgtgcggcagagggtgcaatggcacagatgcgcgcggagcgggagggaggttggttcaacggtaagggcgaagtgagtggaacgacagtggcaacggatcgttagtgtttttgtagacatttcttattcgcttaagcaaagatgaacggatagggatggagatatagatgaggaccttgaggaaaggctgcagaggttttagtgcttttgtatacgatgcggggtaacagatgggctgacgttatcctgcattgacggacttgcttataaatatcaaatctaatatatctagcacgaattgaggagatgacgtccatcaattcatcccaaaaatgtctcaggttggtctcagccaagagactaataggcatgaataggttcgacccagtaaactgtggccg

SEQ ID NO: 6364 - DNA, 596 bp, Emericella nidulans
agggaaacactcagcccgacgcgccgcgaacgagtagtaagccccgagaaacaggcccgaccgggcggcatacaacaacaaccgcggcggggacaagaggaacaccgacacgtacaaagaaaaagacaggagagcggcaacaaagatcatcactggcctgaccaccgagggcgcccgcctgagactacggcacaggacccaaccgacgcagcacagcgggcacaaacgggccgttctcggacgccacgaaccacagctcccgagaacgagcggcccgcaccgcgctgcggccatgccgccgaatccgagaccgctgtgactgctcctgctccacgccgagctcatagaagcgaacacggaggatggcaagggtggaacggaaatgggggacaacagacgcgctggatcgacaggcggcagccaacactgagacctaacgctggagccagcccgagtcccagtaccaggaggaaccctggcaagacctgccaggggtagcaacggacaatgccagcttcaatgacgagacgaagactgacaccggaccagggaagggcatggcaaacagatgactcagacctagccctaacagggcc

SEQ ID NO: 6365 - DNA, 1240 bp, Emericella nidulans
ataataaaagtagatcttgggccccctctcgttgggggtcttcgacaccccaagtttaagaaaggggaaagatcctcgagtttacaagtagttgggccccctaaaaccggtaggtggccaagccctttgttcccaccaggctgtttttccaccagtgtcaagggtcatcctcggcacaataggttgcacacccgtgcttcgccccgttaactgggatctccttgaacggaaccgcttttgggactcaaggtcctccggtcattgtaccaaggtgttggacctgcgatcgaggtaagctttatcccagcggtgatcaagaagtcaaccagggcagccttcattttggtctggcaagacttaaagtcatcgcccacgatgaagccgttgtgcttctcggcaagctcattcgcaccaggaacaaaggtattctggggagacccgttgatgaaaggagtgttgtcgaggatacaagcaacagcgaagacggtagagggagaaacctcggtgtgaccggacttaatggagttgaccaggttctcagcagtgtcgttgacgccagggagaatgtcggcgtagcgttcagtgttggccgtccacatgacaatcaccttgtcaagaccattttcggccttgaaattgctgctacagttagtgaggtttctcaaattgcagtgtaagtaacttaccggatatccgcctgaatcttctcaacatgagcccacgaggccttgctgccctcgaggacgttgtcggcacgatcctcctggttggcagcgatgaagtcagggtagtaaacgctgggcaaaggcttcatctcagccatttccttacggacaagctgcttcagggtgggctcaaggacctgggcacggtccatagagtcagccaggttcatgctgctaatgtcccagccaccaatgacgaggtcattggggtggaccatgggcaacatgtcattgaaggggatgttgatctcctcgccagtctaggagtcggatccaagcttaatggtcgagctcatgacaggggacccgtatcatttggaagaacggggcctttcttgggtttccagaaaaggttcccacattgggagagttacggccgtaaaaggaaccgttttttcacccaacccaccccatagaccaacttgccacctacggcaacttgaatgatggtgccgcttagagagcgtagcttgctttgagacagtgaatcgggtttgtagctaagcttgattcgc

SEQ ID NO: 6366 - DNA, 632 bp, Emericella nidulans
  unsure (1)..(632): unsure at all n locations
cccggggcgggcaacgccggaggaaaccagaacaggaagccccgcccgngtgacccaccagacccacacgaccggggggggcgagaaaaaagaaaacgcgggggaaaaaaccgcccaagaagggaccacagacaaacccaccagccaacggaagagggccaaaagccccaaagcaaggaagaggcggaccacggaacaaaacgggcacacggggaccgcccagaacacgcagacccaaagggcaagaaaacaaaagcngcgaccacagaggaacacaccggcaaccggggacggccaacgactgcaacggacggcaggggaaaggaaccgccagacccgcacgaagacaagccccggcgaccgggaacaaagctgcaccgaacacgccgccgacaccccagcgaggccagacagcagaccaacgcaccacaagactaccgcaaggcgaagccgacagcagcacaccaaaaggcaccctggacagaaccagcggcacgaaaggaaaggccacacaccggcccaacacccgggacaaggccagaacccccaacgcaagcgagcgccccccaaggcaacggaaacaaaacaacgcagtgaaaagccacggaaaaacccggacaaaccgcccagaa

SEQ ID NO: 6367 - DNA, 730 bp, Emericella nidulans
agatgcagcctcttgttcgtgacagacagaaccctggacacgccgaacttaatgacgtcctggggaattactctttgaccctaatcgatagcttgtcaactctggcaatcttggcatcaagccctgatgatggccccaaagcatggcaatacttccaggacggtataaaagattttgtcaggctctacggggatggatcggatagtgtcacaggccaaggcgagcgtagtcgcggtttcgacattgatagtaaggtccaagtttttgagacggtcattcgaggactgggtatgcgactgggccttctgctcaatgaatcgagaccatgcttgtgtctaaccttagtctttaggtgggctgctaagttcgcatctctttgctgtcggtgatcttcccattactcgttatagtcccccggagaaggaggcggcgtatgccaaagcctgggataagacgtcctttgccgccgatagtcggggaatcgcctgggataatgggtttgtgtacgatggtcaactgctccgacttgctgttgacctagcgaatcgcatcctaccggctttttatacccatacaggtctaccttatccgcgggtgaatctccgtcacggagtgcaccagcagcctttttacgccaattcaccgtagaatgcggatactgtacgtgtttgcgatgataaaaatggtaatgtctgtgatgcgtcatcagcggaggtcacgcagacatgca

SEQ ID NO: 6368 - DNA, 370 bp, Emericella nidulans
gggaaccgctaaaattcgttggtcctaagacgctttttgcaaaccgtataagtccggttttgacgccaccagagacgtaggcagtctttgcggtatttatgaccacatacccgccaaaaaccttgttagagtcagtcactcaataggggaaataatttggagtattttgattaccaaattgaaaagagcacgttggtattattatttacaagattttatggatgattatttattccgggtctttgattggaatggtcagtaggattgagataatgattagctcgggcctctctatggctgttaacaggggaaagaatattcagtgtgtctcttcccataggactcgtatttcctttggctgcttaagcct

SEQ ID NO: 6369 - DNA, 838 bp, Emericella nidulans
  unsure (1)..(838): unsure at all n locations
aacccaattaacagttagcgtcacagatcgacgggggcccgggaaccgtatgcgtcgccttggccgaagccttttccagtctgcgcttcgtcgtgcaagactcagccgagcagatcaaccagagccgcccgtcctaaaatcacaactggaaagtgtccggtctgccatcgaacttggcatttacaaccactgcgacgaacagcccattcagaacacagacatatttctgctgcgcatggtgctacataatcataccaacgccaatgccatccggattcttgcccccttggtgcggcccctacaaacaaatccagctgtgtggctgctcatcgtcgacgcagtgcttccggagccaggtgatgacggctgtctagatgaagcactccagcggtaccgggatctgacgatgcaggaagtgttcaatacccgggagcgaagcctcacggagtttcagcgacttctggatgtcatcagcgacagcgcgaggcagctagtaggttaagaacctccgccagatccccagcctccgcgctgtccgntatggatgtttctatcattcctacacgaacggcacaagtcgactagtgattgacaacaccgggggccggattgcattctttttccatcctgatgatggtttaatttttgccaaaaaaaaggggtgttggaagggccgaagtcctttaaggaaaaaagcaggacaggggaatggcaacaaagcagagcaaacagggagctaccacagaacctatacagagccgnggactggaaaggggtaccggagaagttgctgttgctctaggatattatctgcctacacgaggtgttgctgtggaat

SEQ ID NO: 6370 - DNA, 965 bp, Emericella nidulans
ccgcgattttgggagaccccccagcgcagactccagcttcctcctcacactccaagacaacccctgtctatcctggccctcgaatcctaacaaaacgccaccgattaagagcaagtgcctccatcgcggcgacttctcatcggcacccccaacgacagccttaacccattgttcacgatccaatttcctaggcccaggcccgccccatggtatccgcggatcttccgactcttcgctctggagaattgccatcgcggctgtattgaagacgctgataatccgtctgcagacgtggaggtcgacgggttggtcccatattgccggagctgctagcagctgtgaagcgagtagtgtaatgttaagtgggttctttagaactgcgaggagactcgttgcagtgggaagtaggctagtacacaggaagatgttagctgttgcatttaaacagaccgagaagcttatcggcattgttctgttaccttaatccgtcttgctcgtgcggtggtatttgaagggagcgcataaaggcgcccaaagaccgctcagttgccatgcttggagagagaccaaaatttgtgttatgggtgacataggggaaccgccaagccttgagatgtaaacagcgctacttcttttaccggacattgcgcggacatacctgccaggtaaatgaagtgcaaccttcaaactgttcttctctttgagagataaaatatgccgggtgctcactccatatttttgcacttaccactttcgtttcgaggcgatatgtccccttaaaagcaaaacgtccaaaaacggacgtgtccacttacacatccggccgaagtgttatacctccaaatgcatacttcggccttttcacctcctggggcttcccacgccgcgaatttgacttttcccccggtagggggggaactctcactctacaaaccgtggcggcgcccctctttctatccccaata

SEQ ID NO: 6371 - DNA, 501 bp, Emericella nidulans
gggggccgacacacacccaacacatcaaaacggtgacccccacacccgggcggggggcggccgataaaacgaagggggccccaggcgagcaagggggcaacaccacagcagcccggacgcgcccgcgcagaccagaacacaagaccacgcacagagctggcgaacaccagcgagagaaaaaaacatcgagtgggcaaccgctcagccccgcaaagggcagacatgaagccgagacccaggcgcagccgggagcggcaccctgacgccgcggcgagacagacgagcatatcggcgtcggacaaaaaggcggacggcaacaagaaacgggcccgggcgccccgcgcggcccgagaaagggccaaaacaccgaggccccgacaccggagagagatggaaaccgcacgcacgaacaaaaaagcgaccaacccggaaaccaaaaccgcaataaagaagagcacccgggctgtccggaggccccagccccaaagagcgggcaaagcc

SEQ ID NO: 6372 - DNA, 583 bp, Emericella nidulans
gttgacacggagtttgtacctggaatgaacaaactcgatacgtactgggatgtatataacaataggaagagggttcggggtttcatgaagtggactatccagaaagtacggccgggcgttgttctcccttcagttgctttccaatatagggtactaacgcggcttttcagggccaaaaatacgccgaaaaccacaccgaattttcccgctcaattggagaaagttttgggactcggagctgagccctcgccttccactttacgcgtgcgagcagacgctggcccctgggtggaatgatcacagaggtcagctagttactttcactactaggccgtgacaaccgctaacgttatgttttagacgtgtataaaataggtgatattgcagttgatctgtccaatgttgatctgagcagattcaactcgaagctcattgacgacaggcgcgcgtacgatatacagctccatctcaaggtcacttttggtgctcaggaaggactattgaaatataaagctataagtcaagggaaaacgattggagtgacaagtattgatcatagtctggctaaatactactgatggtc

SEQ ID NO: 6373 - DNA, 812 bp, Emericella nidulans
caaagacacaatcgaagcgtccaagtctgtctacgatgacgaaacttctattccatcttcaaagtatcacttagaacgcaaggggttcaactgcacaaagtataaacatccgtatccatatcccatcaacacaatcagtctcaagtagtcccccttcatcattgaatcatctggatgcgattcaatccaagatgagttaaatcataacatgccccgtcatcttagagcctagtccaaggccagatttatcctatgccccctgcgcccacaagcggtagtatgcaaggtaaactagactttaactaaactatccggctcaacacgcaggatatcctccgcgttatcctcgttctggatgaggacgcggccgcgctccgcggcgccgatgacaatgtagtgtgcgtcttggtagcggacgcgggtgccagatgggaactgggactggggcagagcagatatggtgttagttatgacagctgagagacggacaagaacgttggtacatgggtttgtaggaatgtttgattgggatggaggcacgggacatactgccatagatggacttaacgatttaggtgatagatggatgaataaatggctggtgaagtgccattagctaatcacactgtgggtgggatggaaattggagtctgtttgccgtatgggacgatgtttctttatcttggtaggatgacaagtaaactctcgcattttaagctgtctgactcctccaatgcaaaaatgcaggctagtttattggccaagacaagttgttaattctaaattttgtatttcaacaatacgggagagca

SEQ ID NO: 6374 - DNA, 610 bp, Emericella nidulans
  unsure (1)..(610): unsure at all n locations
aacgggaacacttgaggacccgggggtaggaaacaacgagaccaccccacaggggggggaggaaaagaaagaacccgccgaacagaaacccagggacgcagcggacacgccggacaacgaagacacgacagccaacaccggcaaacgccagacagacaggacgagcaggacaaccagcacgggagggaccagcgggagaacaacggagggaccacagaaaaaggcagaacgcggcggcaagaaagcacccacgagggcagccggaaaagagacgaaaaacaaagacagcccccggcccgacgacgcccgacagacgggaaagaaaggacaaacccggggggccacccaaagcgggaccgcaacacccagagagaaccacaccccacgggcgcgcgcggggcccggccaggaaaaccnggaacaaaaaccggaggcccaaaacagcggcacgggggcaacggaaccacaccaaaaacaggggagggaccaacaaacgccccgccgggaaccaacaggggacggggaacgaggggagaaaggccaaaaaaggggaaaaaaacaaagcccggcggaccagaaaagaaaaaaacacaaggggggcacaaagcgc

SEQ ID NO: 6375 - DNA, 612 bp, Emericella nidulans
acactccgaaaccactggacccagccccaatgacacacccggacccgcccgaacgaacggggagactaaaaacagaccgcggcgggacaaccgcgagacatgacctcacggaagagccgaacgcaaacccatggagaacagacggacagcagcgcaagagaacacactgacacgagtcaaccaaggacccgagagacactactagtggccacgagtaatgctggacatgcgagtgtgactgggtccgagagaagcccgaatgaccacacagccgacaggagctgatggcaacgaaagtgctcactcagagagggtgaagacgaagcggccagagcaggacccgcaatgacgggctgaccacggccaaggcgaaacgaaagtgcacaacccccagaccatgagcaccagatatagaccccaccgtcgaatggcaactgaggggacaagcacccgaagaaccggaggcccaaaatccaaggaaaataaaacaagaaaagggcacgggaggaaggatcacaaggcaaaaccccacccaaaacaaagggcggacaaacccaggagcaaagtccggcgtaaaaaacagccgaaggcaggaaaatggacttgacagcg

SEQ ID NO: 6376 - DNA, 574 bp, Emericella nidulans
gactgcgattacttgatagtcacaggctgagagaatctgccgtgaaagcaactactacaaccctgagattgtttaaaatttcctcaaggaagctcgtttgaccgaacagttgccgctcatcactgtatgtgaccgattcaactttgtgcacgacttggtcttgtacctctaccagaaccaacagtacaagtcgatcgaggtctacgtgcagcgtgtcaacccctcacgcactcctgcggttgttggcgggttgctcgatgttgattgcgatgagagcatcatcaagaaccttttgaccaccgtcgacccatctgtgattcccattgatgagctcgtttccgaggtcgagacccgcaacaggctcaagctccttctacccttccttgaggccacacttgccactggtaatcagcagcaggcggtatacaacgctctcgccaagatttacatcgacagcaacaacaattcaaagaagtttctttaggaaaacgatcttgttgacactttggttgttggaaagactgcaagaagcggaacccaattttggacttgttaccgaagggacagatgactg

SEQ ID NO: 6377 - DNA, 699 bp, Emericella nidulans
ggaccgcccagacttctatcccggtcatgggactgtcctggcctatctttttctgtttcagtttggcggatcgctgttgcagtatatttttttgagacgagagaatgcaaagcggagacgaggtgagagggaccattgggtggaggggatggacgagggcgagattcgggcgctgggtgataagcggccggattttatatacacgctttgattggggcatcctctcagagcctaggtcgagttgtgagctgtgatcgctagcatatggtgagacgcaagggctccgtgcacaagattccccggggatcgagtaggtagctaaatataaacgcccgctcaagccatgaacgcgtgcatccgaacgcaacctcatatcctcagaataccaagtttatatggccctcgagtataagttaacaatatcctgccccttacgcggtcccctaacaacatgccgacttgcccaactaagcactttcccgctctcatcaacgcgaaacgcatacgccgtgcgatacatatcattaatgcataaatgatttccgcgcgccgcaatgaccttgggttcgagacccccttgccaggccctgcactttgggcggcgtaaggggggccccgaaactccgctgattgaagtagacaacggggggacgcaaaatgaattcttggaatgggtatcggctttttttttttcttttc

SEQ ID NO: 6378 - DNA, 576 bp, Emericella nidulans
agacctccacaacgagaatcctactgtctttaaccacgaggtagcgaacccgcagccagcggaacggcgggggggcttttataggggaacgggggcccccctacgccagactctaggccgcaaatgccaccagacatatggagtgttcaataggcaggagctatccgcgccagaaaaaaaccccacccttagagcagatcaacttactgaacgaagcttaacatgagcttcacacggccaccccaaggcgtacaggtcctcctcggcccgatcagctgagaatacactttcacttggccagattgttaatgcaccacatattgttatccacaactcaaggtgctaagggagactcatggagaacaaaaatctccactatcacaaaccgacaactgccccattgattaagagtatcagtgaggtaccaaccatgatagtgaagacaccgattctctagccctctaaaattgtgctagaggagccagaaaagcacccccggcaaactgccttgggcaacaaccgatatagcgacgtctattttaaacttcgagccgctctcctccacccgaacacact

SEQ ID NO: 6379 - DNA, 722 bp, Emericella nidulans
tgagcgccctcgccgtcgcaactaccgttatccgtcaggtttcgaccatatggattgcgggttcggccaaacacatttgtgtgagaatcggccgtcatcatcgtctggggcaggtgggttttcacgtagattacggcgcccgcgtccaagagtatattcaccatcgggctgttgaacgtcagggcaggtcgatccaggaacgaaacgtagccaagggtagactgaacaccagtaacattgtaggagtccttcagactgatcgggataccgtgcaaaggtcccacgagctctccagttacggcgtattgacgatctagctcctttgcgcgctcaatagccctatcgaagaagatttccgtcagacaacaagtaagctgctgggctatggcagctcgcttgcagaaagcgactgcgacctcgtaagcactgatttcaccatccttcagacgcgagatcagagcggtagcatctgagctttccgtgatgtcgatctcgcgctcggtcaggatgccgctctgtcgaggaatatcaagaatattgtccagctcatcggccttctttaacaggtctgacgatattcgccatcccgaaggaatttttcctgcaagctcatctcgcttgcgctgagccttctgctgccagtccattcccagcactaccgatgatattatggagaaatgaaagcagatggcgcacctcaatcttatagcccgtcccaccgg

SEQ ID NO: 6380 - DNA, 1103 bp, Emericella nidulans
cttgaactcgtgaacaaacccggactgactctgttctttttccgctaggcacatcatgttctttgttgttatggcaacgatatccccttgaatgctggtttacattcatcgttcaattttcagtcagcgcactttcatgcctctttctcttcctcctctattcctgtatgtctggaattcgcattctctttcctttgggtttttaatagtctgcatgatgtttcgggtattctgtaccagtcaggaatgacgattggatggttactggtttattgctctcttcttccgaacttttggctccttaaacctccactcttaagccgttgaccactcctcatccggcccctggtccagttctcggccatcggtagacactttgccgtagcagcagctatacagtggcatcgcacggcaacaatgaaaccatcatctatcagctaagtttggcacgcgcctgttgagtgttgttgataaggtggagagaccaccggcaagaattctcttgttttccattcatccgacggcctcttcggacttctccgctgatgtccagtccaaagctgtgtgataccgatgacgaaagagacccttgcagaaaatgcagagtccttcacagctcactgtggatgtattgtgatgccgcggtggagatgggttgtggggagttcctttttagtgcctcacgcgctcattttattctaacaataattctgggtcccacggtggtttcatcggctaatttaccattgcctggacccaaaccagtctggatctcgtgatacttcaaagtttcctggaggtgcaccagctgacttctgctgtcggcccacctcgtggggaatcgcattcttttgacttctaaactctttttttgggggtatgaaccgtcctggccttattttcgtaactagggggggcccttccaactttcttttcccaggggcttgactatcttttgttcctgccctgtaaaattgccattgtctagtggctgttttagtatgcccccccgactgttgaattgttgctttttatgagctctttttttgtttttttcggcttccatccggaaactttttcattggccatggtcccgtccattg

SEQ ID NO: 6381 - DNA, 970 bp, Emericella nidulans
  unsure (1)..(970): unsure at all n locations
ggacggcggcggtctatatgagcgtagtggatccgcctgactgaatgaattatatatcaaagcttatacgagtaccgtcttttttcaagggcactacaccgcgctagtcgcgaatccactataggtggaatgcggccgccatctgtgggcttgcgatggattagggatggacaagaagtgaactcggatgatgtcgagtttgacacggacagcctctcggtggatcgtcttcttcgaagtgccattgctttacacatttcgcatatactgtcctcagcgttcaggaggatcagcgagaagcttctttattctaatgggtcactgtcattacacgcctatcttaccaggaccgaaccaggggattgtcagcttgatgttcaacttaccgcatcccgtcggcttcgagttgcgatcgagcccctgtcgggagctatagtgctagcagctactccgaataccctggagcgagtggataccgatcgcaatatggaccgatcgaccattgacgatatagtatctcgcgtcggaagacttcgctgtgctgcggcgatagaggaggtagaatcgcaggtgaagatgcttggattcatctcggttagcccaaggaacgtaaggattgacgctcgaagttgtttcttgaaacggtctgcggttctcgttctttgcattattattggagcgttcctgttgcttgcccaacaaagagttggatgaaaaaaggggggtggccaactcctcgccggattctgacatcaaaccacttggagctcggaaaaagcccttttgtcttttgcggttttattttttccgggaaacaactcaacatggatggattgttcagtttggataattagccttttaactgtttaaatgggtgaattaatttggtatgtttttttttaattaaaaaatatttnatttttattttcatctttttatctatactctctctttattatttattattaat

SEQ ID NO: 6382 - DNA, 545 bp, Emericella nidulans
  unsure (1)..(545): unsure at all n locations
gtcctgcagcgcatatgcctttcagatggacgctcctcgcatcgacatcgcctttgcggcactgtactttattgtgacgttggtgctcttgattttcgcctcggtgcgcatccgacggagcaagaaacaaggccagcatgtcgccggcgctggcttcctcaacctgtcaatcatcttcgcctggttgtaagtgtcttagtggtccgggggacaccgggccaccaccccgcgtgcttgcgtatatcgaggaaccttctaacaggattaacagcgcctatatcgtcactatcgtttacaccgttcttaccgaatgcgacgtctacagctatcgccacttgtaccatgcgtccgtgcttgagctctggctccgcgccgtctctgagtacctgttcctcgcggccatcctgatctacctcacgcgcaagctgcagacagatttcgggctagtgcagccggccattcacaccaaaaagaaaatctgggccgtcctgatcggtcgagtcctcatcgtagtccttagaaacagcnccgcctcgtaccnctct

SEQ ID NO: 6383 - DNA, 1041 bp, Emericella nidulans
caatgatgatagagatgaggtttcatatgtactggatacggagcagaaacttgcagcgcttcttgacatggattagctaatcctaagcctgtaaatatagtcgaccatcttcgagatgcacatgaatccatgatatatatatttgacctattcctgtttgttagtttctacgtggtccagtgacacaggtacggaaagaaccgactgaaaatggtttagatttccccccttagatatagcctacagcttaggaaagttttgaattattgcctattttctgaagagaagtgcaagggggaaactgtagggtacttgaactgactgcagctgcgacggtgacaggagtgttaaggaaatagaaaaaagaaacaccaaatactctttcatcctgccacagatttcttgcatctcacattcctgtagaacaccattatccctacagtgataaattcctattattttgaacacgatctgcttttgccatggagaaatcagaaaaagacgactcaatctgtggctcctttgagaatggtgctcgggacttgtcatccgaaactccggcgcttgactgttttggtgaagcggtgcccccagttccagcttcagacagtgcttctccattacctgaatcacagcaccgagctcaacaatacaacgcgatagcgaagccagtatcgacttctcttcgcgattcttcgcctaattcgaggttcactcctcctctacccccatttccagacgacgaacacgcccttgtacccgacaccatcgctgcgtctacaccttccagtgcttcaaagcaccgtttgtgcgtgggcatcgtcgtcgcttcacccacgttagtcgtcgggaccttgaaagttcagaaagggaggtctgggtgttgagtccactggatttaatacgacgacaaagcgcgttaaccagaacctaagaatcaagtcgaattgcagaatgaccggctttcaccacaagtgttttgaccgaataggcagaacctggtcggaagtctcagtacaaattaatttgacgccacaactg

SEQ ID NO: 6384 - DNA, 1395 bp, Emericella nidulans
gattgagaaaagatgatgagaatataagagattggaggagaatgagtagtgagaaataaaattagagaggacaagatcattataagtaaaaaagagaaaagggggcacatttggtgagaggaaatgggctcaaaggaaaagggcacaaaacccggaggataaaaaaatcttgacaaaatggtcaataactgcaagcaatcttggggcatgaaaacaaagaatatacctttgggatgaaaccaaaaaaggccttgggggaacgacccgggcccaccattcccggtaagtgccctgggcttttctaagggaaaagggccataaaagcttgttccctccggggggttctaaggcgatacaggtaaattaaaccttaagacccccattaagcttgtttaaatttcccccagaaagtgcaagtcggagcctgacccccatgttaagtaattggcctttccatcgactgcaacttggcctatagcccatgggtcctccacggacagttttcgctcccgccccgaccgcctgtcccgtcaacgatagccccagcgtctgatgatagcccgttgtcttcaacggaagggtcgccgcagttgggataatatcgagactagccatagttgtcgtgctgaactgcgcccgaagtcaccgggatacccggtccagtgatggcatgcgcccatacaacacccacaagcgtaggagccctcatcctgaagctggaagtcagctctgagagtgtattattttactcccagagcacaaaggtgccttatgcgctgtgtctttcagtgcggtgagaatatactctcaacatctatgggagtcgcgagatccaaatttggtggatgaacgaagtttggcgctcatttagccatatgttcaagtgtgaggtgtcaataacctggactaaccagtattgtctatgtaggtctgaatactcccgactcgtcatatggttgggggcgctatgaagcgcctgaaactagctggcagttgttaccaatcttgtgttttactagttgtctttcctttaactgctctcagattgtccagtttcttccctttttagaatttcgatatgatcttttcccttttctgctatcctcttttccttgtcatctctcatcttcttcttttaccccatcctctctcgtctttaattctataatatgttttttaacttacttgttctattccgtcatttttatttctactataacttatttttatcttttcacttttttcttctttttagaattactgttttatttgttttctctcttttttaatttttcatcttttcgtatgcacttcctttattctttaatttcttcttttcatcttttttttttccttctttattttatcttatttatctatactttttctcatctt

SEQ ID NO: 6385 - DNA, 478 bp, Emericella nidulans
gcagcatcaaccacacaaacgacctccaaagccatttatagaccaccgccatgaaaaccccaccagggggcgttttataaacaagggcgcgttcaaccaaacaaagagcatcacccagccccggcacaaagcagccaggaccacatgtgccaaagtccatccgctcagacaccacaataaacagccgcaaagacaacgcgccctcgaccagagaaaccaccgatgccctccacaaacgcgagacgcggacccaacacataacccctatgaacggaatcccaaccactggcagcgcaaggccagagcccaggagcgcacggaatagagcctggaccaacaagagcgcccctgcgacccccccagacgaacactggcccacagagacacaaaactggaggccgagacaacaaactgacgcgaatccgctgatagcgaacgcaagaccccgcccagggcaccgattaaggcccaaagcccc

SEQ ID NO: 6386 - DNA, 577 bp, Emericella nidulans
ggggggggtatgatcctcttagagctctctttcagctccttacagatctccttggatcctccttggccgcgtctcatgcagctttgaatgctgttggcacggccccaggggtacctagctatcccattctattatctgtctaatattccgcgaggtagaagtacgttcaaacctcgaggtaatgagtataagaatcaatgtcgttccgagagctaaaggcgtataattagaggggactactactgcaactactacatcaagccatctattccggagcatatggcgtctcataaggcctctcagcctggggggtgatacgcgccaaatgacgacgctctcccgtcgtccagtcgacaatcgcagagtgtgccgtgacgcggttcttccctcgtcagcatcagatctacagggagaggatattgaatggatacttacatcccaaacaacgaccgtccttggcgcccacttgatccgggcctgatagtcgataccccgccaacgtggttcagcaggaagcccagcaacgcatcgctctcttccttcttcaggccgacaatgctccgagtgactgcacatc

SEQ ID NO: 6387 - DNA, 456 bp, Emericella nidulans
gatgggcccacgaaacaggaaccgaccgcgtctcaaaacaccgggcgcagcaacccaacgagggaacttatgaggaaagtccggcctaacaaaacccccgcgggctgggaggcagcaaacatgaaccccaacaaaggctgaggacacggagggagcgcaaaggcgcgcatacgagcacccgtcggagacaccgacaaccgagacgccacaacgccccgagcgaaaacacgcaaccgcaccaaccgggcaccaagacccaaagacagggacagggccaggcgacagagccggcgcggccagacgcaacagggcacggtgaaagagacagacacgaagcgcaggacccccggcacaaggggcaccaaaaggccgaacaggaaacccccaaaggaccgggcaacgaggaacccaacccgcgcgcaccccaacgaacacagagccccaagaacacaccga

SEQ ID NO: 6388 - DNA, 585 bp, Emericella nidulans
catatggcaaaccatgttttctcgacggcgaagaatggcaacagctctcataccaagtcggaatcgaagattctcagaaaccaaacgaatggtcatcgtccgtccatcctgcagagctagtctttatggaaatggtcaagtgcccgcgttacctcagcgaggcactcgaactcgcgtactcctatccctctcccctcgttacagctgccataccagacctctatcagcgagtccaggaaactagacacagtctacgcgaggcaaccgcgaccttgcgagcctgtacgaaccgtgacagacactcacattccaatcaaagtctagaaagtctgacaggtgatagcgggccaaatcttcttcttcaaggggctgagcagacccttgttgtgctgcgagatctgcttgagagacttgcgcgagctgcatcgagaccggaagggagtagtgctctttcgttccgggttgtatccgagctggatcggggaccgcctgtagctcctagtaataggatagacctgctgtctgtcacttggttagatcgaattgcgtcttctatgggatgatggaacttcaattgtgagggta

SEQ ID NO: 6389 - DNA, 721 bp, Emericella nidulans
gtgcacgtacagaatttcgtttctaggtccctactgtgcttttcacctgttctagcagtagagatgagaaaatgttctatttaggaagatatgatctcatctgacaggtcagtgatcatggtcacaacgtagagatttagagattgtaagagggtagcgatgagatgaagggaaaagagaaaagaaaaagataatgcgtgataacaggcgcgggtgggctagtgctggtatgcgaagggttcgggttcattagatatcatggttagcttaatagtacattgactagaaaggttcaaaatgaagagggcgaaagttagagtttgcatccacgactcctccctgtcttgaggcatagttttgccagtgtgagtttggttgtcctttgacggaagaagcaggacagattgtaagtctttgctttccatgaggtggaaaacgacatctgctcatacccgtccgacgggcatgtcgtgacgatgtagattccacgaccattcaggaacgaccttgtctcgctcgtaaagaagaccgcagttatgtcagagtgtctatattcagattagcagttgtaaagatgaaccatgggtgggttcgcatactcatgggccagctggaccgtcgcgtacagcccataccgctgatccccataccaaacagttgctgcaccgccaattttgtcgttccctatgattgttagtggaaggtaaagaaattacgcaag

SEQ ID NO: 6390 - DNA, 913 bp, Emericella nidulans
  unsure (1)..(913): unsure at all n locations
aggccgggcacaacctgacttagtaaactacaacgaagtgaaagtttatttcaccggatgcgatgcaaaaaggaaacgggtagcccgagacagacaaccctgtcgaggcggggatcccggctgcaaccccgggtgggacgcccgggacacaatctatacttttgaatcttcaaatcgtctcgtctcttttcaagcccgagctcccaactcaccgaccagtgagccaactcgtccagcttttcgttgtctgcttggcagctgcctctgcgttctcagcgaggacgtctaactgtcccggagcagcgggagccgcagtgctggggttgagggagcctggtccggcttagacgcggcggcgttaagggcttccagaaacccgggcttattgttttccgcgcccaccgcagcagcccccgctggcgcagtcttttcggtcttcagtccacccagcaggtagttcttgaccttgttccacggccgttgagccctctcctcctccttcttctgcttatagatttcgccaatcttctcctttttcaacagctccagttgttccgctgtcgctgttccggtcacataagccgcttgggcatcgcggagtgtctgcatttccttctcgatccatagggcgcgttggcgaccgttatatagtgttagggagaccatggagtagacagtgagcacaccgcatatgcctgttataccatgagccatcatgctactcttatggatacagctacgctgtgatttgcgaaggccctgttgcatgaataataccaacccacaagggggtaggctgtacctggacgnggtaattgagccgtgtattaccatcgtccttgggtgcccttgttcgcaaaacccgtccgcccaatattccacccattgtgttcaaccccgtgaaagccaactg

SEQ ID NO: 6391 - DNA, 492 bp, Emericella nidulans
cacagcgtatgggcaaaactccccgttcttggtggaactgttctactgggtcctgaactacgcctattattcttgcaccaaggccatttcgcacgctctatctcctgctggaacggtcgttgtgcagctcgctcaggaccatgggattgctattctcgacttggagcaccgttcgatcttcagcatcttcttcccgatcggggagtcggacttccaggcatactttccaaatggacaccccgggtggatgacctttaatcgcacctactcgctggtgcatattccagggactgttgtgtaagtgcttgttacctaactacaagcggtccaggctgactgactagctacctttcgtggtggaatggggctgcccccgaccatgagcgattcgcactcgtcccacgcacgatgacgctctgaaactttgtcccattcgaagctcttctgactgtttccttggattgccaccctggtggttgcccagtttttcat

SEQ ID NO: 6392 - DNA, 660 bp, Emericella nidulans
  unsure (1)..(660): unsure at all n locations
tcattgtaatagcatagcctcacctctaccataaaaactctagtagacgttactatgacatatattggacagaccaaagataaaaccagacaggtttttatagtccaaccattaatactcaagaatgccaagacaccatccccgagattgttaacaaccagctactattcttcttcacattatacatcaactaaattcatgaagaacaaacaagatgtcttttgtcaaaaatctgcaacaagtccaagagcgcaccgttcacataacaaccaaccgagcaacccgcagccttgctgaatcacgcctcatcctcgccgcgctccagaaattcggcgaagtcgtgcacttccgcaacgcgacgcttttccgcacaaacaacaaacacctacaagacttaatggtgagcccaagcccggaattttaggcttctaaactcttgaatggttggtttgtttggcgcgtagggagaattcgaaggacaagccaaaacgaaatccatgccgaatgcgaaagctaatacatcttattccattcgattacagacaaagggagaaaacctgtcaacacagacagcgaggaaatgcgacggcgcatacttcggatttacgcattgtcgacacccggtagcgcngcgaacgaatcgattcttcctctcatgtg

SEQ ID NO: 6393 - DNA, 460 bp, Emericella nidulans
gcaggaatcctggatgcaacctgagtggcagcggtgctgtttgcatagcgatcatatagctggagcaggggaatgagacagtgtggggtactcaacatccgctggaatatctcgaaatgagtgaccgctgccttccagaggcaacatccagttgatccataccgaataatgggtcatcaccctccgaacaccgaacccacaaggggcggcatcagagctcgaagctctgttccttgcgtggtgcattccaaagacccatgagggaagaattctctgaacaaggacgtggtttgggagagctttgaagaacaaaacacccatcccggagtctatataatgggtgttttttcaccaccttgttaagtgcttattacgctctctcttcaagactttttttgacagtcccagtccttaattttaagccttttcttccaaaaccataattcccaactttctcctt

SEQ ID NO: 6394 - DNA, 466 bp, Emericella nidulans
cagacgagaagatagcggcgctttgcttttagggaagatatcttttctttcatggccttttcttgctctagcttctgagagatagaccacggccaagaggcttgccggtgctttcttcatcgtaaggtgccacagtgtcggaaatttgctgcagctgacgatagtactctaggcggttattcatagtgtctcgaaacatctatacttccctttccaggttggacgcaatctttgtttgctccgtagaaatgtccgtgacgttcttaagcacctttgtgaggatttcaagctcaccgcgagctcttgtgctcccgtcgttggcctgccattccagcgaggacccaagactacgaagttcagcaatagccccgcgcagagagccgaggtcggggccaggttttacttcattccgtcttttcatgacctccaggtagagagtcttagaaccgctcttattctttttgcg

SEQ ID NO: 6395 - DNA, 889 bp, Emericella nidulans
ctagagcctacatcacaaagcagggctcttcagcgaaccacccagcaaagaaaggtaaatcacagcttagccaccctgctacccccttcaacaacctcgttgaaccaagcctctaaagcctgattaacctctgccggcttttcccagagcgcccagtgcgaggcattaacctgctttgtcgtcagctgcggtatggccttccccattcccttgcccaagtgcggcgggagggcagcatctttaagtgcttgaataaagaggactgggatgtcaattgttcctttctgtagagagagctcgtcgtcatagttaatcttgcgggtgcggtaccagtttactgcggaattagtaagtttgtgccatgagaatgaaatgggaaagcaaggaagagcgtacgaggtccacgaagcccatggcgggcgaattcccaggcgtagtattccatttcctgtgagcaggtcatgtcagagcctctcaagacttccccgaatcaaccgcccaggtaaggtgaagtaatactaaacctctcttccacaaccaactcatcttacgcttttatcttttcaaatctacaccttatgacataaaggcggtctttctctgcgtttcccgcctaagtgaatcagaacggtattgcctcctgctttacagactttcatttcccgtaccaatgtattgacccaaaggggcccttagaaccttttaagggatgtttttgaggcggcgacgccccacacgaaaggcctttagtgtggcaggcgccccgcggggagctttcacgtgaaggattctacgggaagcgcatccatgtccagatttagccgtttggatttttctaccattttatctctattacatctctttttacctcataattatcaaataaaat

SEQ ID NO: 6396 - DNA, 1132 bp, Emericella nidulans
ccaagggtcctacagttgggctccacagttctcacgtcacgggtacttgaatctgttaatctgtttttttcgtggcgtttgtctatggtcctgctccgggcaattagctgcgtgtatttcgtggacttatcgtctgacagcgggctcaccaaggctctcgaacgctacggtggcgtattctatcatatcccacgagtaaggacaacgctcttcccggtatagtgcgcagcttatctctcttcgtatgcagaggtcgtccattggaaaaccctcttattataggcctgggctcctcttgtcatatctactcatccatctcccggcgactcctcgtcattccagcgttttccagctcttctagcatccagtcatggcaaagtcagtgcaagaaaaggcggccgcgactgtggcggcggacagtgaggtcggccaggtggtcgactaccaggcgcatgaccatggagccgactccgggctcagtcgtaccctggagacgcgccatctcctcatgttctccatcggctcgtctattgggatgggtctctggttggggtccggcacatcgcttgcctctggtggtccagcagctattttcctgggctactggatagcggggctccatcgcgtggttactcaaccaggccgtgggtgaactggcagtcctatatcccgtcccgagcgcctttcctcagtggtctcgcaagtttattgaccacgctgtagcactcactgtcggctgggcgtactggttctcgggctcgatcacgctcgccaacgagctgcaggccatcgtcactgtgctccggttctgggacgacaccgtgcccaccgccgatggctgtccatcttccttggacatcttgtcataaacgtttgctgtgccgtattcgtgaagcgatccatattgccacgccagctccttggacattgcggacattgcgcatatataacctgttgcgcccaactaaacacggctggatctgactcatgcctaccctgttcagggctctgtgatggactgtttccttttggtccaatgtggtgtgttcagaccaccctatgcgccaattgaccattgtccctccttctcaagcctttgtaattttcccaaaaatttttgtggggccccccc

SEQ ID NO: 6397 - DNA, 505 bp, Emericella nidulans
ggccacttaaaagccatcaccaacaaccaaaaaaccaagacataacccaagaccaatcccacaacgaaaccagggcactatataacatcctttgccctttaaacaccaccacaaaactaagaagcaccacccaaaccccacacccaaaaaccacaacctcaacaaacaacacacaaaacacacacaccaaaacaaaacccaccacccccacccacacaacaacaaccccaaccaacccccaccccaacacccaaaccacacccacacaccacccatacaccaaacccacccaacaccaccaacacccccaacacaaaacaccaccccaaaaccaaacccaaacaaacccatcacctccccacaccaccaacacaacacccacaccaacaacacaaccacccaacaccaaccaccacccccccaccaccccaaacacacaaaaccccaccaacaaccaaaaccacccccacacacacacaccccaccaccaaaacaaaacacccca

SEQ ID NO: 6398 - DNA, 471 bp, Emericella nidulans
gaccgcacttcatccagacttgtggcaagggttgggccacgacaccgaaaggaggagtacgggggagctttgaaaaactgtggggttagcaccaacggaaacaagagaaggagcaggtgtgcactagagagatcacaactgatagaccacaacggagaacatgacggttacaaggagggaatgcaaccacgagcacgtgaccaggctataaaaaaaccaaaaaaagacccacaaatgctgtggcagcataaggaacagatccccgacttccaccctaaaccagacctgctccccccctcgaggtgccaccgcccaactaacacaccaaccaacaaatgcaactcatcgacgggcccaacaacaaatcaacaggggcaaagtggaaacccgtacaccaaaacccgcgcccgcgaggaataagccaaaacgaacaaacgtgcaaatcaccccggtggaaaataaccaaacgcc

SEQ ID NO: 6399 - DNA, 561 bp, Emericella nidulans
tcagagctcggccccgctggataacggttggcaggtcttcataagagatgtctttgattgttttaagaaactcctcatggctgtttggacacgggtatgtatatgcaagcccatcgccggcaatctgtgtatcaggagctggtgcttcattgccagactcctcgcctggcatggtgatgccgttaatgagctcgtcttcctcttcctcatcctcagactcttcttcagaaccaataatatcctcgtcgtcttcgacaaacgataagctgacgtccgacctcgtttctacgaggtcgtcaaggataaaatcgtcttcatcgtcaacaccctctggccgagatgtggagtaatttgtaggctgctgcaacccgaaatcttttgcatcatccgggagagattcctcctcagactcttcgccgtcctctttcttttcggccgcctctgctttcgcctcgtaacgtcttcccacgcattctgcaaatcgttcttcctcgggtttttaaccggtgtgccttttttcgccttctttctctgcttagacgggccgagcattgtcgcttg

SEQ ID NO: 6400 - DNA, 986 bp, Emericella nidulans
  unsure (1)..(986): unsure at all n locations
gtagctaatcctgaaatatgacgtggaacagcctgcagaacatttgcatctttctgatcttagtaacgagcagcggtcagactcttcagactagtcaaaacttctgtgagattggaatcaggccgacacgggggctgagatacgtgcttgatagtgccaaccattggtccaagaagaaccatatggcggttaaattgagttcgggttgttaacctcgacttgaaacgtgctgtaagctcgtactgtcgatggttgctagggctagaactgtgacgtggacgaggagcccaagcatggttgaggcgaatatcaggaaccagcgctatgttcattcgtctatgatacgaaacagagatataggagaaacacatgcgagaaagactgattggatataagacggtatctacctaatgcacccaattccgtataggttttaccgcgcgaaaatcacatatccgccgctgtccgtcagaaaaatggtaaagacacgaaatgaaacgaaggtaagaggatccatcacgacaaaaactagtagtgaagtgatttgaaacgagttaagaatgtaagcactcgtaagcaagcctagggtgccacccgaccagccgatggatgcccttgccttggatttacgagtgaatgttgatgtggccgtgagcgcgcctgcgggagcgcttctctttaagcatgcgggacttgatctggacagccttgactgcaaaattcgtgttctggcccggggtgcattctgtaccgctagacagnggtttggacctccgtccaagttccgctggcgcagcgctggaaggacgagcccccaatgcagttccaggagtcttcgtcggtgcacgggccggaaagggcgcaagcgtcgaagtggtgcctgtcttagcgtgaggtcgtgtggcggttggtgcaagtaccgcacttaaggtgaggaggagtangaatgacgcgcagctcattggttggcagtgtagctcaacgtg

SEQ ID NO: 6401 - DNA, 983 bp, Emericella nidulans
cacatgcttggccctggtatcgcgctaggaacacttctttctcaaccacggtctcgggcaccgataaggatcaagacgggcatgcatggaggcgacacgcctctgactgtcagagtacgggtggaagacgagggccacaacctctccactcgcatcttaacgaatctgaaccggaaaccctggaaggaacgacgtcgcgttagcttcagtcacacaaaatggtcctcatcggaaagggcgtgccttctggataggtgctgatccttgacatgcgtctcaaaggctacctcagacctgaatccggtgttgccatcgcaggctctccattcacatatgcgtgggctgttatcgatggtcctaaaaatccgaaccgttaaatatgatccttcggcttctccagggcataggatacggtagaggcttactctgccatagaattgtcatgctcagccatatgcctatgcacattatctgaatctgcattgctcagatttgatgttgtaccgccacaagctgatgtatatgccgactgataataggggggaccggctacggacccatctgttaccgcctgggcccataccacggggtcaatgtgtgtcgtaatgcgctcggtactcgagtactcaacagtttgcgcattttggaatagggggtcttgtagaaggtgacgctttattataaatattagatgcgggaagatacaacgtcgcaccgggagggggaaaggatcccaggggaggagccgccacatggtggggacagggttttcgcagataaattatttgggcgaggacgatgagggttctggggattttaccgccaggggatttggtttttccccctggggtaatcctggaaaggtttccccagccgtgggggggggtccccttttacccccgataagtatcctcctgctaatcttttcaagtccacatttttagcccttcttttgtgggcccccccccttttctttaaaaaaa

SEQ ID NO: 6402 - DNA, 592 bp, Emericella nidulans
tccagagggagtttttcaggttttgcagaatggaggatatgttggtttctagagctgggctgaggctggaagataagcctgatttagcagaaggaatataaaaggtttcgatataagataataggatatgcatatctgacagcagcagttgtttgcggtcatgtaatgaggacagaaatctaagccggtaatagtacagaagttgatatcatgtcgtatcccaactcaacatccaagcaagtcaattcattgtataggcggtgaagattctctcaagatgcatttcaacagtcagtaatctagctcagaaataatctaaatcgttagtcgtatcgttgaaacaattatccgggaaccatcatcttaaagctggtcattatgcgctcgtgtcccaggtgcaggggcaattgtagcctcagggtataacggtcccgttcccgacgtgggcccggacaccggctgcgtctgagactgatatgccatcccaggctcatacgtcgggagctggccgcctagactgggattatgagttcgggtataaccctgctgcatctcataccaattcgtaacatcttcctcgctagatgaggac

SEQ ID NO: 6403 - DNA, 559 bp, Emericella nidulans
cacccacacaccccaccccaccacccacccaccccaaacaaaccacacacaccacccaccccacacaaacaaaaacaccaccccccacacaccaaccaccacaaaatcacccaacacccaacacaaccccactaaccccccccccaccccaccccacccacaccacaaccccaacaccccaccaacccccaccaccaacaccaaccaccccaacaccccaaccaaacttcccaccacccccccaacacaactcaccacacatcaaacacccccccctcccccccaacaccaccacccaaccaaaccacacccaccaccacacacaccacccaccgaaccccccaacaccaccccaccacaaccacccacccacccacacaccaaccacccaccctaacacccatcccaacacccaatcaaccaccacacacaaccccagaccacccccaacaacccaccacaaacaacacaaacccaaaacccccacaccaaaccccaacccccacaaccaccactcacacaacaaccaaaaccccaacaccaccccaacacccaacac

SEQ ID NO: 6404 - DNA, 969 bp, Emericella nidulans
ttcagatgacgcatttattgtcagttacgtgtttacgatagaatgcctacaccctacagtccatgtctatctgcccgccctcggcgaatacgtaagtgcagtgatccgcctcaagatcacacataagcacatcttaccggtcgccatatcgatggcctcccaagctgtgtgggagaagcacccggataccgactgtgacgagctgttgaaactctcagatagtatgattgttcttgccgcttcctgccgggattaggagggtgcattttgtccggttattcgcccaaaggttattatgctttgggtcatggtgtatagcgattttgtctgatgtggacttctaaagctcgcttagtttacaaaacctagtctcactagagtaagttaatactgtcgtcaaattgattgaaaaactaattctggtagcggtggtgatgttagggaagacgctactcaatacctgtagctggagctgcagtctcaagagcaataatggcacggatagtacttctggcgggcatttctaccagcgcaatgttgcccagcggcttactttgttgtgaaatcgggcgcagttagaaattttcacctacaatgcctcagttatttgctccaatggtttttccacttgagaggattaacccaaccatacccaggtcagaaaggcttcttataaaaatgcataacctagccagttccaaacgcctcatgagcatcagagctttgcataatcactctttggccgggcggtaagtcatttaagcttgtccaaataacaacggctccttaaaatgctttaaggaattgcccccaaactcctaatttccgtcccttagtttttgaactttgtttgaaccaatatttttcctcccataatggtttgaattcagttcgagccgtattaaggcctccacactatatgtggttgggttcccttatctaaatatttggatgattttgggtattccc

SEQ ID NO: 6405 - DNA, 436 bp, Emericella nidulans
accctactaaagggatcgcgctgtgataacataaagtgctcaaccctgatgttggccgagaccagcttctatgcacatggtaaaagcatattagctctcgtcatacgcggttatacgttcgacacagtgccgaagcggcttggcatgaggagcacccggcttaactgaaacgcctgatgaaggatgctgctaccatatcgccaactccagatgttcgattgagggctcatgccataaatcagaggccggctgcaggaggactgggaccgatactgtacgggtaaatggcaaatgatcctcggacggagatagatggctctatgacgatgtgtgtctgcttggctgagctaggatgctccgtcttaaagggatacacgaagcattagagttcctgagagtccaccttgagctcactagcaaacccaacaatgaactt

SEQ ID NO: 6406 - DNA, 548 bp, Emericella nidulans
tggaggctttcttcaaacatattctattgattcttctagcaatttatcgctattgaggtcgagcatgtcatgaatacagaatctcccatagacttcagatgacctgaaggttcattcttatcctacgatgggcatgagcgactgggcatctgtagaaccagtctcgtcaacactggcagcacaactggcaccgcgtctctcatcccagggaagccagattcatcatctaaccaaagaagcctttgcgcaacttcgacaagaacttttggaggggaaattcagtcacttaagccttgatgacagtgctaccgatgttagcagacttgtttgcatcgtgctcaaggccggccttgagccgtgtatgaacgatgaaaagccggacgaggcagacctgaacgggcaattgttggattgtttggacatcatcaaaacggcagtcagcaaagccccccacactctaacaaaggttcctgatccaaaaatcctcggcgaaaaggcttgcgctccgttatacgtttggctggcggtcccacttcaacacctgtcgg

SEQ ID NO: 6407 - DNA, 998 bp, Emericella nidulans
  unsure (1)..(998): unsure at all n locations
cccttcactaagtcatcaacctcttgttttctactcaaagccccttctagcgaaaaacttcaatctatatctgcacatgtcccccccccccccccaaanannntttttttatattattcccctcctatctcccctttattttcttcctctcccttctcccttttctttatctttctccccctcctccccttctcttattttcctttcctttttatctccctcccttaattttccccccccccttctctcccccccccccctattttctttcatattcccctcttcctctcttcccccctctttttttttctctcctcttctctttccttctcctttttttttcctccttttcccatatctcttttccccccctcaattccccccttccttttaaatccattccctcccccccttcttattttcttctaacttttctctccttctcctccataatccctttttccttctctctctatccttatccccctttccccctcctcttcccatccttccctctccnaatatatttcttctattctctattctctctcttatacactcctttcttcttccctctcctcttttccacttcatattcctcttttcttcatccctttttattcctcttctttcttcctctctttccccctctttatcttttcctctctaccccaattctctcttctccttctctaacccttcatcccctttttctttccctctcccccttcacaccctcaattttcaccctccctttctattcttccccccatactcttctcctctcttccctttcttcatcttacccttctctttatcctcttccttccatatttcttctatcctccttcctctttctttctttttcccaccatctctcctcttttctctctttcttcaatctatcttcttttcctctcttttttcatctttttctttcttttcttcttctcctttcttccttcctctctcttttccccctctcttatcccntctat

SEQ ID NO: 6408 - DNA, 699 bp, Emericella nidulans
gacattgtggagcggaccctcaagcaactgggccacaaggtgagttgctgtatgcccatgttcgatggaaagcctaacgtggattgtcaggtcattgaatggagcccgccttcgcacaaaaccggcatggagctagctgtacgtccactttcccactgagaaccaactcccaacatctgttgctaacaaccccaggacgccgcttacagcctggatggtggcgcagatgcgcagtaccatttcggtttatctggagaggaacccgcgccgcagctcatagtggctactggactgcctcaaaagacagctttggagattgccaaaatcaacgtcgcgaaacgcgagtaccagaaactgtacatggactactggaactcaacgtcagaggtcaccggcactgggaggccagtcgatgccgtcatttgtccggcagcaccccatgccgctgtgattccgactcagtatagccatgtgggatacacctcggtcatcaacgtgctggactacaccagtgtggtgattccagttacacatgcggataagagcgttgatgcaatgtctctcgagaattccttgagaactggatgcagaatcgacagaactgtgagcgttccagcttgtttagagcgcgacactgcagccctgaatgatgcgacctgtctatggacccccatcgggttcaaatgtttgcgtgtgaga

SEQ ID NO: 6409 - DNA, 737 bp, Emericella nidulans
agtgatttattgagtggacggcggtgaaaagagagtgatgtccccaggacaatgaagaggaaaggaatggttatgggaagcgaaagagaggatacaacgaagacagcagctgatgagcagaacagaatcaaagactagagccagcagcttggagggcctttatactagggctactcctcggtcctccgcctctgtcctggtaccgatgcagtctgtaacgagagacccctgccaagggcatgcttcatctatacaaaactgcattttggacctcacgccagtccgtcatagtgcttagtgcctcttggcgctcgcttgtcgggccagtccgaccagtgaacggccctagcagggctttcagggaccatttaatctataccagattcttggcgtttcagggttcgcggtaaccgggtgcttgatattaaccggcggcaaccccaatatcgggcttaatcctggcgagatgagttcataagacatttcatttgtcaagaaaaggggtctaagaacctgatgacccaaagctggagaatgcacagggctcaatctcggagtggcttacgtagcgcaaggacactccttgacccgggatgctaggcggcagggtatctaccctacttacatagatttgagatggactgaccagtgtacattattgacctgcatccccttaatctttctaaatattttttttgatcgcttgcggaggcggactttcagattgacaacggtag

SEQ ID NO: 6410 - DNA, 549 bp, Emericella nidulans
agagatggaagtggctatgcccaggacacatctagtcggggcagtatttcggcgagacggttgtttaactccagagaaggggcctggttgagagggtcaacccgggtgccgctgagctcgtttatgggctcaattgtgaggcgcacatccggcccgctggtagctgtatcccatttccaagagtattcaagggggatgccaacatctgagacgagagacctccacttaaagttgccatctgcgtcgggtttggggccgagataggggacctgcgcggttagagagtgcttggtgccagccagggaacgacttgggactcacgacccagtggtagtggaagaggagagtctcaaactgcttctcgatggaatagtcggccgcctccagcatcagagccagctgcgggctggtgagctttcaccagtgtgtatgactgcgatctagagacggtttcaacttggacacgatatccaggaccttgagctttggcgagtcagtctctctagtggcagcggaactgtggttcaacatcttggaggtacttttcag

SEQ ID NO: 6411 - DNA, 504 bp, Emericella nidulans
ggtcagagcatgcctatgctcgccggggattattcaaccaaactggggggaatcacggagatcgagctggcgagcatcttgactacaaggagctatgctgcactatgatcacgcgcaaacacgtgctaagcacacaacgagcccttgatatggaccaagatcaacatcattacacaccctctcattaaaacgagcggataccccaactgctacatcgcacgatctgctgttctaactgacactaatctttcgttggcgcctgggcttaagcctacaacttctctctcttcggaactcatatccggctctgatacaagaatgctgtgtgatgtaatcgactatccagacacaatcatgtaataactgcacactgtgattcttaaggtaccatacacggtttgacactaccccgctgtccctagctgactcacatatttctagttgattattgtaggacacagtgggaagcaaaacaagacaagtaactagaaagcacggaccttc

SEQ ID NO: 6412 - DNA, 798 bp, Emericella nidulans
cctatctaggcctggaattcacttaagtcgtcggggttatgtgaagctcttttatttccaacctgtgtcttaatgtgccataatacaaattgattcaaggctatcaaaatctaccatctcagaaccggcctttttatcatagcactatcgtcctatacttgaaattagtacgtcatgtgaggacttggtgatttctcacacggcccggccaacttcaagcggccgcatctcatactcaacaacgacttgatcggtacgctggatgccgccggctggccgtccacccttggcttgcttatctagccgcaggatactctcctggctgccctccggggtggtgctaatgttgtttgtgataaataggtctgcgtccttgtagcttcccaggttggaccttttgtggcgttcagcagagaaggatggccgctgattgttactgcccttatccttgtagtggtaccgttcctgagaactccaggaccgcctgccgagaatcaactcgtacaagggaccgagtgtaggaatgcaagaggcaatgactatgatgttggactcaatactgggaaacaaagttagtctgagctcgctgtgggaaatgccagtcttacctggtccagataacaagatccgcagtagcgtctggggtctttcaagttagcagagaaagactcatgatttgagggcaagctttacttccatgttgagtcccgccgattgtataaacttggcagctgaaagcacttgacatagccatcgcacaccccctattaggtagaatgaactagtctacagcaccgg

SEQ ID NO: 6413 - DNA, 461 bp, Emericella nidulans
gattaccctcctcataagtatccagtgctctatgattaatctttgtattaatctatttaatttgctagacttatacagtcagtgccatgtttgccaatgcgtgagattttcctttgtgcatggccagtattatattcaaactctactctacgtattgtacctggcattgtagtgcatatacatgctaatcacattcctactaacacaggatgaagctgaacctagtagagaggggaactctgctagccacaatgcaagtacgctaggggaacaaggagggaggaggagccgatattaggaattgcaagggctactgattatttaatctgacaccctgagcaaagctagtaagtagcttatggatgaatatttctgtggtagagcaaaccatatcagcacagaagtctttagaagcatgtcataaccatacagggaaggaatcactattacaatagtgctga

SEQ ID NO: 6414 - DNA, 743 bp, Emericella nidulans
tcaaacacaggttaatgtgcacgtctccaagacatatcacaatagaacataccacagtaacatactcaccagcttgcgcgcatgcgacatagttgggggaccggcctgacgtccacgacatcaacaaccagcacagtaagaaacagtggatccgccctcgaaaatgacgcctttcagcattcgtccgggtaattattgagggagaagattgttgactttaaccggataatcagggttgcgacccaaaagattccccaaaggccgatctttgcttggcgtgtcaaagcaccctttctttgcgtcggcgggcttggagattcaaggtccagaaaacgaatcagtgctttgcgtcggtggagcagtactgagtgattgtctcggatcccccacagggtgaaacaaatgaccccttcgtgggggacaagccccgtggcagaaaagggcaatccgttgcatacagcctatttaaggttgacggtattcaggcatttcagctgagaccaacaatttatacgaactcttcctgcatctcatcttgactcctagaaccaacgcgctacaatgagaaacctcagtacctggcccacattcgcaagcctcctttgtctgctccagggtcctgcgcagtggggcttccgtaacgttcagctggcgttgactgcccgttcgtgacccaaggcggtgtcatactaaggactcactggggcccgtcatgggagtttttgggcccaactatatgatcc

SEQ ID NO: 6415 - DNA, 785 bp, Emericella nidulans
tggttatggcgatccatatggaatgatctatcgggaacaccttgatgatgattttgccctttctttctgctctggtcctgtcatgttctgcctagtgaatgggatctaagcactgtgatgacagctcaacatctatggtcttccaagcctagccatgccaggttgcttgctgttttgtgcatggtatcaatcgctctaactgtctactcgcgagctttactatagtgcttattaattaatataaagatagctcctgactgggttgaaataaatgaactgcaagggccttttttaagtgattctgccctattatccccaaagaatggtccagactggatgaagtgagcttcttattagaagtcacgctgctaagagtacccatattatcaaggcactatgcaccctgaccagcagcaggtgcgtaacggaggacgatgggcccagatctagagccacactacacggaagctggggtttaaaaaaagaacagacaatgcaggaacaacagtgaatgaattagaatgatgactaaaactataatcagacagcctcccagtggtaagtaaagcgtatcgatgatacggagcagaacgcgcagtaaagacagtacgatggaaaagagagagcctcccattttcgcaacatgaccgtaaagttagccacccagtaatggacgaggtataagaacatggcataaaaggcagttaaacgcaagaaagagccacccgaaaggtactgtgatgcaaccacaacatgaacgaggcaaggcgcaaaaaaaatgccac

SEQ ID NO: 6416 - DNA, 493 bp, Emericella nidulans
ctacaggcccatatgtggtgcctgcgccttaagaggtgagccctgtggcttcccgccagacacttctcgccaacccaggagggagagggacgatgcgtctggaggcactacgtccaggcaggcccaaagagagcctccttcggtctccaatgccagatcaccccatgccctggagtttgatctgtctcctgcgccgtcaaatgtcgcggccgaggcgaactctcaatcaatgaacatggtcgatctgcagcttctgtcgtacttcatgatccataccggcaaaaatatgtcgttgattccatctcggcaaaaggtatggcaaactgttatccctaggctggcggcacgccatgaattcctcatgcatctcttattggcattggccgggctggattattttcatcctgatggcaaccctgacgcagaccttgctgtggggagtgagtcaagggcggatcaatccacttcgatgagcgtagagcatcacctgcag

SEQ ID NO: 6417 - DNA, 501 bp, Emericella nidulans
caagaaagacatatggagtggtggcttaagtcggtccttacgcttcccaatattctccaccagctacagcattaatgatacccctggctccctatacaagcacttctttcttccctcctttacccagtacgaagcgctggctaagatatgcacagaaatctgcaacctccgccgagcgttcgtcccacataattagcagtaagacgatcactccagtccaaggaagccaaccgttgtatctagatcggaagagcgcgctcaacaactaaccctgatgatatgtattgagtggttaccccgttggacatccacatacaattatatcccatccacatacaattatatcccatccacatacaattatatccctacaaggtaccatcaagaatctggaattgacgtgggtttgggcgactacttgggtattcatttgaggagcccactcttctctgtttatgtctacatcttcttacgaagaagcgtcagctttgaaaggagttc

SEQ ID NO: 6418 - DNA, 1135 bp, Emericella nidulans
tgagacaactccgagcaactctaagacaagtgaatcatgccctaacctattagatgactacggcaatgtagctcgacgatgtctacatgcaccaaaagcacctcagacctccgtttcctcgatggagtcaagaccaaggaccccgccctaattcttgccagcaacatgtacttccgctaccctggtgtggacagggaccagctccaggacatcaccttccaagtctgcttgggatcccgtatcgccgacattggtcccaacggtgctggtaaatccacccttgtcgatgtcttgaccggggagaagattgccacccgcggtgaagtctaccaccacgagaacatccgtattgcctacattaagcagcacgctttcgctcacattgataaccacctcgacaagaccccgtccgagtacatacagtggcgtttccagactggtgaggatcgtgagaccatggatcgtgccaacaagcaggtcaccgaggaggatgagaaggctgagttgaagatctacaagatcgagggtactccctcgtcgtgttgtcggtgtccacgcccgtcgcaagttcaagaacacctacgagtacgagtgttccttcttgcttggtgagaacattggcatgaagagtgagaagtggacgcccatgagcaccactgacaacgcctggattccccgtaacgagatcatggagtcttactccaagaaggttgccgagattgatgcccaggaggcttttaagagcggtaacattcgccccttcatccgaaaggagattgaatatcactgcgcccagttggtttttacgccgatctttgttcccactctaaaatgcgtgttctttccttctgtcaactgttaagggtttttcggcttctgttttttgtttcccccctttctgaaatgttctctacatacccccctacttcctagagcttgcatctatggatcccttttcatggtcttaaagccttttatggttgtgtcctttttatcatctatcttttctattgtattatttctttttcttgctcttttattttttttccgttataactttcttctccttactttagttctcctcttatcttcttttccttatatatatttcttgtgtatttatctaaatctttat

SEQ ID NO: 6419 - DNA, 663 bp, Emericella nidulans
  unsure (1)..(663): unsure at all n locations
aggagttgcctatcgggccttatccgaggggcgaaaacgctcagtagtgtactcttgagtagctagttgtggttactcgcttagaacaaaatcatcccgaagatctcggtaagagatgtggcatgggctcccgttggcgggatgaataataggtgggtgagcgtcccgaagacggcagtccgacactgacagactagacatagctcaaaagtcaatcctatggtctttcatgaatcacgaatcttaccgaattcggaaattccccgttcaacgacgcatatctttttccaggggttctgatttgttcgccagcgttgggaagagtcgatcgcaggcggacgaagaaatgtgttgtgggggagtgaccgccggcccacacgtgcctgtttttcccagcaaaacctgcccagcagccgcctttcattatcaagtcaagcccgtcttgacaggattgcgactcgagcagggagcaggtcaagtttgggatctcctcgccttctgggctcccgttaacctgtcacccggcttggcagcaccagtctagaactctggctgtagaactctggcctgagtagatttcgccgctcccgncctcccngcaacttagccaacagcgaacttcaacaaggaaagtggccccttttcgtttgctttaaggccttg

SEQ ID NO: 6420 - DNA, 645 bp, Emericella nidulans
cacggcccaacagcagccaccccgcgatcgagacagccagaagggcccgcggccggaaagctcgggagctcgcaggcagcacgacactgcaagcccgagaacaggaaacggccaggcagccccagccaacaccgccagacggacaatcgacgccacaggaaagacgaccagccaacacccacgcaccagaaccccaccgcacaacaccccccccacacccacccacgcacacgccaccgcaaccacgcacacccacccaaccagccccaccaccatacccaaaaacaccaaaccccacacacaccacaaacccaccaaacccacaaccaccgacaaccccccccacccaacccccaccaaccccccccacccacacaaccccacactcaccacccctacaaacacaccccacccaactccccctaacccacaccccccccaccgaaaccacccaaaacatcaattccacacaccaacaccccacaaccacaacaccaaccacccaccaccacaccaccaaaacaaccaccccacccccccccacacccaaacaccaccacccccccgcaccacccaacacgcaccaccaaccacacacccaacccacacaacccacccaaccaacacccaccccacccaaccccc

SEQ ID NO: 6421 - DNA, 480 bp, Emericella nidulans
ccgataatacgactcactatagggatccgctgactttgagaagaccgtgagaggatgtgaggataacggctatcttgcactctatggatttggaccggactagtatatgactctgatagccacagtgacagtggttcaggtgagctaagcctagagcgggctgttatacagatgggcttggaggaccgctgttgagtagaaacggtcagcgaggggcttgtatctgctgatgaggcgcttgcttctttgcatgcctacgtaagcatacacagatgatatattggtgctaacactgaatgccgccacttacacatggggctaaaggacgcagctgcaaagcactgctcactacacgagacatctagagcacagtttattatgttgcgcacatcgcatgactatcagaccatttactgagaccatgctctgagtattaaactgtggatctaagagacaacagctcgttgtgagtcgtatgta

SEQ ID NO: 6422 - DNA, 717 bp, Emericella nidulans
ggacgggagtttctttcacgcacccggcttgaagaatcgacagaaggtcaaggagggaagagcgctgtacaggagagtcagaagtcggtaagcgatataacccggctgttcgcaattgtactcacctcccaagccccgccccaatgcgccagataatggtggtaaaccctcccttccaaggtcacatgctggcctacccgaacgaccatatcctgagtgggtttcacgtagacgatgggaggttcacgagggtatgtgttgggaatccataacgcgatagggaatttgtacactgtcccgcgaaaagtgacgggtaatgtgcccgagagttgcaggagcaacgcagagaatccgttctcgtaggctagaaatgcgatacgtcagtggccagcttgagagatcccaggataaccagcactcactgtagactgcggtttcaggggcaagtgtgggaaatttggccaggacatttgctacgtcgtagtaagtccggttggggtcctgatatgtttgcttgggtcgtagtgatcctggtaaagttagcacgaatatccgcaaatgacaattccgaaatctcaccctgatcagaacgctgtacagccaagtcagcgtcctctgtgggactgacgccatatcgagggagctctggagagaagtggggagatgagtccgacagcgataccgcagcacgaaagcagagcatcgcatccccgagtc

SEQ ID NO: 6423 - DNA, 1005 bp, Emericella nidulans
  unsure (1)..(1005): unsure at all n locations
gtctacgcacagtccttctggtcttctacaaagccaaattcctcggccagccaatccgccggcgcaagcagcatgattagcagccgtctacttggccgccgtgagctggtcgacaccccaagcgatcaggtccgtcactacctgcgccagatactcacccctcctaccggtagttctggctcaatggccctctttggcctacaaggcgggcccgccacatccaagacctcgatcctccgccgcgggagtgtccatcctgcttggcgacgcgcgtacgcgcatctcatgacctacggcgcaccggtcaatgactctgctgatgcgaaggcggcgctggagacaggcgcagtttggtacgaggggcatatcgaaccagtatggaggaagtggaccggtgaagagggtgggagctatgcaaacgagggtaatgtgtttagcagcacgtggaaggaggacttttacggtccgagggactcaaggatctacgaaaagttgcttgggatcaaaaagacgtacgatccgaaaggaagcttgttcgcctgggccgcgttgggagcgatgagtgggagtatgatctgcatactggactgctttgcaaagctggacagttttcgaacatacgaaatctttgatgcatcaagccattatatacatgtcacttncaaactcataatgcacccaccggttttgagcatattgcattgttgtgggagtaacacaatttggctgttattaccttgaaggcgacaactctggccagcgaaggaaattgaaaacttactctgttccatgaccctgctttgtaccgttgggctgtggttcgggtaaaaaacaaacggcgtgtgattattaccgaaggaatacggctatccaaacgacctggacgggttattactccacccttttttttttattgtttttaaaaaaaacccctggggggggggggagaaaaacaaaaaaatttttttttccccccttttaacttttttcaaaagtctttttttt

SEQ ID NO: 6424 - DNA, 535 bp, Emericella nidulans
taacactggctagactggcgcgtgttgaggctgatgcgatgcgtgaaggtatccattttacctgtgtctgcgagagacggtcggaccagacgaggtctgccgctaaaaggagcgagcctggcttggccgtctagacgcgcgcttcctggataggcacaacaggcgttggctaattgctactctactagcgaacatagtgtcaggtctatggcgcgttgaccacattacctactacagcaccgacagatatggcgagctgcactacacctgcagctacatgctgctattggtcaatctcgtcaaacgtatggacaacgctattgaagctgaggcacataatacctaatgcgacactaatgcaagacgaactgaggttgcgacgggaacactgagcagcacttcctagctagactgtaggatatttcatcgaagcgtaccaaaggcatctccaggctgtcccattggcctgggactggacggtcgggttttctagcgtttgatgcagcagcacgacggaggataacatctggacgcg

SEQ ID NO: 6425 - DNA, 937 bp, Emericella nidulans
cagaaagaaagtgggggagttagtgtgtagtagcgaagtaagtggtatgagtgatggggatcaggaaagagagaaattagtggaagggaagggatggagggggagaggaggatatgaggaggaagaggaagagtaattgagaggagaatgggaagagaggaaagtaagagggatgatggtgaggtgtaagaaaaaatagggaatagaggaggagaggaggtagtgtaaggaaaagggagaggaaaataatagtatgggttggcatgggtaggggcaaataggggagaggagttaaagatgggaggttggaaaaaaaagagagagaaaggtatgaggggtgtaaaaaggggggtgataaaaaataaaaagggaataggtatgggtaagtattgacatggccaagaatggccacacaggaaccagtgcacagccctttttcacaccggtaaggatcgataataggtggtgttctatccacgggagcccccctttaaatagtgttgtacctcgcttagtatatttatcccccaatgacttcgaggttatcgaattcccttatccttcgctatacatccgcatatatatataacgtctgtctattcttgtacactcatatccttgttatactctgttatacgttgttatatatctttgccacctgaggtgtcttgaagagagttccccttccatctccagatttgacttccatcaacaggtctctttcccctgccgagctgatgaaggtgtttgagtcgtgcatcctgtgcacgtatccaatctcaacgtcgaacgctgcgtgatcgctgagaaacgccatttatgcgcaatctggcctcctattcggcgcaatactgctcgaagaaggtcatctcaaagataagccatttctagattgagcttaagccttgccttttcgagacccggggaattagatcgc

SEQ ID NO: 6426 - DNA, 525 bp, Emericella nidulans
accggaaactcttgcttgatctctggacaagagtactggggttctatgagaaacagttggcttagtatgatggtggtgctagttcaaagttgtgcccctttttcttttcgtcttttttttagtcttcttttttttcttctttcttccttggtttcttttctattcccccccccccccaaccccttccaagtagttgaactggcatttctctgagtattcatgttcttaaaacgtggacgatccggggtgagcagaacggagtataccaatcaataaattctgcatatgcagccatttatctggaacagtggggtttactcaataaggctgtataggatacctcaatgctggcgctgatcattttctcactagtactgaactttgatggacaggaggctcttccatccaatggacaacatgcaacacaaggcccaagtcatgattctatgatacactaccgggacattatgatgatattggctatgccgtatatgactttgcgcccccaaattatctacccatggt

SEQ ID NO: 6427 - DNA, 665 bp, Emericella nidulans
  unsure (1)..(665): unsure at all n locations
ggctcccagggtagccgctcaggagggcatcagtgctttcgtttttatggccaagttgaaatccgtacctctgggatatgtccacatcgcggacgacggtgtggcacgagcttacgacgaaaacgaatccgtcattgactatgttcccttgaccaatgaccagctcaagcatctgcttcagaaccttcccgaagcatggaagaaggaagaggatcatttgcacgctgtcttcgatgctgtcgacggacgcgaagttacagatgaaaaacagttgcttgaacctcctgctgagcttcgaaaccccatgaatcatcaggcacctcagtcgaagcgcgaagccaaccctctccagcaggctgactactactgcgtaggccaaccttgcaccagtggtgatgcttgtcggttcttgggctgccggggctgtgcgcagattgatgctgccttaccaggaggaggagggtgtttgcttttagtgaaaagattggaacctttctgttgccctacaccttgccatcttnctaaataggccagtgctttccacagctgnttccttggtctcttattcctccatgaacgatagtctacacatcggcttagtgcaatcctgtctccttctttccttatctctttgtcgaagcctttttcagattgcgagaaaaaat

SEQ ID NO: 6428 - DNA, 511 bp, Emericella nidulans
acgggattcatggagggatacctcgcatgtgtcgtggccaatggtgtagggcagataaagaaagacttctttgcgctgagagtggtgtctcgcgctatgactgaaggggcttccatggatgctaatactgatgatgggctttgcgcgtttcactgctcattattcggacctagcgtagcacataccatcagcatagctcgtgctgcaacatatagcttgtactttggggccccaatcatgtctatagactcttggagcatgtatacgcttgtaaccgcatacatggtcgcacagtcggattacataagcatcttgaacgtgtacgcctcaagcagctggcatgatacgtcatggggcaccagaggccatgacaaggcgggagccgatcattctgccatgactacaggaggctaaggagaagaggctggaatcgagcaactggataaagcgcatgactgaatcgaacgtgaaatggaggcaacacacacacgtgccatggcttcgtctgtta

SEQ ID NO: 6429 - DNA, 618 bp, Emericella nidulans
ctaacatgcttatacgctagcgcagccagatcattttaacaatcatccgtgagctagcaaagttttcgttgtccaacggactgatggcagctagaccgcgtaaagctagtccctgaatctaggtaggttgaagcagggcaaggtctaagaaattccgttcgagagtcagaagacccagaagccaaagcaggagagggccgttcgcgggccaatacgaggagaagagaaagcagaagaataatatgcactgcggcaccggcggttaagctggactcgaggctgcgcgactgcgagaccgcgacactagaccgaactcaatcgagcgatccaagtcctcgaccaagtgcactacccaacagagaatgcggagacgatctgcgggaccgtccgcagcgctcaatcaagggttcgctttagcgaagaagaggacggggcttgagcctttcgaagggaagtgacgcctgccgatagaatgcagagcatatagtacgagcaggatctcgcgtgcatctcgatcaaggcgtgccgacgacgctgacaggttcaggatacggagggatgcagtgatgcagtgatgctgatgcaggtggaacgggccctcgtgctcaacgcccagca

SEQ ID NO: 6430 - DNA, 551 bp, Emericella nidulans
ggggggtgccccccgataccaatgacccttatacccgccacggttactacccccccggaggcccgaccccgggggggggaaaaaaaaacgacgacgggggggacaccacccccaacccacaagccaagcccggcctcggcaaccccccccaacaaaggaggcacacaagccccaagaggaaacccaaacaaagcaggcgaccaacccccaccagaaccacggacgagacaccccgaggagcgaaagcaacggcaagcccgaaaaccccgaccccaacagccaggcaaacccccccggacaaccaaccccgaagggccaaagacacgcaccccacctcagacaaaaggggcccccaaaaaccgcaaaccgacaagacccccagacacaccaacacgacccggcaccccccgccggccaaaaaaggcgccacaccagaacacccccaaaagccacccaaggggaccccggccacccagacccacggaccccacaaccaaacaacccccccccgccggccaacaaaccacccacgcggacccgaaaccaccccc

SEQ ID NO: 6431 - DNA, 575 bp, Emericella nidulans
tagcggtgttgatatacctctctaggcacatgaagaatcacttaaaaccttgaagtttaacccggtttcttaacgaggctagctctcgctttcttcggccgagtcatggttatcgtcgttacagatccttctgactccagagagacgagaaaaagaagcacgtgcggttgcttacgcactacggcacgtaaatcctttccactgccagctaggtggcagtggtacctttcgcatatggagtctgaagggcaataatcagtgaactaaagtatagcgcaagagtcactgccagaatagccactttagcaaggacgctagaaggcgaatcccaacatccgtgcagtgaagatcatcggggtttgctaacggtgactgaaggagggatatacgtaccaacgtaacacgttgcatgtaacctcccgtcccagccaattcgttaaattatgacaggtaacggtcatcattctctgtgtactacaccgggtgaaatagtcgctagtcgagtctagtaaatcgggtccttactattcgaggctagcgactctgtcaacgtcagttgggttggctagccaggc

SEQ ID NO: 6432 - DNA, 1008 bp, Emericella nidulans
caacaggtgctcctgaagaacagaaagaggaggctgcagtctaggagccagatagcaaaccggtggataaggactccaccgctgtcgaggctacaccagctgagactttgaaggaggagcctgtaaccgagtctgtcactgaaaatgctgctgaagccgacagggtagaacctgaagttgtcgagccgtcgaaggacgcgtcccccgtggaagtcatcgaagagcctgtcgcagaagcagctacagaaaccactgttgttgaggaaaatacgccagctaccactgaaaatgagcccgcttccatcaaggaagaggttaccgaaccggctgagccagtgattgatgaggcggcagttgaagagccagtggccgagaaacccgcggcgaatgctcctgcaattgaggctggtgcatcaactgttccccaagaaacgagtgaggagttcgaagccccttcaaagccagctgctcctttggacgaagcagccattgtcgaagctcccgcagtcgcatctgaggagcagaaactcgacgaagtcagcgcatccgaaatccggcccgagacatctcagcaagctcctgaagaaacaacgccggtccccgagaaagaacccactgctcctgagccagctgaatccaaggttgaagtcaaagacgctgaggtgcaccccgtcgagagcgtggctaccacggaagaaacaaccgccgaaacccccaacactttggttgctggtgcaagccaggaagacccgacaggtcgaggagagaaagtcttaaggatgagacagtttcccgccttgggtatagttggccccttccttgcgctgaaatgagtgttgcgagcaccgctttgcccaagaaaactgacaactcttgaagaagcgggttggcaccacccgacttaagattcaccttctgcaacgagaatttatttaaacgcgggttccctactgtcttgttggaattaggcttaaaattaatacttcaagactttttaacaaaatcagg

SEQ ID NO: 6433 - DNA, 607 bp, Emericella nidulans
ctgattctaaagttagctttaaaaaaataactctagaaaaattgctgctacttaataaatactaggtattttattttttttaaggctgaaattataagtataatcctcccttcttgcttagccaaattttaatataactaaataatttttggagtcatagtaacagtttgaataaatttagtataaaaggttaagcagagtatgcagcttgcttgtagattatattattagactttgaattagtatacctgcctagtaagttaactagaatatccttattattagtagaacaaggctttaaactatatatatttatagattagaagacccctgtagagctgtcagctaagtctactagttatagtaaaatactaagtataggaaaatagaaataggatgcctgggagcttgcaagggaatatatagctagattataagaatatataaagcagaacatagactaaagatatttataagttctttaggtagataattaaattattctaagtatagataattggaacttagctgcccaaagcagagctagctgatagatactagcctattagggatataaaaaaatagtactttacaagctgatctgtgc

SEQ ID NO: 6434 - DNA, 537 bp, Emericella nidulans
cgaataaccctcacaaagggatcactggtaggacctgctgtgcacctttactgcatatattccatggatacggcttcccaacatcatcaattgaaagacatgggacgaccatctttaatatgtcaatcacgctgactgcggatggtgagtgggcgaaagctataactggattcggacgcagacaggatatgatcgagacatgcatgaatcacggaacatacttacccgtgggcctatgcctcatatacaggacagtgcagaccctatggcagaagactccatttcagattgcgggatcgcgcatttgagcgaacgatggacacatcccagtcaacaaccgacgtatcttacgcacaaactggtcactgaacaggcattgtcggactatcatgcacaactcccagaccgaggctatagctgataccgatcatcgtcagcgacaaggcactaccgtcgccattcgcgagcactactcgatccttaatagcgctagcgatgccactggcggatgctttgtactgaccacccaggagagag

SEQ ID NO: 6435 - DNA, 609 bp, Emericella nidulans
  unsure (1)..(609): unsure at all n locations
caggcaacacatccaccgcaccggcgtctaagcatctcgagatgtgttgaggatgagggatgtacggctgttgctgatcggcagctgcggaggtgggctcgcgcgcaggcgggcgcaggatcgcgacgggaatgacgatattcgggccgtcatgaacgtgaatgtctgtggaaaggccagagagcagcctcagatcggacatgccctcgctctgcgacgaaaatgtaaacccgcgacggagcggtgcaggcgacggcggtccctgccaagacccgcggctggtgctgcgacgcgataacgcagcgggctcttcgccgtgcaggtcgatgtcgagaaacgcaaaaatgggcgtacaattatttgagtggctttcgcttagctccgcaagtttcgtgacgagcgacgcgccggcttgacagagatacactatcgcgaaggagacattagcacaaaacatgcagttcgncnttatgcnaaagacatactttcccagcgacgcccaatggacttcgacatncgacccgagtgactcggtttcgtggggatataaggattcggcggagagccttgatacacccaatgtttgactggatacagatcatatagatg

SEQ ID NO: 6436 - DNA, 1074 bp, Emericella nidulans
  unsure (1)..(1074): unsure at all n locations
aatatggcggctctttgattgatgagctaagccaaagcaaacatgacaaccatctgcttcccctgagctgggtggtggttattgcaacgttcattatcttatcgcatctatgacgtcttttctacgaaggccccagggttcaggtcgaaccttgaaaatgtactgtactccataggtggtggttgtatttaactttgtgactgactccagacaataaatctaaatctcttcattcattatactttgcgtttgcgacaagcctttcatatcgcataaccaccatgtctgaaaaagcctcacaataccgactgaaagtaaccgcaggaccctcctacgacccagcaacacaccaagaggttccagtgaacgaagacaaaactctgcatatctgcaacgagcacgctgccactaatctgaccgtacggatccagaattataccggaacgttactagacttgcagaattaatctgtgcactgcattctggtaggaccaacttggtggactcacaggcttccccaacggcgcaccgggatcgaacccttacttcgagcaccctgatccttcaaagaccagactcgagctctttggatagctttaagaagccataatgggacatctcgtttttgaaacgacttcaccggcccccggtagatccccctgctaaacgggcgctctgttgccatgcaatgtcccacctgagggagcacccgcaaccgactcttggcgggtggcaactgaaacttggtggaaaaaggaattccttctcaggatttaaaggggggggtctgggttccccaagcctctaacttgaacccttctaacagtaggcgggggtggtttctaaggggtgatctccttccatcctctctttcctctctctagttttgttgtgttgtcggggagcactcctttaacttgtcatccatccttaatattaattcattatccaccaccatctccctctagaggtggtttctaattggatatttcttcacccactactcacttccctatacaccaatctcaaatgctnattataactttatcctttacccatctcattctcctgtac

SEQ ID NO: 6437 - DNA, 480 bp, Emericella nidulans
tcagtaccaggttctcggtatgtgtacctccttcccgcggcatcaggtagcgaaggaacaactatttcttcatacagtttcatgtgtatagtcgattcgaatctacttcgcgcagtacattcattcaaaatggacttaatacctgctctggaacggacattacagggtcaggtcaagccatgtacgttctgcgttgcttgcctccacatacgattgcgtgaactgacatctccggcagtattaacaaaatgttcactcgcatcgataatggctggccagccaacgaatccacgaacgaacaatcccatccgtcccgacttccttcccccaccaacaaccctccctctccgtcactgttcgcacaacgaagactccacacccatcgacgaaacaagctgtctgctctccctcctctcgcctctctccggcgtcaagcggaacaaagaacactatatcctcgcgacggccgacccgccagcc

SEQ ID NO: 6438 - DNA, 568 bp, Emericella nidulans
  unsure (1)..(568): unsure at all n locations
tccaaagtctatccccccccttttttncaaccaaaacnaaacaaccggcgcaccggggaccaaaacaacgaagagcgcgaccaaaaggcacaccaggaggagaacccagcgcccgccaggaaacaacaaaccggaaaacgaaaacgacaaaaggaacaaggcacaccgcacaaaggaccgaacagcccaacaaggcgaccgcgcggcacaagaaccaccaccaggcccagccgcacccacagacgcaaaaccaaccaaaaccacccagcccgaaccgaaaccaccgcaaccaacagaaacaaanaccggacgaacggccccacacacaccgcaagncaaagaaaaaggacccccccaagaaggcccccgaaaaaaggaaccgcagaagaaaggacgcaaaacgaaccccaaagccccaaaacgaaaaacacaaaaccgggcaagcccccaggaccggaacacaagacagcgccaacgggcaaaaagacgggaaacaccgccaaccaaacaaggcagaaggccaaagggcgggccaaaaaaaagaaagccaaaggaagccccagggacc

SEQ ID NO: 6439 - DNA, 764 bp, Emericella nidulans
ggatcgaatgcgtcaacggtttcccggtgagattatagttgttgaaagcaggtaccgctccgatactccagagacctagccagataaaaatgaaagtggaagagttcatcatatccagggcgacgatttcacggggtttgatgccgtggactttcttgaaccaggtgccatatcgcaatgctacggtatacgtctcgtggaaagtccagctgcggccattgtagacaatgaacggccggtctttcgacgccgggtcgagagcatagttctccaagacatagaaaaggttcagacggtcccggcgctgcgcgagtcgcgacttgataatggatttaaagagtccatggaagatcttcttatcataaaaaagcgagtactctgcgttcaggtaggcgagcgtagtcgcaagtgccggaccagcgagcgagagggggatatctattgcacagtgagttagtacgtccattgaaattatgaggtagctaacaaaccaagtggtaatggaatggacatgactatattgtgagaaagtcaaggagagtaaacgtaatggtgccgtctactcgaggtaccgacccacttgggagggggacgttggacagttaaaggtgggactcactgagtcagggagccgtggtactgtttagaacgcgaagcgagcaatcgaaaggatgtgatgaaggaaagaggcgcataatggccagccaaacaaagcttaaagagcacgaggctgtctaggaggctggacgatgtcaaaacgagat

SEQ ID NO: 6440 - DNA, 1076 bp, Emericella nidulans
  unsure (1)..(1076): unsure at all n locations
ccttggtcggtcatgaggctacgcaggcgatcaaaggtgtccggagtgtgccatgcgcccggtatgaatacaaaaatggggttttccataatggcctgaatattagtcgaagccgggagtgttaataagggccctggtactcatacagacccggagaacgttgatgggaaagctggagcagtaatcggaccgttgctggccttgagtcaatcccaggcgtcactatgccgttctatttatacaaaacttgagttaccccctcgcaatcgcgcagatcaacccctcaactgtcccgcagcccgttggagaaacccaaccccacttgcagaggggtcaaaggaacatagccattgctcttgaatttcgaatcggaagtcttctcagtgctgtcccggtccggcccggcggctatctcactatcccggcaagccatggtgagcaccactgcctagaaaacatccatgattgaccatggaagaaataggcagtcgtcagctctttcgcctacgagatccgaacctggcttcgagttgttcttgagcttaccttcctttgggagggacaaggtacagctggctttatatgcccaatgcggaggaccataggcctacaaccctagttcccacaactgacgcttaaaacagctcattgactgactcatttaatcggaaattccatctgagtagctatggagagcgacgaattcattatcaattggcacatcactttacaaggagatcgctagatatgcgttcgtatatttcgaggagaatacgtagactgcggttataccgaantccgagctttgcacacacaacttccaggagaaacctttctctccagctaagatgtacgcagtctctctacctacaggctcaggagaactggcgtttggaactataggcataggctgctcaatggtagtggaatataaacgctgcgggatcactcgacagtgtcagaattattcagctgtgcaagcctgatcgtgagagagcatgcaccagagggctggtcacagcggctgacgtcgttgagtgccgctagtctgcgactgtccttagacaaagcgttgc

SEQ ID NO: 6441 - DNA, 580 bp, Emericella nidulans
  unsure (1)..(580): unsure at all n locations
gaataaccctactaaagggatcatcactaggctgcggaacaagaagtatgggctctgacccagaacgatcgtacttcaattctgtgtggtagctagagggttgactctcgacgcgctccttttcatagatatcaacggtgcctggattaaggataaatagattagctccggaaccaatgaccaagtgtcctgccatctgatcgcaccaggaacttgtcgtccttttacatccacaataccgagacccatagtgacaaccaagacagactcagctaggctgggctagacgagaggactgcgaattgcccggtggcctaacgacccaattatcgaccggtttcgtaattaagttcagttgattgcgggattaagctgagaacatataggcggaaaagaacatgctgcagcagatgctgatagttcactcctcagtggttgtgttgtcggagggggtcaaaaattggattgaggagaggcttgagggtagaaaccaacaagatggcgcagcgaaacgcaaggacgcactgtcaaactcactcctcaccgagaaggttctttgaagtgaatatcgacnagaatg

SEQ ID NO: 6442 - DNA, 1109 bp, Emericella nidulans
  unsure (1)..(1109): unsure at all n locations
aatggcccgacgcctaccccttccccattagccaactcacctcgtgttccatgattcagtcccagtaaggctgaatcccagctcgaagctagcccggcgaggggcgctggccccgggcgtttgcttcgcgtaagccgaagagcccgtcctatgcagacactatgacactacttaccgtgaatctgaacctgtgtcttgcttttggcaccacggtcactcttgtctacgctatatccaggcaatcctattcagacaaacacccctcgatttgcagtagccccttcaacgtcgtcggtttttgaactagaaaaatgcgcaaattcgtcaaatttctgggcggcgaaaagaatggaggttcctaccacagcatctgggccatgccagctccggaatcaggaactagggtggtagtcacaaatacgaagaaagagaaaacgagggagactcgtgagaccctgtcaaccaagaaaccccagtcgaccatgcacatttcgaaactgaaccagcttcccctggcagaactgagcagttctacgacatcgacagtttcagcgcctacggaccgagagcctgttgagtggagcttaccgccgtttccaaagcacaaggctaggagttagatggttgtaggacaacggggcaaactgaggtttccattgaagtgagaaaggagacacatggagaggctgcttgttcaactccacaaccaggctattattgtccccccctcccgtccgtaaccctgtgtgggcgcgacgaattcctgttggccgacaacggatatctcccctcataattctagccaaaaggactgctgggataacatttctcacccgccctgccagatacggaaatcccggatttctcacccaggggatgaccttatcggagcggaaccgggcgggttcaccctaataccccttgaaaacgcccctccccaccctccccgggggggggggggataaataatatctccccttccctacatacaaccccgcccattcctacaccataccctcannnnnntacatcctccttgctaaacttaacactttccccttctaattctatactctcccccttatcaactccccctttttgtaactgac

SEQ ID NO: 6443 - DNA, 506 bp, Emericella nidulans
cccgtaccggaggcatacacccgggggttttttagaagtacaagggggaagcctccgccgcaaacgccataaaggtcgtgtaccttattggggggagccccgagcatttgcgccccacgaggatggggcaaaagcatcatcagcaacgacactgctacttctctgccgacatgtgtagcggcatctctgcctttacgggctaaagctgtccgttctacatcggacccgcactttcaagctgcttgtgattcttatgggcgtggccactgggcttgctgcccgacaaggcgcggatcgcttaaaaccttctatgcatgcgaggacctatgggattgaatcccatgggaagggggtatgccgcccccccctatgccccttgggggagaggccgcaaacccggctccggtggattaaagggttacttaacggaagcttggagcactggaagggtgtgggggcccagatgttggtaacaggtccctctggcccaaagaggcagtttgggc

SEQ ID NO: 6444 - DNA, 463 bp, Emericella nidulans
tacagactcaagacgaaaggggggtacctgtataggtatgcggctgttaataccgcacggcaagtgtcagggcgatgatgttggcagtctgactacactttgccaacgctgaccgggcctcatgggccattaacggatgttctgaaaggctacgagcgattgtatcgactgaactgtatatagcttcaaatgtaagttcttgattgacaagacaagcctgtgtgcggattgatagctgatcatacactggcaagaccatgtaaaacgattcttccgcgatcaattacaacgttcaacatggagctggcgggttgtctagggagagattgttggatgtcttattttcaaatatggcttcgacttgtaaccacactctggtgtttggtgctcgtatctttcctgaggtcaaaggcccattcgccaactcaagtgcaactggcttctagttaactgaaagggtttt

SEQ ID NO: 6445 - DNA, 528 bp, Emericella nidulans
taagttcgcaacctttgcgatttgggtcttttcgcaacagcattatcgtggtgggagaaagaaagcgcagagcggcggaattttggtcgtggccccttgccattggtgtttgctgggggactatatacacatctcacgtctggtgcagcattcgatctagtctcgggcgagatgcgacatgtaaagacatccacgccattagtatatgccacaggaaacaagcctttctcctcgtcctgcccagcaatatcaatgtcctcagcctcctcatcgcttttcagtcggattcttccaataacatcgccttcgctcggcttcgtcgtgttcgcattgaagaagacaatctcccctgaggaggccagtccagtcgcaatagcagctacgcgggttgcaccctcgcctttccaaggcgacaatcgagtgattctctgatacgtctccgtagaaccctttgacccagccaccagtttaaatactgacttcctagacagtttgacagtttggcctggtgtcttccattgggagatt

SEQ ID NO: 6446 - DNA, 636 bp, Emericella nidulans
ccgagcaggacctgtactgtaacgccgtgggatcagggattcggcagtccccccaacgcgaatttgcatctttcaggctgcagcctgcagactggaacctggggctctgggcctggggatggatagacgctcgcgtcagggccgtgatcgacgatgaaggctaggaacgcgagacccacagtatgcggcatgaaaccaacgggcgcgagggaaagaataaaacacgcggacagaccaccgatcggcggagaaaacaagatgtgaaccgtcgcggcgagcgactagggagattgatatttcaatatgcacatcattggtactgggcagctgtgttggcaattgcgggtaaacggagagatcggtcgcggactccaatgagattgaaaataatgccttttttttatgttactgaggctgactgtacatgtgacacagaattgtacaacctcccactcgactcgagcacggagttgtgagggatgcacggagttacacccatgcagacaggcgtctgagaacgtcgtaggctgggaccgctcaccttggcggataaagatgatcatgtatgacgattggcagaaagcacatatcaagaatactgtgattctgcgtaccggactagagcgtactgacaca

SEQ ID NO: 6447 - DNA, 619 bp, Emericella nidulans
ttgccctgcgggaagtccagcggtcaggcaggacactgtaggtttcactgaccttggaggccaaggggggtaggctgggaattctcagagcgagtttacgttaatacctacaatcccgtgatcgggatttgatgaaagctcgctgctctctgccaatctttggttccagtcctcgacggaactttgatccatacaatttgagcttctttgaccttaaactactccttctggggtggccgtcatacgaacgatcacacaactttagatgcttgcatcagctcgctggtcgcccaccttccatgcgagcttctagacctcacggcggctggccggcttatggcgcccccagccccagtatggaggagtcaatcaccgagtacgtccttgacgaatctgcccggtcgctttactaggttcatatcgagcattcaacatccaatactgcacagccgtagctgaggatcttcgttgtctttagccgacgacctgggtaccccaaacgcacgttgtcgatcactccaaactctataagcgcagctcgaatttgaaacgacccagtccacacaacgaaaatgctttggtttcagtcataatgggaagacccgtttctatccctgag

SEQ ID NO: 6448 - DNA, 860 bp, Emericella nidulans
gaccctttgtacgctgcacgatctagcagggaatgggagatgtgtatggcgtagggttctgtccagttgaagtcagccgaaattggggattaccgctgaaggatgcagcaggtgtagcatccacaagcagcgctggtgagcgctttcaagcttgagccaagctcacgaagagaagaaagaactatagggctaatagatattgaaagtgggcgacaggctttctggctcagcacaaggccatggaagtatgtaatctgtagcaaattcttatgttgctcctggctcttgagtgagggcgagtcccaacacgaatcaacaaggcagagcttgcccattcaggcgacaaggcactaatacagaagcggagtgtaaggcactttgccgattattaccgcgtacaggaagggcttgaagacttcaccggttctaattggaggataatgattcggtacaagtggattcaaggcaatggtaataatgcctcaaggcctttcggctttcttgagtcccccgtccttatgagtgaaccactatccattcattattttcctcctgctatatcaaccctcctatcgattcccgtcggttaccgactcctaatttgtcgcagctgagaactgagtctgttcttaagaacttttcctactacaaacaatggcttttcaaattgccgcttccaatggttttggctttgacctcttatcctttctcaaccctttccgacagaatccctgtaactggccactttcgggtccattaaaggcccctcgatcaacgattgtaaatcccggaacccttctttatccaattttggggcagtttaatatggacctcctgcaaaaaaaaacccttcgtctcct

SEQ ID NO: 6449 - DNA, 815 bp, Emericella nidulans
tatttttagacctcacgcttgtctctgttgcaatatgtccactcgtaagagaaagctttagctttaggaggaggaggagctccaggcgctccctagtgacgagagtgaggaggaggaagagtaagtctgcttgtcaagtcgattctttctctattctatagacttcccttctccttctttgccttctttgcgccctttgcgccctttgcaattgcggcgctgcgagtttgcgcttttgttgcgcgtcctaccgtatctcgtctcttgtcttcctaccaccgatccagatgcaccttagcctactagtgttcccattcccattcctgtcgcgttatcatcgtatctgtgcagggacgctccattcctggaccctcccccaaccccatttccccacacccgctcgttagctcataaccacttactgacaagacccgcaatcaggtacgaaagcacccaaggagaaggggaaaggtgaagccaaaggaaccgaggaagaagaagacctttccgaggaggagcctgaggaggaggaggagcccgaagagcagggtcccaaccaatttttacccaatggctcaaatccatccaatacaagaacctggggtaaccaaaaaaaaccagggccccccccttttaaaaaaaaaaaaaaggtttttcccccaagcccttttcggggccaaaacccttaaagaaaaaaacccatccaacggaaaggggggggaaaaaaaacgccttcccttttagagggggcggcggaattccctcaccccgggggaaaaaaaaaggggtagaaactaaaaccccccccctcccga

SEQ ID NO: 6450 - DNA, 738 bp, Emericella nidulans
  unsure (1)..(738): unsure at all n locations
gaaggtaagtctacttctctctgtcatactatatatactgaaatcttttttttaacactgcccccagtctcccatacaggaatccctgcgacatgctttagactatttctcctcaagtccccgagtccatatgattggaagaaaatgtatcaacacggcaaaatcggcaggctgcaggcgtggagttcctatataggcagcacccttgcctgggccaagaaactacttatataagtccaatgaaggcccaggacttgacacgaacaactgattgattgatttacctgtccatgtctagctgctcccgggaacctgctgttcttcctcgaagccatcatgtgtggaatctcagcagttctcagtctcagtgaaggtagtatctgccctcaagctctagctagtcagatgaatgaaagcctgcagctgattaagcaccgtggtcctgatgcaagaggccagtggctcagctcagattatcgtgtgggttgagtggcctcttcgagaaatatcaacatatggtctaattgtaccgtcatttaggccttggacatgcccgatatcagtaatttgatctcaacccnggcggtaaccagccttccacgatcctgaagcaccgttaatgcgtcgtaaacggagaatatacgacccaangagtactgcgcgaagctcgccataatatgagttcagagcatagtgattgcagaatgtactgcttatatcgacatacggatctctttt

SEQ ID NO: 6451 - DNA, 795 bp, Emericella nidulans
cgaatcattcttgacgcactatagcgcgaattttgatccaaccactccgcgcacgatggttgcaaaggactattcgatccgggcaacggcctgtggtagaccgtcctgtttttggtttatgggtgaaatcgaccggaatatctgggatgcgctcgtcaaggatgggaaagagggcgagatcccaggaaaccattcggcgcggtttgcgcctgttatccagccaacactcaaggtcggggcagaggcgttggccgtaggtgctttgacattcttgtgccgggaggattgattgttagggcaaggggcagcaggtcgatgcgagtgctatatttagagtatctactgagaaaaatcaccgaatgctcgtcaaaattagctttatctctgcaggactgttcctctcgagtataacgaattttaacgccatggtgggcatggaagctgatgcatgtgctgtgtacatctggcatatataaactgtaccggccactccgtgtggtcaaaaggagcactaggttcaacttacaatcccaatataccaatttatttaactgatatcaatgtcagctcaaaaagaactaattatgcaccaacctgagagaggtgaaatgcgcctggacgatcgtgccaaagccacgctcctagcccgacctacgtaatcatcccatgtcctcaaaaccagactctaatcccggccgttcattttttcgcttccactttcatgttaaaattaacccatcatatcagtactcgaaccaatcgaatcctgcccattataccctaaaatgcgcggct

SEQ ID NO: 6452 - DNA, 634 bp, Emericella nidulans
gagagaagtaaaacgcgtagagatagaagcaaagagattaaacaggagatgagagagtagatgaaagaaagtatataagagagggaggagttaacagaaaaaaaaggagaaaaggataataagatatataaaaaggtagatagaagaactagagaggtaatagagaggaaacgaaatattacagaacagcatcatataactagaaaaaggtaaaagaaagtaaaagcgaaaaagtggagaattcaaaccagtacaataggtttgcttccaaccaaatttcaagaatcgaatgcataaatacatactaggacaactcattgttctatattggaaatatagccactcaataaaattcagtctcgctttccgcatgcatctgcccgatggcacatacctataacctcgaaaccctcgttcaggctaaagcacactcagctgctcccaccaggccagtgctttccgatacccatctcttgatctctccaatctctgccgtgttgaaacatcgaatttatcctctccggccactcggttgagttcatcatcattaagccgcgagaacgtctcaaaagagacagctcgtagtgggcatttcggccccagcacgtgtctctcaacaacatgagtcgccgcg

SEQ ID NO: 6453 - DNA, 588 bp, Emericella nidulans
tggagtcaaagctccgattttgccattagccgatgctcgcactcaatctagggggcaaggtgacatttgatgccaggactgaccaacccgccgccaacggacaagcaaagcaaccagccaagcagaatgaacctcaactagctgctgcaccaacagctactcccagagagcccagttcctttccacctcaatctgccccggcaagcacaaccaaacctatggagcggaaagaggtcatcgcgagaatgctggctgccaaagccgctaaaagctccccggcctctgcgccaccaacagatgccgcacaaacagcagcgtctgttcaaagcacgcctgcgacagtagagaaacctacgttatccacctcttcgcaagatcaatcagcaaacgagaaagagacacgtttgagagaaaagaacaaggcgcagactgaactcgcgaggcaacgtatcgaacagctgaagaagcaggggctcatcagaaatcttcaaaaatcacaaataaatgtagacaagggacagaaagatgtcaggaagtcgcgaggccgaaccttcactataaacacccttaactaacgccttcactcct

SEQ ID NO: 6454 - DNA, 579 bp, Emericella nidulans
tgtgcatgtgttgtaacgaggaaaccagcggcgcaatccgattggagtcgcgacgcccgagccgtttttgttattccagacaattccaggggacggtctgagattcgttgcccatcgcaggaaccgactctgggctgcggtcaggcagtggtgatatggccgtcggttacagacgtggttcctgacccgatagatcatagattaccggtctcacaatgcgtaaattcaaaaggaaatcatatatccatatggtatacgcagtcgctaaaaatcatccatcacaatcataatacatcaaagaggagagaagggagaaaagaaatgattaaagccgtcaaggcatatgatcaagaagaaatccgccaacgccgaaccgagcctgatagagtatgaaagagcctaaaaagcctgaggagcccgaagagcctgatattcgatatctggactccgaaccgtagggacagtaaggatcgatcaagtgagaatgccagtttctcgctaataccgtgacgagtcatccgcagtcactgttccagtcagcccactcattcactcattgttttattgaccgaggcaaag

SEQ ID NO: 6455 - DNA, 602 bp, Emericella nidulans
  unsure (1)..(602): unsure at all n locations
gcctagatcctttctttctcttatacccaatttttcctattttggtttattttttgctttttcccctttgatagtgtcctaccacctgcgtcttggctagcgggacaggccgactctcatactccacatctatggacgcataagtctattccttcctttccctctttctttggctttcttgaaaaattctttgccgtgtacgaaactgacttagaatgtccgtcgttatccatattgctgatttctgactccaaaaaacttttctggatccctaggtagcagcttggaatggtacctccttgccccgtctacatccctggacaccaagcatatagtaatattatcgtgtacaatacaactcaataatagtttaccgtatggtagtttttacattgcaggtgagcaaatctgccaagcatgccgttttgcgaagtctggccagacggtatggaataaactctggccacatatccctctagagaacgtgaaagtagagaaatattatccnaaaattttgggttgtatagctctaagtcattgattaattgccgaggtcaacaatgtcgttaacactttcggaatagcattaatgccccaaaatc

SEQ ID NO: 6456 - DNA, 589 bp, Emericella nidulans
caaaactaagtattacatgcctagaaaggcaggacaaaatgaagcaatgatttaaagttcatcaacagaaaagaagtaatatgagagatttgagccttcaggcgtagcaacagcctgcaatacaaaacaattctggctctactaggtgaagatgctgacctaaaccagtcctgggtcacctggactgtacttggagcagcaatgtccattggaacgttctgtgacggaagggttccatatctactgcccaatgtactagccaccagccatgtgtgttctgaccactgaaaatgcggctggtgtgacagagcagttgaatgttaaatttaagttgataaaataaaaatgaaatggcaatatatatgactagtggctactctattggacaacacagaactatatgattcaagggaagatgatttttggggtcatttacttaaatattacaaggcttgcgctatttggagagaaatctcttgtgtaggatactgatcagcatttatcactgattggaagatgtacagatactacagctgaaagtgtcctagatgttgttggcagtgatgggaaagatttggtgcttgagacg

SEQ ID NO: 6457 - DNA, 443 bp, Emericella nidulans
acccggaggggaaaggcactgccacaccaacatccgacagaaaacgtggagccaagacaacagaccccggcagcgggggcttgaaaaaagcccgggggccaacacaacacacggaggggccaaccgaaccccgaggaagacgaccgaccccgatacccacaaaggggcaggcagacgggggccaaaccaagaaaacccacaggaccacccacacggacacaggggcccgaagacgcataaacaacgggcaaagggacccatgacaacaccaactatctcgccccccaaaagagcaacacaactccaagctgaaacgcatcggccgatgaaacaaagggcgcacacaaaagaaccaacagcacaccacagcacagaccggaacaaccgacgaccggcgaaaacaacaactgaaaaaccgacaaggcaccaaccaccccgccggc

SEQ ID NO: 6458 - DNA, 496 bp, Emericella nidulans
  unsure (1)..(496): unsure at all n locations
tttttnggttgataaatgatctccgggggagtcagaggcgcgattagaggtgtgttatatcgctgcgtactaattacaagctgaactggatagcaggggcgttttgctgcctacctggggaacaaaatagagcccataactgactcctcccatgacagtagccattatgaaccagtcacgccagtcccgtttcggaggtgtatccatccagaattagctcactcattgcatcgcaatttatatcgagcgctcgactgaaaactcactccggcggaggttgccactggccatactgagggtatccatatccttgtggcgatgacagaggtggacggtagactacttgttgtggtgcggattgatattccgatgctgctgacgatgctgctgcggccggtgatgggtactcgccagcgcgcgcgagagctacatcaatttcctatttagtgaggttctttgactgttgaaaagaaatcctcttcttaatcggagctgt

SEQ ID NO: 6459 - DNA, 1117 bp, Emericella nidulans
tcttcagtttgttgtagggacgtactcaggacaacacagcgccatcgtctgtttcggctcaagcatgctcttcatgacggatgccgggtccaagttgtattcatcgtagtagtaatcatagtagtcatcgccgtacggcgtcggagtggcagcccgagttctgctcgaccttgtggccgtcggggccagaactcccgatgaggtcaggacgctgcttgcgtcgcgtccggccatgccgaccgtcttccaacccttgggacagtagagaccgggcgagtagtagacgccatagtcaacccagatgatgtcgtcgtccgggacagcggtggtggatgttggctctggtgtcatggtggggatgcagtccaaaaagtcgacggtagacgtgcattggacaccgtacgcggcgtaaacattgaccccagtgataaaattattcacgttgtcgatcgagacctcgctctcggtcgagcacgctttctctgctgttaaggtggccaagatagggcccaatttgattacttatatccctccttgcaagtctgtgttatatatacatcctattttgatcatattagtctcccttttatctttcatttatcccctatactcatgtgatctttctccctttcctaataccctttacaagccttcgcttttatgtctacttattcggttctctccttctgtattgttctccacctctcatcatatcatttgtcttaacgatgcatctatattttcgtgtcctcatccaataacatatacctcatctcttaaaatactcctatcatccttatttatgccccgataatcttacacaatattctatacatgtcaatggtcaatcttttttccttaattatctcaccatctatgccatcctcaggttatttactctccttaacatcctctctcctcatactttctcttctccttcaactttattatttcctcatctctcacattataattcttccttctctcctcctttctattattccttcctgcccatccccatgttacttacatctctcctttaccatcatacttagttcatatcataccttcacttctctacccttccctctcctccattttctacctcactaactac

SEQ ID NO: 6460 - DNA, 598 bp, Emericella nidulans
cgaagcgcgcggccagagagccattgcggccagaaatcggcgaagatggagtccgccatgtcctgctcaaactgattagttacctgtactgatagtaagagcggactagagtgtgtaccaagcccccgccatggaaccggactatcgtcggccgtttaccagtctccagtgtctggggtaccaggacgtcgacgcggacggcatggtcgccaacgtgtttgtaggtagcttgaatcaaatcgaagccttggaatctgggatgcgcagggtcaaaagtagccatagtgtctgatagcgtgcttgaatgaagggagacagtccggttctgccaaggggaaccaatcggtttgtttattccattgctatcggttaccccgccaagagtctaattcgatcctcaacttcttttccctttgcgtttcttcactggcgacactgatgcgcaaatcaagagtattcgtatacagtagagactggtttattattgcttaccaaagctcggtgccgaacccaccgacagtgccgtctgctcccctgtatcacttcaagtagaccagaattatagccgaattttacatatcatgccaagacatgctcg

SEQ ID NO: 6461 - DNA, 978 bp, Emericella nidulans
tgatcgatcttcgcctgcctctcattcctccaccgcggaccccaccgcatcaccacgcaaagtaacggcattgtacacaacatcacaagtgcaatgaaggtaaaacaccatccccgccccatagcctctaacattggatcaataagcgctgtagccccagcaccaagtaaacaacgcacaaggttatttgatgcagtagcagcagatgcattgctgggatagaaatctaccagcagagttgagaccgtgttgaatgctcctgtcaacgtgagacccatgagaaagaggatggttgttggcgcggcgagatgtccgccgtaattgagacaccatccgaacgcgatgattgtgaatgcgcctagcgtcagcagcgggagcgcgacctgtaaacgggcgaattcaatggggaagtgggtggagattccgggcgcgagtttcttgaagaggaacgtaaagttgttttgccagccggggtgttggagtctagaagctttcctgttgctattgatgctacggtcgcgccgagaccaaaggggacatagcatagtcccatatagagttcgtctaagccgtacagttaatggttatagagggatcgcgctgtgacatctaaaacccgaaaagaggatgggttggcataagatgatcgcatatttttttggataccacgaaggggcccatggggatgggaaataactttggcaataaaaatttggttggggtcttttgggttgaaaaaggaggagggatttcctttgggggggatgaccttccccttgggcagcgtttggattgaacaatgacaaaaggccgcaaatggggcaaaacagcgccctcattttttaaaccctaccgcctttttgggggttggtaggattctcctcccttattatctccctcgttgatttaatcacacccgggtgggttgttttttcttttcttgtaaagaaaatataaaatatcccccctcctttttta

SEQ ID NO: 6462 - DNA, 576 bp, Emericella nidulans
  unsure (1)..(576): unsure at all n locations
ccaacccaacgccaaaaaaaaaaaaagaaaccaagcaacaaccaaagaaacaaccacaaaaagaaaaaagaaaaacgaaaacacacaaacaaaagggagacgacacgaaataaagaaaaacaagggaggggaaaaaagagacaaaaaaaaccgacaggcaaaggtcgaaaaaaagcaccccagccgacacccgggggagcaggaaacccccaaaggggggagcaagagcaccaaccaagagcagaacgagaaggaacacggccgaaacagccccaaagaccaggcaagacggacgacgaanncaaaaacacgcacgagaagcaaaagccccggcgacagaacaagggcacaacacacgaacgacccgggaaggaagaacccaaccgaaaaggcaacaacaaggaccaggaccgacaacgcggcagcagcggagcaaacaggaaggaacaccggaaaccgaaaccacaaccgaaagaagaacagaaccgaaaggacgaaccggaaaagcggccccacaaagaaaacggggaaccgaccccgaaaagagaacaccnaccccagaagcaagcgaaaaca

SEQ ID NO: 6463 - DNA, 500 bp, Emericella nidulans
gggggtgtttgccctgtggaacgtcacagccaggaagctactgtttgctgccgctagaaaacgttccgggggagttacaggcagatttacgccgcgatgaaaggtgaatctgagagtaaagccaggaggtgcatacgggaatggtgtgctatcgaagcctccagcaggctcggacgagtcgctcttggagccgacggccatagcgacagcctggttctgcaacttctctgccttgtcaacgagccttggcccatacttgtcgcccaagtgctgcggtcggatatgcgactgagtggctgccattcgagagagcggtcctctgtttcctgtttgcaaggaatggggcgaggagggggaagacccttttggtagggaagagcctaaaataaaagcgggccccacgcccccctcaaaatttgtatacaaaatcctcgggtctctgactagaatttagatactgcatagctggtgcctctcaactttatttaatgggggactcc

SEQ ID NO: 6464 - DNA, 556 bp, Emericella nidulans
  unsure (1)..(556): unsure at all n locations
cagctttttgtttgatcccaccgagcaatcgcaatcttcccactttgttcaaggcatagctcacctgcttttgtttccatatatgcatcttatccttgttctttgtctacaatcagtcaatggaaaaggctgatgatattcaaccccgcacccctgagtatgccatgcttcctgcatatcctcggctcccctcaaggtgccaagtagcactcctacctagtatatcattccatccatacttcagcaccttcaactttacacttttcagctgtgactctttctaaccccagagcctaaatctcaatccaaaataatcccctccaaacgaaaaacatcagagaaaatgtccttccccttaacctaccccaccacccgctctctaacgggcggcgaccttcttgcccagtctctcaagcagctcggcgtgaccgttgcttttggcttacatggcggacacctagacgccttcctcatgggctgcgagagccgcggaatcaggctcattgatacgagacacgagacagcagccgtacaagccgncgagggctacgcaaag

SEQ ID NO: 6465 - DNA, 513 bp, Emericella nidulans
tttgctaaaagacctatctcaggaccctcacatatttctatttctatttctatttctatttctatttctatttctatttctatttctatttttatttttatttttattttcttgtctgttttggtttatataatttctattctacaaatttatgtacactattttaaattactcttgttccttcgctcccaaggggatgggccaactgaatctcaagagcccagttggcctagccagatgttacactcgtgtgacattggcaaaccagagcctgagaatggaacgagaaccgctgttctctatagtatagctgcagaggcctctcccgggcagcatgggccagagcggattccgtttctcaccagcaggccgcttgcgagggcccttccgtcgtttttcctcctgatatgagctctccaaaatcaatggctcaccatatatctgtcgagcagaatattattatttggaatcatgtgtcatcctgcttttggagacgtttaattacgattagtg

SEQ ID NO: 6466 - DNA, 827 bp, Emericella nidulans
acacctaacctcatactacctacagccggcgacaagatgctcacccaaagctctaatatctgcacatcagcatataccaaaaggattttggcacaaaatgcagaaaatccaagttacattgacgagcagggctcgcaatgagtgggcagcatgccagcaatccccaacaagagggctaccgtgtagcaagctggcagtaacggaatggcctctgaccccgaagaagaaaggcaggccgcccatgggctcttcaacggtagaagacacagttgaataatgccgagaaaaaggttaggatgacgaatgctctgctcctgcttttgttttgcatctgctgaacaggacagtgcaaggagagcgggatgtgaacgtgaagaagctgaagatgatggaggaggttaagctggatatggacgagaggcaatgtctgagatggctgatcgtcttgttagacatctgaaaacctctgcttaacccccagctgattcaatgatttcgtccctcgataccttaaagctcatcacccaggctttcaacgccaatcaatgccacacagggtctttataaattcatagaacccgccaagcacgcggctccagattccagatgcaccgtgcccctgcaactcttccctaacagaaataccgctccttgacgaagccttacagacagctgtggccatgagaaccgcatctaccctacgcccactgatcatttataccatttaccggcttcgctcattctcacgctccatagcaaccatagcctgaggtcttaggctgagattaatctcacgttctgcatccgcttcacctttagtttaaatc

SEQ ID NO: 6467 - DNA, 957 bp, Emericella nidulans
gaactctcgtgtcccgtcgtgataacgatggagctgttgatgaggcgctggtaggtgcaaggtcaacagctggtgcggcgctggcttgttcttgacgttccgctttcagcctcttcttctcttccttagtctgttctcccggacactcggctggaaccttcatttcacatttgctgtggcaggtgtatccgcaatccctgcagtcatagcctttggcggataaaccccaaatacgttcaccgcaaaggtcgcagttcgtgggtatcttgaacgtttgtgacttgaaattatggtttttggcgccgagcgagaggtccccgactaccgatatgatggtcgatgtctcgacttcggcggtgagccgtttgcgctctatctcgtggagggattcctgcatgaagatgatagacctaaccacatctacttcgtacctgttgtctcggccttgttgaatgctctgccgtacacgtttggcggcctctacctttagtggcttttgggcggacctatccctatacttgggacatgaggcttactcctgccaaaaggttgcgctcaaaaccttgccggttcatccgtttcagggccttatgttcgggccatcctggtttttgctgaacccacctagtctgttcctgaatttgggaacctttggccctagtactttaggctttttggtgagctttttattgtgaattacctctttcaacgccacttatctcaccttgattttgttagttcctccttctcttgtttcctttcttttatctttcctttttttctccctttttttctgcttcttctttttttattctttatctcttattattttaacttcttccttcttttcttctttttctctttcttttcgtttttatttctctatctgtaattgtttttctcacacttttatttactctcttttttctcttgtcttcggttttatttagtttttat

SEQ ID NO: 6468 - DNA, 734 bp, Emericella nidulans
ttatcaagaacgcacaattttatgtagatccacgaaaatatggagtatgctggttatagttggactggaagaacggcgtgttgggcgacggagtatgtagtatggtttgctaaccgggattgccggctaatccgcctctactcagcttggtcaactgtttcagtttcaactgaactgaggatccgacatatctaatggaacacggggtttgggcaacccaaaagtcggggttgttccttgttcttcaggaccggcgtaaatttgacttattcgctgatcggacaatattattccacgtgcaagtgctccgtacactgtagaccgcgatatccatggcacgatagatatggaccatgagagagggttgttcagattgcggaggatcctgagagctcaactatctgtggttgatgatctcgttggctacccaaagccatcaagattgcggagtatttttgatgacagaacaatgcgactcagctgatgccagttgatacaaccatccatctaggcgcgagagggaagcggccgtgagtcgtcggtaagcccgcaatcaggatgccagcagggctgaggtccacttggtagcatcatgccgctggcccattatcgagttatgatgtagggcatgaaatcactcgtctgggataaggcgagtctggatggcctgaggcttgtttgctagatagtgacaagaaatcatgccgatgctgttagtctgcacccccaatttc

SEQ ID NO: 6469 - DNA, 535 bp, Emericella nidulans
  unsure (1)..(535): unsure at all n locations
gaccgcatgtggtgactcctagcactcggatgtgaggcttccgttttaatttcttgctccaaatcgtctgcctgcctcgctgctttgaaatactccggaggtaccaaagtaaagataaatggttgactctgagagactgctttgacctcctggaccaagtcgtgcctagccagaaggggagtgttcaatgggctttgtgaggctactaaggccgcacgatacaccggagatgcaaagaagtccgatacggtcgtccatatctcgagcacctttattactggcgcttttgcagttatatggaggcgtttaatgattgcgtgttcgtgaatccgatgaataatatctcattagtcgactaaacggggatgaggatggatgactgctggtatcttggtctcaatactgtaataagcgtctcggcaacaccgtacggttgacaatcctgggcagatggcagcacctgtagaataaaaaaaagacgcagctggactcattgagacagttgaattccttaaccacaattncagnctaataa

SEQ ID NO: 6470 - DNA, 189 bp, Emericella nidulans
ctctgtctttatatatcttgtattgtacacattttttatatttaaatttctgttcgctgatcgggccgcataattcgactcactatacgcatcatggtgtaccagttgtgattgttctcaacccatcaataatgtctgcctatttggctttctttattactatgacatcagtgagtatattttttatcc

SEQ ID NO: 6471 - DNA, 602 bp, Emericella nidulans
agcaatacggcgaaccacggggggacaacagcaaagcaaaggagaaaggacacgccaaaggggaggatctgccggcaccccagacagcgccgggggggacgtaaaaaaaaaatacgcgggcagaaaaagagacaaaggaaccaagacgagccgagggccgagcaccacaatgcccaacccgccaccaggcaagaacacgaacgacgccggcagaaccaggacagaaaggcccccaacaaagaggcccaaagggaaacacccaccaccgcaagagccaggggagaaggagaaaaccgacgccaaagccgccagccgaccaaggcccaagaaggccaaacccgcggccgcagacacgacaagaacaccgcgaaggaaccacgcacaacaaagccaacggagaagaacaccgacaaaaccaaggcaggaacggcaacagacaaaccgcaaggacacaaccaaaaaggaagaacccaaaaccccaaaaggaaagcaacgactcacaaacacccagaacaaaaacacccaccaagaaccaccacgaaaagcgcaaacgacacccacccaaagacccaaaccaaacaaacaaccaaaagcaggccaca

SEQ ID NO: 6472 - DNA, 932 bp, Emericella nidulans
gagtctcatatccaagctgcacgggcgcatcttcgactggcgccgccgggccggcgctcggtgctgaagccgcaggggcaggggctgcaaccacggccggcggccggagcagcagacgttggcggagcagctgcagcctcgggtgcggactcggtttcttcttccactggatcaacgtcgtaatagatttctttcgcatccttgttgtaacaaagtatttgacgctgcacagatgtggccgcatcatatgcttcatatttggaggcaagggttcttcgtgccattccacccaaagtgtctgctggaccgatttccacaatgcgttctgtccgcttttccgcaagaatgacatcttgtgtctcaatccaccttactggagacgcaaactggtaagccagaagctctaccagcaaggtgtgagccagctcttgttcaatttcaggccgcatgtcgctattgactccgaactctgctctgggtaatcgaagccgtggattaataaaaaaaaaaaaaaatgcgcaatcgaccttagaatcttgtaagatggcagcattaagtcgattcagcaccctgtacgcttgtcgtcggcgcaagcagatttacattggccaaaaaaattagacgggaattgttacagtccactggaagactcctaggctcaacatgaatagcaatggagaggaccgaagtacccaggaaagatgagattagaacccccaaaatacaggatttatgtgttgtgaaaaccgaaaagaatggtagatgaaatgggagagtgagagatccggcagaccgaaggtccgagggcccaccagggggaacacttaagttttgtggggaggggttttttcggggcaaacccctggccgaatgctgcgggggggggggttcctctttctcgatggaaaaaataattttttactcttttttat

SEQ ID NO: 6473 - DNA, 616 bp, Emericella nidulans
atttgacacttcatcagctttataaggaactcccttgctcctaggttcagcttgggaaaagctaacgggtattagattgagcctacaactttccggacctggctgcggatactcgctagtattccaaatgctgtgctttggcttctccgctttcctgatattggcgaacaaaacctcagggagacggctgtggcatgggcaggtgaggagacggcgtctcggattatcttcaccgatgttgcacctaagaatacgcacattgcgcgggcgaagattctggacttgttccttgacacaccggagtgcaatgctcatacgacagcaactgacgtcttatggagcggcactccactgttaaccctcccacgctacaagtacaagatgtgttctcgaatggcaagcagtatcctcagcagcgccctaccgaagactgagtccgggcaacaggcccgcgaggaactgatcgccctctctgatgaagattacgagaagaaagcgattcacctgtgctgcagtttattctacgagcccggaggcgaaagtcgagcgagaggcaagattgtttgagcttcgcagaatgctatttgagggcgacagagaagctccctttttgaca

SEQ ID NO: 6474 - DNA, 935 bp, Emericella nidulans
agcacctgtacacgtcttagacgaagacgacactgagctaccagacgtttcttcgtcagagaaatctaaaccccagttttttcagtcgaaaccgaagcccaagccgcttgtaaattccactgagtcgaaagcttccggagaaccttcccatgaaccaactcccagagttgatccagagtgacgctccggagccaagaccagaccttccttgtcacagcacacctaccgaatccaaaagacctcctcaatcgtttaccgccaagccagaagtccatcaacaaaccatccccccctgcaccatcacgtcccgctaaatcctatgatccacaaagccggagccgatcatccagccaaaataatacttcaagctcatcatcttcgccgctgataagtcagatgtcaagaccgcgtataacagcagaacgacctgtcacaaaactgtcagctaaaccaaatggagtggcgaggacacccgagtcgacaaactctttgaagcgcaaggctgacttagagcggccctcaatccacagtgctagccgcctgcatagtgatctggatcacaaacggcggcgggcagtgagcgcttcgagcggcagcaccgggagcgcatcgcccccactcagtcgcgagttgcttctgcgacaattgcgggaaaagtcacaaaagtttaaacaattttatgccaagtatcgtgcactgcacgacgcaatggcagcccaccctgacccgccgcgggcagaactagagaagctacagaaacagcatgttcgcctccaacggatgaagaaggaaatttgggatgaagataggcgacttcgcgacggactttaaatgatttcgacagcgcatggccctagtatatgacatgaataccattgtctctttggcgttaaccagacatgtttcgacagcacagttctggtggtggtgctttt

SEQ ID NO: 6475 - DNA, 490 bp, Emericella nidulans
atctctttgttcatatgctccataatatgaattggcttgctcttgaatgaactaattcagttgatgcttatcgaatggtcgctgcgcacgccgccgatcccgtttactttactggcgttgccggaaacgaccgtggccagaatgaagtcaccgtactgctcctcttggtcttccccgaggcgtgagagctttgttgttaatgtaacggtcccaaacaatcatggcacatccctgacgttgccagcgtagaccagcctatagtcgtgtgttgagtcttactagcaaagaccgcgaggtttgattttctctatctcggggtcgtaaggaagtgcacgacgcgattaaatgaggctcttactcaggccgccagctatgagtgctgctcagtcacttacatctacgttatttctgaactgccccgaaagatgccggtggagagacatgggaggccgaaacttcctgctgcggagcgctatattatccatttgct

SEQ ID NO: 6476 - DNA, 522 bp, Emericella nidulans
ccacgagcgacatgaacagcaatcatgattctatgtgtcgaaattctttcaccaggggagtcgtaccggcctgtccagcggatgtcacaggagccatattggcgattgccgcactgcgggacgtcacagacagtgggatggtgtagagtcaaatagattggatatcaccgcaaacggtgactcctggaaaaaaatcaggtcaatggggaaggagtgattgaaaagaaggagaagacaaaaccgccggcgtctaatgatatttttttatggctggctgttttttctcctcactgctcgtcgactccaacttcagtgtagtccgcagggactttttgagtatttctccgccatcgggatttgatcagcgaatcactgattggtgtgagatcacgacatcgatgcaaacacctttacgtcttcaagacaaacatacctgattgggcaaagtgcggggttcccgtgactcggccctgagcacgccagccgactgcgggcagatagacgggtaaagcacggctttcc

SEQ ID NO: 6477 - DNA, 824 bp, Emericella nidulans
  unsure (1)..(824): unsure at all n locations
tcccgtactgcaggacaaggcgtcgtccccgagcacgtacttgtccgcatcttcgccattgaaacctccaagctggatttatcgtcagtcagacaccttcaccgcgaaatgggtaacttgccgcagtgaccaggctataaacatgagcgcggacttcggggtcgatcacttcaacagtctgagcgggcactgcttcctccatcacggcccgtgagtgtgcatatacctccttcagtcgttcatcatttattatcgcaaccgccctgaatgatgaaacctcgtgttagcgtgagccaatcatcacgcgttaggtcacgcgtcacgcgtttgcttgtggagtgtccggtatgcggaacgcgcataaactgaaaagccgcgtagccgaggatagccgatgacgttagatcacatgggcagctatgtctattgcacggagtagaatcgggggctcgagaggttctctttcttccttcagatattgntcgntnggnataattctctcaattctgtggttgtctcagaatgttgtcgccggcacttcgtttactttgccgcataggcgcttcaatgcgttctcgtgcgtttagcacattttccgccgttcatgctgccgaggtcaaatcgttgggagtaataggagctggacagatggttgttgtcacgatatgacttcttttgcctttgcttacactttattcagggactcggaattgctcttgtcgctggtcagaaagcccaagtccctgtgacacttgttgattactctcatgcataactagataagggtctgaagtttgccggtgcgtaagaacgtcctttatatc

SEQ ID NO: 6478 - DNA, 945 bp, Emericella nidulans
  unsure (1)..(945): unsure at all n locations
catatttccgcggcgctcggcggcgagacgaggaccgtcctggagggagcggcggaccgcgcgagcagcgacggccaggtagcggttgtagctaaaaggatcaggcgatgtcagcaacattccagagaatctatagggcgaacagattgcaatggctatcatacgtcagaccagcggatttccaggcgaagaccatcttgactatgtgaggaagttggaggtttcaatgtgcaagggaacaatcgggatgtgatgctttgctgagcgtcgagttcggaggatcgggatcttagtcatttgaggcacgtgaccaagcaacgtctaccaatcaatactctaggatatacttcgaccttgctacaagagaaattcaagtaatgacatcgctcggaaacctattttccagtattgattgtttgaatcatgattagcgtctataatctagtatggtaagatacagactatttgggagcaaaggtagcgcttaccataccatattaacctgaatggatatgtacttggaaagccatataactgtggatatgaactcagctttctcgttaagtttctaatagcctactgctctattacctgtattccagttgttacagtgttaggagcttaccatacggttgcgagtccgctggagatgttggcatactcttccaaggtagattcctctcctatcattctcttcaattctcattcaagacttgtgctccgatctgctgaatgcaatcctctccgtctcctctcaatctcatcattcatcatcttaatttaatccattggttctagcgcctccataaataccgtatcgagttaaacagcgtaatatatggaacggtaaacaaccttttccaggataatttggaccttactccaaaacacacttcgccaacgatatcgctcaacatacataactngaacgagcttcttcttaaa

SEQ ID NO: 6479 - DNA, 597 bp, Emericella nidulans
cccctacccagcgatatccaagaagagaacgcaatcaacccaggcaatatgacccgcggaaaccaactagaccgagaccgcgaaaggcagcgcaagaaggccgagagcgaggtaagaatcccatccgcagccgcgagccatccgctcctcctcctaactcgaactgtactctgacggatgagatatatagaaaaaggccaatactctatccggaacggcatttgcgcgtaagaaggaagaagacgctgcaaagatgcgagcgaagcaggcagcaggtaagttaaagttctgatgttttgcaggggtctttctttgttctctcctctcttgccgcaatgcctctcggcgtattcaatttgttgcagtgctcctctgttcctattggggaaggttggactgtggatcagaagactgacgtatttttcgcttttagccgatgcgaagaaagctgctgccgctcttgctgcggcagggaagaaaaaatgacacctgctttgcgccgtgactacgctccataccttggactgaaccttttcgaactcaggacattgtcctcgaataatctcgctcttcgttccgcgattatatatgcgctta

SEQ ID NO: 6480 - DNA, 566 bp, Emericella nidulans
gtacattattaccacaagcggggggaggatggcatcaacagggcgactgcgatgtataaccacgcgtttgtttttgccctctccaggctatatctgggcggggtcaactaaaagaagaaagggcttaaaagaggaaagcgaacaaaagcgggctgcaaagccagagcggacaaaccctccgcgaacggaggccgtaccggaaccgcctgacagaaacatcctcttctagctgacagacttactttaggggctaaagcatgcaagattagaactgccagatagtcaacccaaaaaggacaaccgataaggccaaatgctaaaccgaaacccaggcggccggaatgggacacaggaagaaggccaaaaccccttttaccaaggggcctacccacccaaaaaagggcgtaaaccccagaaaccccaaaaaaactggcccctatctttggggaaaaaggcccaaaaaacaacccaaaggccccgggccgaaaaggcccccaaaaacgggcaacccaagcccccaacctgggatccccgggatagggcacccccaaaccaaagggaaaagg

SEQ ID NO: 6481 - DNA, 406 bp, Emericella nidulans
gatctacgtggttactcggattcggcttgatatggcactggccattagagcccttgccctctgtgtactccgagatcatgagctctgccctggcggaattgatgcattggatcagcttttgcatgattatctgaccgaggaggtgttcttggcacaagcgggaaccggggatgatattcatttttctgacacagctggcattatatggctgtgatggctacatgcgtgcgggcatcgaaatgcactaacgggggacatgcttgtggatactgaatgatactactgggttgaggcgatgctattattgggcatgaagtctgatatggcggcgctgatagctgaggatacatacataggtaagaatgcgaaaggcgaccgcttgacgtttataactatcactgatact

SEQ ID NO: 6482 - DNA, 553 bp, Emericella nidulans
gcttctggattccttgacttgcactgggccggagcttgtccaaatccacagtctaggctcagggaaaagattgggttctagacaatggatctattaggtgcgtgggtaacttaagatacataactggtgcgggtcaaatacttcattagtcgtttagcgcatggcttgactcggtgacagcccaagtctaaaccccaactgtttagggctccgggcagctgttccgacttcagttcacccatggcagttctcatactcaactccggggagaacttgaatttacaggccagttgcgcctggatatgctgccttggctatgcatagcaccgagggacctttgcacttttgggccgaccacccacgggggaagtggccattacaaaaggggagggcagggggtttaggtagcgtttacaccccggcggtgacccatggggaagaccccttttgttaggacccccgcggtggggttggaaacctcaattttttaggggggggtctttgctcttacttaaagccgggttttcctccggggccagggggggtctttttc

SEQ ID NO: 6483 - DNA, 507 bp, Emericella nidulans
  unsure (1)..(507): unsure at all n locations
ccaattaacccttactaaagggatcatatgggcctacagagccctttatgatgacaggctacgaattgacctgtagtattctagcgaacgagtgaagcacacacatggcgggcacataataccgctcggctatacgaggcatgctcaggttgaacggcccaccggttaaattataaggggcacaataactgtcgcggtgaacatcagactaagtcgcataaaatatactgcacatgatcctatggcgctgcctgagagcgctgccaggcgatctacacttagtacacaagtattatggctggccatgaaggactgtcctatacgacaggctctaatatcaatgacaccttccaagctcgatgcttcaagcaatcgatggaaaagaatattggaagatcttacaagcttagaacgacgcggatgagtatgcagagcacagacctactgctgagtcagtctgactcagtgccgcgtataagancaggcactggaacgaccttaatatat

SEQ ID NO: 6484 - DNA, 578 bp, Emericella nidulans
  unsure (1)..(578): unsure at all n locations
ggggaaatanattcttgctaaattgcaggagaaccnngtatctgggtctatgacgtacaccgagattcgcacttttatgcatgtccggagggctgatacaaccctcatcgttgtgagctctggcgattaggtcgggaatgacaagaagtgggcggataagcaagaggattcaacggctattacgaagaatctcaaaaattgggacattgttcaggatgcaccccatgaggtttggaggactacagaggggctacaattgctggaggagaggttgcgagaaatggtatctggtgaatgatctttcttcattctatcttcttttgtcggcttggatctttctcgcctatttctatcttgtatatgtctcgattctacctctatagcctcacttgtccttaactcatgggagtttgcaattacaatgaaacctatatttattttcttttgagccggtttacctattacctgtatctacatactgccccaacatttcataggcccaaaccgtttcttaactttgaccacttttcaatgtcttccaaatacttactacccctttttgataccgcaaatgggct

SEQ ID NO: 6485 - DNA, 508 bp, Emericella nidulans
atccgacggagcactggggccgtgccgtgcagctgaggctgtcagggtgtgctcacagatcctcaaatacgctctctccttggactctgacatagatatcggcgaactgtgcgatcgattacttacctttgaatgccatgcggggtgcaggttgccccagcgttgggaccactcttagcgtggcacctggtgtgttgaaggtctggggcctcatattgacctggtggcactggaacgacgcgtgctatgccgctattgttctgaggacctgcacaaggacggcgcatagtgccacggtatggaccatgctctgctgcgctagaaacacattgaaggcgccaaagaacatggtcttggatcataaccttttttacgagagtgtgcattacgggggctacctgtgacaaagtaaagaatccactgccagtaggggtcctgtacactgatcgtctatcctctgacacccgaatgtatggatccatatcccatgcactctttaccatctatc

SEQ ID NO: 6486 - DNA, 530 bp, Emericella nidulans
gtctaagatcttccgagtttatgcgggagttcaccgagcaggtagtgtaggaccatgactcacattaggacaacgtgatcgcatgcccacccgcaacatactgcctattaggtgaatgcttaacatgatgagcacctggactaccactatgacggcccgatatgacggtctgagacttagcaatcgattactgggagccaggctatagccttacatggtagcactcgtggacgtcaaaattccaacaataccggccgtgccaaggggactgagggtcttgacaactgtggccgttggacgctcgccgccaaatctggctctgggaatggtgactgcaatggcagacacggatcgcccttgagacctgtccatgattgcgcctcacctgaaggatatttatatggccgagcgcatgttagctagatgaaccagtgtaagctgactgtgcacggacaaggccagctctgaggcgtgcgactaactgacagaatgaataccgcccatatgatctggcccatgagcctggtcgc

SEQ ID NO: 6487 - DNA, 415 bp, Emericella nidulans
tcgggcgataatatcgactcactatagggatcaagatagacacccaggcctggaccaacgaacgatacgctgatcgattacttatgagcagtacttgtagtggtccctgtatgccactagcataagcgtgggccaagagactgcgtaatacgagcataaatatcacagcttgccacacgcagcactactgctgaactgatcaacacacgggatgcagagatatgaggatgacagcccatggatacacatccaacgcgagcacaaagggataacatgacgccacacggttgcgatgctgatcgacgaccacagctagcaggacacacgagcccggacacaagaaaccggacgacagcagctacgcagcgggaccgtaatccactcaacgagcatatacaaagcggaggtctctgcc

SEQ ID NO: 6488 - DNA, 509 bp, Emericella nidulans
atgatcctacgagcgaccggactgtgtgtgccgaacgtgctttcaatgaaaggcaccggtaagcgccgacgagtcatgtgttcgaccccaaacgggtgttacatgtgttctgaaacgatccctctcattcgccagtgctgaccgacactaagctgacaaaactggataccgctctgctgtcgggactgtaggctgcgcagcccgatgttcttcgctttcgcaaatttacagtgttcgcctattcaacatttgccatgacatggacaccttcgcccatgccctaaatgcatgcatctgcccaatactcattgacccacgactgcacagggatagcgagtgctcctccagacaaggagaacacagccgatgtggatggtgtatgttctgcgcagacagcggagaccgactgtacaaccgtcgacggagtcacgtgtatcgagcttcaccgtaactggacgcctctaggcgcagctggcgctcgaacctgaaacggcaggaagagagcaagt

SEQ ID NO: 6489 - DNA, 562 bp, Emericella nidulans
aaaaaacaacccgggcaaagtttattcaccaatacgacacagaaaccgcagacaatatacacggcatcccgcccaggccccgacaggaccgatccaaccagctcggggcaggacagccgcgaggcggccgacaggcatgaccccgaagggctcaaacaagcaaacgactgaacgagaaaggctcactaaatgctccgaacatgcccacggtaccggaacgcaccgacatccaactacagccgacacaaccaagcacgaagaggcggctacccagaccggcgacagagaatactgcacacaaagcgaaggacagacccggaagacaggaaagcgagcaaaagcaagagcccgaaagcaggatgactgagggaaagctacacaaaaagatgcggaccgggctgaccaagacgccccgaaaaacaagcgcgcgaggcaacagcaaatcgccagttcaccagaaagctcggaacagcggcaaacccaacgctgagaccaaaggtcaacgacgaaaccaccagacgccaaaaacggaattgaacccaaacagaggagggaagaaaaa

SEQ ID NO: 6490 - DNA, 336 bp, Emericella nidulans
  unsure (1)..(336): unsure at all n locations
cgcaacgcactgggtgatccatatccggctctttcgtgatcacacataactgatgtgcttgaactgaatgatggatgcatttgccccgacgatcaaatacttgatcagacagccgaaccggacgagagaacggggaacgatgccgcactacccgtctattaaaaaactacccgctctacatgggagactacccgctgacaggaggcgaacagggcagagacagattaaatgctttgttccatactcacataacatctatacacttgtttctggcaaacacgatcgcgaggatccagcctgatgatgaacgcactactgaactangttccacgcaag

SEQ ID NO: 6491 - DNA, 411 bp, Emericella nidulans
aaaacggtggaggcctgtgctcaacggtctcccgggtctcccaggggatggtgcttgctggaggcccaccgagcgggctctataccgcgtgtccctgctgaaccgggccatccctgcgcacaggcccgaacatgggatgctggtctcccatcaggagggatacatgctgcccctggagtgcatgtggctgtccgcgaccgatacgacgcctgccggacgcggcctgggctagccgagcgcctgtgattgccgagcctgggaccgtatacactggtgatacaccactcatatgctgatggcgggagtatactatacctgttcgttgcgcggaagatatgacccgaacgcctgtgccacgttggcatgtctagagacatatgcggagacatctggtaccctaggaccgggact

SEQ ID NO: 6492 - DNA, 568 bp, Emericella nidulans
ggatcaaggctggctgctgtatttggatgcaggagatccaccgacttcctgggggcaccagttcatcagtccatttattacttgttgaccgtggatagagagaccctgcttgtgctctgttcgatgctcacgctaagaacgtagcgcctcccacaggatggaatcacccggccttacaggctattgctttctggcccagtcacatgtatacgctgacgggcctgcattatgcaggaaacttcattcacaatatgaataagcacctcctccctctggcactgctggggctcttttcgagcaaaggcgctgaagcgagcgccaatccccatcggactggaatgaaggacatgttatgcaggcaaataagaccgtctccatattacaaaagatgttctgccacctagcctcgagagcggacaggcttgtccattcgcgagactgaccttcttactatgttgccctgcattgccacctcgtttgcatggtcctgactctgccgcatgagaatgcgcattgtcgccagagctgcttagctccctctgctatacatgaggctttgcgtagtcac

SEQ ID NO: 6493 - DNA, 495 bp, Emericella nidulans
cttgtgctgtccgactctgtgactcctggtttgtgagatgcccggacgggctctgctttataaattctgatatgacccctgtctgacgtaccatatactcaagcccattatgaagaattcaagccctacttgcgcgctccagagacatatgttccttaataccatcgtggcagttcttcgctacagcaacgcgttgccttgcgcagctctcgaagctgggatggagataaaaaagactgctttcgcatgggcacgtgaccggccattatctgaatacaccccttatagagaacagactggcgaatgcctgcctcatggatgcagagcgctatgcgccttcctatggaagacacatggcttgatctgctgtcggcgatgggatggagatactgcggctcggggatctaacactgccttttgacagctgcgcctacttggccatgatcacctggagactgtaaggagaccccgaacccgggattatggtacaagcgc

SEQ ID NO: 6494 - DNA, 543 bp, Emericella nidulans
gcgggctctaagcatttgcggcggagacgccatgaaatggacgacatgagaataaccggacccccatgggacccctctcccctgcgccggccgctttgtacctgcctataaaccggacttccccagatgccccgaataactctacttttgtggaccaattcgcccgttttcagcacgcatgagcgcctggctggagcgcttgactatgaggcatctcctggtccaagctctcgcggatagcggcttgaacactgcttgcacggagaagccggagcgccaagagaaagctcgagatggactacaacacatctgcgcgcaagaagctgaaacattgcttgaatgagctagaggactaccgccgtatcacggcttacatgatcgctcgctctcaagcgcacacggtgctataacctgcggcaagaagcatatgaacactgccctacggaccggagacaggacagccattgcatagtactgcatgcctgtcgacacgaatagcaagctacgatgcccaaaaccatactatattccgtgggatagacc

SEQ ID NO: 6495 - DNA, 508 bp, Emericella nidulans
tcttggtaggctggttcagagggaggcaggtgaatatggcgcacgcctacttgtacaatcctgactatagtgcatcacacttaactgactagacctgtagatataagacgcatgcactaacagggagaaaagctcagactcaactgacgctactactgacatgccagactgagaatccgtatgattgcttccctcgctggacgcaccttgcccagcagatagcgtatgtgtgaaagctctaatgtgtgtctactcaagtaaggtgtgatccatatggtcgcgctctgcgatcactaccttatcgccagcggccttatgctcgagcgaccttcgccaacacgcactctgaggatctgctgcgctccccatccattcgtccaccatgtccgtatcgcttatgcacatccattcatagtctctggtgctacacggccatggtgctggtgaaccatgctacagctgtccgataccatcttggatgaactggcttcagagttccaacaacccg

SEQ ID NO: 6496 - DNA, 135 bp, Emericella nidulans
  unsure (1)..(135): unsure at all n locations
caaaaaacctcttactaagagggacccccggaagcgngggagacggagcatggacgcagtgctacatgggcatagaacggaactttttgttgttcctcagagaaccatacgtcctaccacgcaacgcgggggatg

SEQ ID NO: 6497 - DNA, 572 bp, Emericella nidulans
accggaatcgtatcaacccattatttctattgcaccccaacagtacgacggctcacgcagacctaacaaatcggggagcttttatagaacgcaccgtgattgaaaaacggaaactcgagaatgccgtaccaattatgggagtgcgcataggactctgggtaaaatacaaggcacccacaaaaggatcaagagaggccccacaagcgacacttgacgtatgaagaaccaaaactaaaccgctctgtagaatcacatgcagggcgggacgagacactatgaacaaacaattatggccccgaacccgtgatgatagtacaacacagcacgtgccttacctctaggtactatcaggcacaacgtacacacattgtggctgacggtattaaaaacactggccaggagaactagataatcccatgttgagaactccacaggcagggcaactgcccaagctatgctctggccacatatctgaggtctacagattatataccgcgccccccgactcatgttcaacccgtacaatttgcgagctcctggcactaagagcgggcacaactcaacttaacttt

SEQ ID NO: 6498 - DNA, 515 bp, Emericella nidulans
aaaaacggtgaaccttgtctagcacccgccgtcatgtgatgggaacgtactgcaccgaagcattacccggagtgagcgttttacggactttgatatacacgacggtcaaactgaagtggggtgacgacacgccatccttacattaaataccacaaatgcaatgggcattgcaagagtacagcgcgactcatgcgattatcttctgagcctacgggtcttacactgcgaacgtgtggggcgcgaattcaccaaggcattaggtgccccgtggaaatggtctagagcgtctccattccatttacaaagtggcggagaccaacaataggtgaccaactggcataccatccgaaatggtgattgccattgccgctatcatggttctgggagaaactgcgacgatacaacaggagtcgggcatcatggcgcatccacctcttgatcagttctcaaagcatgacgaacacaccgttgacactaccattacgttaattgacgacgatgtgggcacaaattcg

SEQ ID NO: 6499 - DNA, 493 bp, Emericella nidulans
ctagtactctacagcaacggacaccttcaggaggcgcaggcaaagaactactaaacaccatccccgaacagccaaatcattaaagcaaccaatcacacgtacgcagtgcaatcataccctgctaacaacctaaccatgctggtacgcaggactgtcctagcggacagggaccatctgaccgaaagatgagaaacgcgaacatggacttctacgtcacagaacatctacaccgtagccgtccaactggtccatttgatggtaagcacatgcattcaaccggattggacaacggggagacaacagaccataacccacacgcacaccaagagcatcagaacactttcacaccaacatggctcacttccacaagacacgacacacatgtgccgcatgagtgaccggacgcaacgcgcttatcgatggaggaggatacatgtgtgcaccacagccaccaccatagccacagtcgcgtcgcagaccgtgacgatctgag

SEQ ID NO: 6500 - DNA, 566 bp, Emericella nidulans
  unsure (1)..(566): unsure at all n locations
ccaactctnataaaaaaccgcggcgcgtccaccacaccaaacgtaaaacaagaaccacagggatttttatcagaacacacgaagcacaacggggggggaataaaaaaagcagcgggagcctcaaacaggccccccacaccccgctaacccatgcaaaagacgccaagtaccccaagaataccgactgaatagggggagaatcgaaaagaaagcacggaaaaacacgcaaaacacacatacaaccccctacaacaagaagaacacccctggacacaacaaaagacaccagtcactaattgaagcatgagaaatacagcaacctccaccacgaccaaccaacgaaccaaaccaacataataacataacaacacccaaagccaacatgccagggacgaacaaccaccccaaccacaaaccgaccaacaaagcgggcaaacccactcaacgggcctaaacaactgaaatacgcgcacaaaaaacaaaacaaaaaacgcaacccccttaacaaaccaaaactaccaacccccaaaaaacaacgaacaagccaaacccaacaagcaccacaa

SEQ ID NO: 6501 - DNA, 571 bp, Emericella nidulans
cagtaaacaactccttactaaaaggatcatcctcctggcgctgtcagagcatatggagatctaccgggtattttttaggggacggtacagatccactctgaagttcaacaaggactcatggggctatggcgaaaggaaccacggtcatctgatgcaatgtcaatggcaggcaaccactcagcgtacacgaccgatcggtgccgtcattggcgcaagttgcgcaggacctattactagctctatacgacctaggggaggagccggagaagctctcacggcgctgaatgcacccatgttcaccatctatatcatgcacaccaatgtgatgacacatgcgcacctaacaacggactgcataccaggaaacatattgcttgtcagaagaaccattctactgatgggagactgtgcacatgatagagacaggtccagttacacaactgttaattatgctcgggacacatgcagactatcaacgtggggagcatcactcctaataccactaaagcccacgcttcgcattacagcgtttaaattgggggcacacggctgaggagcgctggttacaagt

SEQ ID NO: 6502 - DNA, 574 bp, Emericella nidulans
tgtgacatcgcatgcgatgctctccctcacagcggcgatatatgcacgcgctaagacatgccatgcatagactctgtgtacaaagccgaggatgcaacgagcggagaacgtcaaagcctgtccagactaaccatctcttgccgtgctgccagtaacgaggactactgaaccacatgcgaccacatgctacgatgacagggattgaccacgctggatcacgaccatgaccaccaacgggatcacggattgcggccgtcagaggccgagggcgagtactttacatcgcatgcactggacaaggatgataggcgccgcctggaagaaaactcacatgcgagcgttaacatatcccaatacgaagaccgtagttatcttgcgagcgacagcacactgaacgaggtgaacacgatgcacagtcccatcgaggcgttgagtaacgtgctatatccacactccgaccttagactgagatcttgattagaccgtgaacaagcacacaaagagtcatcaacctgatcatgctgtacagactacagacgccaccgttcctgacgatatcgcatggcttagacgg

SEQ ID NO: 6503 - DNA, 615 bp, Emericella nidulans
ttcagtgccctagtgacctatagacccccatgctctctgagacagggtctgcataaagcctgagcacgctgccatcctcggccacactgtcgaaccccacctcttgaccgagtcgccacagaacatggctgggcccggactcgtacatcgcgtgactaccctaaatagcgtgctacacatgccactccacactggagaggcacccgggatcaggctttctgatggcagactgatggccacatgccccacagacgaagctcacagatcggctggtctgccttgccatctgagacctgggcgcacagagcctccagatggagcataactgattactcatgcaaattgggcaccctaagagctctttccgagggcaagcgatgattgcaatgtgctcctttactgaatgcatacggtgagactgggaaaggaattacgccacttccatcataaactggagtggcgcctgcaacctcacccgtgcaccaagcgttgtggcacctggccagccatgaaaagactctagagcatcattactgaagccaggggggccctgtcaccggaatcacaagcccctagggcccctgcctgtggtcctaaaaaggacttggcttccct

SEQ ID NO: 6504 - DNA, 655 bp, Emericella nidulans
  unsure (1)..(655): unsure at all n locations
cggggggcgagagacaaangaaaaacagacgcaaaacngccaaggcacacacaaggcgattgcttaaacaaacaagaccgccacgaagacacacacaaggaggggagcgatagaaagaacacaaaacagagcggggggaggaaaagagacaaagaaggacggcccagcacacaaagcaagaaaccccaacaaagaccaacaacaagaacaaagcgcaagcccaaagacaacagagaagccagacccacaacaaacgcgggaccacagaaaaaccccgccagcccaccagcaaccagaggagaaacgaagggaagaagggggaaacacgaacgaaacgaacacgacccagagcacaaaaggaaaaccaccaaacagacaagggaaccaagcccaaaacacgcagccaaaacaagaagccagaggcggagaaggcaaaggaagaacaagggacagaaaaacaggaccgagaagaagaggaaagaaaaaaaagcacaaaagcgaacggggaaggcgaaagccggaaggaagaggaagaagccgaggaaaaaacggaacaaagaaaaaagagcgagacaagggggaccccaaaaaaacaaggagaaaagacagaaacaacaagaggaacggaacaaaaacccgcaaaaagaagaaaacc

SEQ ID NO: 6505 - DNA, 795 bp, Emericella nidulans
ctcagctgctggtcggtaaacaaggtagtagggcgtgattatagcgttcagctgctctgacccagtgtatttgcaaggcctatgttatatacagaactccgcgccacctttgttggcaaggtattccttctttgtgcagggctgacggactgaggaccagtactacatatgtatctgggctggctgtgtggggccaaacacctgactttcaacgttctatgattttatcatattggactactgggaccctacgattgattgactccggctatagagacctaccgtgagggaacaacctgcgtattcttaggggctcggaatatatcttcaacaacgctacatgtgctgttccgtgtggagctccggacgtttagagtccctcctgatgcgtacgacatgacagagtgtatagtggccctccggacaagtatgactgcccgcttaaatcttccatatataaattgcgctgacagacagggtcttgtttaccatcatgggactgcctagatacctctcatcacaagacctgcatatgattgaagactccagccattcgcgtggcattctgggaaactggccacctgaatgtcgctccggcatgcgaaaataggctgtgactgatggagcgagacccgcctataactgcttggttgaaactacggggacttaatccccaattacccttcttaccagtgtcaaagcaaagcgggcgtaaaaaattcccgttatgacccaccaatttttttagtggacttgagcttttggccttcgctaccaaggcattcttgggggaat

SEQ ID NO: 6506 - DNA, 396 bp, Emericella nidulans
atccccgaaacgatgcatccgaccgacttgaacaaacgtatacttcgcactatatgtacaacaactgttaccgaggcatgatgtggaggccccacagcacgcctggtcccaaccaacagaaggccaacagctctcacagcagacaactgactacgatgacaaagggaccacgagggataccttggatgacgccacgccccccggtgtggtgagaatcaccacccgaccctagggtcggtcggtcatgacgaactatctaccatgccaataacaaccgcatgcgcataaacgtgaatatggctaccatgaacagccacatgatctgtaactatatcaacaggcgcatgtacgacgacccgactgggtactgcctggctactgcagacgaccgtgcct

SEQ ID NO: 6507 - DNA, 653 bp, Emericella nidulans
cgcatatacgactactatagggatcttgtcgggcaggtacggctcgacgtcgggctcatcggaagtgtcgtacgccttgcgcaggatgtatttctcaatgcggtcctttgtgatcatcttctcctggggatcaaccgacatcgacgtctcaatgaaggccttgtcgaggaaaggaactcgcgcctccaagccccaggctgatgttgacttgttggctctgaggcagtctgccaagtgcaggttctttacacgtctaacggtttccttgtggaactcctccttgttgggtgcagcatggaagtagaggtacccgccgaagatctcgtcgctaccctcaccactcagaaccatcttgactccaagtcccttgatcttccggctaagcaggtacatgggggtggacgcacggatagtggtcacatcgtatgtctccagatggtagataacatccgatagggcgttgagaccatcttcaatagtgaaagtgagggcgtggtgcttggtttcccaaaacttaaccacctccatggcagccctctgtgtcgggagcaccagggagacccatggaaaaagattgcagcttgctgaaggaggttaccagaaaaagctcgttctcgccgcgaaaccaccagttaccggtggcctcgttttga

SEQ ID NO: 6508 - DNA, 744 bp, Emericella nidulans
  unsure (1)..(744): unsure at all n locations
aactaccacaaaacgcancgagggcggngagatgagcgaggacaccaaagccaccaaccacccaaatttcaacggccggaacaaagaggagcacgagggggggccatagaaaaacagccacaacccagagccccaaggcgaacgcacggagaaccggaaccggaacaagacgcaaccgcgcccgccggacaaaccgaagcgcgggccagccgccgaccgccgacgggcggaaaacaccagccagagaacggaacacccggaggacngngagacacaacagccgaagacccgacaaaaaagaacggaacgacacacaggaggaacaacaagaggaagcagcaaggaacgannnaccccagcaaccccaaccgaaaaggcaccgccccggaccaggcaacggaaccaccaacagccccgggaccgacccgaacacgaacaccccaaaacgagaacaaaccccaaggacgacgaccaccaaagaggcacgaaaacgcccaaaggcgcaagggcccggaacacacaaaacggaccaagagaaaggcaaaaaccgacgagcacaccaggagacacacaagagccaaacgaaccccccgaacaacgcccccgccccagggcaccgaccacaaccaaaacaagccaacaccgcaagaacacccaggggaacgaacgggcacaagcccaccaacgacacccaaacacgaaaaaggccacaaaacacagcccccaccaggcaagaaaaagccc

SEQ ID NO: 6509 - DNA, 671 bp, Emericella nidulans
  unsure (1)..(671): unsure at all n locations
cccacaccgacaccanaacacacaaactacaccacacaaaatcacaagacacaaccaaaaacactccagacacacagaaacaaccccagcacacacacacaaagagttatcncccacctcccggggcgcgcgtactgacgacgaccctgggnggcccatacacagaaaacggcgagagaaagacacanattgttaccgaccagaccaggcaggaccaacgaggggacccaagaccccaaccaaccgcagcgaaaacgcaacgcgccgaaacagcacaaagccgccggcaacgagcaggcacagcaggaaaagaccacacccggccacnccagcaacgggcagcaaaacggcccccaccacgagaagaagcagccgcaaccccacaccgaggaggcgaacaccaaggagcgagacaggcacacggcggcgggcgaagagaacgaaacaggacgccgacaggaacaacaaccgcacgaccgacgaccaggcaaacgcccaccaagacgccgaaaaccaaagggacacaaacgacccggacaagaacggggcaaccccgaccgcgggaacccaaccgaaccccaacaccaacaggaggagccccaggccgaggccacgcaagggaaaacggncaaacacagaaccccaagccgacaacacccggaaacgggcgg

SEQ ID NO: 6510 - DNA, 978 bp, Emericella nidulans
gcccatgaatcccaccatccctcggctgtcgcttcctcccaacagttccctagtgtgacaagtactatggacgaaaagcaagaactgggactctcggatgtcagttctctatcgcccgccccagagggcttgggccagtcgcagcaagcgttgacagtgccgccactacagcccctagatgaaccccagtcgaccaagggcacgctagaatcattcgcaattgccacctatcggtggctgcaggagacgtttcctacggtgacggcggtagtctcacatatgcctttctcacttgttccgtttgcgtttgctatgttcatcctcgtacaagctctggccactaagggttggattgaggtgtttgcgcacgggtgggaccactgggtaaaccgaacaggtacagtcggggcaattggagggatgggatttctttccgtcatactttgcaatgagagcatctttgagctctgaatttacttcatactgacctgtattagtttgccgggactaacatcggcacgacaatccttctctcgcgcgtagtgcagacttggcagcgactcctcgggaccatggcatacccattagcgaacgcacattctgggctactgtttacagcatggcgctaggtgtcaactaccgcgcctttagcacggccttagtgcctttttgcgggcctactatgcgcgatttcctgctggaaacatatcacgttcgagcctggatttgccaggggaaccacctatcatggaatttcatgggggtgctgccatacagggggtaggttataatggcaaacctccgtcataaggacgaggtttcccgcgggctttggggatcacgacacacagcattatttggggccaaaccaacctattggcgggccctaatcggcggccccgtattgccggtagctgacaaaaccaccttggcaacggttggcctccaaccaaggattgccctggagttcctttttag

SEQ ID NO: 6511 - DNA, 916 bp, Emericella nidulans
tttttttttaaagagcgagaaagtcattaaataaaccccaaataaaaaaaaaattacaagtttgcttaaaaaaagatggtatgaaatttaataaatggctaacaccaattacagtgcggaaaaattcagacaaaaaagctaactcgatcccagttgcaagacggcaaccgcgttcattggttatgaaacggtctatcacgcttagtgcttcagcttcaagcatcagtctcacctaggctacaaacttcacactcacctttcggatgttaggcataataggattctcagtaaaacccatgaaagagctgacgctgtgcctaataccatggtttaatctgcgttggacaatatgtccctatcgctcatggccggttgttcacagctaaggccggaatatatatacagttggccagcggatgcattcagggagccatcggaaagttgttaccaaaataaagctagataagtcttctatattgatactcattgcacactgctttatccattattgtttagttacagtaggcttgctgcgcacttaacggtaacggtgacactccggcaactcttcaccgcggaggggctgatgacatatcgagatccgaagctctcgagctgtcaacatcattcttctcccaacttttttctccgacataaactctaactccgtcacaatgggatcccctattcacatctcctctaaggagcaattcaacaatctcctgacctcctctaccttcgttgtcgcagactgtaagagcctccctctttgttgatccctcgcctctgctcttcgcccctcttctggcgaggcccgccatctctgccagctcaagtgagaaaaaagacttgaagaatcgcgtctagttcatgccgaatggtgcggacgagtccatgcgataactcctgtctggta

SEQ ID NO: 6512 - DNA, 625 bp, Emericella nidulans
  unsure (1)..(625): unsure at all n locations
tgcaggaacccccgcgcggggggaaacacaaacggggcggcaacatgccaggcgaattatttgcgccgcggcacaacgcaccagacaggcggggagaaggaaaaggagcggccggaaagcaagaggacagcaccggagaccacaggaccccacaccaaccacccagaccaaaccgacgcacaccgggcacgcccgcggcgcccgagaccacccgcagcaccaagacccaggaaacacccactcaccaagcaagcaggagccgcgacaagaagacggagcccgccgaagaaggaccaaacgcagangccccacccccgccccgaaaaagcgggcacaccaacggccaaccacaagcgaagcacgcccacgccgccgcagaccgaaggccacaccacggcacccccgaccacaggaagaacgcggcccaggccgggaagaacgaaccaacgacacacaggaacgaagcagacaacaaagcaacagccagacaaaccgaaaagcccgaagaaccggcaaaaaaacccccccgcaaaaacaaccggcgcgccccaaacacacccacgaacgccaaaccccacgcgaaacgcaacaacggccaacaccccaaaccccaccagaccccccc

SEQ ID NO: 6513 - DNA, 569 bp, Emericella nidulans
ggggcagggtcccagtgcgtccccgctgcgcatcacggttgattcgtcctaaccggcaaccgaggttattttcttgattattctatcagcgctcaacgccactccaacgccctcaacaactataactggaaagtggcgagcttcaacaagggcagtatatgtgctacgaccgcgtaagcttccgtgttttgcaacgaccctgaaacattcggcgttagtccgtggccattcgttgactagtcgaacggttcttatacggataactgttctcgtatgctatagagtcatccgccgtgtccaaaatgtagtatcaacttgactcggttgagattggtagtgcatcatttggttgatagggaagtgatggtacagttggcaggcgactcatgcggaccttcccacgatgcaatggtgaggtacagggaaggcgcgggagggcaacgatcctaggtgatctgagttctagttgactggcacatttggccttagtcctagaacacatcaaatgctctgcagagttagcatacagcttagtgtcctcttagatcagatcatcgcacatacagctt

SEQ ID NO: 6514 - DNA, 448 bp, Emericella nidulans
ccataatactactcactataggcctcagcgagcctgccatgcaagagattattaaacaccaagctgcgacgccgttactcaagaggctgcctgtagacttagtcatggccactcgaggtatgacaacggtgaccagggagtccctcattacctagattcctggaggatgagaactgttatcgcatcacatatcatactgaagacgtgttgagtgataagttttgacactgatgagtagcttatgtgctttcttctaggcatagacctggacgtctcttgatgctgcgctgggctcaaactgaagctacggatggcatctgacactagccctcgatgcaatgctgaatggctagctcgcatactggagctctaagataggctcatagatccgtggatgctctatgctagagcgaggctacaggggttcggggccgcgatctagaatata

SEQ ID NO: 6515 - DNA, 780 bp, Emericella nidulans
tcggcattcggtactgtctgcttgagttgagtattggctataattgactccttgtctatgggctactgacgccaattgtgcaggtaaacaatgagtgttttcgatactgctcgtcttggagcatacgaggttacaatgtacacgttgtccgaacttggcccagtaccgcaacaccaaatggctttgcccccgtcaccgcgaatcgtgattgaaattattatggggcatgggcgggatattattccaaggagcgaaggactctaccgaagccgggccagatctccactcctcgatctcactttcacccggctggctgaacttgtaggctgctccagcctccagcctccggtctccagtgaccagccgcaaagagagatctcgcgtgtggacgttcgcatttcaggaacgggtccctagcggctggattatgttttggctctcgattaccgaccggttcatgggacaaggaacaacgggaggcttccaagggttcccaagggttggtgccccggtaacgtttcctcaacaaataaaacatatgctgcttgctttcatatcggcagatttgttactcgagatccagccatgtgctgtgctcggcctgtaccaactatcatctgccgaaagaacgggctacgcgctgcgcgggaaatctgtgcggtgcgacaagagcccggtgcccagcaaaatcacaataacaacgtccgagaaaaatcgtgagtatgtggcagcaattaaagacctactccgtattcattattccggccgcgacatgggtct

SEQ ID NO: 6516 - DNA, 531 bp, Emericella nidulans
gcgcacactgggaggttaaaggaatcaaacctcaatgaacattagagttaatcatgtcgagttatacactgctgaggccacaacctacaggtaagtagccgtcagggccggtacctatgtatccagtcatactctccgttcttcccctgcattcctgactcaatagtaacatacttccgattcccttcgacaacattctccttcatccagataagtctgtcaagaaccgcatgcgaagaagcatgtgaagaagcatacgtctgcaccaatctcactgtgccctcgggctccggcatacccgcctccacgtcaaactctggaagtgtcgcaaagagctcctgaatggcctgtggcccaagatcaacagtaatgggtagatcagccaggaccttgataggggtaatcatcttgccgtacttactagtggggtcaacgtcccgcttgacgtgaatttgatatggtgcccgattccgccccgatactgcttatgatggaaggtaaatccgggcaaaaattgttttccaatggcca

SEQ ID NO: 6517 - DNA, 590 bp, Emericella nidulans
  unsure (1)..(590): unsure at all n locations
cacacaaanacacgaggggacaagagaaacaaccgggaataataacaccccgggccgcagaccgacggggggggggcacaaaagacggggcggccgcgcacaacaaaagggagaacgaaacaaaagaggcgacggacagcgcgagcacgaaagccacgaaaggagcagaagggggaaaagccacacggcgcggcacaggccgacaaaacagccacgagcaaggagcggaaggagccgacacggagaaaaacggagccagcgcagaaacaggcggacgaacagaaagagaaagaacggcgccacgagaagaaccagaaacagcagcagacggaggaagcgccaacagcagcgagaaaaacagacggaggagaacgggcggagccagaacaagaaaggccaaaacaagaagaacgagcgagggcgccaaacccagaacaccgaggggaggaaaaagacaaggaagcacagaccacccaaaagaagcgaggcggaagaacaaaacggcccaaaaacgacaacaccgaacgaaaaacgaacacacagaaacgacgggacaacaccaggaaggaagagcaaaaccaggggaccga

SEQ ID NO: 6518 - DNA, 541 bp, Emericella nidulans
accccagcaccagaccaaaccgggggggaaaagaaagaaacaaggggcgaaaaacacccgaaaacaggcaagggcccaccgcaaccggaacggacccaagggggaccgggagcaccacgggaaaacggggagaaaacaaggggacaacagcacggagtagacggaacacaggacggcgaagcacgagacacacccacccagaacagcattgagaacccaaatggccacctggacacgcacgaggcagaacgcaagagaaggagacacaagcagcaagcaagatccgcccaaggaggacggaaaagacggaacgctacaaagaccccgaaggcagaaccacacagggaccaagctacacgaaaaacgaaagctccaggccagctgaaccgaaaaccacacgatgaaacaaaaccaaggaagacccgggatacaacacaccaaaggcggagaaccacacgcatcactacacaaaagcaaaaaactgaagaaccaaaaaccccaggaagaagagccgccagaaacggcacacaaggccccaaac

SEQ ID NO: 6519 - DNA, 509 bp, Emericella nidulans
acgaagcggaccagagagaccgcacaataaagcggacagcaatgataacaccgcagaaacgaagagcgaaacggggggatagaacgaacaacggcccccgagcaggaccgcaacaagaccaacggagaagacgcagcgaaacgcagaccataccgcaaacaacaacggcgccaagggccaaaacgacagaagagagagaccaggtagaacccacgaccagaacaacggcacataacagaaccgacggacaaacacgacacgagcaacacaacagggaaagaaaaatagaacagaggaacccccagaacagaagccacaaaaaaagcgaaacaagagagcaacggactatagcgcggctgacgaggacccgacccaagacacaacggaacagaagaggggaacagggagcccaaagaaggaagcagcacgccagaaccgggaaacggcaaaacggcagaccacaaaaaacccacaccaaaacggccgaggcagggcaaaggggaaacaac

SEQ ID NO: 6520 - DNA, 609 bp, Emericella nidulans
tctcgcgatccaacccgtactatatcgtgccgcagggtctttgtcacttgttcttacaaatatgaaggattcgggggcgggtgaatcttctaaaggaagttgcagggacccaagtttacgaggcacgacgtgcggagtctctaaaaatcatgcacgagacgaacagcaaacgggagaaaattgatgagctattagatttcattaacgaacggctggcagagcttgaagaggagaaggacgaattgcggaatttccaagagaaggataaagagcgaaggtgcttggaatacacaatctactctcgcgagcagcaagaaattgctagctttttagacagcctcgaagaacagagacaaactggtgtcgaggatactgacattaatcgcgaccgtttcattcaaggagagaaggaaatggcccaggtcgatgcagagatcgccgagtgcaaacagcagattgaatttctcaaggttgataaagcacagctggaagacgaacgacgcgaggcgtctaaggcacttgctcaagtagaactacaagctaagtcgctgtcggataatcaggctgctgcccaagagtcaaaagcacgccatgacgaaagcttgaagc

SEQ ID NO: 6521 - DNA, 716 bp, Emericella nidulans
  unsure (1)..(716): unsure at all n locations
catctggacgtaagcaatccagaggaagtcaacgggctactcggaactctgccgagcgagttcaaagaggttgatgttttggtcaacaatgcgtgcgttgcccactccccttcttgcccaaaaattacagataaaaccgggacccagcaaggctagatgctgattgtcgcgcagaggcttggtcaagggtgtcgcccgcgcccctgaaattgctgaagaggacatagccaccatgttctccacgaacgtccacggcctcataaatatgacccaagcaatcctcccttccatgctatcgcgcaacaacgggcagggagcaggagatatcatcaacatcggctccatcgctggccgcgagccctacgtgggtgggagtatttactgcgcgacgaaagccgccgtgcgcagctttacggaggctctgcgcaaggagctcattgcatccagggtgaggattattgcagtagaccccgggcaggtcgagacagagttttcggttgtgaggttttatggggataagagtaaggcggatgcggtctatgcgtgagttcacacttcccttataagggcaggaatctggacaagctgggagttgttggctaacaactagatgggatgtagaggatgcgagcccgtgacgccggatgatattgcagaggtgatagtgttcacggcgagtaagagaaaaaatgcctgtgtggcanatacgttggtta

SEQ ID NO: 6522 - DNA, 564 bp, Emericella nidulans
agaccaagcccccatttcttgtccggcttccttttccttatcgctgcctttatttttttggtgcttcgccttgcttcgtgcggccggttcctgttccttctttctttcctgctccttatctactttctgctgcagttcgctgatccatgtatcagcttctggagcagggacgaaatctggggcacgtgcttgcgcggccagctcgtaaataagcttcgcaatgctcatgatgtcaggtctgtgtgctggtgtaaacttcgctggtgaggactcctgggttggcttctgtgaacaattgggggaggaggttgcctccataggttcggccgttgccttgacagatgatgcacgcggactgcggtgccgccgctcggattcaaacgactctagagctcgaatagtcggttttcgcgtacgcccagacgtacgcgcggcgttggaggtggtcgtggacaggctggtgggagaagtgggggcatccatgtgaccatcaagaccatagttgttccggaacatgtctgtatcgtattcgaaatggtaatctccattttcaacatcggcggg

SEQ ID NO: 6523 - DNA, 1132 bp, Emericella nidulans
cgtaaaaggcatcaaggagagcaaaagtctgctccttgttacattcacccatgtattctttcctgtaatgcaatacagtaagcttcttgcattcattttcgccaataataaactgctcaatgcatagagggcgggataccaggcatcaccgaagttcatggcccccagacacagcggcgacactttgacgccagccgagggggagaggactcggtggtagccaaggagggttggcggtttcggagctggagggaacatggacattttgaggagaaaatgttatatagtagatttcaggctaagcacaattgacaataatcaatccttattactctacggggggcattgctcgtttttataatgacgacggggtgggcccgggacggacgatggctaccgaggtatggtacaccacagagcaacgctaagagtatagtgagatgatgagaactcgaaaccaccgcaagttgatgaccgatctccatcaccttggtggcggaagggtagagggcccactgtagctccggccactgaaaaatgtagaacaattactataccgaaggactcgccaagggagcgatcgtcagtggcagaccatgcgggggtaatggctatcgtaaaggcattggtcaattgcactaaactgcttactgtggatacaagaaccggagttgagatcggagtttattcctacggacataagaggcctgcgatctgaaagtcatcatgatgtaactgtacttatataatagagacagtctatcactgtctatacaaaaaatgcatacgctctagccaggaatataaccatttgccccataaattagttaacatccagtttttcgttggtgggacatgccttttcacacaatgtttaaattttaccctcttcttgggaaacggggaccgtcctcctaaaatgaaaccggggtacggaacccctccaccttaaacatttgaaggcgaattttggtttaggaagttttttttttaaaaggaccccccccccatggtggcccctcctttttagagacccccctctcctccccccccggggggggaaaatttttgggtccccccccccctcttttatttttggtcccctccccccacatggggggggaccaccccc

SEQ ID NO: 6524 - DNA, 505 bp, Emericella nidulans
tggcctgcagcgtgctcgcgggtgtctataccctatggaggctgagccagaagcagaagaccctggatttgaaggagggtgaaggagtcgtggaggcgaagaagctcgagaagtatgcacttgaccgctgatccgcgctcaaccatggaggctaactgtgtttcaattagggaacgctcggcagcccgcatccaacttatctccgacctttgcgacttgacggttcccgtttcagctatcgggctcgcaaacctcgacgatggccttgtgggcatcgctggtacaatcagcagtttgatcggtgtgtggagtcaatggcgaaagaccgcttaaacacccatcgaaatgagtggctagagatagccttgtgatgactggcttctaaactggttcctggggtgtattttccgtcggcgtcaaaatattcacgtcgctagtgctagaggggatgcacctgggatagcctgctctgcttgcacaaatgcttggaaggaggaataggcgc

SEQ ID NO: 6525 - DNA, 774 bp, Emericella nidulans
tttccttttttctttttacttttcgttagctctcctatttacctattcctcgtgttctaaacttcgttttgttcattgggtaatccgattttgtacggccgcggctttctttcttataggcggcgggataattaactaataccggtgctcaggccgcttgatttgatatactagttggctcagcataaatcagcttgaaggtcttgaacggcatcgctatcatgagataacgtgtaacttgtccgcttattatgatcatctgttcgttggattgctctttgtcctcttatcctggttccaggaccaggatttgggcttctgaaatgaattttgtgttgcttagtccattatcctactagcacataatctaatatctggtttacggtcaggacagagagacatatactaatcaagagctaagcccgagtttgaaacagtcatagagaactgtggaccctattggaaggctggcacgttgtatacaaccatattgtatattctaggaaaaactactctagattctgcctctagttgagaagccagtaaacccgatggcagctgtcaccatggtagtatctcaatatcaattgagccgaatgaatgaatcaaggagctcctggaatggtagcgtctttccatatcagcaaacgaccggtcaacgcagtcatcatgcatctccaagtctagacttcggcgacagacctagcatgaagggacggctgaattgacgtgcattttactttgctcgggagccggcttctgcgtaccaccacg

SEQ ID NO: 6526 - DNA, 724 bp, Emericella nidulans
  unsure (1)..(724): unsure at all n locations
cccccccaccacaacaaaaacaaacaagccaacacacacaacaaaacaacaaaaacaacagaacgcagaccaacacaacaaaaaacaccaacacacacaaccgcaagaggcaaaaccacgcagangcaaaccanaccccnagacaaangccaaccacgaattgatacgcacgaancncaaaggacagcagggggaggagagagccaacaagcgccccgaacaccccagacggaaggaggcaagacaagccgggccaaacaaacgggccagaggggggcgcaaagaggaccagcaggaggggcagcaggcccagcaaggacacgcaacgaagaagccgaaggcacgcccgcgcgaggaaacgaccagggcagcacaaaggccagacaaacggaaccaaacaaaanncacacacagggaggcacagagaccgacaaggacacaaaaaccagcgccacggaacacaaaaacngacagcacgcaggccgaaggcacgaaccagaccgccgacaaggaaggcccaaaagaccccagaggcggcgggaccaaaacggcggggaaaaaaggacggccaaaaggcgcaacaacaagcccaaggggaaacaaaacccggaccaggcgaaaccgcggaccaaacaaagaaaagaggccgaagcccccaaaggagaaacagccggcccccaaccccgaggaacaaacagaccggaaggagaaaaaaccccagccc

SEQ ID NO: 6527 - DNA, 491 bp, Emericella nidulans
gcaatttcgtgcaatctcgtgcaattcagtcgggtctagacttcattgctgctctctatgctagagctatggagatgataatgcaattggacctcgggaggccgcccattcccgcagcgctagaccgtttatcgcccaacggcgcttctgccccatacctacgtttctgcgctgtcgatatagagcatcggcagttgcttcgcactcgacgccttcatatcatcgacaatctgctggcccgcccagtagttctgagaacttccgtaaaaagcattgaacttcttgctggtactcttccgctgcagcaagactgaaactgacgtggactcataagaggccgaaccgaaaacgaaatgaaaccccttcgctgtcttagcgccaaagcacttatctgaggaacagttccaattaaccggccctggagccccactggcgcgcgccgtctgtgactatccattggtggccacgccccgtcatcctgaaactggtcg

SEQ ID NO: 6528 - DNA, 588 bp, Emericella nidulans
  unsure (1)..(588): unsure at all n locations
aaaccacgggggaacnagacccagaaccacgcacccggcggacgaacaatattacccaacaccacaagccacaacacgaggcagagcagcaagagccaggcaggccaagcacacgcgcgcanaaggaccgaaacaacgccacaacagcaccagcaccggcagaaagaacgcacacgcaaaccagcacagggccgacggcaccggcgaaggccccagccggcaagacgccgacgccgcaaggccaaccaaccgcagccaaagcaccaaccaacccacagaagacaaacccgccaaaaaacagcaaagcaaacaacggccgagacgacaagacacagaaagaaaaccatccgccaacaaaacaagaaacagcaaacaaaaaggacaacgacgaccccgagacaagcgccccaagggcccacgaaccagggcaaacaaagcaaaaacccaaaacccaccccaccccccgagcgggcacaaaaaaccaacccctgacaaaccaacctacaccgccccgaacgcaaggaaaaaacacggcaaggccgagcagaccggaccaccaaccagagaccacccaaagagcaccaaacc

SEQ ID NO: 6529 - DNA, 915 bp, Emericella nidulans
  unsure (1)..(915): unsure at all n locations
caaaatagctagacaagactgatttatgccgttttttgtctatttttgcgaggactatagcgtacttgatctaggattgtacaaggtattcaagctggtttaccgagaatcctttctttttgctttctgagtccatatgctagtggatttgaactatccaagagtccaaagaagcgaaggctaacatagtagccagggatgcagaccagaccagcccaaacggcaacgagacaagtattgctgcatgagcaaaagccgaacatacattctcaaacacagtagacatctcagaataagccgtaatcgctcatccgaaaagccagggcgaagatcacttggtacctagacaacccataacctgagcaaaatcacgatcagcgacgtcaagaacttttcaaccatctgcaacaatgcaccagccattcccgtagcttctatggtgacgcgggattgccgatctatagcttgtaaccgcatcaaacaagtgtcatgcaaaaaagccaccaagccggcaaccgatcgatttgggtgagataatcggaccactcgaacaccaaatacacccgaccagcccgaaaaacagaaaagatgagtatgggatgcaaaataaatttgtggggggataggaatgcaaatattttcttttgagtgagcattatataggcgaaaagagggccgagcccatgcagtccaccctactttaaaaatgaagtgcctattttcatggactcgttaacctttaaagttggcaaatcaaggcggtggccgggaagtaccacgccctcgttggataagcagggccctggaacgaaccaaaaaaaaagggttggatgcgaattnaagcctttattccaaccgaaaaaaaacgttccggtttggtctggggtttgttgttttttttttttcacccccccc

SEQ ID NO: 6530 - DNA, 614 bp, Emericella nidulans
catgagatttctaccatatgataacatcttaacattttttcttttcgtattaccggtctcgggggacggggcctgtatccgtttccagacggacatggccgacacactagagactggattccccacggtagaaatcaaggtcttggcttcgatgatggagtctctagctgcatcgtgcggattcgaggccggcttcgcaatccaatgacagtttcgttctgtatctgccctgcagcctattagctaatgcttctccaatgttttctcaccaacaaggcttgcaagtttggatccccgcaccagagcccaacccccacaaccgcgaatagcaattggaaccttcaatggcgttccgcggacacccattgcttgataaagataagaaatccgaggagaatgatggcggaccccgcctatgtaaagctagttagctgatgataaggcaacgggcgggactgtttcctgcgtagctacttaaagaccctgccatccgttcccacccttcacactgacggctttcttcctgccttcagctcaattagtcccataccatcatgcgacgatcccttcaacacatcgccatgcaggcaccagcgcctctcgtgtagccgaga

SEQ ID NO: 6531 - DNA, 724 bp, Emericella nidulans
gacgatgttttttgtaatccgccgacggagcattgtaccgactcattaatacagtaatacagttcgtccttgcgcccacaatgataagccgcaacatgcaaagctgcctacaacaaatttttgatgtctcgaagcatctgcattccgaagtggacgcgcagatgtcctgtcatctgtaatcttcacgacagcaggctttcgccggtttcatgattattgctataataatcttggaaataaaagatcaccaaaatctggaatgggacaaggctgagccactgaggtcagtggggtcggcgagttgccgtctagcctgcacaaagcagctgccaccaggaatctgccagagctcgacagatactcttaaggagccaggtttgaattcttggacgtcctcgggaagagccgccatgttcctcggatttcagagacgagaatagacccaaaaggaaatagataaataattcagtagatgatagaagtcatctaccgccctatcacaatgataataataggtagcccagccactgcataatcatcatcgtcacaactgcaatgggatgtcatccaatccaagcctccatatgatcagtcgccgaccaagcgcccatgacgccgattcccccactccagctgagccgcccgtataccaattatcaccctttagacggtcttcttccctcctttggcttttcttcccttttcccactggccttggcccttg

SEQ ID NO: 6532 - DNA, 590 bp, Emericella nidulans
taaaatggggaggattgagagaccagccattcagaaagcctcagccaatctttctatccgaggagctacgaccacgtgcgagagtacccaacccaagataaagctcaatatccgcccctcctcaggatctgaagcaaacgcggattgccaacatgctaatgcagcgcctgggagcagtctcggactgtccttggactacctacacccacatcttttttgttggggataagacactgctccatttagatcaagaacccgtccatttcatacttgcgtaccccctaaaccagaccctcattagaacgaggctacgattcttataccagaaagaacaacacccatcaactgagcagattaggcgcctgagctcagtcacagcgcggtaaatgttcagccttgctgaaggagaatctataagtagactcatctactggagactcaataaaccgaacggagaatccttgaactatccagaacgagaggattgacaaccacaagacctttatagtgctcagagcctattacatttaaccttctaacccgacggtcagatgaccggaataccaccaacatcagcatgcggttgcccg

SEQ ID NO: 6533 - DNA, 587 bp, Emericella nidulans
ctgccgtcgggcccagatgagcccacaccacatgtcgaccaatgccgcgaaacccaaggtatacgctctaataggcttaagactattgggcctcagccagtgatagctcgaaggagcccagccaccctacagtactgtgcccatcaaaccgaaaggacaatgggcgagatctgttgccgcatcggttatgcctgaccagcatgtattttatgagccagtctaacatttccgtcttgactcatacttggagaataataaagccacatgtcatgaatacaacaagagccctatacgcaggttccatgtgaaatagcgcatcattcgtccttatccagcttcaacatgttacactaaatcaagtccagcccatgatagctaagtattcgttgtgagaacaaaatgccatgaacaaaaacaaagcaaggtgattaagtgagcctatagcaggatccagacgccgatgcaatccaatgaattaatatttacaaaacgtgcctcgtaagcggaaagtagtatagagcaaagtaggaccaaccaaacccttccgcgtgttcgcaggtagtgacaaccatgccactagacatgtt

SEQ ID NO: 6534 - DNA, 397 bp, Emericella nidulans
gaataaccctcacaaagggatcatgttcagctttactcttctagagctgaacctacagcaacacaaataccagctggtttgcccgactccgtatgtgaatacctaatcctatagtttgaccaagccatctatgacgcacgcttggtgcctaaccacgggcaaagtggctgatgtgccattcaagaggcacttgttcacctgaacgtatcttgaatgagggaatcctatccagtagaatcaacaaggatagatcgagtgctgtaacacatctgcgatactaccatgggggcgaaccttcctacctgaataaccgtcccatactagagttgtgctgaacgctctatctgtctgaaagcgagccgatcgcttatctggcttactctgtgctgacttgact

SEQ ID NO: 6535 - DNA, 104 bp, Emericella nidulans
cccccaccaccaacaccaacaccaaccacacaaaaaaaacccacacacccacacaccccccaaaccccagccaccaacaccataacacaaccaccaccaaaaaa

SEQ ID NO: 6536 - DNA, 961 bp, Emericella nidulans
  unsure (1)..(961): unsure at all n locations
cctccattcggttcaaaaccagtcgaacactcctgcaaaacttgctcgcgagtgactcgtggtccttctgcacgccgagcacggtcgccactgctaccttctcacagaccctgctcaatggtatggactggctcggtagacgtgataccgccatctggatctgtacattgaggacgtgcagtacacaaaggccaacggtgaggtcgtatcagggacatacctgccgatgctatttgagactctagcggacccgattgtcagcggccgtgaagagcttgggatgccaaagctgtattctgcccttgaggcgaatgagcgcgagggctcatattaccttcaagcgagctggcagggcgccgtctgggggcgattccagtgcgaaggactcgaggaccaagattcggcaacaaccgccaggccaagcgacagtggtgtcaacggaggcttgcttcttcaccgctacatacccaaagttgggagagactgcaagggtcaggcggaggttgagtatccggtgtttgtcccgaatgcagatgagagcaagatgctggtctcaaaggtaaaccgggttcgtacagctacaagggctgcatttgagattgatggccttgggtgggaggctttgcaacgttgcaccacatcatcgagcgattggccgagattccagtcgatgagattctgtcggcgaaaattgtcgagggagagggggtgccggatgtgtcgtctgcgcgccggatagagtgaggaccacaacaaagtgtgaatccttgtaatattatatccagacgacggactagaggattctgatatctgtactgatagtcatctttgagaggcgaaggtggttgagcaggagacggaggggatttagtcctcagcaaccttgggcaatcgcttttctctcggcacggtacgaantcntcaggacgtcttacgctgcttagaatgcttgtttgcctag

SEQ ID NO: 6537 - DNA, 649 bp, Emericella nidulans
gataattcgactcactatagcgatcatatcctaactttatttttgctgtaaacactcgagacggctttgcttttgctcctaggcgcaattgctctagatcttagcaaagccgtaaaccctatcactgggatttctttttcaggttgtgctgcagctattggtttcatggatgtcacagtctcccgtaccttttcatcagccaggtccacaggttcgccgtgaacaaacatattagaaaaacagcgtgataaaggaggcaattcgaagcaagccggagcaaacgggaaagcagctcaggcccctacaactttggcaaacgttccgtcgacgattttcttccggcttcttgtgtcgtctgccaggcagatgatggcctcacactacacattagtacacacccagtcctctaactcatgatctagcagaagaaggaggaagggaagagctaacctgcgcgaagatgctgaagcaacgattcatttgcgcaagacccgggacatgatccaaatctacattctcttacacattatgttaccacaaatatactatgcggcgtattggaatgaggcgataaatctttgcatttgcaatgacatgttcctcaccctacctttagaaaccggtttttggacccgaacccagggggctc

SEQ ID NO: 6538 - DNA, 773 bp, Emericella nidulans
  unsure (1)..(773): unsure at all n locations
ccataatacgacacatctatagcggctctcagggattggttacaaagacatttagtcctcacgatgggatttttgttaccggatgccgaacccgacgtagtgtgggacaggcttgtctcacttgagcgtactggccgcgccgactgccaggcacgactagagctcgtgaccactgacatgcgtccaaggaactactccacgccgttattcttggaaatcgccactgctgctaagcatggaataatccggaagcataccaccctctacagattcagattagatactcaccaggtatcttcgcgtacgcttgcgtgcaggatattgcctccgtctagtggtctccgaaaacagaccctgatactcagttattaaaccctctcggaatcggaaataccgatacagactcgggtctgagtcggatgccgtattcacctccagcagtgcccacactttaccgaactctaaccggctaataatataacggcttaaagtctatgcaaatagctaaggcaagaaccgcttgggcatacggagctagctcatctgggtctgtagagattccctaacccctgtccttcgcttttgatctatttgagctgggagcgggacaatccnnaatggttgctcccgcgcccgaaaattttccacaactatctcctttttccgtccctggacgaggagagcctggatttacccaggaagccctcaacttctggtgagaagcacttaaatttatcaattaatggtctggtgatcattataaatttcttgat

SEQ ID NO: 6539 - DNA, 698 bp, Emericella nidulans
ccgcgcgctagcattgcggttagggcgcgcagagaccatcccagactatttttttgatgtcccggtttcgtttgaaggagatacgatgggtatatataaatctgcacaagtgttgaggatagaacttgctcgaatccagggtctggtgtaccaaaagctctatagcccagccgcactgcggcaggacgagatggctagggtggcggaggcccgctggctagctgccgaaatgcaggatcgtgtaatgctgccgttcaaggtcagtggtccgcttcctcaaacataactgttctaacattaagcagaaactgtatcccaccctggaaaacttgaatccgatcgagtacttgtatatcaaatgcgatgaagtatgccgcttatcggttctaactttgatttaccgcgctatcccccctcagacgggcaccctgggcacgtttgtcaaagaatgcattgaagctgccaggagcgccctccaggcacacaagtcgagcatgtcgctgctgacggaggccaaccaggccacgaagctctcataccttcattgggaaaacaacccccgagtgttttgcgagggattctaacttggcagggggatcctttattctcccgttggtcccttcatcgggcctttctggcacataattgaggggtctttttgggaagcctctaccggcttagggggttgtttaaccccc

SEQ ID NO: 6540 - DNA, 602 bp, Emericella nidulans
acagcacagacatctcgactgtcgactcgagcatgacacgtcgatcatgactttcaagcccctaagcttcagcttcaccctacgtatgcctcacggaggataagcttccagccactacgcagttccaacagtacaaaacgctcatcctgatgaagtgacgctgtgtaatgcagcgtcactttcaatctgacgtgcgaggcatagcaccttgccctccaacgagcaacatctggaaacgagactggcacagatcgggtctcttaatgctggcttatctcggtaacaaaagcaaagctgcccggaatcatgacgcggcattattggactgcaacgctgatttggacgccacaatttttcggtattgcaaatagcttgcttcaagttggcgccaccagctcttaaacatccagaactgagatcaaaaagcatgcagcaataccgaaccggggctcgactcgtttctatgtccgctctcgcatcgcatccaatgacaagttcaagctgggttattattgctcgatgctcgtctatacagttaatcgagggacatccattgttggcgtttcactgtccagctgtcaaaggctccccaaaaacaggca

SEQ ID NO: 6541 - DNA, 637 bp, Emericella nidulans
taaaagatcgtatccaggggtgggtcttcgcaaagcaagtgtcctgctcgtacgtcagcggctcggagatctgcgaagacatgctgattcgagatctgtgctagctcctgcactataattagtgatgtttgcaagtactagtgaacgcaaaggcgcaacacacctctcgtaaggtgttgctaatagtcttcatcggtccggcatgctgtggtccaggtcgctgtccgcggaggagaccgtctcgatgaatgatccagcgcttagctgccgcagttcgaaggtagattcgatgggcctggaatcgccgggcactgccgtcaaggatgactctgataattgtcagaactataggcggccttgacacggcttggcttcgaaagtactgtacctttgcaactgggccttttcggcctcatccgcagaagtgtttgccggcggcgggctgggggtatagttcgaagccattaaggcattcgcggctgccacgcactccctgagcaccctgtatccctcttctgattgatccgctggtggtaccggcacattgagttggttaatatgaacgagcagagtacggtaatcgttcatgagttcggccacccttagggcgcgtgcttggttacctaataagatcagt

SEQ ID NO: 6542 - DNA, 703 bp, Emericella nidulans
  unsure (1)..(703): unsure at all n locations
aaccacaacgacaacccacacggtcacccacgcccaagaacgcaaagaacaacaccagcgcgaaacaataancaaacccccacacccaaagcgccaattcgcgaanacgcggggggccacaaccggaggcacccacaacagcgcgacccccggtgatacccccaccccgagaggcaccaacaagggggaagccggagacggaggcggaaagcaacacacagaacggccagaaccggaccaagagaacaggaagaggccgagagagaaccgcaccgacaccgcaaccgggcanaaaagacccgacccgaangccaccacgagcaagagcccaccggaaaccagagcgcagcgcagacggccgaacggaagcgcgccgggcaacggggcagcaacggacggcggaaacgcagcccgagaagacggacagacccggccccaacggaacaagacccgggccggacccggacccccaacggggaagcccccacaggaaggccaggccaagaagagccagggaaacccgaacgccgaaaccccagcccgacccggcaaaaaagagggcggggcgacgacacgccaacaaacagcacaacgcgggaggcccaccaagaccaaacccgagggaaggacacaacgggcagaaacaccgcggacaggccaccaagagggaacggggaccaaagacaaacaagccgcacgggca

SEQ ID NO: 6543 - DNA, 677 bp, Emericella nidulans
  unsure (1)..(677): unsure at all n locations
caccacccccgaacgcaaaagcgagcgaacaagcacccccccgacgacagaacagagcagacgacaccgcaaacaacaaaaaataaaaacaccccgaagcgccaggcgtagcaggagcacgcaaangcgcaccaacaacagaaacgcaagcgccgggacaattttcaaaggcgcaggggagcgccgacggggggaaggggcgaagaagaggacggaccaaagcgcaaccaagcccaccgggccaacgcgcccgcacggagagccgcaccgaaagcaccgcaaccggcacccacgccacgcaggggnacccgaccaaaagcccaaggccgcaagcgacacaggacgagccgggaaaaaacgccccgacgcgcaaggaaaccnaccaggagagggaaaggcacacagacaacaggaagggagcaacccccagcggcggcagggacaaaggcgaagcacacacgcacacacgcggccgacgggaacaggaacacggacaaacgcgagagaaagcgaacgaacccgaaaacgaaccccgcgcccagaaagcacccggcaagacaaccacaaaggccagggcaaaaacccggagaaacggaaaacccaaaagggaggcccaaaggcagcgagagaaaacgcccaggacggggaaaggcaaaagcaaaaagccccgaccgaac

SEQ ID NO: 6544 - DNA, 518 bp, Emericella nidulans
acctaaggggcgtcgaaaacaagacccgaaggttggccctttttctctagagaggtccccaaatgtaaagggctgggcacttgacgagcagccaggggtgcaggctttcgtctgcctccacgtcgtgaagggagatagatacaggccagtcgggcatcggaacagcgcgaacaggttggctttttgaaatcgcagcggagatgctgcgcgcgacactcagtgcaagcgacggtcattgtccgtcctttgggcttataatagtaaacgggtagggtgaaaatgggatagtaagatcggtagatggatagaatcagggttgatgacgccgattctgtcggggtccattctcgatcacccgattcgccaaggcatgtggcaccagacgacgtaaaggattaaatttaattaattttaccaattttaattgagcgccaaactttactgtaaactggactaggctaggctagatagcgaaaactctagtgactctacggtaatgccttgttgtaccgggaacc

SEQ ID NO: 6545 - DNA, 630 bp, Emericella nidulans
ataaccctactaaagggatcctggaaaatacacagggaagacttctatgctctgggtgggttgagaagctgactgtattccattttgagctcagcgctagttgaaacatacctcttgagtggggaccgtaagcccgagagtttatagagtgcacttgaaaccgcaggatcaagtagacgattagattgcaaagagaggtaaaacttccaagtgcatggtacttctcctactcagaatacatctctaaatattgtctgagttgaaacgtaactccgcagaacacagtcaaagcttggggacgagcctagataaccggctccagacctggaaattcaaaactcattcaatgggaagcaactagtagtttgttatcacacataggtttcagtaactaattgtatcggtaattttctatgttttgggggcaatttcattgggagcaattttaaagagcccgttgactattttgaccaagcttgaatggatataccgccacggccgaaagactgattactgcgatgctctgatgctttattgagcgtttggacttgctgaggtgctgcatttttgataagatgcctttctgaactgggtatgggttggttaatccctctcagtggtaaaaaccat

SEQ ID NO: 6546 - DNA, 562 bp, Emericella nidulans
actttgacctcaacctcatcgcactctaacatgacaatcataatcggaaggccctatcggccttttcatctctccttatcttcgccgagtattccgaccgtcaaggtataattacgccccatgccgtcttcgcctataaagacgtctcaacccggcgcctgggtccatctatatccgttcatcacatcgctggagacaagttcgcgctccctgttctgcgcgtggtcttctctccgttctccttgtctagcttttcaacattagcggacgctcatcctattactctgctaagactcaggaacatgtcattgttgtagaacgatcactatccgtacagccactgtccacgcttcagaatctcgtcccgagcaggacccggcgcaaccagcgcgaccgtcagagagcccggcgatttcagacgtctggtccctaggagtcttgcgatctgctctaggcaaagcgtaggtacccatatcgcgccaagactacttcaagccatatgtggatttcatgaggactgacgttataatattaatacatcgcaaccgtccaacggtctccc

SEQ ID NO: 6547 - DNA, 605 bp, Emericella nidulans
agtcgcctacaacacgttcgctctccgcaagtggctaagtcgccaactgtcctcgtcacatccaccagccttcgctcaactgtttgctgaatttgacagcctgttgcttcttgccaaaggcggaaagatggtctatttcggtgacattggcgacaacggttcgaccgtcaaggaatactttgcccgtcacggtgccccctgccctcccaacgccaatccggccgaacacatgattgacgtcgtgtctggatccctgtcacaagggcgcgactggcacgaggtttggaaagcttctccagagcataccaacgcgcagaaggaactagaccgaatcatcagcgaagcagcgtccaaaccacctggaaccgtagatgacggccacgagttcgccatgcccctctggcaacaaacggtgattgtcacaaagcgcacttgtcttgccgtttaccggaacaccgactatgtcaacaacaagctcgccctccacatcggatccgccctcttcaatggcttctctttctggaaaatgggtgcatccgtcggtgaactccagctcaaactattcgcccttttcaacttcatatttgtcgcgccaggtgccattc

SEQ ID NO: 6548 - DNA, 711 bp, Emericella nidulans
  unsure (1)..(711): unsure at all n locations
tcaaccttccttatgcctttcgttcttagaagtatgactgctgatgagttctctgtctaggcgatatatccttcagtcgctttcagtagacttcgtctttacgtcataactaggttggagcatcatttgtgaggcgggtatcatattgttatggagggcggcggatcacaatgatgaacagttgattctacacaaaaagaggcaatcaacgagatgacaacgtcatctaggagttagtaaagtgaatattctccattagagataatagcttgataccaagggcatggtccaatgcttcatttagttgtccctgcaaaggttacagcaatacgtcagtcacgtgcacgcacgcctgtttgttgttcttcactatcaaccatttctactatttcatcacctgcttcactcaaatatatcctcagatttcacttggatttcaatactagctgtgctttctggctcttggtcaagttattgctctagtgggagaattgtagctgccacttggcttaaaagccccgctctttctgttgccgtggatacggtcgcgcaactttcatgattcgcgaataacggcgggcactccatcttgagggcttttcttccccctaatttggcgaaaataattgcatttaactctggttttgcacatttgtctatcgngatccatccaaaagcggcttccgaccggntgttcaagcgtttgggctc

SEQ ID NO: 6549 - DNA, 727 bp, Emericella nidulans
gatacgctctcttatataagtcatcatcttcacttgctttaatcattgcatgcacagagttttcgagatgatactcatatgctttgtaattcaagtgctggtattaccgtatgaaaatgtcttgaactggaaaactaaattccgctaaccaatcataggacgcctagatccagaatgtcagccactatcccggatctggtaagaggctcctcaccccacagtccttagtcacgggctctgaataacctgccgagatttccacgagttgcgaatcccgtcgccgctcgtattttagtgacaccatcccctcgctggttctgtccgattcagtactttgtccactattctcaattgcttgtccacttcctcatatcgaatcaaccgatattcctgctcaatggaggcccttctccagcagtctcgggccatgtgtccgtttctcaagcgcagctcaccgaacacccttcgttcgttggctaccgctacccgtcccagcaccagccctggcggtggtactatgaccaatttgcagagaatcgctcgccgctgcccggtcatgagcaaggcgctcgctgtccagagtgcccgcatgactggcaccaagcgatttacttcctctgcggctggtgtacctggcgctggagctggtacccccaagcccacccgggttcgtcgggaagagggcgctgactcgactgaggaaacggcgccattgagcatgagttta

SEQ ID NO: 6550 - DNA, 713 bp, Emericella nidulans
  unsure (1)..(713): unsure at all n locations
ccccccacccaccacacacacacacaacacaaagaaaaaccaacaaaacaaacgaacaaacccacccaacacccacacaccgaatacacgctaaaaacancnncccccccgacggcgcgcgantaataaaaacaacccagggaccaggaaagcccaaaggggacgccgacgagacgcaccaattactgggcgacacggccgcggccgccgcaggggactctaacgaaaaacgcagggacccaacaaaaacgagaacgcnacggcacgacgccggaaccacccaccacaaacaaggcaacaaccacccgacccaggaaagggaaccgcaccccagaaacgaagagaagagacagacgcggagaaacgggaggaacccgcccgaagagacgaagagcccacaagcgcacaaagaggaaggaacaaaaaccggccgcaccagaacaccaaaagacacagccaacccaggcagagccacaggcaagccccgcgcagcgcaccggacaaagaaagaccgcacaacccacaaaacacacgacgaccagggcacccaagcaccaaggaacaccacaaaaagagggccaacacaccaccaagaaccccacccaaagaacccccggcaaacaaacccgggaaaagaaacaaaccgcgccgaacacccaaacaagcacacacccatcaggcagaaaaagccccaaacacaacgcccccccagg

SEQ ID NO: 6551 - DNA, 820 bp, Emericella nidulans
  unsure (1)..(820): unsure at all n locations
acagtacctagcaagaagacggacgtagtcctgtccttgctgcgaatctgcggggtgttcccagtccacttactcacaaaaattagcacagcgcgtgatccgagggggaaaacgcaccgtcaataccgtcaaggccgaattcgtctactagtcgctttgcggactgcgcaaacgtttctgtacaagacttgctccgagccactgcagcaaaattctcacttcccttgccaccccctcctattgagagtataagtttcaacttggaatactgcggtttcagctgcgcgaatgcccgaagacaaccagttgtgccgtcgacgggcatctgcgtgtctgcccactcatcactcaactgatatcgaccttggtcagcacgccctgtgtcgaccgtatcctcaattaaaggagtgggagatatacatagaccgtgccgtcttctttgaccctaaatgagacaaataaggttggttaacaatctgatttctactgcggattcggcatccgcaagtgatgcatggctagtatataccaggcaaaagcgtaaaagatatgggagatgaatcccaatctgagcgatgaaggaggttgctttcgatatatgcgccaagtcggatagtatgctgcattcaagagaaagggatctcccaggagctgccactgaagcgttctgctgctttaccgcgccagtggngaaaatagagcccgaaaacatgaatattgtgcagacccgagccttttgggtccgtgttattgagacaattaaaaaaaatttgctagtcagttgcaccaacaagaagggagaaaatggatgtggtgaagc

SEQ ID NO: 6552 - DNA, 652 bp, Emericella nidulans
cgataatacaactaatatatgggatctaatttttgggtttaattggccctttatatagcgcattgaggcgttgggtccgattcggctattgagtattctctgcgcgatccaggtacaggcagtcagtcttatggtctgccatcatgaacccgacggacacgacatggcatggtgtacagtacaggcgctggaataatggacgtcctatctataccatagagtgaatgatttgcatttccaacatatttcttccaccttcttcacaaagccgcaggtaacgccttcttcacaaaaatggcctctgcagttgtacacactactccgttcctatctctcacaatcccttcaataaacaccttcctcccctcaaccttctccacccttgccgacgcaacaacgacggtcccgctctcatcctcaggtatgagaacgggccttttatatcccagactcaacctcgccgtaaacattcccaagccctcatccaatttcgcagccgcaaccaggttcccgcatacttcgtccataaccgttgccaggaacccaccgtgcgcgattcctgtttgccccgtgatgccacggccaacacgtaaaaaaagatggccttctatctttgcttctgcctctgagacttgggtctgttttgtttttg

SEQ ID NO: 6553 - DNA, 596 bp, Emericella nidulans
  unsure (1)..(596): unsure at all n locations
ctccgtccaaggagccttgtatctaccatgtctcttgtttataccgtcctgtcttttccatcccaactaggtaatcttcagcttctcgtcgactgaacggctgtgtcccggcatcgtttccgtactggaacgcctctgtcaaggtctcccggacagcctggggcatccgtccagaggagccgcaaacgaacacagcacctcccttgtcatgcaggagattaaagaccaggcttgagttctcccgaataacatcctggacatagaccttttgcttctggtctcgcgaaaacgccgtcaggactttgagtttgattaagtcgctcagttgctgccattcgtcttcgaagaagaagtccgcggctcgattccgaccgccgtacacgagaatcgtgggctcgattggcggatctacgccggggtttttctctagataggacttgacgatcgcggctntttcccatagcatggatcgntaaggcgcaacacctgtgcccggtcctatcaacatcgtagggccgactagttggccgacngacgagtngagggccgcctcgtgcagctggaatcatggtgtgcttactggtcgagatggaaat

SEQ ID NO: 6554 - DNA, 533 bp, Emericella nidulans
gtgatgtcttggcggcgatcgcggccgggttctggttgaggagcaaggatgatcactagcgatggttttttgccgggaggcgcagtaccaaggtgctcgggctcggttgccagagttggacatagccgggcgatcctcacttgaaatgagcagacacgtctgcttccatgtagtcgctgtactgcttgacccaatggaccctgtctatgatacggagtgactcaaactgaaccagaaacggatatcggtttcatgtatgtggtggaactcactagttcgagacagagtatggtgggctgaggccatggacactgtaggagggggaagactgacgtacagccggcgccatgctgcaacacggccgtaacgaagcgaccatgaggctgtgctcaacatctagagtcagcacgatgggctggtggatggtgctttcgcgaagaacagggacagctcaagctgacgtagtccatgtatatacaaagcaggggcatgcgcgatgatctggtgccattgcagagtcagacatgagctgc

SEQ ID NO: 6555 - DNA, 1196 bp, Emericella nidulans
gtacaaggtgttcgcactgacagccgagggtgacagccgggcttccaagatccgctgtaacggccaggttctttgttcgaatgtaagtcgccgtgacatgagatcacagcagccgtggtaaccgccgtagtgcatcagtcacggtgacgaatgccgatatcagcccagtcgacgaggtggtgctcgacggggcccagcggccgctgaaaaactggccaagaaggaaacccaacggtgtgcagctaaacccgctgtggataatcttgagaaagagcctgcgcctcacggcgagctctaccatcggcatacgcagggcagtacctccactctcaacactccgctaccaatatccccagccgaatcgggactccggccgtccagcatattaagggaggattgcggttgtaccacccctaagtaggaatacctaatagtgcgcttatagtcttatacagacctactgcagattagctacattgctggcttatgacacgattgtacgacaccaataaacggggtgagacgaaactctgacaccgtatgcatgaaaaaggtattgcgaaattagactagagatgtaataacagtcacgcattatgacgaaataccttcataacgaagcatattttaaggagataacaatgaggcatgataaccggctactgttaagaacggtacacacatcaatactgctcaggtgtcgatcagtgttagacgaggataaccatataatactgaaactgttacaaatagggaagatatgcgtttccataatatcaggatcatgattatgtctgacaaagtcatgcatcaacgatcaacgtcctatgacactgcattctatgaactatgcatacgaaagatcacaaactcaagaagtacctttactataaatcgcacactgataaatataatcaatgaaaacgtatatgcatcatctacaacgtatgtacaacagaatcactctctaggatcaatactctacatctagagactatcatgacacataaacattacgtaggagtatgaatgagtaataatgaacaaggccgtatatatatagatacatcgaacctgcacaataataacggatctcaatcgctgatgattgcttcacgatgaggatgttgattataactaacgatgaagtatcgacaaacataacgatggctcacgatttacatctgcatagtgta

SEQ ID NO: 6556 - DNA, 686 bp, Emericella nidulans
  unsure (1)..(686): unsure at all n locations
acacacctcacaccaacaccaccaacaagcacaaaaaaaccacaccaccgaaaaacaccnacntanntcccccaggagcgcccgacatatcanccaacccacggaggcaccagacccccaaactacaccaacaaccaacgcccccattatcagcacagcgccccaaccaaacaacggggacacgacagacacgggggcggcacacaacccgcaccacaaaccaaccacacccggagacgaccaaaccccagacaacaacccacagatgacacggcagcacaacccgcaccgggccgagggcgagaacaccaaggacagacgccccaacagaacaacgcgacaaacagcgcaccgacaacagccccgaggacaataaaccacaaaacaacgaacgggccaggaccaacggacggcggcccaaaagcggacacgacaccccagacagaccccaaaacccagggccgcgaaggacgggacgccacaagcccccaacagacaccgacaggccgaccgcccgaacgaaaccaactcgaccccagaagcacaaggaagggcaggccccaaaaaaccggccaagaacaaccccagccggcaccgcccgccacagacggaggcaaaccgacaacaggccgcccggaaaggaggccaaagcacaaagccccaggcaaccaaggccacgaagagac

SEQ ID NO: 6557 - DNA, 1004 bp, Emericella nidulans
aagattttggttactgtcctcgctccgtacagttcggcttcgaggaagccgttcttaattgactggccttttatttcggcctcttcattcccgaggagatcccctgcctgcccgccggatgggagacggagtggcgcgatctgagttttgaggaactcgcattcaacatcatgtccctctacatctcaccctccgaaataccctctgaagatctcagggatatcattaagcgctcgtactcgaccttccgccaccccgagcgtacacccattgtcgagcttgacgcaaagcagaacctttaccttttagaactgttccacggccctacattcgctttcaaggatgttgcgctttaatttctcggaaacttgttcgagtactttctcgtacgcaagaataaggggaaggagggcaaagacaggcattatctcactgtataactacctttcgccgtccatatgttagtgctgaccttttactagattgtcggcgctacatcaggagataccggaagcgcagctatttactgtgttcgagggaagaaagacgtttctatcttcatgatgttccctaccggaaaggtgtcgcccatccagcaggcccagatgactactcgtcttgacgccaacgtacataaccttactgttgagggatcatttgatgaacgccaggatatcgtcaaggctttttttgccgatcctgatatcaactccacccacaacctttgccgcgttggtattcctttcctggacatatctatacctcgctaattgccccaaagcgtcaacagtattaattggcagcttgtcaaggcaccagtgaccttccaccttctacttctacttcttttttgtaaaaacacccgctttcgatgaattcaaagttcccttttgtctaccctttttggcacatatggggcattccaatcggtaggacccttaaacaaatgggcttcccaccgtaaactcttattgtttcacacgatatcgactacttgacgtttt

SEQ ID NO: 6558 - DNA, 871 bp, Emericella nidulans
gacttggttgagcttgattcgtccaatttcctgaccacaaccataacgccagacccccgagtcccgaacaaaggaaaatacagaaagagttaacaccgaaatatgctcttggatgtatgacgggcacaatcaagaattcaggtcccaggccatctgcccaggcagcagttaaggatatactgcagtccggtgttccgcgtcaaacagccagatgtattatacaagttgcaaagcaggaaatatatcagattgtcgccagttccaatcgatgtccgcggcgtgaaatccagaacctttcatcatagggagttcggtaaaacttcgtccccgggaaatgggccagatgacagcagagaaccgccgaaaggaagtcaaggatatgcttcagataaaccgcccgcctgctctaattttacccaaggaaagacgtcaaaataatgatttagggaaaagtcggctgccgtctcaccatgctcttggctatggcgattgaatgaaagatagcggtcgtgaagctgccgagcacgcgtcttggtgaaatacaggagaggatggcccggttgatgggggtgttcggctgaggaatgattggccataataagactgagacgttttcgccagcgatgtgttgaaccgagcagagtctgggctggatcacaacctatcgaccctgcagctagcagatgagttcgtttatatagtaccgaccagtgtgagctcatgtcaactttgaagcaaatgtgccgagcattaatgtgtcagcgtgacttttttcaagtttttttttaaacaaatctgtttggtcgtgtgtggacacacaactgttgttcgctgaagaatgatgtgcccaaaatccaaagctggaaaaaaa

SEQ ID NO: 6559 - DNA, 720 bp, Emericella nidulans
  unsure (1)..(720): unsure at all n locations
ccccccccaccaccaaaccgacaaccaagcacacccacaaaacaccncaaaacaaggcaccacacacagaccagccacaccgcgcccaaaacagcttaatacctccctcacccagcgacgcgccctngacacggaaacacaggaggcgcgcgacccganccacaacaacaaactaaaccccccttattcgccaccgagacacccagacacagaggggggcccaacgaaacaacagggcgggccaaaacaacagaacgcgccgacgcagagaagccgggggccccgcccaagaaacagcgaaacaacgacaggcaccactaaccagagacaaaaggaccccgaggcgaaacccaccccgcaaagcacaacccccccgggcgaaaaccacaagagcgcgagccaaggaaggaggaaacccagcccctacgccaaccaaagccacccccaaacccacccggcacaaccggcagaaagcaaagggcccaaccaaaaccccaacgacggcccccccgggcaccaacccaacgcaaaggagaccaaaaccccaccaccgaccgacccaacagcaaaaacaaagccccccccccaccacaacaaacagccccggacatgcaacccaacccccccaaaaagggcccccccaaccccagacggcggcacgccccccaaacaagaaccaagggaccgaccccacccacaacgccgacacaaacccccaca

SEQ ID NO: 6560 - DNA, 1071 bp, Emericella nidulans
  unsure (1)..(1071): unsure at all n locations
gagataaaattacgaagaagagagaatagaatgaaagaagagaagaaaagatatgaaatataggaagtagaaagaaatacaatgagatgaagggaaaaggaagtgggagggaggaagacggaaagatgaagaaggacggaggagaggagaggagggttatgaaaaaatatacggagaaaagagttatgggaaaagataaaagtggaaaagcaggtataattaaagttgacataagaaatgtgggtgaaaagatatatggagagcgaaaacgttatggttggaaaaggtagcgttaactaacgagcacaaagtgaataaagggcctttttgagccaagcaaccattttccaatggggaaacaccaatagcaaatgcggcgatcggcattcaacttcagaggccaaaggccccaactacttaggccgccgtgccagtattccggccaatgcacaaaccacctttctgtcacgttcggagcctctcaaacttctacaagatgtctaaactctccccaagcctaaaggcgctgatcaattcgcccaccgcccgtccaaacaccgtccccgcgccgcgcaatatcaggtccgtctacgccaagatccagcaaaccgcgcaggaaaagaatgtctcgaggaattcatggattgctctatcagtgcgcttcgcccacccagatatggacagtactgtctagatgataatacttggtgactaatttatcgtggtgaagacagcagctaccatgacgatgaactctgccgcctgcctaaccgccctatacgaaaccgcaacatgctgagaaccaagcgaactcacacacattgagaccggggaacttatgccccaaagtgggcctgaagtgcataagctttaacggtatccctggaacaattaactgcctcaatgccttcaaagcgtctctacccgagtcgatcgccttggcgctgtcaaaggaaccaaccncgaccccctgaccgagaatatcacggagatctcaacacgcgggaggatctttggactctatttaccgcccttcgagtaaaacttacgcaaactagcagancacacccg

SEQ ID NO: 6561 - DNA, 926 bp, Emericella nidulans
tgtgtctcagcgtcctacatccccccctccccacactcaaggtttcgatatctgctacttgtggttcgggagcggggggtctgataacaggccgagcctatccaggggaaggcgaaccgccgagtcctcaagagtacagagtacaaagtagcctccttcaaacgccgaaatagagttttatgactgtcaatcaacgtctacggatatattagcccttattttgaaaatacacctgactactccatagtttccccttaacttcagtcataccatgggtcatggaatttagattgtgtgttctacgccgatcattggtaaaagtagccccgagcccgaagcgtcagcttgaatgcaagagttctattttggacctcgtcattctatggattttggataattaagcagacatacgaggtactttcgatgcatggaagtattccagagtactacccacattttgacagcaagcaccgaaggctggctctgcagtatgcccacgcctcactctgcagcctgcgctgctgttctagtcgcgaacaaagcacacgacgactgtctggatactcagtacgccttaatccagacggtctccagacgatagcgtcggatctaatcagcgtagtcaattatctaccggggttgagctggccttctcgcatcttcggcccagtcgcgctgcaatttccaatcaaagtaccaccaaagtacgaacttctctacggtatgggatgatagctttgactgaaaccgaatcggggagtcgctgcatacctccctgctagcatgactctatgccgaagccttgtcttctctggcaacaccgccgataaaactaccactcatccttctctgtgcccggcgccctcccctctattttcccatctttgtcaaccccccctccctggcctgtctccgtactctcctcc

SEQ ID NO: 6562 - DNA, 1562 bp, Emericella nidulans
  unsure (1)..(1562): unsure at all n locations
gagagataagtatgtgggaagagagagggtgtgagtcagagaggaggtgaaaaggtagattgagtagaggagaggggttgaataaggtgtgaatgaatagcagaaggcaggaatagaggatggtgtggagagagatggatgtagggagataaggagaaggtggagattaggagcgtataagaaagtaggagtagaagaaagaagagaatgggaatgtagataagaatgtagagttgtggaatgaggtaggggatagtaatttgtagagtggaaggaggtatgttagggatgggcaaagtgggataatgggagaagtgtgattgtagtggggaagggaaagatagtggggagaatagagagaaaatgtaattaagaggaagatggtgatggaaggtaataatggaaatagaatagatgattgtgtgatgataaggacaatagtagaagtagtggcaaatgagtgaaggggatattaaagtagatataaagataaaaaagggagattgagttagtatgaatgagagagggagaaagtgggtgactgaatatgaagtggaatgaaagggaaatgatatggaaatagagagatggtggctggttagaatatattgaaataggggaagaaagagagtacagtgtgcagcaggagcgtaagagacacgatttaggttagactcacatggcggacgagcagggcgtccatcttatagaactcgagaccgagacatctaactcaggcgactatcttccaacgagcgtaccgcgaagcgcaaggtgagtcttcagttgatccatctggtggtgggaatgatgattatcctcctcgttaagccgaagagacatgaatcatctgaacctgcgccgcctccttcccaaccagaaaatctaccgcctggcctacggccgcgaggttttgaaatagcatataggcgtccaaggtcaccttcattgacgcgagttgcaagcagcgagtgggttgatcctgatatatatcgataattatttgttttctagagataccatgaataatagccctgagaatatcactcttaatcgatgaaccgagctgggacgctttttgtgcttagcactgccgctcgtacattctggaattcactatctatggctagccaccctcgcgtgacaaaggggcaatggaaaatacaaggtcaaaagcaggccgcatcgttgccccgtagcttcagttaatttcacgatatcagcatatgctaaaagctaagctcgaatcaaaaatcataatgatatcaagttcgagagacgacgctgtgataaggcaagcagagaaggaattacagggttccataaagcggcgcttgacctgaatatgatattgatgaggggcctgtccccctgccaaaaatgcgttgtaagagacgaacactgagatagctcaactctgagagtggccctcctggttcagtagctccgctacatccgcatccagatcaccacctgcgaacttggcatagtcctcttcactgtgagtcacttttctcttcttagcttgaaatncgttcatgctttcctgctggagtcaccat

SEQ ID NO: 6563 - DNA, 422 bp, Emericella nidulans
cagaacattcgaactactcacattccgctttagatgtgccttttgcactgctcgattgcaaaccttgtctccgcccagacacggtcggggcaggtcacatatagacaacatggtacgactgcctagtcgatattgcttatccttgttctcgaacctcgactaacgttctcccctcgtattatgtttgacacttgggattttctcgagataatagactgaaacgcaaagctgagactagcgagctcctgtttctttcctgtttatttctcagaatcatggcacaataataccggcaataagagcgacacaattatagtggctttacatgtcgatgaaagacgcacattcaatacactcatgccataccacagttacgtacaacgaagtgctctgctagcgcagtgtcgcgatagtaaggaaat

SEQ ID NO: 6564 - DNA, 718 bp, Emericella nidulans
gaaagacacctggaagggggtcacacaaaaagctgagggcccctaaaagtaaaaaaagctaaacacataccactggactgctctcaaaagaagggggcttttagcccagcaaaaggccttaactagtgccggccaggcttcctgcctgagcgtgagcactgacatattcttctctccctcatgatgcaaggttctgttcattccttctgacgatcgcactcaaataggtgctccagccattggtccagccccacagtctccacgaaggcccgacacacgttgtggggagtgccaaccctgaagtccaagccgaagcatgcaatttcagttccagaaaggcgaatcgcaaagtcccagctcttgagtttctttacattcatccggacacatcttgtgcccccgtatctggactgggtatcatctacccagccagtgcacaagacagaggttgaagagacaggcgtgaagaagatccctccgcacccgcttccttctgttctacttggatctgtgcatgagcttgttataggcctgattgttgagcttgccgcctaagaaaagagattgcgcatccaccgcggccagaaacgtcttttatgccaagtactgcttcccctccagctccttcgagcatgaagatgtctacaccaagcagctagaggagttaaaatacaccttcacggactcgatagggaggtacggaatcactgaaaagcac

SEQ ID NO: 6565 - DNA, 1262 bp, Emericella nidulans
aaaaaaaaacataaaagtaataataggacaaactaataaataaaattatgaaataagaaaaataatacgtaaagaaaaaataacaatcgactagaggaaaatacagtaaaaatattgaaggaaaagatatagaggattattaaaatagtaataattagaataaacctaaaagaaggaagaagagggcaccaacaacctaaacaaacattaaaacagtacgaataaaaaaataaaaagagagttaacataaaatattaaaaatttgtaattaataaaggagcccaatttgaaagatacaagaatatgttagtaaaccaccccgtgaataggtaagaagcaagacgccgtaatacctataaatatcggaacccaaataagaaaaaccggtactcttcccagaacacgtatctccgagtaggaaattcttatcaaggctggaacaatctcacagcggctccgtgacgaagcccttgtattgactgcgaacgcggggtgaatgcaggcttctatttgcgaacttttgttaaagtacaaggcgtctccggataatgccaccggcacacccatatgccgagctattaaatcatctaattataaggtcgatctgacgagaatcattctgctgtacaacgttagtgaagatactgtcgcggcagcattaacgtgcgctttcgacgcattgcatgctgaagcacgcattactaccatggagcttctgcttacagcccacaagccgcaacaaactcttgaccaacttcttctcagggccgtaagtatgccaccactctctccgaacgaaactgacgtgaaaaggtccgtgccccatattgcgacggtaaactggtccagtctttgctcaaagccggtgcttcggtcttctaccaaggcggcgaatgcattctccactcggtcatgaacaatgatgtagacaccctgcgcatcctcgaaccctacttacacggacactcaggcatgacagagatattcatgacggtatggggtaacgggaagcgagcaaactcccagcaggagaaagatgttctttcaatattgcttgctgcaggtgctttaagagaacccgtcagcatggcgctactggagagcgttagaaccgtttcatccacagaggtcggattttcgttcatcgtcaatctactcagagctggcgcggatgtgaattacgactagggggcatgtcttgtggaggcattgatgccaggcaacactcgtctggttaggaggtcctacctacggaccaaacc

SEQ ID NO: 6566 - DNA, 854 bp, Emericella nidulans
  unsure (1)..(854): unsure at all n locations
gtgatgaccgtcgatgcactggacggagagacactgagggatgacgtccgcggtctgtttgctgaagcgtttcgctgaaatattacggggggggaattacgcaatcacgcgccttatcgacttccttggcgcggaactcgacaaacgccgcgtgaacttcctggtcgacagtccgacccatgtccacgagtaaaggggcgaaaaaatcgatgatgaaagagtttgacacaaagtactagtttgaatacaggatgaaaacgcgcctagaggtgggagatgagacggagacgagggcgcaggataggaggcagacacgctggaacgggggaaggaaagaaagacggaacggcgacaagacggacgaaacggacaaaacagtagcggccggttaacttacgcgagtcttaccgccgcccacactcaccttcaccaacctacttctacacctacaacgtatacaatagcattttctgttcataatactgtagtatcacttatttctgtataaaaattggctttgattattgcgcactttcgcagtgcagttgatgaaggtcagcttgagcgcctaattaacggaatcctgactcgcgactgagatcaaaacctctcaccgtggccgtcccatcccacccattcgctgctattctaggacacgccaatagaaggcatccagggataaggagggattagtcctctgcttattgactttcacagctcgagaatgacagagtgcctaagctcacttctatgcactgctttcttcagaagatatagttcttcatcgggtaataccctacataccgggatgggtgacgagtactcgtacaaancggacattaccctgatttacg

SEQ ID NO: 6567 - DNA, 525 bp, Emericella nidulans
ctcctcgaatgtggtgagtaagttccgctttgcggtgggctgttgctgtagtcatgcgctggtgacaaggaagatggtgagcacgagggtgagggggatgctgacagtgcaaagggacgctttagggctggacggtgttgggattgcgcgaagaatggggtgatttgagcttgacgttggccgtggagcatcatcgtggtatgcatgggtatttatctgtctttgtccttggagttttgcgcttcccttgtacaccatcaggattgacttgacttgcccttggtaagccggctttgctatagctagagatcctgatttggtgatatgttaggatatggtgggatagaaacggcactactacaactgattgtcaaacttagaaatggaagacaacatgctgctttgatgggggaagaaaaaagaaatcatgatgtttgtaattgggaaggtaaagagagtcacaactgtgttttggccttttttgggtaggtaaggttcttgatagggatgagcaattgaatttcc

SEQ ID NO: 6568 - DNA, 593 bp, Emericella nidulans
cgataatacgactcactatagggatcccccaatgcaacaatggctcctcattatccactcctgggctgacggatgacatgacccctgcttctttccaatcccgcagcgaagctattacccctgcaacaaccgagcagccatcatcgtttcaatcttctgccctgtcccccagctttgacaagctatccttcccctcctccccccaagatgcttcgttcgatgactccctccgacgcgacagtcatgcgaagtctgaggtcagcgactcgttcagtcgaggcgtcactagcaacgcaagcagcttcacttacaacaacctccgggactcggaaatgagcggtgtgtcccagacctctaccagggcgacgtcgcctgacattggaatggccccgtctctcaagaacagtgtcagttactcaactctagccgaggagaacgaggagacagaagccaacgttctggagaagacatatgctcatgaactgatcttcaaggatgaaacgtgatgggtggtagtcttcgggccttgggtgagaaattgacggcccaccagtcgacgcccgacgcgatgttcgtcttgacattctacctga

SEQ ID NO: 6569 - DNA, 606 bp, Emericella nidulans
agcacgttacgttacggcccttgctttattccgccagattgctcccgcccttcctgttcttgccaagctcatttacatgcttgatgacgaggtcctcattgatgcatgctgggctatctcgtacctttccgatggtcccaatgagaagatccaagccgtcatcgaagccggcattccccgtcgccttgtagagctcttgatgcacgcctccacctctgttcagacccccgcccttcgttccgttggcaacatcgtcactggtgatgatgttcagacacaggttatcatcaattgcggggctcttcctgctcttctctccctccttagctcaacaaaagatggtatcaggaaagaagcttgttggaccattttcaacatcactgccggtaactccagtcagattcaatctgttatcgatgctggtatcatccccccgcttgtgcatctccttgccaacggtgactttaagactcgcagggaagcttgctgggctatatccaatgccacaatccggggggttgagaagcccgaccagacccgcttcccttgtactcaggggggattaagcctttctgtggccttctagcgggccctgataacaagatc

SEQ ID NO: 6570 - DNA, 714 bp, Emericella nidulans
ggtctacgtgttttctcatgctggacgacatatgccggtttccatggtccacaaggagcaaacgcagggccccaattccagccaaaatcggactgttgcttgcgcataagccagcggttgggcagctgagcagtcagttggacaggccatacgggtgtcttcgggtctgccgcaattgcgtctacagtgttaggggcgcttgcaaaatcgatccggaccacggggcctcctgtacactccttcagggctgaggaaacgtcaaaggcatactgtcggaactggttgttggtagaggcgatattgtggccgcagaaggtgacagtagcgaatgtgtccaagccttcgaacaccagccaagtagactcatattcttcaagcctgataaatgttagattggccgatcggtaacgagacggttccttacagatcaggaataggatcacttgtatatgtccagttcgcctgggcaatccattggagatcgatctcattcaaaccataatagctgggcaatttcagcaactaattattcagtaacgttaaaacctacggatcgtctttttggtcagtgagacagaaaaattgacaagacgaacaagcttaccaattacgcctgcattgagcaagtccagatgcgcttgggaaggcagagaaagccgcactgtgctattgagggccgaactagaaagagtccatttcacgtcactcagactg

SEQ ID NO: 6571 - DNA, 606 bp, Emericella nidulans
  unsure (1)..(606): unsure at all n locations
tccgacaagaaccgaggaggacgaacaccgacgacaccagaccacagccaagcagcttacgtcaagacaagcccgaccaccagacacgcgggccacgagcagcccgcaggaccccgccaggaagaaagaaacanacaacgccaacgaagaagcccacgaaagcccaacaaaaacaacgacgcaaacacgacgcaccccgccccgacaccggccaccgccaaggacaaccaccagacgccgaagcccaacgcccgagacacagccaaaggccggaccgcacgacggccaccgaccgaagacaaccgcaccagcaaacacagcacaagcacacggacccggcggagaacgaacacagacacggagcacgcacagggacaaaagaccaaacaggcccgaaaaaggggccaaacacgagcagaaccaagggcccagacgcaaaacaacaccaggggccgaagccccccccaaggaggcacaagcccgaacccgaaaaaccccgagacccccccaaaagcccaagcaccaaggcaggcccaacacaaaccaacggaagacccccaagaccgggaaaagccccccaccacggagccaaaccccacggagccc

SEQ ID NO: 6572 - DNA, 833 bp, Emericella nidulans
  unsure (1)..(833): unsure at all n locations
aattaaccctcactaaagggatccagtcccatttcctcaacaatacgcataggttgcaaaatggagagggggaagcttaaggggaggggttctaggctctggcctaggccgttaagccggttctccaccaaagccggcctggaggtttgcctgttggccagggggggatgaggacaggcttcggtggtgaccgtagggaccaaggtccgccccatatggtccttggccctcattcaaggtccagccggtttcaccttttgggtttgaagcccatggccagtgcggcggccaaggtagaaccagggaggaagggtagtcctgccttttatcccttgggggggtcttgggaatgggcccctttccccaatagaactcgaggtttctccatgagaccgcagacgccgccggggtagggtaccctgcccctgatcatggcccgtctggcagcaaaaaattgtggtccgaacattcggcgcacgcgacgggtgggttcttagaagaataggggcggagggggcccgtgcaggccttgcaggtgctgtctcgaaaccattccttcttgtcatagggggaatccgtaaggatcgttcaccggttccaattttttttggcaaagagccatgttggtttgaccccctttttcttttgttcccttggatccttttccggtcacggcggctggcgggnntcagccgacaggaatcaccccttctctttttatcttcgcgttgtccttgacttttttatatagcccgttcccgatttccttggtttgtcttnagtctcctcctctctaccctnctatnttccgtattttcttattgtcttcttat

SEQ ID NO: 6573 - DNA, 1637 bp, Emericella nidulans
agaggtagaagaaaagaagaagtaatgagaaacatgagagaagaatggaagaatacgtaaagaaagacaacggggaattggttaaagaacaaaccggcacgcaggcaagtgttcagaagggtgtgccaaacaatataataaccaaggttgagatcatgctagaaacgagggaccgttctatagagaaccggtttggatattttaagcgacgtgaaagggtttgaaaaaaatgagaaagaggaaaattggtcccgataataaacggccgtcaaaaccggtccaacgctaaacatatagggtgtagttgttaaaataaaacggggtctacaaaactagcaatgtgaaaaaaaaacccaacagggtggggtaaaaggggggctcacagtggtatcagggccctgctcttaacaaagggtaccgcccgcccaagtctcaaaaaaaggttccaaaggtcaaggttgcacccaaatacttaatctcgcaatctgcgtgtgtgtgccgctcatttgatttttgagaaaacccggtaggaatccaagctccaaaatccagtcccagttcccagaccataatcactaatctcccagtcttcatctcgtaaagggtaacggcgaaaggtagcagccgcgcagcagccgggccccagtccgacctcaagtgacaggcgggggcggatctgcctggagttctttgttctcttattcttcgcctccttgtttgtctttcggagatttgttggtaccggcgcagctgtggttggcagaggtaagcctgggcagcactactggttgcctggaagagcgctactggcgattactggcaattcactggtccaagcctggctctgtagtcacaccaaaagccgaagctattctgtactggtgcaaggccattggccggtgacctcctgcagcgccgcatgcgggcagaacaaagaagggcaccagtgaacaatactactcctggtctgcggctgcttctagtgtcctggtcaccgtcactcgcgtccacaacgggtcgtatggagtattcccagcttgcacattgctaccctgcctccagagtgtctcccggacctctctaccaggcccaattcctggtcgtcccgctctcgatgttcagtttgcgtacaatcagaatgtctcattccctgtttggcgacttttctcgttaggcactctgggcgaggggaccaaccaacagcctaaaaacaaagaagcaattgatccagggtcggcgagaagagaggctaaagtcagggtttggctttaaatgacaaaagacttgagaaggccatcccagctggcccatagtttagtaaactgttgtccttcaacttaccccttaagaaccctaaaagaacccctattggttagggggctgccaaataaatatataatttatcataccatggattttgggcccttaagcacagatggaggtatcattctggccttttcaatcgggtttattttccttttattaaccctcccttgctgttgtttcttctgggtcttctgtgttgagttttaaaacttatttttggtggtttacttgtttaatatatatttggttaaaagattttaatataatgttccagtccttggtgtgaagatttttttctaaacctaactttt

SEQ ID NO: 6574 - DNA, 742 bp, Emericella nidulans
atcgggccgcaataaccctactaaagggatccctcggccacttgctctgcggaacctgcagcaatgttccaaaaaccgcaaattcatggtatactctccgccttctcgccctgtagctgaccaaaggccatctcataagcctggagccacctcacatacaaggtagccgcaacccaaagctggaggtccgggttttgcgcgtggtacttggtgtcgccttccccgcctttgacgcgagaatacatcgtgttcacccactctctgatgagcgatttctcttcctcacctccgtataccatcatgtacacgtagatgactattttctcggcgcggtcaggttggcgcgtggcgaattcgctgtggttgttgagaccgcgggcgacgccgggtgcgcaatctgcaagagtgcgccgaagcagccgaagccggtgatagactctttgagggtggactggatctttacgatctcttcatagtgatagaaaatgggttgctttcaaggtcgacctctgttgcggacgaggtgtatgctgggggcattttcaaactcgctttgatcgagtacgtgtttacgaatgtagagagaaaaaggaatattagtatttgggtcgtgtgaagctcatgcaagaggtaaccggacaagaaaatgctcgcgagtcatagccgaacactgatccttatatggatcaaaaggctcggaacgggacatgcgatgaatagcgggacccaaagcccttaaaaa

SEQ ID NO: 6575 - DNA, 708 bp, Emericella nidulans
catcttgtctaatgggcgaatttgccctaatttcctcgaactattcacacctctttggctttgtgcgcctaatagtcgagacagcaaggatttctctaacgctaaaaagcatatgggctctggtgcggcaggctttaaatttttattgcaaacaggtcaaacactccttgataacagcagcgggatgatttcatccaaatttgctgccaggactccggtccagctcaagctccgataatcttgcattccgcttacctattcgcgttttttggaatccaaatttcatctgctaaaccatcccacaatttcccgctttacagcgggctgtacagcatgtgacagtcagaatgtctggtatcttcggacgcaagctgtacaccaccttctggaaaacggcaagtccgttcctaggacgagggttgcgtgtgactcgcgctgaaaatctctcccatacggcatcccaaattgattctctctacaaatcaatccttaagcaatatgctaaaaagcttccaacggcgcctccccgcaagacgaaccagattacgcggcggtttgcatccggaagctgccttatcctcggtgtctcgcccagttccactgtagtagaaactggcacaacctgtgcggtcagctcggaaaagattatttcacatagggtatcttcgttcaacagatgggttccacacgttctctctcgcaatgtac

SEQ ID NO: 6576 - DNA, 559 bp, Emericella nidulans
acctcgttaccggatcctgggctccagtcagagaacaaggccgctggcggcatttattgccgaggcaaccacggtagtgtcttcaaatgtaataaagccagatggtttgtggatgatgtcagtctgtgtaagaaaaaacaaggtgagggctattggttacaggttatattgagcaactttcgccacgcttgcgtcgcggaccttgtgtagatgcctgaatgttgcgagcccatcgcgacggagtgcattcacgagggcttcccagtgaactggagggatatacacgtggattagtcgagcagggggtggcagcgggttgacgcggcttacggcagatggacatccagatcatgctccatggacgaagaaaggaagcaagatggcctggccttgggcttggtagcattgttgccactgaatgtagaaatagctttggaactgaaaaagacggaggagggtgccgttagtctcgtttgaatggatcgccagacattattttggtggttggcgagagaaaagaattaggatattgggggcattgatatcaatatatcctcac

SEQ ID NO: 6577 - DNA, 1081 bp, Emericella nidulans
atacaatcaagcagcaaacagatgtcgaaaagggaaaaagacggtgacaagtcgcggggacggtggaaagctttgtgatggatgaaaggcgctaagtggaatcctggctcttccaggtgccaggaccgcccacgggtaccactgatgtgagcgaggctgtggaggccccgattagactagattagaagcagacagcacgctcaaaggtaagtataagaataagcaaacttgaatacggcgggcggcaagtgaaggaaaggagagtaggaagaaagctccaagaaaacaggggtagtgaagctggcaaagttttagggcctgttacgatataggctgataaagaacagcgtctactgagccaggtatattgttcgcacctttacttctgcgtacatccatgatcggcttccaaccctcctctgaaccaaaaagttgtatctctggccctcgatctgtccactccagtgcttcgttctcctgtctaactagtggtccaagagccgcctcggtgggggagccgctagttcgagctcggttagcgccatagcagtgtgagtgcaggtctaaattcgagaagaccggcgcttaaccactacttcatcttgacaaaaacgcctggcactcgaagcgccagtatcacttccagcgtatctaaatatccaccaatcgcttaacatttacatagctcttttgccactttttttttttttctcttatggttgcggacgatcctccgcctttgctacaaaagtcttgccgcgcggtctggccaacatctcagggatctaacaacgcccaatcgacgaggcctatcggccaattgcaccatgacttcttcagtcctttcaaacccggactcctttgaggtgctgacggaaatggtcaatcagaccgtaagttgctcagacttttgctttccacttaagctggcaaagcaatgggacctatgccaacctttggtaatctttgtaatttgacagactgcccgtttttccaacaaaaggtaactaagtttgggccaattaacgaaccttcctgagggaaggacatttaaggctggttggaattttttaccatagaa

SEQ ID NO: 6578 - DNA, 651 bp, Emericella nidulans
  unsure (1)..(651): unsure at all n locations
gttaaggaggcatagagtaattgcgccgacagtatgttcgaatgggggcactagcgctgacagaggtactggaagattttctagaaccgggtcagagaatggtatatacactccctcacaagcagggctctctgaccagcccgtcaatatgctccacgtcgagctcttccacaatctctacactaaaacttacctcacctttgacccaggccggttcagccccggactgccaggcctcttctcgtactccatcacaacgccctacctcatcaacgagatgctcgcgctcagcgcactgcacatgagcacattacatcccgataagagggactactatcactatcacgcagcgcagctccagacccacgcactagccatcttcaaggactccaatcaccaggtgacgcaagagacatgcgttccgctcttcctcttcgcttcgatctggggatccacatgctctgcgacacctgatctacgagagaacaaaacgattcagcactttcctttcgcttaccactatctcgctaactattggcggcgcacaatctccggaggcatggttcctcttcgcgcgcgatncatcggaaccagcctggacgctgatgacccttacagtcgacgccactgatcaacctcagtactctgacg

SEQ ID NO: 6579 - DNA, 985 bp, Emericella nidulans
agtcagagaggaatcgctggtcgccagacctgaccactgcagtgtggacgcgagcatttcatgctgttcggtgaacccgtccattcggggtccaggggggatgcgctcctcagcgcggataaccgggtcactgtggaattcgtcggaaagaagatgcgcgccgcggcagacgatcagaccgccgtcgttggggccgtttgggaggaggttgacgagtccttggaggcagcgaaagtcgggcttgtcggggtcttggtcttggtgtggccaaggtttgtttggtggaaggtcagtgcggctggatgggcacctgttagcatagagtttggtggactgaggagctttagaggcatactttgggaagccaaagttgactgcgtcgaaggagacgatgaggtctttattattgtagactttctcaaaagcctcgacgacgccgggctcgctgcggacgtcccagacgaacttttcgtgggcaacgctgtagtgcatgcacatacctttctcgttgatgaggggaagacggtctttgtggaccgtagacgggtcatttcggtcgtagccaaggttgctgtttcgtcagttgtgttggtgaatgcgggtacgaggaggcgccttacaagccctccagccatgagtgcatctcgtcggcatatttgagagcccgttctctgggaatggctcctttcacaacggcgaaaccgtctcgtgcgagatcatcgcgaaagtctccaaacttagggtctctgccatccaggcgcatgcggacattgtccttggtaatggtgacagattcggtgactgtggcggtagacatgctggatatgtttaatggcggtcttcacagcaatacatcgacttgaagcgaagcatttgcgcagtttataccacaattgcaatgactggtaatacgtagtatagtcatctgggttgacgcccaccgcccacatttccgtaacgcccactcaccggaatgtggaggatg

SEQ ID NO: 6580 - DNA, 721 bp, Emericella nidulans
  unsure (1)..(721): unsure at all n locations
cacacacaaaaaccacacacacacaccaaacacccccacctaacaacaaaaaagaaaaacgaacaaaaacaccaaaataaaccaaaccacaccnccccccaaacgcgccgagactggaaangggaccccgggagccgccacacacaaggcccacaacagggggagaatttgtgtacaccgcagcagaaaacaacggaaccagggcgcagctaaaaacgaacccgactcaagcagaccacacagaacacccgaccaaagacccagcgggaccaccaaacagcgacaaaccgcacaaacaacaatccaacagaccacaaaacccccccaacaagcacggcaccaggaaccgcaagaacgccaaaacgcacaggcgcgggcaaggcccaccgcaccaaacaccaaccaaaaaaagcggcaaaaaggcaacagggcaaagacccaaacgacaaaaagacacgaacgacagccgcgacagacgaacaacctacacaacaaaggcaagggcaagaccaagcccaaacccaccaaaaatgaagaaaaaccacccaacacacaccgaaaaagaacgagagaagacccaaccaacaatggccgagaaaggaccacacccacaaggacaggccaccgccaaaaaaacacggcagatccacaaaaaccaccacggggcaacaaccccaacaaaaaaaaggggaaccaccaaccaaaaaacccaagacgggac

SEQ ID NO: 6581 - DNA, 387 bp, Emericella nidulans
ggcgcggtagatcaattcgacattgtctgatgcgagccatgaggactagattgggctttgcttactgctattctgaaatccgggcgctcgatgtattggtgcgctggactgtaactgggcaacgtcctcggaaggcatacacttgcgcgcgtacatctgccatgtatcctttttcagtgactcccatgatgtcattcaggtttgatccttacgacaatgattactgaacttcatatgcacgctgcgaacagaatactgaattgcggtgcctattgcagctaaagactgtccgtcgcgtaccagggctgactttaggagggcgcacgtcgagtgacatgatcccgttgacttgacattcttgcactgagcccagtctccgatctgctc

SEQ ID NO: 6582 - DNA, 835 bp, Emericella nidulans
tacgcgaaagaccatatcttgcaaccatcttgccatctaaatggtgccattttcacatctttaaagttttcaggcttcaaagaaatggaacaatgagcaggatgtcaggttgttcaagtgatgctttacctttccggaactgagactggtttcgagaaccagaaagcacctaggcggaagcacacaaaaggagatctgcaagataactccaaagagccttcgaagccttgaaaccagacttctccgaccgcgataaaccagtaaaggtctccgtgagtgagcgatgcctcacgaaatgggtcacagagtctgagaagctactgcaatcgaatctctatggaagcggcagcagcgaagctccaagacaagaccggccgtgtgaaacatcaagtggtgccaagtggttggagaaggaaaaaggttaccttgaggtggaagtcccaagaagtaggctttggaaagacagaaccgaaaccccggtctgaatatccccaaggccgaaaattccgagcaaaacgccaacgtccaaattgggtttacgggagaaaagactcttgtttccaagaatttttccttgggcttttttcccaattcccccagaagaggttaactttttagggtttggggggtttttttatagagacaccccctttttccccccccccttgtctcccctctttgagacttctttttgcgggcgcccgagaggcccctttgggtccccatcttttgactcttggggggggtggacttttttatgtacaacatttttggttttgggaagaaaaaccggctcaaaatatacaaacccctcgtgacttcttgggttgccaac

SEQ ID NO: 6583 - DNA, 595 bp, Emericella nidulans
ggtgtcttggcaagggggttggacagagggaataagctatagttccgatcataccttataagtgcttgccaaccgatgtgacacggtagttaacttctctcgcccatgtacatcccagttcttaggctaagcgttcccctaaggcacatcgtggtaactaccttgatcattcacgcgctgggagctatgtcaggctccaaacaatatgctgcgggcactctagcgccgcgcaatgttctctctgcagattcgcatgatatagccattggctgcatatcacactattccacatagtttcaggaggtacaagcctctaagaaataccaactcttcgtcttctccaactccctcttcgacgcaaaataccgatcataccggaacgaaccatacccaaaccgcacgttgatacagttctcgggcctctgcgtgtagactgggagcttatcgtgtcgtccattctggtagtatcagaacatcgacggcatgatgcaccctgtgaaatagtacaacgagcacgttgccaagatggcctcgcgctacgatgcagtcctccggtttgatgggtgcgcgccttcgttgtactcctcgctgacgc

SEQ ID NO: 6584 - DNA, 514 bp, Emericella nidulans
  unsure (1)..(514): unsure at all n locations
gcaattaactttactaaagggacccctactgcctaaatggttgcagattgtctgacgaagcctcngcatccgaagctcacccccagagcatccagacggggggcctccacagcgangaccgacacttccacgcaaccaggcccgcgggagacgacaaccacgcncgagggggggggccggggcanaccgcccaccggaaccgccagccccaaaggaccgaccacgacnagccancacaaagnaagccagnnacngagagaggcggaccagaccggccacccaanaagacaacganccancacnncccangaaagggctcnggcngcgcccaggccacggccggacccccccggacaacnagaaaaannaccaccncccgncagggcacggagaacaaccnggaaggagaccnnaccggaggcgacagggangancccccagcacaggaccgggcgcaagggccgaaccaaagccggcaaaaccgccggcaacccgaaggcaacncgccgggcca

SEQ ID NO: 6585 - DNA, 919 bp, Emericella nidulans
ttaaactcctatccaattctccccagtgttctagagcgcctgcgctctctccgcgccatccacgccggcgccgcgcaggccgcggaatcacttgacgaactggaaaagcgccaagctgatatggcaggggagattgagcaatggcaggaggggttgaaggttgttgaggagaagatgtctcagagtgaggcagcgctaaagagtaatatcgagcttgttgaaccgtgggtgagggatctagaaaagagaatggagaagttgtagagtgggaagtgactctcccaatatactgattgttttgttaatcaatattcccccttgttagcatacacaggattattcctcagctttagattttatccaattattttttgattgtttcacctctattattgctcttactatttatataatatctcttgttcccatctttttcttttcactctcttatctatcctttattttcattctctattttcctgattgatatcttttatcccttgttattataccttttattttcttaaatctttatttattctttttttctattttattcctttatttttttcaaggaatttctttatttattttttaataattttttttttcttaatcttcccactcctcttggttcttctttgtttcttcttctcacatattttaaatttttatttacctctattctgttatttgttatttatgatcacaaactttctctttctattctatttaaattctactctcttttctaatgtaaatctctgtcactatgatttatgtttttctatatttcttatcttattttaataatcatttttataatatattctttcttttctattaatttttctcatagttatttcttttcttcttcttcttgtaataatttctttttctctatttttcttatatctac

SEQ ID NO: 6586 - DNA, 546 bp, Emericella nidulans
acggtctaaatgtccaagtaagtgtggtggttttgaagatgtgttcacaaattctttgacacttctctcatccagtcccctctcttgaattctaggtagtttgtgactactgtgaccaataggccgcactgtgtggacttccatcactaggtcagaaaaagccacacagtttctgcctctctctcttgagacacttgcctttagagtcctgggtcaccatgtaaaaaatctgactgccctgaaggggccatgttgttaggaagctccggccacatggacaggtaggtgctctggccaacagccagcaccaaccaacaggcatgtgagtgaaaataccaccaatgattccattccccagttattgagtcacctcagctgctggatctccccagcagaggtctcagacatcatgaatcagagacaagtcatccccattatgccctgaccaaattcctaacctacagagtgagcgcaacaagatggtatttcacaggactaagttttggagtagttttttatgcagctttagtaacccggataatatgc

SEQ ID NO: 6587 - DNA, 951 bp, Emericella nidulans
ttgctgggctcgagcctggtcggccgtttcaatgattgctggtatatgctgtagattctttattgccggtgaaagcgaaggtaacatgtgggccttaatgcgaaacagagataggcgggcgactgctggagcagaccgttcctctcccatgactagtagtatgacttgcacaatatcgtggtagccttgaaaataacaaagcaggggatagttccgcagaacttgtttgattactcgagaaagctcattcttttttgacgacagttcgtcgtcggggcctgaaggcaagaaattaaccgcggtatgggcaagttcgtcaagagacactcacattcaggatagtaaacaaatgaacgtttcacgtctagttggacctgctcctcatcggggcggagtggtaggctacttccctttgacaggatataatctgtggccctcatagccagaagcaaaatggggccctagacgatggggttttaccatgatgaccgattaagtattgaggcgacattacaggccaagacggctgaagcttatttttgtagaaaggcccccttcgggggaggggtgtataccagagcccaattgttccggagtttcgcaatgcccggcggaattttaaaccggccttagagcctttaaggaagcccccattgggaatcttcccccacttataggccccagattagtgtgcgaaaaacccctttctgcgttgaatacgtgcccggcgggcaaatcaaaggcttgaagcccccaaataaaagcccccgcctgaaagaagaaatccttatgggggaaagaagtttaaacggctcctttcggaggagggggtattctttcctccaaaaggacttttcagtttaaagtgttttaccggggcaagtgaatttttttcaaaagggggcctgaaggggtttttaaaaagggttttcaaaaaagcgccccccccct

SEQ ID NO: 6588 - DNA, 488 bp, Emericella nidulans
gtaatcgtcatcatctgttacgcgactgggcagttagctgatagaattgacaacggatgagcagacgggtctttttacctctataacgccgcttgcgcccacctcccctagggccatggttccgacgttcgtaatcagccatgtctttttgtcttgccaggagcaccctatttcacaggggattgctgcacggtgattgagtgaagtgtcccactcaatggcagacacaattgcactgtcaaagggccttggtcggactcggagcttaggtcgcgtacgtcaagctcaaaaacaccagagacctcggagacggattatcagtgccgccgagaatctaacctgtttaccagggcctatagcccagaaaagaaaaaaaagaaaaggaacaggaatcaactccaactccacagctgtaatttcacctccgctttgctcatatttgcatagggaccgacaacttatgcagcttagcagtccctttatgagag

SEQ ID NO: 6589 - DNA, 666 bp, Emericella nidulans
gaatacaaattttcctaggataaatatatcaaacaagcacagataagtctagtagagataatgttcaatttatacaacattagattaacatcaacatgctattttacagtcacccatgatgctcaagtagtcagtagccaagaaaaaaaagccctctatttaatacaccaccacctgagaaaagaaaccacagaagcatcctgagcgcgcattaagaccagagaggagagaaagaagaaggcttctagcgagcaagatgtacacgtccctgctttcaaaaagatagcaatagagatgttataagctttcgtcaagaggcaaggttgatttactctttcttgccaccgccgaagaagccggtcaacgaacccttcatgctttccatctgctcctgtcggagtttctcctcctcggcagccatttcggccagccacttctctccgttctctcggatctccttctcaatcagctcgtagttcttctgaccacgctcacggatctggtcccagagcatcttgccctcctgcaaaccagcagagggtaactgttcgccatctagggtgcgtgcagacgacttcagaccaagcgctgaggccaggctacccatgccgctccttgggcgtttcttctgctcctcagcggttccttctcgaatcgctcgcgcat

SEQ ID NO: 6590 - DNA, 665 bp, Emericella nidulans
  unsure (1)..(665): unsure at all n locations
tgtatctaaagactggtagtcaaccgtgctggttgtcagccaccagggtggcagcggtgaccctcgggtgatctgatctgacatttttgacactgacagctggcggaaccggtaatcatgacagatggaccggtggagatatctcaatgtcagtaccgggccggttttcctccagcgtcatctaggatctgagcaaacgcagagacaagccggtattgagcagtggaagctgcaaggcacggccaagaccctcggttttctctcggggaccggggcaagggcaagacagaattcgtttcaagtggtttaccagcctttcctctttgggcgcaccgtcgagaagtctaaaaacagcaggagcgacactagtgcccgatccggtatattgtcgtacgtcttagtgagtgcttaggattttttcaagtcggattcgtccgcaaaaggattctaatccctgccgtggtggggttaaggccaattttcgatatttttctattccctatntcggttggagtacgtaacattgaagcataggcagaaaaatagaatagaacagaatagagntaaataaaattaaaatcaagtcatcccgctggtgtcaatccttgatcacccctgcgagttttacagncacagacctcgatgcaccgcaacttcatcgggtg

SEQ ID NO: 6591 - DNA, 1335 bp, Emericella nidulans
  unsure (1)..(1335): unsure at all n locations
cgattcctaaatgggacaggcccgacgaagtcctccaaatcggaagatccaccaatagcctgaggccctttgccttgggggagaacttacgacgttcttaagctacgatttatggcctgtgtggaggcggagaaatgccctactcggacgatgcttgctacaccagaaaaagagtgaaaggggctatcagaaatcaatggatgcaataatagcgtcgtcgtatctgggatctctgctaatcatcaaatctatcgaagttcatagaggcgcatagactcaagctgtaggccggctgtgcaagcgaacaatccaaacgccgttcacggcagagagtccttaatctctgcgacaatacctttgattcttggctcctttccgagattagagctcgatatagcctgcagaatggcaccaagatcgtacacttctttcgcagccgctttcacttcgctcaccagttccttgaccaaagtccccaaagcaacaagactgcgatatactgcctccgagtccttttcattgcggagcatccccgtaagttcttctagaagtatcagaccccgttggttcgactcgatgctgagattcctcgcttccgacgtcgaaaatactgcgatgttgatatagagagtcgccactgcaatcgtgaggttgcggttcaccgaagacccactgtttgttaggcatgtcctaatagcggcgatgacttgatcgaagcggtcaatgatgagacggcggccagcatcggtctcgaagaggttagcgaacattcggactgaaagcatggcgttgttgacattgactggggcgtcgaatactccgctctcgataattccggagaccaaggctttaccattatagtctgccgtggctgtacaggagtggcggcagcaaaataggcaggaagtcaagaccaggcggccattcgcttgtggcacactgtcgcgactttaagaagcaaatcacgaccgtttcacggccaggggccttcaagtgttcaggtttcaactattgacagcatactatcggttcactccgaggatcgagaccgatcttgaaccttcagaaggctgccttggctcgtaacttcttggatccttggaatggcaactgatgaaaaaggtttttggagctttggcccactaagtagcttgctgacgggctccagggtagccttatggccctgggnggccccgggttcgtggggccaatagactggggtacaaaaagcctgaaagattttgctttactcaatggcgttttttttaaatgggggtagggggctttcctttaaaaaattatacataatttcctttccccgtcccaggacctcct

SEQ ID NO: 6592 - DNA, 974 bp, Emericella nidulans
actgattgtcacaggtatcaacctgtacgatcggtgatatttggtctactggctctctgcatcttgtttgtcccttgtaaccagttggacacggtcgctttggtgtagtcgcgtcggcctcccttgatatctcgggacgtgtcgagatcctccagtgacccaactttcacactgtaaagattgcaaaaacttcttggatctcacattcactcaataagaagcgacgaattcatctcgcgcaaattgctcttatccactatggcgacaactccaccgcctgcgtctttcctgcgcattcctcctacccctcgacacggcaatggatatgatcaatacgaaccctactctacacgtcaatcagcccgtctagctacacaaaaagcttccgccgaatctcgcacaacccccccgccttcgtttccaatttccaaaggacggggaacatcgcggagcacaaagaagcagaagacaaccgaaacagaatccctctcaccaccggggtcaccaatgagtcctcggaagacgatgttgggccggagagttgcaacacagattgacgacgaagatccgtttaacgacgccaaacttgttaattttaaacgttacgcctttttaagacaacattgcccgaagaatgcttccaccccaaccagacccacggaaaagcctgtggtaagctggctaaccggacgttttgttcctaacccggcaaaaaaaaaagaaccaccggttttcttgcacgttaagcatccttgaggcgatggacaaatacaaatccggacaatttgagtgcaggcagagatcattataaagctcccaccaactgcttagcatgctgaccgcagaaaatggttaccagggttgtcctgaggtaactaactgtcttaacatacagaatttcatagttttggacagaacacaagtcgtccactattgtaaacccattaaaaggttctcctttgaaaaaaaaaaaa

SEQ ID NO: 6593 - DNA, 449 bp, Emericella nidulans
aagccccacgagagagctggaaattttgacggaaggtttggactagcctgtttttatacacaccaataccaacggggtggggggtcgataaaacaccattatggatggccgccatccatgacggctggggccatcgacctatccgcagcctattgcatgcgctcccagagactgagttacactagacagctctttcttctcccggcctgccgtgcacaacactagcgggctgcgacccgatgattacacccacagcatagttagcatgggtaacggtcgaggcgccatgcatcatcacagagcatgatggtggtatcatcttgcgtacgccacatcctgcggtgaagatgaacttacagaaagaacccagccctctctgcctgggggtccgactcagtacctcactaaatgataagaaaagagacgctgatctgggcctggctatgcct

SEQ ID NO: 6594 - DNA, 1144 bp, Emericella nidulans
  unsure (1)..(1144): unsure at all n locations
gagataatatatgttccaagtgaaagtactaaattaacaagaaatgacaaagcagttaaatagagtgaatgattaattaattaagaaaagagaaagacttgcaaataattgaatagagatgatatcattgatataggaataatatatagggatagatttataaaactatctttatgttcacattgtgaaaaccagtatctaactggatgaaaaccatataagctggataaaaaaataccgttaagaaaacgttaaatatatagcaggtacatgtatatgaaatttatgactgataagaaataggatgtagtaatatatatgcgcaattttcctagttggtatgagtatttggtaagattattttgacctgtaaattagaataaattaaatagatagtgggaaaacttgaaaaaaagtttgtgaaattcaatattggaaagtgcctgaatggggatattggtaagaagagttaaacccatatagtagaccttggccctacgggagtagcataatgtgaaatttaaaagtgaaatagaaaagtttgaatataaaagaatggattcatcggagtgaaatcaaccaagaatggtatggggtaacagacaccccctgagaagaaggggtggttcacttggttgtggtgaactgttcatcaatcaaaacacaccgtaacgaagtatgacttatgacgatgaccatgaatgagtattatgaggaagtcaatgctttagtcagatacatgtcaatgagtgtcagatccaagtaccagtattagtattgtacggtgtagaggtatttanttcttctnaattatgatgtcccaccattctgtatttagtaatcgtggtgtctacttttcattatattttagtgttttccccgcatggttgaacttgtttcggacttttagtatggattattttttgttcggtgcggcaatggctttcctttttgtcatggtgcccgatcttgttcttgattaattttttggcgtgtaatctatactgttgtctttaggatttaaaccaattttctctcgaaatgggtgcccttgttttgctttgggccatggttgtttttgtaatttctttttgttgctgttatttcccattgttagttttattttttcaagaatttttattta

SEQ ID NO: 6595 - DNA, 363 bp, Emericella nidulans
gacacccgatataaggtgaccattgtcatattatatttggaatttttacatcttcacgtcctccacatgggtgtggggatccactgggtccagttttgggcgcaccgcgtaaacagatatgaattctgatccttaccgctagacctgaagcttccggcaaaaagaacaatgatccggctaatgacaggaggccaccccgatgaaagggagagtccaaagacatcactaggggaatgactcaccagacattgcatgcttaaacggcagtgacctagagaaatgaatactgctcgacggtccatggcgaggacatcaataccgttgctcaggggcgggacgactaaccattctgcctgagaacat

SEQ ID NO: 6596 - DNA, 298 bp, Emericella nidulans
ttttgatgaatgggtctggcggagatgtagaggatcgttgctccttactgagggctaagcttagtgcatgcatgacgggtgattgctagcggcagatagcactatggaaggatgggctgaccagacagccttgtggcgtattagctgcgctatcattgtaagacaacgcatatggaaccgaagttatgtttaacgtcgtcacgtgtcacgagacaacttggtggctaatgcctggaggggagagtagtgcactttgcgctacgatcgtatatgggaagggacaagactcggtgtatgg

SEQ ID NO: 6597 - DNA, 1106 bp, Emericella nidulans
cgtccacatatgaccaaaacacccaaaccaaacagtccagacgtaggaatgagctgagtcttcgccgattacaaaatacatcttccaaatagttagccgaatggtcgatcgtctttttagtggcagaatttggcttactccgaaatgtaccaagctcgaaacgagtaaagcggctgctatgaaataaagcccttttgaggcacagctcattcgcttgcgaatcaagacagtactaacaatgtactgtaccgacagtaatagtctgctcccacccagcataagactcagggactgaaaggcccaaacgttctcgggtcggacacgcgtggtaattcttgtccctgcagaagcgaagccaaccatgatccctagttgcatagctttgcagattcgttcgaaaagagagtctcgagcaaaacggatatcgaacatcatgacttggagccaggtgaaccagataacacccagaaatccaatgtaggtcaccaaagctaacacgccgagttagatccgattaagcaagctgcgggtggtcccacaccttctacattgtttgatctcatgcgtggctgtaaaagtagaaaggtttgcaacgaggaaaagatcgaaaaacaattcaattggagttgcatccgaccgggggtacaggtgcggtgggaccccatcttttccgtcatcggcgtctagattttaagtttccctttccgcggttttcacatggtcagtttcattctatttggcttagacattttgtcttggcttacttattgttctgccatacttctccgctattcttcacattttccctatctctgattaacagtccttcttctcataatcttcacttctcttctatctttttctattctattcttgctttcacttcaacttccttttctcctctcattcttcctgttatcctcaccttttctatcaattttttccctttctctacctttctctttttttttctttcttatcaattattttctctaattctttctctcatttctttccctacctgctcctttctatctctcttatcttcctcttctcttttctctcctctcttctcttctatcttttcttttgcatctttttcctac

SEQ ID NO: 6598 - DNA, 660 bp, Emericella nidulans
acgagcgacacttccagcagcttgcgcgcctggtccacagcttccttacccctgccacctttgggccgttacaagctcgtcgaaggcgtcgagaatgacgagtgtcttatcctccctggggaaacgggtctgcctgcatttgtggagtgggtgaataagttgcctgagcgtgagccgcccacttatctgggtctgcccgctaatgccgagaaactattacttgttggtcatggaaagaagatgatttcggatttggcgaggattacgagcttgttggatgaaggggagcagcttatgattgatgcttaggcaggcttctagcttttgtattctttaacgacttttgggaggatctctgttaaacagatattgagctttttttcatccttctgtacaagttttttgcatctatatcctgtattattttaggtcataaggcgcctacagtttgcacttgacgcttacaaccctttcaaccaatagatgtcctattcattctccaaggcaagcaactgagcatccagcttttgatatagcatccgtagaacaccaaattcctgctttaaaagaaaaaaaaatccatcatatccacttccatgccctgggccctagagcccaatatgaagctccgacaaccgcgtccggagacttcggtaacac

SEQ ID NO: 6599 - DNA, 463 bp, Emericella nidulans
aggaacgtaggtaccatgacaaatagaagtatcgtcgcaatgggtagtacgaccagtagatggggatcgagacatataaaagagtagacgaacaggaacgaaaaagtatgggacggttgcttccaggcaaataggcgctcaacctgctcctgaaagtggaaaacaataccgattctgcgagattcagcttcggccatttcttgcctcttatggattattttttacctcgcattgaatcgtcgaaagttgttgcccatcagaggaagactgaaagccggtcgctgagcatctggagggtacgggcttgcgcccaccgagaccgattcatcgtgcacatcttccacggggacgacctgttctaggattctaaggtccagattagcaagaagtgatatccataggcaagggggcgtattgagacttttgaaggaacgcacttgtgagagcctatctgcatggactg

SEQ ID NO: 6600 - DNA, 412 bp, Emericella nidulans
tttgttacgtcacacgtgaaagttgataatttcacgatcgtatcgagatcagtattggtttttgatgaaaaaaaaaataaaaaaaaatcaatactctatagaatggggccgttagatatttatgacgttttatcagattaattgccgatcgtgtaacaggcccattttcggggtgaatcaacatttctgtgctataccagatttagtggttaagatgacagaacatcaaaacatttgtataaatgcctaaagttgacccaaaaagcctgattttttttttttacgaacgattcttttagtttcgcaacgtataggtaaatattggatgattcgttatccgtagaagaaaattctcacaagtttaaaattttaaatttcacgaaattatttttctgcacaaagaaacactgtt

SEQ ID NO: 6601 - DNA, 572 bp, Emericella nidulans
cagctaagggaaccgccatattctgttaagccctaacccaatttgtagtctcccacggccttgggaagcacgaggccgatatcccaaatcccaacgaccgcataagcgctgccaaatacgccactattgcacccagcttctccgtcatcagtacagtgactggcaaaatctctgtagtgatattcctcctccgactgctaacgttatctgccaaaccgtggcatcgatggtttctccactctttgacgctcgcttcaattgcgtggaatatactcgggatagttgcgattatcggttattgtcggccgacgaggaagatatggctgcctgaaacgaagcggagttgcatgagttcaagatcccagcttgtcgctgggatatcgcaatctggtaagaaacctcgaccaatttcatagtatatctcaggtacaatgaggatgtttaatttattctctgagaaatattgatcacatacccactcacagcatttaacgccttcgcaaactgggcactcgcactcttcccggcaatcttatttcgcaaggtccagctaccgcttttaagaaggtcga

SEQ ID NO: 6602 - DNA, 486 bp, Emericella nidulans
acgcacccacaaagcgcgtacctgactccgaataacatatcgacgaacgtactaccccgttgggcgggccagtcttgatgaggttgcttgatgacatatgcgagggctacaaccgcgggaggcttcaccacctgcgaaataccactaccgttatcgaccagagacaatcgcatgaacactgacctgggcgccaaccacactcgactggcggagaggtacctccaggctcgacactgtttgatgacatgccgaggggacgccctcgactcgagcaagtcatatgtcatactacaccccaatgagactacggagggcctgtgctgaacatggactcgctcgagaccacaacgacgcctgcacgacagacgcagagccccagtgggagatcagaccacggaagcgggagagatctgcaacaccgagattccgaatgttggggcataggttgcacatctgcttcagagcatatagtggccggaggcaaag

SEQ ID NO: 6603 - DNA, 763 bp, Emericella nidulans
ttttctcgcaaagcttatgacatgcatttgaaggacgtgctggcgaatcctgcaaacaacgaacatgactcggtagagctcaagagacagctcgccacagtcaccggcgacggtactactgagtcggcgcctggtgccactaacagaagccctgcccctgctggactcattgttaggattacaaacacacctagagaaccagactcagaagcaggtcagaggacgaaccacgagtcgacgccgacaggaagcaaacgcgctaggacagttcttggaccgcaggaagccaggctgattatccagatgcgacatatccaggggatgaagtggaaggaaatctcggaccacttcccacaaaagaaaccagccaacatccaagcatggcaccatgttcactggaaacaacgcaaggcgaatgcttctcgactgtccggaccctggtcaaaggccgaactcgagaaattggaatactgaaggaccaaccagagctgacatggcctgcaatcagtgctgagttggcgggccgcttgcttgcggagattgaattaagctgctgcaactttggcgggcgataacgtcttaagcctctgggttctgccaagtcagccactatttacgttggccttcaaggtgcgacagaccggcatgggttttgtcagactactaaattgtgtagcactgatttcgggcggctaaatatgcagcgaccaccctgggtagttttcttaagaccagaacgacccttttatccgaacaagggttt

SEQ ID NO: 6604 - DNA, 647 bp, Emericella nidulans
ttcagtctagtttcaaggaccatggcctgttgatatgtgatgttgagatcctcctaaagaagggtcggattatgctcaaaggagaagatctccgctcatgtcaggaggatgccagcgatctgatcaatgtaaatgaagctgctaagcagcttcagataatccagaggatggcctggacttactcgaagtggacttgacgctgtcctggtgtgtttttctctttcattgctctcattgctcgcatatcataacagagagccacggccccacccgtcaagttaacgctattgattccggattttacaacctgcaagaattcaaatacgaaatcttctgaaagtgatatcagcccttcctaagtacatagtatgagtatggtcaaagggcttttgaaaaacattgatcaaaatcaagcttgataatagaataatctgcagtattcttataagaagctgaaaatggagaaatgaccaacgaaagctctgttagacgcgaagtagctttatactgtcgttcagagccagcccaaatcaactttgtcaaaagtgctgggactgtttcgattgtaatattgggccctttatgtgcagaagatttagcactgtagattcgagggtaaagagatcgctacattcatattgggagac

SEQ ID NO: 6605 - DNA, 813 bp, Emericella nidulans
ggtgtgtttgtatgtcactcgcacagttgatatggaaatctcatgtcttttctgaggggctgcttttcactgcgttgttgtaggtccagttacttatggctattcagcaaatcgacaggaagctattgtacattcaacgaccggcgttgattattttactaagagataattggagtgctctgggtatgccgacaatgaaatggcgattcgtcggtgccacaatctatccaccgcgtgtgatgctaaatgaacaatagccgttagttaaagttaatatagcgagtcaagggggcgcactgacggttcccgggatatctccacaggtgagatagtgtcgtcaccgaagctactttcgcgaggagcggtcttgtgtccgctattggagccactgccctcgcttttttcttcctcatctccacatccgcaatcgtaaaagtcacccgatcttgttgcagtcaaatgctggctttcccagcatagcattgaccttgttgtggatgaaacaacccattcaggcgtcgcattagggaagacacctgcgggggtattgcttaaaatgtcttgaagtgtaggcgcattcaccgtgtttgcagtcacattgggaagccgagtggccaacatggcaacttacattggtgaggccccaaaggtgatgttaatgagcgctttgttgtctcatggacttaggtaacacaacaggtggaagacttcagttgcgacaatcgcttgtttaggtaattttacccagcaatgttttatttgtgtattctaaaaggtaacattttttcaagtttaagggtttaaaaccacttc

SEQ ID NO: 6606 - DNA, 554 bp, Emericella nidulans
accagcagagttgagcgccccaagccctgtgctccctttcaccatttgtaaagcccaggctgaacacgaggagcaggggaggccataatccattttctagcatatccaccgttaactaatgaggtatcaaaccacattcatgacaatggacagaccaaccaagatctgaaaaaggactaatatccatccctaccttgaacacaactgactgaaccaaagatataattttgtctatcctaactagaataaatgacccatgtaccgtagctatacactacaccaagtgccatacaggcacaaatcaaccactacctaggcacgtaatactcgaggacatgaatcacaaagacagcactcctgcctcccgaaatctctcaaacatatagcataaataagtgacaaacaaaaacttggctgtaactgtttgttccaagacgcacacaatttaactccagactagaatgctgacacagcaacattttaacacgaaacggaagatcagtcaataagaaccctgttcactacgatgcaccatacataacagtcctggcaga

SEQ ID NO: 6607 - DNA, 477 bp, Emericella nidulans
taattacatccacaaacacattcgttggacgtccaaattcaatacaatgtcatcctctgttcacttcaagttcaagtctcaaaaagaaccctcaagggtgactttcgatggcaccggtatttctgtcttcgaattgaagcgggaaatcatcaatcaaagtagattgggtgacgggactgacttcgagctatctatttataatgaagatactggtgaaggtaagtaagatgccttgcagtattgtcaagtctttgaccttacatgaggaactaatggtgctttagaatacgatgatgatactagtgtcataccgcgctctacttccgttattgcacgacggcttccagcatcacgaccaggcaagggtggtgctgctcgctatgtgtctggcaagatgccagtgaatgcccgcagtgtgccccgtaatgagcaatcgacgtcaaatcgaacagtttcaaatccaacccaaccagtcag

SEQ ID NO: 6608 - DNA, 475 bp, Emericella nidulans
caagttcaccaccttagcgttgggaattatggatattttgcaggtctccacccagatactataaaccagtctgctagcttcattggctatggcagcgactccataaaagcactgtgatttgcagctggatgccggcagcacagtatcgcggtttcagttgacacttttctttcaagccctactttagagcatctcgtgcggcggatggcctggaaatatcgtccagcagcacgccattgggtagtcccagcatcaatagtagagagcagccgtccatatctatcagtggctgggagggatcctcctacgaagttgtcttatcacaatcatccaagttaatcaatatcgaacccagggtcacatccaacataccggggggcatattccggttgtttccggagctacatgacacgggcgacagggcagcaaggccaccaaggacagtctactttcgtgtcgatggaacagaaaacct

SEQ ID NO: 6609 - DNA, 831 bp, Emericella nidulans
tcgggattcgattcattgtttgccccgatgtttggccggaattgaggttgttgagcgcggcttgctcggtttgcagccgtcgcacttgagctgcttgcgcctgcgcgtgtgcttggtctcgagccttggcgagcatgattgcccggttctgcatgagggagatgccgtactgatccatctcatagtcaagatcctcgtcggagtcctgctgatcatactcgaagcggtctgccttccacggacctaattcaactctacatcgcgaggcaaagctacgacgatcaatcaacagacgaccggcccgccctatacgtctcctgaatgacggcatcttgttggcgtgcttactcattattaacgcgtgttcgtcgagcttatcacgatatgatacgggccctgacatatctaaggccaagtcaggtgtattctcggatgagtctgatgacggctgcttcggcaggtgtgacgagatcgcaagacggaatgagatatcaacagtcctttcaggagacggctatagcggggcccgtgtgaaatccacataacccttgctccacttcatatgtttcgcgatgttcgccttgatatcgcgtataataaacgttctccttgactgcttgcacatccttcagcagatgccagtctaatgcggctagtgcgccaggccttattggcatacaaagctgcgctgcctatggaccttgcatggaagagagcctatatcggcttcagtatgtgctagccccctgtataaacgcctggacgtgccgatgtggatactcaaaaaatcttacctttcgttgatggagttccaacaaccttatttgatat

SEQ ID NO: 6610 - DNA, 391 bp, Emericella nidulans
tacgaaacccggtccaacaaacttacttttacttagagaaactgcgaaatgggatactagaccgggctatcaatacgaccttctgcaatcagcacttcagttgaagaactcacacaccaggcggccgaggggcggtccccaaatgactccacaatcgacacaatttgtctaatatgaccctccctttatttcatacaagctagggacaaatcccttcaattctcaactgctgactttgacacactcgctcaatgataccaccttgaccggacctgagcgagctgacgtgattcgtgacctcggcatggacctcatggctggctatagcataacgcgtggatcagatctatggaaccgctttgttggatggaacacctagagcacacaccta

SEQ ID NO: 6611 - DNA, 932 bp, Emericella nidulans
  unsure (1)..(932): unsure at all n locations
ttattgagctccaggaggcatcggtgtagacccaggtgcggctgctgtatgatggacactcgaggggtgcacgccattatgcttcttaacaagtaattgttctcatattattataatcttatacccaatacgctagcacagacgggagcttatggctttccttatggaaacaagaaaatagaaatccaaaaccagccaatgcactgtactcgcctatccatcggcaagaatcctgtacatctgattgtgctcatccctcctatttggtgaacatatctactccaagtgaggttctgatctggctagatctagagctcaaacgggaaataccaatcagtattcctgcccgtgtccatcagctttgtttctgacgcccctaacccactcccccatctccctccagaagccccgtggcttttctagcgtggatctctcgtaagaatccacaatcggcctctcccagaccaaatccgcttcaagcggtttcaccatcttggtccgcttgacgaccttccagtagctaaatgtcataaaagcgaagatcaccatcgtatagtttgtaaagaaactcgagacatcccaggggcagaaactgccgtacccaaaaaatagaatgatgagtccttcaccgacgaccccagcccacgccgcatatggttggaagcgccngtagtaaggggaggccgtacgatcgacgccctgtgccttgcaagcgcngtagaagagacgtacctgacggcccatgttaagaattgatcagccctccagtgttagggtttcggagccagttaagccctggctcaggcgtctccagttgaagtggagagagccaaagaatcgtcccgcccattgatggccccctgtcgtgcttttagaggtccggccgcggccttaattcaggcatggttggctgtccacatacttttccccag

SEQ ID NO: 6612 - DNA, 421 bp, Emericella nidulans
cgaaacaaaaaatgatagggaatcctattctatctcgagtgacaaccgcaggatcgggcgactatgctcaacctaacaataagggagccgcgtcaaacaaccacgactggagacaccagagatatggaactaccggatgagcctcctggcatttgacagacaacagaaaattgccaaccgaagcccggggcagcgaacgcatataagcactgaaaccgaaaacagacagcaaaactgtaccgaaaatcaagcgctatgcacagacgacatcctagagcagtacagggagcgatcagaactaagatagaaaacgcatcggagcaggaatcaaaactccccctgaaggggatgaacagcagtgggcaaaagatgacgacgctcacatagtaggagagaaatgaggctctagcttaaaagcgga

SEQ ID NO: 6613 - DNA, 620 bp, Emericella nidulans
gacccagcttagagacctgtgtgatctgaggtaagaaggtcagtgccagcatcaatgcgtaagagaaggagtcgtggaaggccacgacagagaatggagttgccatattagcatgttcacgggccgaagcttcgagggagaagagagccttcctgagcttgacaaggcccttggcaattctcaaactttgcctttgaacctcattgagcacggagtatctcgcctgttccattgcctccgccgaagccacggcggacgcagtggaaccttcgtgtaacaaggaaggaaatggtatgtcctccgtttcgccattgccataccggactcgaactgctaactccccttctccgtgagtttcttcacttcggcgggctgatctgcgtctaccgccactggattgggatgactgcgaggactgcgaggtcctaggttggcgcttacgctttctgtccttggagctccgtctcttacgtgagctagattgaccttgcacaaatgactgttgctcctgggtacttagtgcgtcaggacttcggaccaagtcgaaactgtaaatgtggtcgccaaaaaactcacaatcatcacattgggattggcattactgatttacgcggtgtttg

SEQ ID NO: 6614 - DNA, 749 bp, Emericella nidulans
  unsure (1)..(749): unsure at all n locations
catatttcgtcctcaccgcctgggcaacacgctccatcgagtcatctacagcttttttgcgccctcagtgacgcccgccttctgtcgactgcatatcacgaccagtagcagtttggtaagtgaatccgctctatcaagtcttttcgtgcctgtacttgagcttccttccccgctgttcttccatataacctttttacgcgcccagtcttctgggacaacctgctaaccggttatcatgcctccgctaccaggagaggagctagtgctaaccacgtaagtctactaattaccccgcaaaccttacagtatattgaatgagatgcagctttgccgatattcattattactttgcggcgccgaccccgaagccccttctccatcgggtcgacaagagctcgtatctatatctataccacaaaggcactcaaaggaagaccaggatcgaagtagccaataacccctggcaccccctgatcaggatgcctttaacggaggtataggttgcaggttggcttggacctagactagtctgaagctgacatctactagcttttngataatgtgcaatataagcccttctacaagggtccccaacccctgtgcaccataacccgtcgacgggcataccacaagcacaggggggggtattacatttccccccccaccaggtagggcaaacccgtccaatgggaaggtgcccaccatgaacccgcgggagatgcttcagcgctgacactttcacattactt

SEQ ID NO: 6615 - DNA, 572 bp, Emericella nidulans
cggcatgtaagcgaacgccggcctccgcgaggacaggcaggatgaactcttcgctcacaagcgtcaagaggaagatgcacccaaatactgcaagggtcttgtatccgacttccatccacgacctttctttgctgcggggatactcgagctcgtagcagagagtggggcagaagatgaagtcgacgtagttgtagagcgtaaggttctggggatacgtaacattgcccattggcgaagttaactcagtagctaggtcgtcgcgcagttgcgcaactgagtttgaccgcttatggatactaggtcgtcgcagtggctgcttggaagtgggcacctcaggataccgaacagcctcacctgttggttgcgaaccaggcttatccaattctgagagtcgacgctctgttgcgctcagatgaccgttgtagaaggcgtaagagtggatcttcatgagaatagtcagggtgtgcagtgtgaagaagacctgcgcagtccatgtccagcgcagcataaatggccacctgtgaatccgtcagcttcaaagcattctgaaacatctactgaagtgaactcac

SEQ ID NO: 6616 - DNA, 945 bp, Emericella nidulans
tacgaatcccggcttatgccctgttgcgctatacggtcccgcctccacgtcccaggtatttgtaacaacaatcgactgtttatttcgctctgataaacacctaagctcgtcgagctcatacccatggcctcggttagtggcggtgccgttaatgtcatgcgtgaatccagcggttgaagtcgagggacgcagcttcacgtaacgctctgctttggccttggattccccggactgcccaaacaattgcggggtcgacgtaccgctgccgcggctgtcgcaactgctgtgcaaggtccgaaacgcggagacacgctcgaataccggacggagcagcggcaggcaggcgaggatgattccgagcaggggctcgaggatcgtaaattatatcaagggggtcgtcgtgtatgtggagacttgtgcttcaagggtcgttgatcatgttgacccggaagacggtgatgatacaaactcctgtacggtgggttcagtcatgacatcgacatattacacctttccctaccgactaggccctgaaatgtttgtttaaccggttgatagacatgcggtattttcggacggaagttttattccaatttattttgttcccgccattaatttggggctttcctaacacgtgctcgggttgaatagccgctctgccgtaaatatattaattccaaaaggcccctcctatgattaaacccttttctttccgtatgtcacccgcgtggggggcacatgtttctttaaagattttttgtgtgggttagagaataatcttttggtcaaaaagtaagaaacaccctgtttttaaagagttgtgtgtgccgagaatatgccatacccgtgaatcttccttttggttttgtttctatagggtgggtgtataattttgtctggtgaataatatacgcctataaaatttaatatccttcttgttgtatt

SEQ ID NO: 6617 - DNA, 671 bp, Emericella nidulans
gctgtctagtccctcggctagtttacgtggctccaaaatcaaaacaaaatccgattgtcccagccccaaataaaaacaatccaatcatgccctgctccctgccaccgcgtcttcttccctcgtgtctctttgtttacttcacttgaccttgcctgacctacctaccttaccctacccaccctacctcacctcaccttgcctttcctcacttcactttattttcagcctttcgtcttctgacttgcaatccatagctaccgcgaacaatccgctcctgctcctgcttctgcatccctctaccaggactactaccaagagaagcaacaaacctacgataagactcttgagagccagctcgacagaactgagcacgagtaccgccgtcgttaccagccaacctacgacgttcactcctcctacagccgctcccaagctcctgtagagtcactcgaaggtcctcgccagcacacctctgacgtctctagccgctccttctggcctaacgtcgtcagttacgatcgcgaatacaaggctttaaccctcgacatttctagcgggacctttacaccaaccgtcaggcagtgtagagagtgtcaagaccccgcttccactagcacagggcaaggttttcaagaccccttcgttgttgatccccccaggcttgcaagatg

SEQ ID NO: 6618 - DNA, 968 bp, Emericella nidulans
cagcacaagaatctcggccaccaaaacatgcaggctcttggcattctgcacagtgggatccccaagcacccgcgtcactaaccaagactacgcctttatgccctttcgctttttccgcatccagcaacaggtcacaagcggcgctactgacgtcgacggcctcgcgcgcgaacttagcaaaggaattctctactcaactatccgctctaattccacaacagactccgaattggccccttcagcccgccgcattttcaacctcaacctttggtcatcgcacagacgagcacgtgatcgcagcacaagaaccctaccgtcccaggagattctcacggacagcatgccattaggcgatatcatagtccagaaagaagtcaaagtagatgtggcgaggatagcggatcctgccactgaggcagccttgggaaaacatacttctgtcacagttgtagaggctggtgactcgactgcacagacttatgttgatgaactatataatctctgctatgcgcccgggctgcgtctgcgccctagtccaggcttttgaggatctcggtttggcatactattctgcctggctgatactcaccatctcactcgtctattcatctccgcttcttccaacctacatcccgtccagggttaatcggtgactgcgcctccgaacattaatgcgcccatattgccctaatgaaggcaaaatgggcctcttgaagctatccattccatccacatacgcccgcacccaagctaatctggaccttactctccgcgcgaaccaccaatctctcaaaacaagcacgaaactacataaacttgaccgcttagttggacttacaggattttgttgactatactccttccgatgcgaatgctatgttcttgggctcggcgctttcattctatttctattttatttttggtttggtttacggcatggcgcatacgaagaagtgatggggaaaagg

SEQ ID NO: 6619 - DNA, 549 bp, Emericella nidulans
ggaagggccacaatatccaggcatagtccttatctatttcattttcgcacattcagtgagcttaagtttactgacggactgaaggatcttcttcattgtacagctcggccgtctgacatgctaacaccaagggcatgtatcgcattacaaccgttatacctgcaacagatgaatcggtcagccactgggggcaccagctttacaaacccccagatgtgcatgatgtgggattaccaaaagctgctgtctttcttatatctttaacagtttgcatgtcctgatggccctatcattccttggctgccttagacccctcggcttcctttacaacgaagattagaggaagagtttctgcttaatctctctggactttgctatatcatttactggtctcgtctgatcactcgaatgagacctctcgttccaaaaagtcttactgtgcatgcttgacgctaatacttctgcacatgagttgcacgaactttgcgagcctctatcacactgttgaggacatgatgaaggccatgagcttaccttttggctattgtg

SEQ ID NO: 6620 - DNA, 1285 bp, Emericella nidulans
ctcatcgatcactcttcttctttcttctctctctctacctcaagatctcctactttactactacagaaatccttgagtcactatcttctcgtctagctgagtcataaccgtggtcatcgagtcaatcccagcgctttccaaatattgcaggcctactataccttactctaaatggccaattcaacgtcttccgataacgaacctccttatatgagggctttgaatgctgccaggaatggcgaaaaaggtgcccttgaaggtcgagatggagagattctagcgtcagcccgcgactcaatatggcggaaagttgaaggcaatccgaactacttgctgaatcgacatgaattcgcattgttcaactattaccgacaatactacgagaagaccccgaaaaacaaagaaatcgcccggaaagcggttgcgcggttttgggacaactattcagaaggaccttcaggatctggaacggccaaatcataacacgatctttcagctgtcgcaaatatctagcactcttctcgcctcggccgtcaacatctggctggtggccggcacaacctcatacctaaaggttgcgttcctgaacgccggttccttgggggcacttgactctctttatcagcaaagcctttacttggagagcgaaagagtttgctggaacttccttgtagcatcgccattggacagactctggtagtctcatctaatttactgcgcatctactatcgagtaatcgtactttacgggtttggggaattcagccttctcagcttggttaggattcttaggcgtctctggcacagcgccggatccatatattagggggggagtttgaggcttcgatggttttatgcccggcggttaaaaggtggggggcccatatttgttaaccaggggatttgcggcaaatttgggggggtggtttttttttttatatgaggtttctgaaaccggttttggggaaacgaaatatctctattatcccgcgaaaataacacttcagaggggggtctctgggccaccatataaggggctaaacgagaagtccttaaaagcttaacgtttttttcttaaggtgtgattccccggttagggggggcgcggggctattcatatacctttggggtgcgttaaaaaaaattttttctttaaacgttttaaaaacccccttttctttttttggaggtcccctcggcggtttttatttaaactttttcgtcggccagaggggggtgcccactttccacctctttttttatctttcttcacattattctcttat

SEQ ID NO: 6621 - DNA, 441 bp, Emericella nidulans
ttgactctctgaggacagttttgatgtcatctaatatgagcaatgatatataaatgcgcagcacatcggactgaccatgggcaatcctcctttaccacattgatcagatccccagctcctctacaggatttggtgagtatccagagagtcccctccataagcaaatctactgggcagccgaaacagtatcgaccatcgatccagccggtgattgcacaggcaaagctcagggatcggcccagaaagtagtattatccctatggtctgattattcagtatcaatcttgactggacccgattgcagatgtttgcagggctaacgccatcatatttgatgacactgactgtcctgaacgatggcaaatgcttaggcggatgctgcctcgtaggtgcctctgtaccttgcgagcagaaagcaagacggtctccattaaagagggg

SEQ ID NO: 6622 - DNA, 827 bp, Emericella nidulans
ctctgttgcattggttatcaaagaacccttgtaacagcctggataagtttcttggtcagaattgcggctcgttttaccgttaaacaggcgatttccagctccttggcgtaggggccagtgtactccattctgatgcggtgttgactcggtcggagatgcaattgtgctaaaaatcgcgaggcgaatatttatattcaaaatcaccagatggaaagaataacgtagaagaggtcttttgagtcaattctcaattgaggttgcgattacgtaggggtcgaagattctgagtgacttgcgagacacggcgagacggtgccaagctattgcaatgggtccggttgtcgccaatctaattggctgctgtgttctctaccgagccagttatcttgccctaagtaatctatatacaagatattcgagcactctggaagtacgaagcttgttgatttacttttatgtagacgacaaacaccagaaccccatgatcttccccaggggatggccacctgtttttgaattattaagcctagtgaaccatggacattaaaagttataaaactttttgaaacggaaatcagaaaagctgtcatctatcactgctctaatgggctgttaaactattctaagggtatgccgcaagggtcttctttagcaataatacttaactcacccccgcggcaaaaatggggcgggtttctgctggtgcccctaacttttaaacttgtgcgcttaagctctagcccactcgaattacatggacccctgtaaatattcaaatttggatagccgccccccgggcgcttacttccaaggcactctgaagtttt

SEQ ID NO: 6623 - DNA, 595 bp, Emericella nidulans
  unsure (1)..(595): unsure at all n locations
tattgataagattctatcatcatatcgagagtaatccataccgttcaacgccatgaatccagggataaggccatgctctttataaagtccattaccatgttcatgtccatgagtaatcaagtcgtgaccggcactgccgccgcaaccttcaaccccaaccgctgcgcatactgccgcccacgcattgtgataaatctcccgtggccctgtgatctgctctgcagctggctctgactctggctcctctcgagtctcctggctggcttggacaaatgctcgtggatgtggatatagacggggatctggctgcagctggcgttattggcggccatgtgagctagagccgactgcgcctctgacttggaggctgcctccggaggagacgcggtaggtggaggtgttgaaggggagggccccggngaaggagagagagaggtcgagtttcgccgtcggacgagcccgcgcaccgnaccaacgatcttntcttcacccaacagggcctggngcagtgcttgagttggaacaaggcaccatcgacgcttgcactgattgtggtaccggcgccgaaaactgattctttacactagtatctgga

SEQ ID NO: 6624 - DNA, 710 bp, Emericella nidulans
gctccggcttccaattctggcactttatgcctcatactctccaaaagagaagcacacggggcagtggcccatacttgttactactaggtactggtaccccaaatcgcctgcttatttgacccttgaatgtaatggcagaacgaagtcttatatttcccaagcttattttctctcattcctgtcttgatctatccatgctataacaaggcaccaacaaggcccatatgtcatccctctgagatcctacttctctatatgtttggttataatctagcagaatcggacagaaccgcacaactgtaggaaaatacttcattctcaccaggctacataagattcacattattccaatttcaccttgtaatataatactactcaaaagccattcttgtgaaagaattcagtaggatagagatgtcgctattattaaatttgcgattgatagcgttgaccattcgagcaaaatttttgaagcttaaaaactttgcatcgctaatggaggtccatctgtcctggttccgtagcccagggtgcagctcctatagctctagatctatcagtttctgtatcgacttttgcacatttttcttcgattttcagccgccctttggttagatattcaccaaaataacattttggacggtcatcttcgcgtagtccgatctttccgtcgactacactcgggatcttccattcattatgaattcttt

SEQ ID NO: 6625 - DNA, 469 bp, Emericella nidulans
cctcattactgttggttgaccactggcgaaactgctgcggcaagtcgccttcagcggcgatgttactgttttggttttggaccggtggaccaatcccaatgccgttgcgacggtactagggaaagggattggatgatctaacaatgcttgtgtcactgtggacggtgcaaccgacggattgttgcgtgccacagtaaggatagacacctgtaatgcgctgatagctaagcacagtttcaggaagctagacatgactaattgacaggcctttatttttgtagacgtaatggtgagggttaggttaatgcggttctgcacggacgtctgcggtaatcgtggtacaagggggcttgacctgctcgtggtggtgctagcgacaataattgggtacttggagatacatgggccaattgtgcgggctggtttaggtatatatatcttagctaagactggacagcagaattgtgtt

SEQ ID NO: 6626 - DNA, 622 bp, Emericella nidulans
tgcgattttagagttatatcccagatgttatattcgccgggacactgtacatctagctcgagatgaccaaaatcaacattctcagcccagaggatgtgatgtagggataaactgaaggacagacggttcgagacactactgcgcgtgaccaccacacagttgattatatgatagaggaataataatgaaagaagaagtggaggggcaagaccgcaggagtgagtgggtaagagggacggcagcagccagctttccgcttcaatgagaatagccggaacaagcttgcgagtcgcgacgaccctgagtacggttatcgacagggggtaactatccaggaggaaccaagtccagagcgttcagaggaatgttaggagaagaagaaaatatatcttttaggcgtcaaaattggatgagttagtaaaccgagttcacggaccattcaatgaaagaggcccaggcacagttaagcgcggagcaaagaggagccgtgggcgtgaagagaagctagcatgagggtaggcttctgactgatagacgtggcgaccgcaaaagaactaaagagtgggtgtcgggcctgtcggcatccatagttttttttttgtttttgaaaaacctcaccctc

SEQ ID NO: 6627 - DNA, 824 bp, Emericella nidulans
gcccgtcaacacctgcgagccaattaaggatctctactgggacgtgtggaactgtaacgcgactggtgtctactcaggcgtccaaagcagcatgaatggcaatggtgacgatgactctaaccttgacaaaacattccttcgcggaattcggaagactgatgaagatggtgtcgccgggttcaagactgtctttcctggccactactccggccgcacaacgcacgttcacgtcgttgctcacctcaatgcaacacttctgcctaacaatactcttacgggtggatacgttccccacattggacagctgttcttcgaccaagacctgatttccgcggttgagacgacctacccatacaacaccaacaccgtagcgatcactgagaatgcaaacgaccacgttgttatagtcgagactgaagatagcaattccgacccgttcttccaatattctctgcttggtgactccattgaagatggcattttcgcttgggttactctaggagtcaactcttccgttagccacgactcaactgtttcttatgccgccactctgatctctgatggaggtgtctcaatatcaaatgccggctcgggtgtttctttctgaatgcacacagatcaattaactgatatgtgtgaatgttggtcagctttgcaagcgtctcgttttgtggatttggttcactttgttgctctatactgaggctgtttcataagctgacattacttcaattccacctatttcttttgagaaaaaccataattatcctgattgaagataccccaaaacaaaatacgctccttacccggtcatcgatagacac

SEQ ID NO: 6628 - DNA, 635 bp, Emericella nidulans
tgttttcgtgcttcagggccgataagagttgatagtgggtgcatcccgggctgaacggagagtttggcgaagccaaggactacgcgggcaaagatataaatcacgatctgacgacgttagcatagcgttctccgatactcgtgatcattgaattgcaacgaacctgttgcgtgatgctggacttgtgccggccgaaaaccgcgtagcctcccagcagtcctgcaaggaaactatcgtaatgcccctccttcccgacaccagcggggttgagattgcgcaagacaatcatagagctcttgtatataaagcaaaagacggcgaggttacgggcatgttggcgggtcgcgttgagaacgagcttgactttctcgcgaatactgcatgacgtaggtatgtcagttgatgtcgcgcggccgtaagagaagatggagagaagatggagatctgggttgagtagtgtcgatccggggagtcttacgttccggatcgaaaaagaaaaatcattctataacagaaatcttattagcatactatccgtgagggaatacctggaggggttgtcacatacaccaaggctgccggaaccggccttggcgccgtattctgcgccattgctaataccctttaatggtaca

SEQ ID NO: 6629 - DNA, 534 bp, Emericella nidulans
gcaaagccgcgcggccaaatgctttgttgctcacgctgcacccatcttgtgaaaggtttatggctgacagcacgcatcgagccaggagcgaggacttgaggttcgcatttgtctagcatagtccgaccattatacttaatggaggggatcggaaccacagttcatgacaaaggacagaccaaccaggaccgggaaaagggctaagatcgatgcctactttgaagacaacagactgaaccaaagggatatttttgtctaaccgaactcgcatattggagcaatggaatgtagctatacacgacaccaagtgccagataagcacgaatcatacactgcctaggcacgggataatcgaggacgagacatatgaagtgggtactcctgctctctgaattgtttcaagacatagagcataaagagggtgcagacagaaaacttggctgtgactgtgggctccaagactcactggattgaactccagactgagaatgggagagaataacattataacacgaaacgcaagatcagtcaaga

SEQ ID NO: 6630 - DNA, 655 bp, Emericella nidulans
aggccgcgtctcccaactctatatgcaataacgaacctcgttgatgtccttgccctggagcttttcaatgagcttctcgaggcgctcgtcgtcggcgtcaacaccgacggaagagagaacctccttgatgtcggaggcggagggagactcgttgccagcaagggcgaggaggaggtaggctgcgaggtgcttcattttgaactatagcacaaaatccgatcagtcgctaatctcagtgtcagccgtcaattgaggaaatcacatactgtttgatttaactatcgaacaagagaatcaatcgatttaaccgcaagttgggcggagactgaaacgtcgagttcgggttgggttgatgtcgtgaagagggaaagaaacgaaaagttcgagatcaccaaattagcggaaaagtgcgttgtggctggtgctagtggctgagccgactaagcgagctctgtggcggttaagtagtcacgtgactggctcattctagaagacagcatggagggatgttccttatctgtcacgcgcaataagacagcttcttctgagggcctgaaactcacactgcaccagcaaaagtttggcatcacgtaccttgattcatagccctttttgcacctcgggtgataggcctatactcgtcgaacactggttg

SEQ ID NO: 6631 - DNA, 416 bp, Emericella nidulans
tactatagtagacccagcttcggatctgtattcaccttccttctcccgtcactgcccaaaagtaccgtgctgagaccctgtacgagggtcctcaggacgacggggccttcgctggtatccgtgactgtgaccccaaggctcctctcatgctttacgtctctaagatggttcccacctccgataagggacgtttctacgccttcggtcgtgtctacgccggtactgtcaagtctggtctcaaggtccgcatccagggtcccaactacacccctggcaagaaggacgaccttttcatcaaggccattcagcgtaccattctcatgatgggtcgtttcgtcgagacaataaaggatgttcccgccggtaacatcgtcggtctcgttggtgtcgaccagttctgctcaagtccggtaccc

SEQ ID NO: 6632 - DNA, 592 bp, Emericella nidulans
gtgcttactgccagatacagcttacagcccttcacctattccattacgattagcaggtggaggagcgaccgtcctacgtgtcggatctctcgtagttccggaggctccccgttagccggtcagagactgctccagccatgctgattttaagacagcccatcaggcagggtagaattatttcgaaacttgcactagaatcggttctgtgatcacacagcacctgcgagctataccatatacagcaggccctgaagaacccaaacaacactgttgctacccccatccctacccagcccgccatttggcgtctaggtactagaacactgcagatcagacctcatcgtactggcaacagaccatgcagacccgtgccgcgtctatagcaaggcaatataaccagccactccacgagcaggtggttgcaggaaaggcgacggcgtatatggtaaaatgtcctagtactttacagtccggcatttataagctaaagtttgacagtacctctgtgcactctgttgtgaactaatgggatgcagaacgcttactagtacacggcgtccgtaatccatcttcggcttggcctctaactttt

SEQ ID NO: 6633 - DNA, 867 bp, Emericella nidulans
tagtattctgatggtgagatattgaatctataaaaacggaaggtcagatgttgtggcaggtccaccttgggcgccggcccaagcgaaccacagacggccaacagtctcggcttcgaccatctcgtcacacgtttatgaaccacgatcccttcccctcatccgaggtcagaacgaccggaagaggaagttgcgatggcctcgcagtggttccttattttctttttccttcccatttatctgaatcgacctctcacattcacattccatggccatttgtctgcccacttggcttccaaattattgtacccgcaggaattaatgcgggaacaatattatgattagatagagtgagaaccagccagcaaacccttgaacaaagacgacaataccccttcagactccctcggtcggaatctgagggaatctgaggctgtcaggctagagccttgaggaccgtgctaggctctgcagtcacgagccaactgtgcattgccaggtctgatcttcgcgactagactgttgatctcagggtccaaacatcaagctggggaagcttcgctagttctcattccgcttcccgagaagcttcttcaggcgaagacactctgcagtgtaattctataatactaaacacgagcgactcggagaacccgtcggaccagttaaacccaacccttttgtgctgagcctgctgatgatgttacccttactgtgttttgaactccccattttcccaatacctcagtttatatgataccaccctaaccgtgtcttaacaggttttacccaacactaggcaatgcggtgttttttttttctttttttttataaaaaaaaatttgtggttgtttataaaaaaaaaaaaaa

SEQ ID NO: 6634 - DNA, 911 bp, Emericella nidulans
  unsure (1)..(911): unsure at all n locations
tcgatcatgctgagttgttggccacatggtccacgcctgtctgcagcgtggcaacacgccaacctggccgggcctataaggctgtgacttcgagaccggtctgcaagagctaacagtagtatttgccaatgccgcgattttagccagaaatggatgcaggccatacatgaaaacctttcaggacggtcagtgatgctgcgcgacatcggacagcccggataatatatatttgaaagacccaacagactaaccgtgccagttaacagagtgggcggttggtgccgccaaaacgagcctcgccaattctgaaccagtcttatcgccattgtcccagccaaaggcgcagtcttcagccttcaataaaggccctcgcagtcctaaccggagatttatgaactcttttattccatctggcaccggcactataatcccttcctttccttttctccctctccctcgccccttcccctctttccttcttctccgcttctacctctacttcaaatcatttttcccatatccctttaaacctcccttgtcaactcatcaacgattaaaaccttttcccatggacccccaagcgcgtaccggcttcgggttgtcttctacccccgataatacccggcaaccgccacggcacggaggcccgctgggccttctagtcagagtgcctgcctatcagaatcgcagagatgtcgagctgctcttgaaagtcacaaatcccgcttaaccggacttgtcgaggggaaaaggaggaagggagagggcactatgatgtaccgtgcgattggttttgcacctcaacctttgtcaagctgaaaagggcgggggcgtaaacattacaagggtaggttnggaatttggttcttttttttatttccccacccccaaacaatatatatataattttc

SEQ ID NO: 6635 - DNA, 474 bp, Emericella nidulans
cctgagcctagaggaggtattatttgccaccaagtttgtgttctgcccttatacaagtccagtacagtttgtctatctatgttcctcgaattctccaagtttactgacgtaccctcagaccgtgtttgtgacccgccctagccgccagtgcgtattgtgccgcgcgtactactgcgatctccaactccacaacgtcgacatcgacgcgatacctccagatgtacaatatggccacggatgctaccaccggaatcaaggcaatgcaaggacaatgggaggacatttccgtctatagattcgagattcgcgagcacatgattatggcattcgagggtgcttcgtgcagcatctcggatgtcaatggccagcaccaagctagtttcgcgagcaaggatgcgctggtacttcgggaggttcgacctggggataagtgttatgtccagaggggtcgtgtaagttgcagaaatttgaagg

SEQ ID NO: 6636 - DNA, 604 bp, Emericella nidulans
aataacaacaaaaaacagcaccacacaacatcttacacccattaaaacaccgcaacaccacaaaggggacacctgggaaaattaaaaacatcaaacccacaaccccacaaaaaactattacaattaaacaatcaataccacctaatcacagccatcaaaacctactattaaccaaacatcaaaggaaaacattacctatctcataaacgccacaaaactatcacaaaagcctcattattcctaccaactaataacaaaacgcttataacaccataaattaattctaacattaaccaaataactccaaaaaaacataacctaaacaatttccaccacaaatacataaatacaaacaaatactctctatctaaccaaactctcaaactactataacccaattataatcataacaatacccccataaccaaactaaactaaattattacctcaacctaaactacaaatttaatgtatacatacaaatactattaacaaaccctttaatacattcataaaaaaaataccaaaactccaaaaaactttttaaaataaataatactacacacactactaccataccctcttagaaaaatatcaccattat

SEQ ID NO: 6637 - DNA, 357 bp, Emericella nidulans
accttaatggccagaatcttctcatgtcctcatgcaaagcgcgggcttactacttcatgagcctgccgatcttcatatggtctcttgccttctgctgcactgaactcccaaagctgttccccggcccgtcgttggggctggcctacctggcaattaccaaagccctgttataggaattcgcgctttttctccagtccattttgtgcatccgatggagcacggagctctgatatgcataatatactgtcagtatcaaggactgacagcatctgtgcgcctgattgccctaacgacctctggaactctcgaggtgttgacactgcactgaaaggattgcattgatatcttcatacatgc

SEQ ID NO: 6638 - DNA, 984 bp, Emericella nidulans
ataaagagaccaccaatacatctattaaaagaaatataagagaaattaaaatatatttattacaacaagcataaaaatcaataaaagaagaaatagggaaagtttaaagataaccataacataaagaaaaccaaagaaattagaagaaagagaatattagaaaaaaaactcaaatatacaaaattagagggagacaagattttaactaaaaccaactatgaaagattaaatgataaacacacagttacgtatcgaatgacaagaaaaaaaaaaggtaccaaacaaaaaagtaataaaaccatacaggcactggcagctaaagaacaagattacagaaaaacacagggtacgagtgtaaaaggaaacgagcaaaataatagaaaacagggcaaaaagacgaaggtatatatatactgtaaaaagacgcatactacaatagaaagaggtttacaaaagcggttcaaggattagaaaaggatctggtattgggaacaataaatcgatcaattcatagaaagtatataatgcgtataaaataaatcaagcataggaaaaaaacaaggaatggaattcacaagtgtaaaaccacattggcaaagggacaagggcagtgggtggatcaagatcacacctgaacctggtgatctcgagcacagtacagtatggcccaaggcattaacagaggtattatcatgaggactagataacacggaattaggacaaaggactagcgcaagcagctgtatatagcttccaccaaatacactgatccgaggttagctggctgtgaaagtcatatggtgggacgggaaggagaacagctggaagtggtggtgaactgccgcttcggccggaggagcggaagtgtggccttcagcagaagcgagcgggcggaggactcaagagtgctgaaagaagtgatgttgtgtatgaaatgttcagcatcgaaagagaaagtaaaataaatgggtgggattggagagc

SEQ ID NO: 6639 - DNA, 563 bp, Emericella nidulans
  unsure (1)..(563): unsure at all n locations
aaagggacccgagggggccaccgccatctggagttggcgngncngngacagatttccaggaggnannncgaaacagagcngagagaggaattaagggacnaangcaggaanctccacnngangagcaannangaaccacgccaccggaanacnacggcccacncccggacggacccggngcgnnccgaccanncagcgngcnacaacacagcncggccgaagggaccggaggcgcccaanccggcgacaacggggcacgaacggagaaacgcgaccaacaagcgaaggagccanngacncgngaaaccaaanncaagaggagagagnannanncannggcngggcaaaanncnaannacanaacagagncgggaagggganancannacgaaaaaanacagncaaancagaagaanggcncncgacacacgncgcccggccccacacagcancggccacagcccccacnggaagacgaanggagggccgggccggccccaaaaggaaagaagcccccgngaaggacagcccaaagccgcccgcacgccacccgagccgaaaag

SEQ ID NO: 6640 - DNA, 546 bp, Emericella nidulans
  unsure (1)..(546): unsure at all n locations
gcatttgaatggaaaacgctccgcacaacaagttcttggcgtttataggcgggctgcaacccgggggaaccgaggcagagttggacgaacgcccgcctcgcgcaagaatcccaagcaatacgtagagcccggagggtatctggcatcacatacgctgcaggtgaccgcgtgctagcgcctgctgccttgtgcaagacgaacaacatgacaacgaacgaacgcatccatggaccacatgaacaggctgagacataccagaacatgtgacgacctggcgacacgaccatacagaaaaatgaagagacactcatcgctatcgtccggatacacacagccaacctcaataactgaaatgagcacaaatcgttgatccgaagcgaatgatacacagaccgctcagcagtgtgcgaccttgcatagaaccgcatggccgatgaccatacagcagaccgatcgccgacgcctgaatacgagactgcaaccagccccgcgtactaagagacgatagcntgacattcaccaaggacaggctgtctcgttatagtg

SEQ ID NO: 6641 - DNA, 836 bp, Emericella nidulans
gtcttttcagcttagattgtcctcaatccaaccatgcggaggacggtaaccaaagaaacgagccagctaagatgcggcaatatgcaatgcaaagaaaaccgactgagcttatatggaatgcagagtaagcagatagcagtgaggtaaggaggaaaggtagtgtagaagagaagagagctgagggtcgagaacagagaatatataccagtatagtccctgaagtgggtgactaggagtaaacaaacgttggcagggaaacagaaatatatcacgtgataggtggcgggtgcggctcttcccgattgtcttggcgctctttgctccgagccaaccttcaaccagcccctcgctcttgacctcctaatacttctgcaggtcgaaacttgggagattgaccggatggagtcctattcctacttcgctatttagcccaagtttttacttttgcgttcttagaacacctgtattgcccataccttcttcggtactttctcgtggctctgtgatgccaagggacccattttcgcccttttcaattccagttttaaaataaggtttttacaccccttctgaatgactaccttagtctgtgttctatatctgaactctgtcctacactttcctggtatcgaattcttagtcctctttggctgattccacggtccctttttgcgatcctcctcacttaatttccacggggtttctcccccttaaatattttattcttgtgtaatttattttccatttatttaatttcgttttatatgccccattcattcagttgttttttttatttccaaagacggaatgtggcttgtgaaataatgggctttttt

SEQ ID NO: 6642 - DNA, 482 bp, Emericella nidulans
aaacaccgccagactatatcaataccgtgccactttcccgccgtctatgtttacagcttccattttacaaaccgtggtgacggggagcttgatactgtaatccatagagaatttgaattggcatgcgcccaggccatgccagcggagcctcatgctctgtcttggccagagagcgtttatgctacactcggagccgggtcctgctccattgtggcaggtatgcagcttaacatatgttggcctaggcagggtatgcgttgtccgtacagtactgggctgaccacctcacacatatatatacctctgttagctgacgggaaggctctggcattctatgtgggcattgatagatccggtacggtgactacttgaagagtccgacctaacacatggacggagtactaggtgtgggcatatcatgacggagaacatattctctatgcggacagttcggccagttgcattcatcccttcttgctgag

SEQ ID NO: 6643 - DNA, 567 bp, Emericella nidulans
gtttctagatgagattgaaggtcacttcatcagtgatccaaaccttttcttcctgcaatctaaccaataacacctcctggcagccattcttaccattacgaataaatgcggtgtatactactgactttagatagtgtcgggctcacagctcaaatactgtagccctaaacactgaatgtggtcaggttggatgatttaaataagccatctaggaacttctatttcgattgtagcttgtcgccatcgcacataaagcggccttagtgtctatgttcggctctagtatattgtagcatcctgcaatcaagaaacaaacagctagaacaaagataccaagagaccttcaaactaataggagtatatcagtccaaaataacagcatcatagattgcctttattttcttttcttttctttttttattttcaaaatttcggggttgaggctcaggcgacatgcccttcatagaccgtaagactacaaggagttcaggggttgccctgccaacgctcagtgccgctcgcaccaacaattcccttcactgttagagctgtttcggctctcttgct

SEQ ID NO: 6644 - DNA, 669 bp, Emericella nidulans
agctccgattcgtccgaccgatccatagcgccctcgcaaaggaagaagccgaggcgcaagcgcgcagttttgtatactggttccccggcatgaacatcgcctgtctgcggatccatgaagtcgcgcctctaaaagacgtgcagaaagaacacgagagcaattgggaggaagcagcagtgaagcagctctggggatgggtgaatcccgaggctgttgcgagggcctgtcttctttctgttgagcgcgcagagaatctcaaaggctgccaggtgttgaatatcgcagcgccgacgacaacgcagagcacgccgtctgctgagcttgcgaagaaatactatccgaacgcggagatcaggccgggcttagaggggaataaggcgttctggacaacggacaaggcaaagaggattatcgggtgggtgcatgaggagaaggagtaggttgagtctggtggatatcatatgtgtgaacagaaagttaccgggcagggcgtattgcttgcgtgagtggactgctcagtaactatagatcataaactgcattcacatatgttataccattcatatcaagctgccttacctcttaaatggagtgctattgcctttgtgaaaagacaccgttaccagaccagtctagggtagcggcaccaatggtatacgcgtagactga

SEQ ID NO: 6645 - DNA, 1108 bp, Emericella nidulans
agatctcgttgactcttctccctcatactgtcatggatggcgtgtacagctttagtatctactcggagtctccagactccacacgcaggctggcctatggctcggttgccactgtatgtcatgttggaaacctgctggatccggtggagatggcggcccaggaacaggaatgggaggcggcacagtcggtactgcgcgaggctcgtgagaacaccacagttcatatagatcaccgcacattttataaaagcctcgctgctctagggttgaactatgggccgacctttcggggcctggaccgcatcactgtctccagggagtatcgcaccgcttgcagttcgctcaagattccagatactaagtcagtcatgccagagcagtttgagtatcctcatttgctgcatcctgcaactctcgactgcgcctttcagctgtcctttgctgcattacaggcgcaagatgacttacgacagccattcgtgccagcctctgtgggtagaattttcatctcgacagacttaccatccggtgcggggtcatcttttatagggacttcgtctgcgcggcacgtcgatgggtccgtagtagcagactctctttttacggacgcagacgcgagcgcacccaagatcgttattgactccttggctatgacgaatgtgggagacggttcctccgagacggcggagatcccagcacgcactgctaatctcgtctggagggagatgtctcttccgttatagggtctcatgtgggcaattccctgaatgggtgatacgtggcttgattcttaggcataagacgccgacgccacgtgctgtcgtcgcgtgccgacattgacatggtggtcgctaaatgcttgcagatacgctctcgaccctggagagggcgttgtgggttcttaattaaggggtcttccaaaccgttcaaaaagttccccagctctcaaaaatgtggacccggtatttaaaaccggttgcgacttaaataaaaaagggcctccttattagcccgggcggggtttatattctcggctggggggtaaaaaatttttttttttataccactcctgttttgtgtgggggggaggtttatttttttgtttctt

SEQ ID NO: 6646 - DNA, 585 bp, Emericella nidulans
cccattaacctgccccctataaccatccatgtcaccgcagctgagcttcctggttgactacactgctactatgaccaggagcacttactgcttagagctggacttggattaatactgctgagtaggcgcccaactgaaacctgaccccaaaccaactgcttattgcataactcatccaccgccatgattgcaccgccagtattattgatggacctgccacttccatatcgataggaatgtgacctgacaccctggctatctctgtcaccctgagctcatctaagatccctcccctcaagattcaggctgggaactcaaaaagcccagttcaactgcccagtagctagactgaacactcgagccgtcgcccacaatgcatcggtaatctgactacagacatacttaccgcggtgtctactcataatcgcaaaagaccccaacactgatggaatagacacactgcatcctggatatcacaatgccgagaatgatctagaccccgtttgcactccatgcctagccagttcctaaaatatacagaacacctatacctcattaaagcagcatagcttatatgccaatcca

SEQ ID NO: 6647 - DNA, 680 bp, Emericella nidulans
tttacaggaggttaatccaaaagttggggtttagactagcagaagttctggaggaaattggttgctagggaaacagaacctattcgagcgtcgcacggatttttggaacttgagaaacagccagtaactccagttgcacagacggtggctcctttgatgaattagttgggtgctttcggctcccagtaggggccgctcaacccctgcttgagtgctggtcgactggctgtatacgcccgctagtggagattgaaccctgccttgtacctccgtgctgggggctggtatgacatacttttggggctgtcggcttcgctgtgtaccgcagaacacttaaactgtcgtagtggatggaacccctttgatcaggttccgcagattcagggatctatggccttggcggcacagttgtagtatctggaatgtgtcatctgccacgtcaaggtcttctttgttgatgggtgctgagttatcggaggataatactaagggtgtgcaaggctttacacaaagggagaataggatcaactcccgaatccactcataacaactgaaggcaagatagagagtacgcccctgtcaatatgaacctgcctcagttaggacataagagcgctgaatcagtggtacccgagcggccttattttaatttttgcccttggaacattaagggggcggcc

SEQ ID NO: 6648 - DNA, 241 bp, Emericella nidulans
  unsure (1)..(241): unsure at all n locations
cgaccagcccnacagngcagagggcacttttgggcggcaaccaccgcaaaccaacgcccngacgnagcnnnacgcagcaccaacccaggccaggcaaaacacaanncggggacccgcggacccaggangagagaacgcccggccagaacaaaagaacgcanacgcggaacagacacccgnnaagaacangacacnccagccaaaanggacggcncaaccacagncaacancnggcgacaca

SEQ ID NO: 6649 - DNA, 569 bp, Emericella nidulans
ctcactgaggtgacgacgtttcggttcaagaacgccatcactattgactcgctgcttcctacgcggcacgtccagattggtctccgccggtacaagtacattgccgagatcctgaccgggttcgacgtggactgttcgtgcgctgcgtacgacggaagccaggtctaccttgcgccgcgtgcggtgggcgccttcattacgcaggtcaaccagattgatctgacccgacgatcgccttcgtacgagaatcgcctttccaaatactcccaccgcggctttgagattttctggccggacctcgatcgttctcggattgacccggtgagtcgttactccgatctttggtgtcaatactaacgtcacgcagtccatcttcgagcgcagctttacgcgtactgtcggcctcgcgcgccttctggtgcttgagaagctgcccaagtcttcggatcgtgaagagtacctggcgcagcgacgcaaggagcgtgggcgacccccgccaaatacattttatcgaccgaacaggcttgctgggaacattaaaaatgactggcaagacgaaatcgccgaat

SEQ ID NO: 6650 - DNA, 565 bp, Emericella nidulans
ccattttacctgttttgcttggtaaaaaaaaaaaaaaacgccaccgcctattcgccctatccattcatagcagagaaatgatcgaccgccctttgttggcctctaataaggcggcattatacacgtgataaccgaatgatcaccgagagacgcctcggacagctccgaagagcccttgggtcctgaaggagggttgcctcgatatacgccagacgtatccttaatagtcatgcctacagagcaggcagtcgctgcatttagccggcagttggcatccgtgtttgtttgctgcgcttgccaccgggaatgatttcggtcccctccactttccgaatcgcgcacgggaactacggtactccgcaggctcgggttattgaatctgataagatcattgcagggctagacagatttggtactcgattggcttttagccctggaggctggtctggttcgcgaatgacgaaagatgattactacgtaaaccgtctgcagtctatcaacggacgtcattcgccgcacttataagtacacgccagccagacagtagatcagcctgatacaagac

SEQ ID NO: 6651 - DNA, 878 bp, Emericella nidulans
ggggcgatatctactactatagcgcaatgcgagctgagcaggtgagagttggaggaacaacagacggtgacgtttgttgttgttttgctgcttgttgactcgttgcttgccgctgggcggaggcccgtgtttacgtgggagcccgactgggactagcgtggtctgctatcgataagcttatccttgcgtctttcttcctcagtgctccttccccaatacctttccccatccaccaccaacttgtctactcttcttcgttcatagatctgccctgtacttcatcctgcatggtgctcaaactcaagcaattgtggtacactgacacgatcccttcttcacttcgtcgctggctagcaagctgtcgggagtactaaaatttactagtcgatccatggttcttttccgttcccgcgcaagcacccttggtcagggtccgcgatctagtgcgatcaagcaatgcttgagttaagctgaagctgctttatttctgtttccatgcacaccggcagctataaccgctggcttctcttttgatctgaaatcttgaaatcctgatcgacccagaaaatgcttagacgcttagcctatcgcggcattccaccgaagccagcaaccattttccgaggccacggccgcatatatgcagtgtcttaaactatgagcgatctacttaatattcgccggaatagtccgtggaggctgatcaaccacctatcttggaagaaggccgcataccacgcgataatttaacatagcagcggctagacggaacattccatcttacgcggctctgattcaaagaggtgatcctggcatcggtatcgatttatttacaccatgcttcaaaccatgctcctggttcttgttttagaaaatgc

SEQ ID NO: 6652 - DNA, 492 bp, Emericella nidulans
cagtcctagacgagaacaaccaactggtcgagatagtccatgagcagccggaagatgagccagtggatgatggctggggcagcatttggggctcttcaaaagataagaagaagtcaaagaagaacagaatcgccgcagagcctccgccccctgcgcccacacctccttccctagggctcgagcgggaatttaccagggactccgagctcgagagagaagaccctatttgggacgattatgacggcaagcccgtaaagtcgaagaaggaggagacccctgttaaagccgtcaaaggattctgggccagcttgggagcagctactatgggaagcagtaaaccaaaggccagcaagaagaaatccgaggagaagcccagagaacctgacccggtaggagaaataaacgctgctgaacctggcctgattgatattggcgaccaaccagcggacatcctaccgaaagcgccgatgcgccattcggcctgacgcaaat

SEQ ID NO: 6653 - DNA, 756 bp, Emericella nidulans
agaaaaaaaatggcgctccgcacgccatgcggacgtcattcgcaaagccagtccccgatggtctcccgtaaaaattcgcttaattgcctcctcattcggcgtatatgaagttctccaaggcatcggagtaggttccgataccattagtaccttgcttatatggcgactcgtcatctactcttcgcttcagagtattgagagatgcgatggccaggttttgcgcgctcgtgctaatatacgggcctctaacatcagcgtagatcttaagggcagggctgccaccttcgccacgatgcgggacatgtactgctgccgaatttatcgctgtacagataggagcacctatcgtactcctgtcttgccctatcgtaggtgatgtgaaggcccgtatctgtgttgcattttcgtatacttctctacttcgttctatgtccatggtcttcattctctcaattgcatatcatttcgctgcctgcccattgttaactgggtcaacgtgttacctgctcctgtttttcatggcgccctagtttgtatctactgagtgtggaacttcacatgtactcacactattcatgtcgtgtctactccaacacctcacttacattcctctcctgcatctcctcctctgtgtctctctctagaattccatctgtgcgcgtgttaacgcgtgctctctttgctcactatcacactcacttatgctatagatctctcttattacttctgttgactctctgtgtactcgcatagctg

SEQ ID NO: 6654 - DNA, 471 bp, Emericella nidulans
cccggagatggtggaacacgagttcgacgcgctcgcctttctgcttataccatgactaacattcttggccggggggggcatcagcactgtacggaggaaagagccacaccatttatgagcttttgctgacccactacctctagacggaattccttaaagaatacgcactctttgcagacacggaatggaacatacgatatctgaaccatcagcactgtacacggtacacttaactgtccacgctgtatgccattatcatactgcacgaatactattaactcagccctccactctcatacaacagaaccaagtatactcttgacatcgttgcaccaaggctgacattcaatgcaaacatacataacttctgatcacgacctaaagatagaaactaccatattactctacgctgctctctgcatcatccatgaagttcgaagacgaacgtgcgtgagacctctacacacgctg

SEQ ID NO: 6655 - DNA, 438 bp, Emericella nidulans
ttcggtcctcaaatgccaaaaccacgaaccataagcttaaccggactatgcaaactgttcttttcaaccttgtgacctcagatcgtacctcgtcgaagggattatgggctatcaagcttacgcgcgagctctggaagaggcagatttggacggatgctaaggccgttgagatcatgaaggaagcgtctttggcggagaacgaaaaagtgattgttggcggagtgcgcttcttcctaggtggagataaggagcgcgaggagatggaagaggagagtagtgacgaagaagccatcgatctcgggcgggtcaaacaccaagtcggaatcaacaagaagacgaagaagaaggcgcgcgctattgaaaaggcaaaagcgactgtccaaaaacgagagcgcaagaagaaccagcctcatcccctaaatttctccggcctgcatc

SEQ ID NO: 6656 - DNA, 460 bp, Emericella nidulans
acgtttccggcgcggtcatagctgttttggatagacagttgcatttgttcctccagctaatgcggagttagattagctgactgtacggccatcacgcatattgcgttgcgcatatgggaaagtgaagcggctcaaggaagtgtcacgaaatcggagatattctcaaaaggtcataaagtaaaagaaagtgagacgtacgtgttcgaggcgattctgaatctgttgttgtaacccgtccaactgatgcgaaagtgcccggaggctcattgggtccagcagcaatcgaccgtgactgctggcggcactggcagcgcgcgagctggagttgcttgtacgtccagtacctctgcccctggaagccccattgccagtgtgagcgccctgcagagcaatctgctgttgttgacggagaatctggatctcggagaggtgaggccaagcgaggtgtcgggaatcgagg

SEQ ID NO: 6657 - DNA, 530 bp, Emericella nidulans
ggaagcgttcaacacataatgctaccatacaacatttctacctacttttactgactgtaattattcgggatgctggccacttatgagagccatgctcacaaactatcaaaacataatggcacccgatccacattgaccggctatcactgacttgcaactactctcaagccactcaatatggcagggaaagcctatatacacatactcgatttaaccgcaaacgatccttgatcatgaaatcactgcctatagcatcattaacagcatcatcaaagacacaatcttaaaactctacctagcactcagaacgcggatcctactatatgccatccttttaaaccaaaccaggcctgatcttcatcggactaggcggaagcaacaggcctactggagctgcgcaatgattgttccaaagcaatacggaaccatggaacatgtcctgacaatgatgtgtgtatgcaccaaaaagcacaatacaggttcatcggttgcgtagcctcagtatatatatgaagccgaacattgatgct

SEQ ID NO: 6658 - DNA, 605 bp, Emericella nidulans
  unsure (1)..(605): unsure at all n locations
aggcaggncccataaaggagtggatatctcgttaatggcgtacgtatttctttgagtctaggtatggctataggaggctggaggggtgactaacctgctgttcgcagtcacgcagggccaagagaactcttccccggcgtcgtcttggatggatgcgccggtgttctgatgaacgctcgaaaggagttacattgcgaattcacaggcgtgagcgcccatgccggtggcaatccatgggacggcgtcaacgccctagatgcactggtgagcgcctacaacaacatcgccatgttgcggcagcagatgatgcctgacgaaagaatgcattgcgccttccttgagacacccaaagtcgccaatgttatacctgcccatacaaaggcctactggcaggtccgcagcccgacattaaaggggctgaattcgttgatgtccaaagcgcgcaggtgcgtcgaggctggagctgcagcatcgggatgtgacgtgaaaatcaccgagtaagtcataatggtggaagttcctaaataattcttcggctaatactgggtgggggtggggtgcaataggaaagagcttgatgccgacatcaagctgaatgacacact

SEQ ID NO: 6659 - DNA, 530 bp, Emericella nidulans
gaaaacacaaacgaactaatgcacaaattctactgcataaactcaacagacttctttgttttcttgttatattgaagggcagccaagggcatgttgttggacctcatggtctttaccttgttggttatactatatgactcgtagggggatttaaattcaatgaaccacaggacggcaagggaacgggtaccctatcatcgctcggccttaaatatttgtttgctcatgaacatgcagggctatatctctgattatctgatatgcccttgcggcagctgaaatgtgaacctatatatagtccttgtttttctaatcaacgtgaagacctgcttacactatatatcatagtggaccgacatgagaaagcccagccgaccttgcaattatatgaataaccccgtatctaaggctcatgtcctttgccaggacatgagattgctaggcacaacagattctctggcggaataagccagtctcttatgcgacgctggtaatgtctgccgctctatagacctgcccatgattacacg

SEQ ID NO: 6660 - DNA, 1180 bp, Emericella nidulans
gaggtaaagggagaagatatgggaatgtaggtgtggagtaaaagggtaggaggagagtgaatggtgtacataagtagaggaatggtgaaagggggagtatatatatctggtatacgtaggaagaagtgattaaaaaaaaataagtatagagctttattttataactaggaaagaagcgagaggaggttagacaggtcaagatgtgggggagcggaacccttttccagcggtgatgtggacctggcaatctcggggggtaactggggcccgaaagtcaacggcctccctgaaaagcagttgaagagctagttttgcccatattcagttgaacggcgaggtttgattctgtccccaaaaaaatgcttccaagggactcagggaatcctttgggcattcttcgggggtgcagaaatggaactctgaataatagtagtcgtcgaggaatacggaatgcacctgatcgtcctgttgtgctatgccgggggtaaggtggttcacgtaaaaaggtacgggctggccttcatcatacaaggtgggcgctacacctggaagataaaatgcgtcggacagcgaaggtgctgttagaaggaggtaagttagcggagataaccgcctgttaagccgcattgcgggtgtctgaagcaaaagggcgcgattagcttggaacagtaaatttggtgtttggccggtctagggatggatcgcgtttggtcgacatacagtctacaactgccacaactctaacagaccaaggctcatcgaatacactttaaagtagcaccactatctgcggggaaaaaagggaaagagcctgaaaagaatggtgcagagaattattgttggaatcgagaagcctaacggacacatcggcaaaaggacaacagcatcagccctgtgcacgtgactagtctttcctttcacgtgctgataagataagtctcgagatttttttccttccatcagctgcggagtgaggaaaagtgaggaaacctccagacgaaatgacaaactcagcaatggcgtcggcagtggcgcaacagcaacagcctgagttgcaaaacatatcggatctacttgagactctcaccacgtccctttccaccactggaacgtcccttcccagcactaagcgcgaatccctacggaatctctatttaccgccgcagatggcatttcgttg

SEQ ID NO: 6661 - DNA, 340 bp, Emericella nidulans
cactatagactactaggatcacgacactgctattatccaggctgcagacaactgagacatcaccgggggcggaaccaacacagatggcgccagactcccggacagttggatggagcacgagcatgtcacggccacgctgtaccgaatgctcctgagccaatagtaacgcaatcacattcgagatgcgcatcacgagtgtagccactgtacatatgttcgtgcctacaccattcaacgtaccgagcgcgactaccaaggagatagatgctacgcaggccaatgccgcgggacacggggatccaatagttgcgaccgttgttatgcacgctatggcgctgat

SEQ ID NO: 6662 - DNA, 815 bp, Emericella nidulans
ttaactcgcacaagcgttacctagtcttgtcagtgataagattagagtctctcgagagttgcatacattccagggtcatgaacggctccgcccatgacgacgacttccttggcacgtagaaatgcctctgggtcagcagcagaagccacggccaggttggtgagtggtccgacagcgacaatggtgacggtgtccgggtcattttcgcgcaaaatgcggagcatctcttcgtgcgcaggacgcttcgaagggataaatgaccggtgtgctccagagccagatggtacaggttccagctcaacaggctcgtgagttgggtcgaaaagatgctcccatgcatcttggggagtcaaatgcggatgctatatgtgtcagttaaggccaaacaaataagttctccaaacacttacgctaccatggattccacccaagccatcaataccatcttcaaaagtcagcaatagggtgcaggatgcaagatggggagaggctagactcacggaagtagtctgcgagcatcttctgatcatcgagaggatcctctgcgccgagtgcgacaatcgggggatgagcccgcaatgcgtcaaagccctcaggcttaccgttctcatggcgccacttcatctccctctcgaggatgtggaacatggagacaacattgcgtaaacagctgtatgccattagacaggttgtagtcgcgcgcagtgcaatccagcctacctcttacactcgacatttccgaacgtcagagaaactaacaggacttcaacgtcctctgccttctgggaaaaagccagcaaaagagcgaggatatc

SEQ ID NO: 6663 - DNA, 483 bp, Emericella nidulans
accctactaaagggatcaactcgcgtgcctggaaaacctctaccacttcgcctttggaactgaaactgtaagtgcagctagagcagctcctttgcgcatatcgcttgctctgcctccttttatctttttgtctcttcacaaaaaggttctgagctcctttcctcgaccctgaaactttcatctatctcactgcaccaccctactttctcctaatttactacccaactgtagttcaacctcgataatcgactatcacatccccgcacatctcaatctaatctgcttagcagttctagccaagaagcagagttcagacgcacattgtgcatgtaaccatgaccacgccaacgttgatcaaccttccccctcctccctccgacccggtgaccccatctgaaatgggaccgtgagtctacagatttatgattattttggagacggaaactgacatctatcagcggaacgcccaattccactaccaca

SEQ ID NO: 6664 - DNA, 459 bp, Emericella nidulans
atgcatgtcatcttgacttgacaaaccctgtacgagaatcttgtactctacgctacccaaccatctcgacgcgggcgaaggggcaatatcactatcgcaacccaaccacggtgaaattgacaccaaggtgcccatatcgatggaggatgcacgatacctacctccacaaactcgcagagtggccaacacacttaccccaggacatctggaactgacatcttcatcccaccacactcggattgcattaataggcgcagaatcaccactgatcctgattgcggaaaaaaccctgtctgccggactgaggcctcatgatacactgcatgaaggactcaccacatctgtttggaagaacgcgcccatattatcgctaacccctcacaacgtattcaatggacgtggtccccttacgcccgacacttttgagcaccgaacaaatacctgacagggagtattatc

SEQ ID NO: 6665 - DNA, 618 bp, Emericella nidulans
cctcgtcatcgtgatccgtatccggcgggtgagatcgtagccggggaagttggagttgcagggaaataaggagcgcgcaggagttggaagttgcggttctgagggagatgtaggagatgcaggataagaagcgttctcagctgaaggagtgttttcagcctgaatcgagtgttcgtgaagcttttttgtgagagtgccgatggagagacggtgcttgtcgtaggcggagaaggggacggaggtgggcgcttgttgtgtttgttgctgcggcggcggacggaaataaagcgatcgcgaacgaggaaagcgcggcgcagcgaatgatcgaggcgaagggcatcgcgaggacatcggcgagatgagggcgtcgcagtcagtcatgggtttgtcgtcgtccgtcggggtcggcgtgaggcggggtggcctggacgaggagggagaggagaacgagaagtcttcgaacatgatgacggtaacgttattccaaacaatccagggacaaatgttcaacagctggaaaagaatgtgaatttctaaaaccggcagttaaggaatcctgctgggactgtgatgatggtggtgagtctcctcggcaaaatgatgtccaaaggggttata

SEQ ID NO: 6666 - DNA, 623 bp, Emericella nidulans
  unsure (1)..(623): unsure at all n locations
tatatacacgtgccactatgtgacactatgaaacactaggatcctgatagaggcatgatatgggcacaccctactacatatatactgctccgtgaagaagtgtcctaaatacaatgggtgaaacagatatgcctcaaggaaaaaatagcccaacgaaggctgtacatactgacacaccaaacatgtgatagaccaatccatagccataaggtgagtctaatcatatcgggggatacagttgtgaaacctgtacatgatagccacgccagtgctaggaaccaaanngngattgcactggcactgaggatgactgggcccactctaggtagccttactgctggatcaaggatggtgctattctcctggctgacatggatgtaggaagagctacgaaatggtgcaacaatttgtgctggccaaatgatagtcttacttgtcaagaggagccttggatgggtcagagaaattcatggtctttaaatgcgactcttgggggatatgccattgcttggcgggtaccactgagaaacctgcctgtatccccagattccccggtataaccgctctttccctagaacttatcaacatgttttactttcatgattctttatttttttttttgc

SEQ ID NO: 6667 - DNA, 493 bp, Emericella nidulans
cgatgcttcgggtcgcgacggtattgaacgagtgttggggcttatggaacagcgcgcgcgagagaagcagttcggcaatgacaaatgggtcggagttctggggttttcgcaagggaccaggattgcgagcgggttgttgttggatcagcaaaggtgggagagagctgagaatgaggggaaaggaaaaaggactgtgggcgaaggaatcaggttgaaattcggtgttatgtgtaatggaggtggaaggccgatggagagtgaggttgggtatagtatgttttctctctgctcctctgaggctggaaatacaggttgctgatgagatgaatagaactggatgagccggacatgattgtacgaataccgacgttgcacgtacacgggctcaaagatgaattcctggcgtttggacgcgagcagtttgagaagtactttgataaagacacggccacattatacgagatcaactaccaccatgcgatgccctgggtga

SEQ ID NO: 6668 - DNA, 529 bp, Emericella nidulans
gcttgccgttctgttcggtttcgctaaagcgcatcaccgtccaggacttggcgctcagatcggcggggttatcgtaaaccccgacgcagtgccccacttcatcacggatgtcgttccactccgaacacgccacctgacaggctttacagccgatacaggtggaaacgtcgataagttttgcgacttctgctttgtaatcacgcacctgagaaggcggcgtgatggagttagttgcggaccttttgataatgtcctgcgtttccatagccatctgttcgcccccttacgccttctcgatgttgactaagaacgctttatattccggcgtttgcgagtttgcatcaccgacattcggcgtcagagtgttagcgatataacctttacgcgcgacaccctcaaagccccagtggattggaatacccaccgtttcaacctgctgaccatttacattcagcggtttcagacgacgcgttacacagccacgcgcggataaagcacgcttgctggagacagtgacacgataccatta

SEQ ID NO: 6669 - DNA, 456 bp, Emericella nidulans
gaggagactgcgtgagttgccataccccctactgactttttctaataaacacaacccaaacatacccctcgggtggaggctccatttttcaaccccgaacaagccccctacaaatcctgcgcctggctttcattcggagctcgcacacatgcaccacctattctacaaatcatttgagactctccaaaccaatacacgctctcgctgtagttactattccatgaacacacacccgggtataaattattgacacactattccgaagcatcccaccaaactctggacgactgcatcctgaaacttagctttacaagccaatattatactattacacgactggggttagcctgcacatgcaactgaaatcctttccccgtactaactgaccccgtagccaacaacagctacctactcaaactttaaatcacggtccacattctcactgcgttaacctga

SEQ ID NO: 6670 - DNA, 655 bp, Emericella nidulans
ggcgtcatggcattgcatcccttttgatgtctaaatctgctactgctgcacataccctgcatgagtcacctggtctcagtagcctggacatcgctccttcaaactgctgtcagcatcagagcatgctgctctccccacgagcgcgtccttcatgcaatcctgctacctggttcggttcctgaaactaggattacgaggagtcgcgttctcggcactctcgcgttctcgtagtattcgtctgcatagctgcgagcatcgactatactgctctgttgtatcgtggtgaaagtcctggcgatccatgggttaccacccaaaagagagcaatgtcggcgctacggtgtatagctaacgttgacgcttgacgtcgatctctcccattcacaccagactgagactgtagaaagtaccatttgctgcgaacgtcaagtatacaatgcaacggaccttggtagagataactttgatgatccctctagaaccagaattatccccaggttaagtaagcaatacgatcacatgtaatctttcgatcagattactgttgtaccacggtctgctagctagtatacggaaagatcaagacacagttccacgagtagtcgtctgtgacaaggtattaaagggatcaattgcttaaggtttactcacggtt

SEQ ID NO: 6671 - DNA, 455 bp, Emericella nidulans
taatatttgcaatgatctagatgttgagctcagcgaacgtggccagcagccttttgacgatggtagagactatgatgctcaattggtcaaaggtttggccttgtggcgtggaaagtggctgaaaactacgagctgaatccagtattatcgctgcacccgggcagacttgcattggatacagagctatatcttcgggtgctgtgggtagacggagtatgacgtgagaatcccgtcaaaatcttcaacatataatgcacgaactgacagaaatacaacttgaccttcttatataccgcctggcaacagttcaggacgcggactatgttgaggcactaacaggacaaaggccaatgtatccggagatatcctctatagatctccagagactgagaggaaggagcagtgaggccaaaaagcatgaagggaaaaagcctagtttgcttgaccatgatttg

SEQ ID NO: 6672 - DNA, 584 bp, Emericella nidulans
aatatcaggttgccattctattagaaaaaaaaaaaaaataaagcgttagctggttgaatattgaattttgttagaatgtacctctatttcgggcaaccagtaagtttgaggactttaggccttttacaatctcatgtaaaagatctgtccactcagttacttccggcttgggccatgctcaattccatagatttgttttgaagctttgatgctaaagatttaagggtggcagcttctgctgggggtgattggagaacaatattgattgtgtcttgtatttcttcaggcaccttcacatcaacaaggatccctgcacggaaaagtgttcgtgtacagtaggtagaatcgctcggccttcgtggactagaggatcgggatcgagatacagatgatgtagaaggtggaggaaacgtcatgttcagctgtcctgctgccatctcaagccgtgctagatactcctgtctcaatagaaggagagcagaagacaatggatcgtgagctaacttagttcgcttataatcaagcggaaaaagtatcgtccactctttgcttcattttgaaatctcgtaaactagtgatgagag

SEQ ID NO: 6673 - DNA, 651 bp, Emericella nidulans
aacgattgtggacttgcaaccgcgctccttatgcaatacctctgggctccaaatgccgcattctcgtcgttttttcaggtataagagagagcgtgcgtagacgatgatgtgctatgtatatataccaaaaaatgggtgactgccccactggcatactatgagcaagtccatttgagcgagccactaagcgtagccctaaaccaaactcagcagccaagacacatcagctgctgacaaagcgttctgggcatgatttcatcatgggaatcatcaatgctttttttattcccttttcatccgcacgtgcatctttgttccagggccagccagactagaagccgggctggcgtcggttgatcgacctccttgcctatcacgggccggaagccgtccgttgtccgcaggtaacctagctggaacgcccactcactgcggccctgcttagggtccagcctgtttgcggcgtccatcttgctcaaccttcttggcttgatcttcccccgccgatggggacccccgcctctaaggcttgtcataactgtcggcgacggcggttgaaatgcgatcgggctgtcccgtcgtgcgcgaaatgcttccacatcgggcaggaatgtctgggatatggcaagctcttcctctggaatcaaggcg

SEQ ID NO: 6674 - DNA, 481 bp, Emericella nidulans
ggagcccgtcgacgaaggaaatgtatttgcacagagtgtttcgaatagcgcgatagttggataactagaaatacagtaggaaattcgtcggtctcgtcaaatcatcagcgctgtaaagtggggggttctgtatataaatgacggcggaggagagagaatgacgagtcgtggagtggagagacaaagcaggcaagagcacaaaaagccggtgaggtagaaagacagtgacaaactgtaccggccacccgcagatacgcccttctatagaacgattgagggaatggagattccggcccaaactgaatcacgaagccgacttttgaaccttgtgccgttctaataatcggcgttgctggcggagagatacacggcgctaatcccaataggggctagcctccaacacgtgagtgtatacttcgacagcaagaggatgaaaacgcaaaagggcaaccatggccagaagcttcgtagtaggcggcaa

SEQ ID NO: 6675 - DNA, 246 bp, Emericella nidulans
ctttattcattaatatcttgctgaaagagagtagatcctatcgccatggattgacaaagacaagcgttgtttcttctaccctattcgttgctgactggcccgtctgaatgcagcaagctgtataaccaagtcaccattccacagtcgtttatttgcggtctgataagagccggcaatagatggattgtcacaatgaacggggctcaatactgctattctcagtcagccctattttggagtcatttg

SEQ ID NO: 6676 - DNA, 490 bp, Emericella nidulans
ctttacataccaccttggctgagaagcctctttttttttccttagtctctttgttagtctgtcttctcttccatcaactgggtcttggatgggatctacatccagttgacggtaacaaatcccgtatgtatcagccacaccgtttgcaaataccagccttcccggtcgcagtcagaatgctggccgtaacgtacccaaaagggtatgagtacgaaaggacatacgcactttattgtttacgcatatatctcacgccaggaatcgtatattccattattctgaatccacgcttgctggtcaggggaattggaaggggccggaacaaggaggacccaatctctaaatataacatccaggcacaggctcacaactgcgtcatgactatagccatcgcacaaatcctaagaacatgctattgtttgagttggaaaacaatatggaaaacaatctgcgcaaccacggattcaattcggattatttgatggttttt

SEQ ID NO: 6677 - DNA, 110 bp, Emericella nidulans
ttgttagcacatgtatagaacgatgaggcactgtgatgcacaggatctcggaaggcgctgaggtcaagagcactgcggtattgtgatagcaactgactatggatacgcag

SEQ ID NO: 6678 - DNA, 542 bp, Emericella nidulans
agggggctaaagacgagagataaagataaacgaactcatatgtttccgacagagatgatcaaggtaatgggtgccgacgccaatcatcaacggaccttccatccgaagacgtagaaattcctactgctctcatacgttgttagacatgcccttgacccactactacatagacaactcatgtagacaagaccagagtagaacatagccagctctggtgagtcaaccattactaacaactgagacaactcatggctatcatgatatagagccatgtccacacaatcttcctgaactatgtctagcccactgaagacaggaagattgtgttgagcaccgagctctaatcaattacctaaccttaacgactcaaacaaactctagaaatgccgtgcagcgaaaggcaaaacaacccagtatagtaaaatgccccgctgaatctataaaagtgatttcatcactcacagcgctggtagcatatgccctgcgattgcaaaaattgcatcctagctctattggaaaactattcggataagctccgtcct

SEQ ID NO: 6679 - DNA, 94 bp, Emericella nidulans
ggggcgtcaaatataaccccaagcagccacatagcgggagggttggatactggccctatacaagtatttgtctgcggaaatatatatactgaat

SEQ ID NO: 6680 - DNA, 512 bp, Emericella nidulans
agcgctttgtgtatttgccggctcttggggtggtgtccgttcgacgcgaccgagcgcaaagccggtggcagcgataccgacagtgctaatcgcacagagctagacgtgaaatcagcgacccagcgacttgaaatatgcacagtaaaaatagtgatttgcgagttaaaccagtgcaaagcaggcgagaactgaaacgggcggggagggcgcacgatatgaggttttgaacacagttctgaagaatgcaaagcaggcaactcaccgttgatacatgttccattctcagagaaagctgagaacagtatcaggtaccatggagcttagattagggacatcgataaaacgtggaggagttgacatcccatctgcattgtcatgcacgaggaagctcaggtggctggacacatcagacagtatcgcggccgatgaaactggagacgatcggctttccaaacgaacaataaaacaggaatatcaaatgagatcgttaagagctgcagaaatgaccgagt

SEQ ID NO: 6681 - DNA, 536 bp, Emericella nidulans
ctagaaacgcccactgccacagcggtgtattacccagattatttcctgtgcccctcgatgctcattggtgattgataataactgaactaatggcatggtcttgcgcctatcactgaacatccaaaactatcacctatcaactctccatggtcggatactggcctaccatgtcagcaactgataactgggaaaatagcatcacataccaaaagggagccatgaaacccttacccacatgcactgactacttcaaccccacaaaatacccactaacaagccatcgtggcagtcacaataaatgcacacaccgggccctactgcatctcgctatcgaaatgagcacaatcactattccttctcgaggaacaccatcaagacaagtccagatccagccatctgcatacttgcagatagcagtactgatatggaaggctcagcactgaaaatgctcagcgtttgaccacttgactagatcaccggctcgacacaccgagagacctggaacacctagtactctctttcaagaccacctcaca

SEQ ID NO: 6682 - DNA, 836 bp, Emericella nidulans
agagcatcgtggaagcggtgttcataccctgaccagctttgggctgaacgaaaattagccaaccacgccactgtcatgactataaagcgggtgcaaacttacgctgtgtgtgtggcaggcatcgctcccatgaaaacacgctcatccaacgtatacttctcagaaataccctgtccaatggggtacactgagtaccactccacacgatcccactctatgtagtatggcttgagaatcttcttcgcgacgttctgaacctcctccgcagtaggttctttccgggggttgaagtcggggtcggatgaggaagcaatctgcacgtagagacgaaccatatcatcttcacgggggatgaccatgatggagccagcatctgagtggatggtacacttggtctaaaaacagtgctcgattaggcatggttgagagagatttagggaggacattcgtacctggatatcggggaaatcggttctgacaacaccgtccataacaccccagacgtacgagatgggatccttgtggcggatctggatacctagctgctcgcgcacgaaactgcgcgcaccctcaccactgaacaggtacttggcgcggacggtttcaacgacgtttgtatccaagcacttgagctggacctggaccgggtaggtggcatccaaaccatcgttcttgaaaccaataatggtccacggtctctcgacggtcgttccggccttcttgatctcgtccaagaaaacggtctcaatcttaccctggtgtacaagggtagtgaacggatatcgcgtgtcgatgaaacgagggcagctgggccagtttccggtccgcatgatacc

SEQ ID NO: 6683 - DNA, 720 bp, Emericella nidulans
agcagtcttgcgatgacggcctgcgtaccatgaaagatgccctttacgttgacattgaagacgcgctcccactcggcttcggttacctctagtgtgggctgcacgccattagccatatccaaaagaagttgcgaacggggactgggttgcaccttattccgataagtagttcccgcattattcaccaggatatccagctttccaaattttgtgactgcagtctcaacaagagcagcccaatcgctggggcttgtcacgtcgaccttctgaaagacgagattctcaggattctgggctgcgacgctctcgccaccggctgcgttaatgtccgcgacgatgacttttgctccttcctcagcgaagcgggttgcaatagcagcgccgaagccagagccaccgcctatttcagtgtcatcggagtcagtgggtttttctttcacctgaaggtgtaaagatacatacccgtaacgatggcgactttgttgttgagacgaggcattctagttcttgtgccttagttgctttgttcgagcagttggaggagaagttgttggcatatatgaagtgaaagagtgaagcggggagggaaggcctattacccgaggatatcgaggggcagtcggggggcggaatcttcgggatgaagaccgaaactgaaagatgactgaatacggactacgtgtgagttctctttgcgcggtctactgtcttgccgatcat

SEQ ID NO: 6684 - DNA, 424 bp, Emericella nidulans
acttcgcgtcaattccacctgacagaggcacaacgtaagctgccagtagcgacgaaggtgcgcctgaacctccaccagtccatggttccgaaactttgagtgccactgccagcgataccagctgggtctccagcagacagcgctcgacagcctcgagttcgactctctgcccgcggatcttgacctcgttgtcccgtcgcccaaggtactccagttgctcgccgtttttcctgaccagatctcctgttctataaacgattccgttgcctggaatgcccaaatgtgatgcgtttacaaacaccttggcagtccgctcagggttaccaagatacccagcagcaacgcccaggcctccgaccacaagctcaccaatctcgccatcaggaattgcctggaggtctgaatcgacaacgaaagcatagta

SEQ ID NO: 6685 - DNA, 617 bp, Emericella nidulans
tcatatgggctcggtatgtacaaggatccggctcttgctagttttcggagaccatcctcacatatagggggagggggtgaaggactgcatgggcatctcagcctccaaagctgtcagcattggctgcttgacaagcaactggttaaggacgacgaatatgatgagatgtcaagatatcttccacctggataggatgggcagtggggatcggactagactctctcttccactgacgataatgcattaacacacgccacgctcctgctcattttgatgaccgaccgtgagaaatgataccaaccagggtgaaagaaccgggggatagataaggttgtgctagggcgataatagcacaaccggtggatatggcgactgcggaagaagaaacagggtcagtgggatccagtgcccttgaacctcaaatggcattccaagaaacaagtactacctttatctatctcaggctgtggtgctctatactctataccatgccccattgtttttggcctttaggaatacccctgaatataccggtgatgggccacttgtaaataaaaatgcggcagtctatctttatgaaatctttcctttcaacctctaggacatcacgaaggatt

SEQ ID NO: 6686 - DNA, 469 bp, Emericella nidulans
cgacgctttggcctgagaggatcatgttcggttctgactggccggtctgcaacttaggaggtggtggaaaccttgttagctggagccgctggaatcgggttgttactagtgtcttggagcggagagggttggatgagaagcattcaaagggtatttggggccaagttgctgtgaaggcctatggagtaacccttcgagacactcgtctctaattcactactaatatactctttccgagaagcacaagggagaacaaaagtagagagagattccgaaacttggcaggttacgtatactggcagctgacatcaaataatcagtggaagcaaatacataacccagttaccacacaagttagtcgacccggaacacagcgagcattatgaaatgaatgagcatagtgagatggataaataacaacgacaagcaggtggagcagttcaagaacagatcgcgatgactggtaaaa

SEQ ID NO: 6687 - DNA, 575 bp, Emericella nidulans
tgaagaacacgaccttgtgctcacgaatgaatggtatcaacttttcggcattttacttctcagcatcatcgaccatagcgagcgggtggccattcactagtgccatgagcatctgccgcacgaagggctcaaacacatacgctgaaaagagcaggatggcttcatgatggtcccctgtcaccccataccgagctgaaaggtcagtgatgctgttcaccacgttagtgtgttgcttgagaatgcccttcggaaaacccgtggtccccgatgtataggtaacgtaggcaagctgcttgctggtcagagatgggtcgcgcaaattggctctcgggaatgtcgatggctgctgatcaatggcgctcaagcaatgctctagacgaataatggagagctccctgtcgctgatgacctcgctttgaagtctctctgcaaggtgcgtgctcgcaatgatgacttttgcctgagtgtcttcaagcacaaagcggactcgttcatcagggtaggttgggtcaatggggacatatgccgcggccgactttcagatacccaatatagtcacgataaggttttcgttt

SEQ ID NO: 6688 - DNA, 919 bp, Emericella nidulans
  unsure (1)..(919): unsure at all n locations
aagacataatcgcgaacgctcagcctagcatgcagagggtatgggaatctgactcgcatctagacagctcaggggactggaatgcaatacaataggagacacaagcgaagatacagatgctcccccaagccaagtgaagaatcctccaacttctcttcaccatttgtcaagggcacgacacgcaaagatacagaaggaatatcctagaaggaatatgacagccagtctcgtcaccgtgacaccncaataccttgcggtccatgtgcattactcaatctcgtggaatgagatatagcgaactataagagactgagagcattcctttgattcttctgtggctactggaagtttatgcagaaatttactgagtctctatgaccggccagaacaactctcttcataaatcttgcagggattattgacactccttcaggctgcgaaactagtcttacagaactaaacgagctatgcgcaatgatgaagactaatcttgttgcaatgtgtaagttttgatcattgtgtgatgaagctaccgtacagctaatgaaaaccgcctttccacagcggattaggacaggtcacaggtctcgagccgccatcctaagcaggtccaaggatatgggatgtgacaacaaatctctgatccgcctgttcttcaacaactacatacagccttctttcttcttcaggggccatgttggctcctcccactggcaaacggtacctacgcacggcgacggcggcaacgtggtccgacaccatacacttccattcgttgctaccgtagtagacggtgtacttgtcgttatgggtctggctcgagctcagattctcgccgaactgccagaacgaatccgcggtcatacctggggtcgccagagtcgtcttctgccacgccaactcagtaggtgcagtggtt

SEQ ID NO: 6689 - DNA, 499 bp, Emericella nidulans
gagccgtttgacctgcacgtctacaatcaggacatagaaggcaacaacaccatctttacaacgcatcttgatggcaccattatccacgggaacaccacgctcggggtcaagggcgtacgcaccccattgaacgtgcccctgtggacagactacgtccacaaagttgtatttgagccgcatgcgccgttacctgtgaaaggagaaacaaatgcatatctcggtaaactgaaaaaccatgtcaagcttgacaagaacatccatcagaacagtaagtcctcgagggagacgttccgatacagcgagctaacgattccagccctcaacaaatttcctggcttctctatcgacgatcccaagttggtgttggatcagcccgatcataatttggtggccaacgcaaccctccctaatctgtccgtcatgacgttgcaaattgtaagtcttccgttttcaatgaccgaacgataaactaaccagccaagggaacgaccatgctcga

SEQ ID NO: 6690 - DNA, 1009 bp, Emericella nidulans
atcgcttgttgtaattcgtatcctgaggctaggataattggcggaaggagtagattgaagaagaattggtagtcgaaggcaacgaagtttgtaatgggtgagtcggtcagtcgaatgatcaatccgacgaacatacctgtctactggtgagattccgcgatcacttccggcgggagtttgcattgagtggacatggaatagcatacccccaaagatagacagaactgtttcgtggactgcctcgatcttccgctgctgcaggatgtaactcgtgaaaagagcaagcatcagcaaggtaatcattatgaacagcgcccaggagctgaagaactccttggtgccggcttctggcgcatctcctgaggcaataaagtcagatatagccacaagtagcagtggatttgtgagcgcaggggcgaggggcgaggtgcgaggtacgagaggggctctgaggcgcgtaccatcatcgggatcgatatcataatccggaggttttcctgcaaaacaaaccgattagcagctgactttgtcggaaactcgaggtaagaagaaagggagaagagcgcgttgtcgggggaattcatacgaagaagcgaatgaacagcgtcaggcataacttggcccgccattatgttgaagtcgttgtaaccactacggcgttgacgctccctagcggtttactccagcggcgattttctgacgccaatacgatgcgcacataatagtccacaagcacgaggatgggaagaaagaactcgacgacaaagggtctaaggacaaaatgaagacgagggcgagggtgatgagttggagtctcgagtttggactttggacaggacaagtttcgccagcgtctcttacctagtcggcgactcccgccccagctctgccttatccaaccacgacgacgcgcaaggctgcgcgatttccatacctagcacctccgtaccacccgctattgccgactcgctattccactattgtctggtattgaagtttgtactccgcg

SEQ ID NO: 6691 - DNA, 459 bp, Emericella nidulans
tgcagaatcggactggtcgtccgataccaattgcctcgggcccgatacccccgagcgcttggacgatcctagcaaagacaagactgccagccccgtggggaaattcccagatcaagctagccaggcgtaaaggggcgccgctgtttctgccgctcagcctcctgattggccgtatttttccttgtgccgggttgggtgacagcccatgttcactgttcactgcagggatataagactccgcagtgcgcgtaatgaggaggaggcaagaggggaagggacagcacagtatcttcattgcgaaacagagcaatcagcagtagcagcagtagcagcttggtcgccatggctgacgagaagactgtccagccttctgcagacaggaggcagtaggagaaccgaggaagtgagggtcgccacgatgcgctcaacgccaaatacagccccttgacctggtcgatg

SEQ ID NO: 6692 - DNA, 496 bp, Emericella nidulans
ggtgagaggggttcgtcctctagttgagactttctttcgttgcagctgcctcgtgtaaacatgcactggtacgaaatcatatgacttcgatagtgatgcgagtatgactgaaggaggagtgcggttcctggaacatgtcaagtttaaggttgttccatagagcttcgatggggtcaacacgcgccccatgcttggatgcctgagggctgaggctgcaaccgcctaaggtgactcggaccgcccggcagccagctcttgcttacaatacgtgacaaaactgtgtcaacagttctccgcattccatataagacgaccaccactattggtgcaaagtccgccagagatttatagtgtaagttacatgcgaaccggtacatatggatacagatcattcaagatcaaggggaatcaggtaccggaattacggaggatcactgatccccccttaaactgtgtttgaataaataattgggcttctctcacaggaagttgtgca

SEQ ID NO: 6693 - DNA, 827 bp, Emericella nidulans
agatctcatttccagccttgttccctccatacaaagtagtatgtgcattatgtgctgagtgctagaggttatccaatgcgtgctaaaccctgcgttccgtactattcctctcaatatgctgctgttgatggtagtggtgaatcctagtaagcaacttacatgagaatgattgcatatagatacgaatatatcacaccaaataggtttactcctccctcaaaggtacagactgcccgagcttcctgcaaagttcttccagggccatcttgtcctcatcagaaggcgtcaacgtctgcgcttgcacaaagcactgcccacctccacccccatccgcgttcctcggataccggtaaatcagctcctctatatacggactgggtccgatgccatcacagaagaccaaataactctcctcatggagcccgatcacgatctccgcctcgcgctcaaacggtgttgaattaaactcccaaccctcaggcgagtgaccgtacctgaaacgccggaggtgcggcagcccatctttgaacgcgcggaagtaatctgcccagcgcttggtgtagcatgcatagagggcaccaaggagtccgccgcgttgcgtgtactggcctggggacaggtacgtattctcaaaatccttgatcgagacctcatatagaatgccgcagtcatcgaggtatagctctgtcagggtatcggcatgcgcaagaatccaggtcagctgagaatcgtgaacgaagccgtagtttccaacgacagcgatttgaggtgtggaaagtgcagcccctgaagtcgagtttcggatagaacctcagtaaagggacgag

SEQ ID NO: 6694 - DNA, 712 bp, Emericella nidulans
tgagagggctcggatggagcaggagacccggcgattcctacataaagaagctcaaactctactagatcatcgcgagcgatatctgttagaattgatcggagaggttgtgtggggggaggcttgaggattgatatggatacatgataatctctctacatagggcccgccggacgggatcatcttatggaacagcatagagccttctcaaattcctcacttcatcccgtacgcttagttaggcttttattatcttctggctggtctgcacttgccatagtgctagtaaaacaaaaaacctgacttttcgtcagatgctgtatgcggcaacggcgacctctgtaacaaccgtgggttaatttggtgtctccagatgggaaagaaggtccctactggctataacaagtcgtagttggagtctgccatgccccatgcagagaggagatatcgaaatagggtaatgacaccgccggttattataaacatccccagtggccgaaggagaaatagccacacggcactcaaaatcgtcctcacaagccggctacacgcgagactagcgtcagtaaggtctcggaaacgaagcttaagctttctaaaatgaaatgcgagcgagcttacacaacaaagctagccatctcaaaatactctcctcttcaatctatactggttcacgtgcaaaggtgtgaagcggctgtagaaaatacatactcgg

SEQ ID NO: 6695 - DNA, 107 bp, Emericella nidulans
tggcgcatgggggcgggtgatcgggcgttgagattctcacttaccggcatgctaggtcttgtagccggctattacgagcactctgcaacgacactggtctcctggat

SEQ ID NO: 6696 - DNA, 482 bp, Emericella nidulans
ggctttaaaactttatgcaaaaaccaggcatccatcgggggctttgtgatctttttcaggacttgcactgtcctctcatactgcctggaggtggcggaaaagagcccaaattaaccgcaatttctaaacacgagcctatggcccttggtgtcctcatggcacccatggaggagggaagaaattggtctcaaatgaaggcgcacagcagcagtctaacatataccaaggacgcagctactggactgggtgcgtcaaaattgataaggtggtgtgcgggtatattgtagatcaggcaaagtccaacgggaaagacctctcccatacaccatgtgaaagttcattcagatcatgcccatgctgcctgcagtagctcttcagcacacttgccattcgttggccacaaggggaactaacctgactgattgattccactatgtcaaccttggcctgtatgccagggagaccaatctgaatgaggtaca

SEQ ID NO: 6697 - DNA, 567 bp, Emericella nidulans
cgacatgggcatcgtctccgataggttgacttgatgtggaagacttctaatgttccaaggccttggaagttcaattacaactcttaggtgataaattgaattcactaggaaagattatctcataggccccataccctccaatatcccatacaacctatacctagctcgtcccttgaagattgcttctatgtagtcttccgcatgggcggcacaagctttaacttcgtgagatctctaatcgcggtccgagcactctcaaacgagtctacagttcctagaaaccccatccgcctcgccttacgcatgctcaacgagagcgcccacccacctaggaccgccgagtctgtcatgccgaagatctgggcgcggtactgtggagtgaaggggtcaagaaccagctcgtgcttttctcgtaattcctgccacgcggcctgcaccgagctgagccctgaccattcttgaaagctgaatgtagacagtgtggtgccggtgggtccgtactggatttgaacgggtttactctacataagtgccaggatataagttgcagggatgttaggcgagagc

SEQ ID NO: 6698 - DNA, 439 bp, Emericella nidulans
tcgagatgaaagagggcggtttgacatggaagcgggttgagggatcaagcactgaaggaggacaatgcagatgaagcagcggggaggattgaggaggaagtggagagataagtcgacgtcacgacggcgagtagtgttagtcttaaatgtcgtgaatggggaggcttggattccccctccgagccgcatcacctgaccaggcaacaatacttaggaacctgccaggcaccagtggccctttcgtgggttgacctccacaaagcaaaatcactttgttcttggtgagtcttgtcaatacttgatcgtgctcgagaccagcaattgacgtattaccagggcctactcgcggccatgcatttaccacttcaatgcggacaatggcagaaaccatgtccatcatttgaaataggcttttactgaaactgcgaaagggaaacag

SEQ ID NO: 6699 - DNA, 840 bp, Emericella nidulans
tagtacctggcatctgcttgatcctggcgagccgtgatggcgctgcctgaggtaagcaccaagaggaacctgccttgcataaaccgatctatctttagctctaggctctggattgaaaagcagattcacagatttgactttaaagacctgacaagaaccagcgtgtatccctaccttatcctaaataacctggaccgattttatattctactacttgaccggcaaacaactatggagattactcattttgttctctagtgtggtataagtactcttagaaatgtgcagtattgcacagtgctacagctaagctggctattaagaaataggtttcttcccagttcagtaaattgctcacaaattggttggcaacacaatgaccagcatttaacacagtttgagatgaattatgtctcgaaatcagcaatattccagcctacgaaagctctttcagcgactaggcttattctggctctaccattccagggttatgttgttctatttctggtataaagtatgtggcatatacaattaacacgagctgaggggctgatgctgaagtgggccgttcattgcaaaaccaatcagaattgcttatttaactagaggcggccttcatccgccttggtctttgagaggatatttaagctgcctagacttcaattcgtgcacttataatactttgatccagctggctgctgtcgcaaaaactctacagagacttcatccttttcgaaaaccacatactgtcccttgtaggtagattgcgcctagtttcggcaaatttccctgctgccgtagcatgcatcgagcagctccgttccagccctaatacagaat

SEQ ID NO: 6700 - DNA, 558 bp, Emericella nidulans
ttacttgatctaccgctagcgtggctaggtcaagaggcgtgtgagtctcggagagtccaaagtgcgcactctgaagatccaaatgcaccattgcggcacgagagaccggtcgatatcctgttcaaaggctggatgggtctgatacagcgtatggtaatttagcttccgcgttcccaacacacgcagcccattttgaaggtgcgtaacggcgcggccaaagttcccgcggataagctcaaacgcgataaacaagagacagcacagcagaaccgtacttttgacatgcggatcattcgaccctgatcgcatcctggatacgaggtacccgatcgaccgcgtatactgcaccagcgcaaacctctgtgtgcgattgctcatgtcctcagcgatgacggggactgctgccgtctctgagacctcctgcagggcgcccaacgcaatgacggcatgacagaccgccggttcagactgacacatctgcagcgcaaggcagtgtcacatgcgatggtcgagccaccactcatcataggaatggtgaatgagtaaaaataattgaag

SEQ ID NO: 6701 - DNA, 345 bp, Emericella nidulans
ggttggcttatcgggcagtcaagtcgccctcatttatctcatcctcgctttgtcttggatccctgacttgctttttctgctttatatatatctggcagctttcttctcgattcaactttcccctctcctcacgtctatttcgtcttcaaccatagcatttgacgataactgtacgctttcacgcacgctttcacgcggggatccaccccgaccgataacctcatcttatctctttcgagcgtccagacttcgactatcgccttaacgatacggtgtatacggtgttcaatccatggcttttcgtctcccaccgcaagtcccgcgtcggcgtccatcctatactgc

SEQ ID NO: 6702 - DNA, 704 bp, Emericella nidulans
ctactgattaggacgtagggcgactggttcttatcgactcaataaaccctctcattcactctacacgaaccgaccggtcatttaacctctcaaatttcctcagttcattcattgtgccctccgagcccaccgccaccaaaccggatacctccctcgtcgtcacattccatcaagatgttccaagccgccctgcgcaatctccgtactcgccctctcctctatcgctcttatcctaccttgcaacgactgtcataaaactccactctttctcacacatcctcgcccgaaaggccgcccgtgatcgcagtcttgcccctccggtgtttgggcttgaagaagagcaagacggcgtcctcctcggaagactggataatccagtcggtaacggctcaacagaagctggaggcgtcgttctggaaatggaataccggcgcaagagtggacgtggggttctggagtggtacctcctgcccccggcgtcgaactacccagctacccaggttaaggagattgtaatgctgcttgatgatcatccgctttatcgaccgcctgaggatcttgatgctcgatctgaaaatgaggagccagagtctacctttgaactgcggcttacagagacccagcgaagagagagggagggtgttgtattgaaattacttaaatgcgcaacagggtaatggtcctggcgaggggggtggcatctt

SEQ ID NO: 6703 - DNA, 1073 bp, Emericella nidulans
  unsure (1)..(1073): unsure at all n locations
gatccgcgccactcgcagaggatacgctgggtcatctaccacgaggtaatggtccagtactccgcgcatcttcctggtcagcgtgtcattgtttctatggaccttttctgtaaatacccgcgatttattcagcgcgcttggggggtccatgaccattgctgttgggcttgcaagccacatctggaatacgcgctcttcatcggggacgataggacacatggtgtcttgatactgcccttctacacggatgtagtgagggatgactatatagttgatgcgcataccatgtcttaacttaaggcagacttcttcttatcgtgacccccaatttggcggctcatctgaaactgtaaaataccgtctccgacaataaaccccctgattaaccccttggtcagcgttttgtcttccttcctttacatgtgaacctcacaattctaacggctccatcattatctcgtttgcatttacatatttcactattcttggttgtgtagaataatttgtttcagccttcttaatttcctacacagaaacttttataacccccaatattcttgttatttataccccagctcccttgcaatgctcattgaattctttgtccatccacttatatttaccactatgttctttttaacgtacatttatcactttaactctaattctttacctttctttctaacgacatctataacttaatcttctctcctatcctatccgtttatataatctatcgacttttttttatattctattttaatattttttatcgcttattttatttgctattctatcctttctaatatcttatctactttctttatatctatatccccccctctctcttcacttctttcttttttacttaatgtattagtatacattccatgatccctatacctctaatataaccatatttttntcccccttctacatcttacgactaattaccctttattctttcatctttacactacttatcttacttctttattatccttcttctaccacattttcctttctaatatcctctgtattttacattatcttcatttatctatctctcatca

SEQ ID NO: 6704 - DNA, 600 bp, Emericella nidulans
tccctggcagaagcctggatgagccttgataaagaaagtcaaaagcaaagttttgtcgagctccgacacagcacgggtacacagcttggattagtgaatcaagggaagccgcatatatatagataggagtagatctcaggtagatggggttgcgaggaatgcgaggcataggcaacgagcaagccgaatacaaagagaagctaaagggcacgaacacaagaacaaccattccaccgtattcgaactggaaaaaaacattgtgactagttgctgcaagctggcagcaagatggtggagcacgagggtccatagaccaaaaaaaagaaaacttacggcatatccgacatcgcagacgactgtgtgtacctcatgccgttggtggcaggtatcgggacggacggtccgagatgattgctaaatacaccacttcttcgatggctgtcttcgtcgtccatagagtagcccgtcggtccagcaaaaggtcgttggactccggagtaatcgccgtcagaggtgatgggaccatccagcgagtattggttatgcaggagcgctgcttgttgaagagacaatgattagagccaattcaagagaataata

SEQ ID NO: 6705 - DNA, 735 bp, Emericella nidulans
aaagttattccattttcctcgctccatactgctgctgccgccgtgactctcatccctaaatcacactggaccctagaaacgctgagggaaaacttcgcaacttacgacgccgcaagcgcggttcctgaggaggtgatgactgttgatgcagagaagaaattcaagaaagagctgtaccactacctccgctgggcgttgtcggcaggtgcctctggtccaacagtcccggagataatgatcattctaggacgtgaagagacattgaagagactggaggaggcgaggaagttgacgacggaggacggtgctgtttctcctgttgctgctaggttaatgaaggaaaaggggcttgagccgaagactgggtccgcgaataaggcacagaccaaaggccattcatggacgcctcacccgtccttaccgtcagccagctaagctctatcaagctgtgtatagaacataatgtatatcattataccgcaaatgtacaataccttgtctatcggacttcagtctattctcctaacgatgaaaatttttacacggctacaagaggggtttagaaccttggggtctagacctgttggacttgtccatttggaatcgagttcagacatacacggttctcttcaatgagctcccagtgcgaaccagttagggatgacctctggaaacaggccatgagccaccatgtagcagtatgcagtaagcaaaacgcgtccagcatcgggtgtt

SEQ ID NO: 6706 - DNA, 614 bp, Emericella nidulans
tatacgggcagatattctgggatgtacctgggaaatggtcgcaaatctgactcatacacggctgctcgagggttgagggcaaaaaagatgactaggatgctgaggaagacaatggtgatattgcgtcgatcactggcaagaatatagatgtagttcaccagcagtagccgtaggtcgatatcctctgacaactttggcgtattctgggtccacttttgattatcttgtgacctgctggcagtaaccccaggggatgctggtgctagatctccacctcgggcctgagtaacctgagaaagcatatcggctttcggaggcttcgttgtgagagcacgaaccgaaggatccactggtatattctccggttcctgcagcagggcaataggtgggccgttggctatgttcatgtgcgacgggtactcgatcagtcgtttctccaaatctgctcgaatatcaggcggcaaccacagtccaacctcaacgtcaactttttccatcttcttccaggccgcagcccaagcaccagccctcatcaatccattagcggcgaacaccttgacctcccattgtcgggtcgtattctgcctcacgacgcgggccccgcaatctgggca

SEQ ID NO: 6707 - DNA, 1393 bp, Emericella nidulans
  unsure (1)..(1393): unsure at all n locations
gcactcaaggctgggctgaaggtattgcgccttgtgcgctcgatccacgggcaagagttcatgacggggtagtaataacttcgatcgttggagtgtgaaggcaaggttgtacgaaaagatccgtctgttaagatgtaactgaagcctcgagtatttgatgaaagtgaggaatgaatactagcttggtcaatagacatgcgagagtttgtcgaagaatcctccgtcgacgacgagtgatgactgagccctgcattacccgcagagcttccaggtcttccccattgctggtatcttgctcccttatcccctgtggcacttgagctcattgctactccagcagcatgtggtggtggtcggggccccgttgggtgcgaaaattgttggtgattccgcatagcagatggatcccacgctggatattgatgaaagtcacctacacccttcgccaagtgccctggtgatggctcttttcgaggggatgtctcagccttggaaaggtagtcaacagggattggcgattgggtatctgtcgacaagctctcaaatggaatcgaagtaatcgggccagctgatgtggaaagaagggacgggtatatatcaccgccgaaatcgactgactgaattgaagatcgctccgagaatcgggatgaaccagaaccggcagcccttgatggcggggcgagactcttccaggttccatggggattccacccgacctttaaccggccttttttaaggaggtttcttccaaagatgattttgccttgcgattgttggccccgattaatccggatgtcgcatatttgacgtgcgtcgcttaaaggtcccggttcggagcgcaacatgagccttgtcactaagaggtttcctgatctaaggccaaaaaccccccaagtccaagctctgcgcgaaagtgggaccttaaacttcgagcggacaaaataataaggtccttggttaaagccctttgacttctgactggatggactaacctccccttcggccaaaagaacctttttctctttgtgacattagggccggacaaaaaagtgataccctggaaagctgacccctgcttttttgttaaaacccattcggttaaggattttaatggtttggggggggccccggccgctttgcctaaactgtccaaccatccctctatgcattaatattaacccttgtttggacgggcgcccccccccttctctcgactcacctttcaaaccgggggaggcctttttatggccaaaaacccccaaaattgtggggttgggagacccttaaccccctttttttttgtgggcccccacaaccacccacaaactttctccccacattatacatactattttttttagtgtaattcattttttgtntcctctcattcact

SEQ ID NO: 6708 - DNA, 460 bp, Emericella nidulans
aggtgacaaggcggctcaactgacacggaactggtagaacggtagaggttgtacttcgggccatatgctctgcggtctctcacggttatcgccacgctcgctcgtagcaacggccattttcttcacaacagctttgataacagccaatttcgtgtcggagattccgccctgccgagctggcatcccttgctatacacccctctacccgtcaggccccgagctcgcatttatgactggtgtaacggccatcacattcataacaaacgcgcttgtcgtcccacgaacactggacagatcggacagatcgaggcttattttttcctatttggcgggaatccaattcggagctggactgctcatctcaggaatggctgatccggtcaaagtccttcgctttttcgccttcgtcaccgatcccgctcgttttgatccatccttagcactcgtaatccttttcggt

SEQ ID NO: 6709 - DNA, 620 bp, Emericella nidulans
  unsure (1)..(620): unsure at all n locations
cggggtgaaacggcatccctataggtcgcgctgccgaagtgaacctaagaaacatttacagtttgtacatcttcacatggtatgtctgggatgtgccatattcctctcacagttcgtgtcgtgactcgttgctcatatgtataggtacgggttatccctagccacatctattatgctgtggatgattgtgcggaagcgacccactagtgaggctcatcgccgtgtccgtcaaaacatcaactggtaaccagtgagtgattcgtgcattggctattggcgtttggtttgttgggtatgatatannnntaacatagaatgtaccgtttatcttgggggcaaggcgagtctcatgtcctgcaagagctccttgggtaaatgtttctgcgcaagtgaaaataccgtggtattgttattgagatggcgttgcctgccaattagcatctacactcagataggaagaaatatgagaactcacctcctcatcaaggccgntacatcagcctcgtcaatggttttgcgtcccgcgtgtttggagtacgcttctagatcctcgctggcttgttcaaataccacgaagatgcttgctcatcgcngcagcgtgctctactgatctcgccttg

SEQ ID NO: 6710 - DNA, 1289 bp, Emericella nidulans
  unsure (1)..(1289): unsure at all n locations
attatgaggtcacagggtagaaggttccgctgttccacggaaagttcactcaggctatcatgctactggaatcctctactcggcgttcggcgagattcctggaccgtgttgtaccactatgatggcattcgtgttaggtaccggaagtcttgttctggcggagacgaaatctggggtctaatatgcgggtgatgcctcacctttacaaggtcacgttcaagtctcgttcaagtaatcactttgaagtagtcacttccaaatagccactcttagatgagggaattgtcttatttttggctactcaacttgctacgaacttgaatggcgaactggcgagaacgggaagtactggcgaagtaccncagagtgggatctacataagcgccaaaaaagccgcggtggaccgtgacagtcagatcatcccgagttacagtttgtgagccaatcgtgttggcagacgactgatcattgtcatgctcctacatcccttgagtatccggcctagtagcctcccgatggcgtcaggatatccctgtgttgggtatggatgacgccccaatcagtcagctggatcgcagccccaagggttcctgactcggctgataccagcctgatacgtactgtcgactctctgcgctgtctgggcctgccgttgggcctgccgtatgttggcaacgcagtgttcagcactgagttggcagcgattcgacccagagcggttgagagtcaagatccaggctacctgctaccttctactgtctactgtctaccgtctaccgtctaccatctaccgtctaccgtctaccatctcgcagtctaccaatctattgtgaacaatgatttcagttagataaaaagaccaaattcatggaagaaccgcggggtgcagttcgatattgttgtgacggcttgacggcttgacggctgcttgggaacgataagactcaggatagattcaggatagactcagttgagatatggcaatgctgtagaaagtggatttgttaggctgaaatcggtagcttcatcactttggccgtaaacaccgtcctcagcgtagcgggcgctatcgcttgaactattcttacccatgagtgacgggcccacggagaatagttctgtccatccccgattgcttcaacctcatctctctgtctacctgggagctttcttccacccttccaccacatcccgctcctgttcgacagtcgtgccggttgcccaacgcttccaagctcgagtctcgtttcgtctcttccattcgatccctttagtagggttattcgcca

SEQ ID NO: 6711 - DNA, 771 bp, Emericella nidulans
gagatggccatggttggatctggctctctgctccgacgaaacggcttctacccaccagacaccgtgtggaccggcagcaagaacggaaacgcgatccagttcccttccataggctcgaaccagaacgtccagacgcactcggagaagcccaagatgtcaacgccctcttcctcctcaggatcggcctccaactccggcacctcgacgcctgtaccgttcgacgagaagaccctcacttcagtgaggacacgcgccgcgggcgaacaccgcagagacacgactcgccccttcggccgcgccttctaccaaggcttcgccaacttcttcgtcatccccatccctggaatcgtcttgtactcgacttttatggtggtcatcagcactgtctggcgtctcatgggcgtgctgtccggcctcctcgtcctcgcgcatgccttgagacaggaataccgcgcctttgaccgcgaatggtggcagcctttttccgtctatggcctcttcacggccgttgtcgcggcagtcactttcgcgcagaccatcatcggtgtcgccgttgtcatcaccacgaaatgggctgtcatgggccgccgcacagagggccagtatcactgggacaaatgcagttataaccagcgctggcagttctacctgaccgtggaaacgctcatcaaagacatgtaccgcggcatcggtgtgttgccaatgctctctggaacggcctacctgaacatctactaccgactcatgggcgcacccatcggaaaagactgt

SEQ ID NO: 6712 - DNA, 608 bp, Emericella nidulans
  unsure (1)..(608): unsure at all n locations
gtaaancccaaagcaacttataagtttgtcctaagtcaaggacgtaaagtttaccctttgcttggctggcacggatgttgaagttgccctgtcgctcgccaaggaaggaaagcaggtcgttcaggtcgaactcggagggaatattcaatcgaacgcgtccggatttatccaaagtcggatggttgatagctcgttgagctgatgcagttagtagtgaaacacaccaaaaaaaaggtgttttacatacagatataattgcacgttccatactcgacaatgcttgagaaacatgctnnnnnncatggctgttcatgaagcgtgggacggcaggcttcgcacggagcatttccatcacactgacttgtttagacattgattataataaatggctgtgggaaatacctttcgcttgttcaaccgacactggacgcaagtgtccttgttctttcttcgcattccagcattagccctaccagccatggtcaaaggccccttgcgacgagcaccacggtgtggagaaacgaaatcagcagacgccatagatccaccttgaccgtcttcctgaacaatctgcaatggcttgtggctatcttgattcaaagcgacaa

SEQ ID NO: 6713 - DNA, 550 bp, Emericella nidulans
tacgcggtcactatctctgtcacggtcatctcgttcgcggtccctgtctcgatccgacctccgttctcggttacgatctctatctctgtcccgatcacggtctcgctcgcgatctctgtcgtatgtccgagtgagagaacggctccgactacggcccggccgccagcttcggtagccctggcggtagtcgcgaattgggactctgtcgtctgacacacggtcccggggtcggtcagaggcttcccgtgatcgcctgtgatagtcgtcatcgaaccgagatgatctcctccttgagcggctaccactgccatcacgtctccggctccggtcttctgccactgcggatccacgtctgcggctatagtcagtatcaacgactgggctacctggtttagtaggggtatcggagaacctcgagtcagatgtgcccttgggttttgttggcggtggtttgagaccgttttcaatcgcttcggctttctcgaaatcgaactctggcttttgacgggctttagctgctagctcttcgccttccttcaacaacagctgc

SEQ ID NO: 6714 - DNA, 325 bp, Emericella nidulans
  unsure (1)..(325): unsure at all n locations
aagctaggatcttttaggtctatggtgcagattacgatccccatcaatagacgactttttttctccgcagaaaaaaaaaactaaactcgaggctattttcttaaaaaaaaccccccccttttcccccaaattgcaacaaagccccctaagcttgaaagtggacccccaaatggaagcccaatcgaacatcctcaacatcccgtacctcacaatgnannnnnacatattttttattagccacaccccctatatttccgaaattagataatccctgggcnnncnnnnnnccttgaccttcaaataaccccccaacctccaagtattt

SEQ ID NO: 6715 - DNA, 585 bp, Emericella nidulans
tatttacaacagattcatgacgactctatcttctctgccgtctctgcccgcgaacgattcgcaattcctccaatatgtcgcctcccatccaaacactccaatgccagagctcgtcaggccatacaacgactacgatgcgcactacgcaagatcttcgcccaggagccgacccatcctgccgtggccgataatatcgtcaatatagttcccctcttcgacgccaatggctcggccgacgttcgaatccgcgctcgtgatctggcttctgagtcggaaacgacgcggtccaaataccttatgccgctgaaggacgaacaccgcaagcccaccggtgtgccggcggttgtcagccacatcaagaattttcagacgaatttcaatatcttctcggagagctccttgaccgacttggactggaacaatgtcgttgccgcgggcagtgccgtcgcaacttctctccttccggtgccagatatatacagcgactcgaagcgtggcatgcgccagttctaccatgaagagtttgccacgcgtcggatgtggacttttcctttacggtttgaccgaggacaggcgattgagaag

SEQ ID NO: 6716 - DNA, 532 bp, Emericella nidulans
  unsure (1)..(532): unsure at all n locations
ggaaaaaacccccatttatttttttancgacacgaacaaccaaggccggtggaagattaaaaccacaccccccaacccaatatgaccaaaaaaaacaacaacgatagtacccagcaaaagtaaaaagtatataaagattatgaccatcttctataaataagtagtgaccaaactacgtgccacaagatagggaaacacggacaagaccagtctaaagaatccaaatgaggctggacgggtacctaaacggagaanncttctggagtgaatacatacacactaaaggccagacgaaagaaggaggaaagcccggagtagagagtatgaccaatgaacggacagactggtagcgggcaaagcatacacctaaccaaaaccgacgtgaagggaccaaggaatggatacgacgaaggatgcaataccgccgtacacaaagcggaccataaggaaagcgacagaccaaaaaagcccggtatacgatgaatgggggacccgaagaaaacaggagcgtgaaaaacaagaggaaatggcg

SEQ ID NO: 6717 - DNA, 487 bp, Emericella nidulans
  unsure (1)..(487): unsure at all n locations
aaacaaaaagcacagggtaaaaacgaacaagatgcagggcccaagaatcaacatttaacaccatatgtctaaaatgcagggaggaggtaaactatgctaccataacacacctcttcgaggaaataaaccagttctaactacctagttacaaggggggaggggcccgaccttttatacacctgatgtaggaagctgccgactacaaagacaatcgggacgcacaagcgtgaggtatataacaagaaaacgatcgattcttgcacagcgcaagatgaatgacactgcccacttacgcccccangcctactactgcgctggtatacacaaacgtatcaagaaatgcgcctggactggttatccgataaggacaacaatggttgccagaaggattccgagggccagcgcattgcctacgagaaggagagtgaccacctacaaccatatccggacaccatcgaggtctacagaggccgctacgtcaagccgg

SEQ ID NO: 6718 - DNA, 819 bp, Emericella nidulans
  unsure (1)..(819): unsure at all n locations
gcgttttgtcattttagccgtgggttgtgcatgtggagcgtcttggcgtcgagtgaccgtgtgggtgtacacacatcgtacagatggagggctcgacgaatacctcaaaacatagaacgtaagtcttgggcaaccaaggctccgtgagtctgggtagtaacctcgagctacacgaataggagcttccgcggttcatcaaatcatgttccttgacttgcatagggactagaaatatacagcatgtgcgacgagcgagggcaggatatagaacagcatcgaaggagcagtttagctccagcgccaatagtgttgaggcgtataaaagatgtcagagaggctgccttgaatggctctgaccagatattttgtgcgtatacaccgcgaacgttcacctgctcatgcctgcttctgatcgggcccatgcccctgctacttcttcttcctctcgttttacttctccaactcttcctttccttctccttctctctcccctgttttctttcttatctttcatttaattctttttttatctatccatttttctttttttttactctttctctctccatcctctttttactttactactctatcatattttctatctcctccttttacttctttttcttctttttttttttttattatccttcctcttttttttttttattattttttnttntccatttncctccatctctctcttcttctctttttttttcttctttctttccttttctttctttcttctttttttcttctttcttctctctcgggtcctattctcttccacttcttcattcattccactttattttt

SEQ ID NO: 6719 - DNA, 759 bp, Emericella nidulans
  unsure (1)..(759): unsure at all n locations
gtatgttggatctctagtgtatgatctaaagcaattgacactctccgtcagacaacaatcccatgcttcgggatggtatcactggtgattggtatgtcgtgttctcatccggaattcgtctgctaggcagggagctttactaactcctaatccaggattggcaccttcctcggtcataaaggagcggtctggcaagctcgcctctcaaccgacgcgaacatagccgcaactgcagcagcagacttttctgcgtgagtcgcactatgtggctatatccatattgcaatcgcctaacttctcccgctcaactgcagtaaagtctgggacactcacacgggccaatgccttcacaccctccaacattcccacatagtccgagcggtcgcattcccccttcaaccttctcctcaagttctcgcaaccggcggttacgagaagaaactccgaatcttcgacctgacacgcagcggcagcaacagctcgtcccccacagcctcatcagcgcctcccgccgaagacggaacttcctctgcaacgagctatgaaatcggtcccggggctcacggtggcaccattaagtccatcgtctggaatcgggactacaacatcctaactacagctgccgaccaaccgaaaatccgtggtgggatcttcgttccgccaccgggggtaaggtttccggcggggcaacaagngaggttgagactgaaaccctgaaacgcccaacgatccgtttccttttgtggctcaggaagagcg

SEQ ID NO: 6720 - DNA, 894 bp, Emericella nidulans
gcttagggcgcaaggcttgagaatctgcggacttgtaagttctccatctttacggttcaacaatatgccaaattgccaggttatagcgcaacatccgataatatatataatcccagtactgcgactgagtgttggcatctattatatagccagagaaaatgaaccactccattcaatgccaatccaggctcttgaatatgctgtaactatttgtaagctctaaatatgaacacaatccttcacgagtcaggagtcatattcaggtcaaacttcccatattcatggactattttggcagaccattgtgcttccaaccagaaaatctggctctgcactaattatattatgatttgattgtttgctctgtaggactttaaaagtttgatcatggaataatttacgcaaggctgatatatagacgtacagtctctgctctgcataaataagccatacccacacaatccttttagccaatttatacgttcaaaatgcctagggtggctaaagagtacagtggcagaactatatgcagaccaggggggcgtaatgccattgtccccacactaacccaagccacgcgaggccggacactctccgagccgcccgcactgcaaacgcggacccccactttacttatcaagtgatcgccccctcaatcatgaccccgttgttttgtcaccggtttgacccgtttgacaccaatgtactcctttgaacaccaaggatagatttgtaccgttaccaacttatttccacattttgtctacccacctcagtttaattgccacaattcccgaacccttccatggtttcttaatgtaacccctctaattcaatccaatgggggtttcggggttaaaaccctttccgcggggggatttttaaaaataatcc

SEQ ID NO: 6721 - DNA, 928 bp, Emericella nidulans
attgtatgttgattccacacccatagggcctgcaccgcgtcttgtaccactgattacggcattgggctcacaagcaaggtccggctatgaaagccgatacgtcgaacagctccgggacagcgccaagtcactccaaggcatcaggcaggcggatcaggttaccttaccggaagaggagctaagacacgtcatcaatggttatctcacgcgctgtgaggagcattacaaggagatgcatagagctatatttgcgaggatgacattttccggtgtgggatctaaagacaacccggtttatcttgccactttgaagacaataatcactatcgacatgggtccaaggttctcgacagagctcttccttcaacaactgacgcgaaagaagtggaatcagatctcaccgcgctggaaagcctgcttcatagcctacgggatttccatcacggccttccagcgagctaagcggctggttagcctggtcggtcatcgagaagaactggtccgggagctccaaactccggggcactctaactgggatccctacgaatttccagagtcgctgttactggagattgagaatggaatcctgatcagggatgtccaggagcaaattgcccgacagttaaggaacatacagcccgggcataacgccgtgatgcagcttaacatgggcgagggcaagtcatcagtcattgttcctatcgtagtcactgcgcttgcaaatggctcatgtctggtctatgtgctcgtcccaaagccacaatctcgccagatgtttcaaatgttagtttccaagctcggtggactgctgggacgccgcgtatactgcttgcccgtaacacgctcactcagcataggtgagaaagaagcatcagagatggagagtatgtgtttggaatgcatggagaatggtggtgtctactagttc

SEQ ID NO: 6722 - DNA, 530 bp, Emericella nidulans
tcatgggagggacaaggtgaggctgagagtggcatatttgcatctctcgctcagcacctgtgaaaggggtagtccgatgttagtaaatacttaagcgctgtggtagatggctatataggcatacctctttgctttatggcttgctgatggtgggcgcgctcaccatcgccgtttgagtcgaggcagaacaagcaggttgagatccatccagtgaatacggaccctgcttgctcaattgcctcctgcatcgctaccagagcctagagctgacagtccattcctttcactgaagcagggaataccccgggacctggagaagagaaataacgaaagaagacagctaagaaaagatatgtatcgtaacctttgggagcgaaagattataaacaggcagcatgagaaggaaagacgagcgaggaataacctccgcagacatcaagtcgtcgaacctcgaagctcaagagcagagggacatgcagtagatagacacgctcgcggtggcagtagaacagaaatagtcacgtgaaatg

SEQ ID NO: 6723 - DNA, 760 bp, Emericella nidulans
tgaaccgctctcggtgtttgtcgggggagaagatgcgcacgaggatcgataacagggcgatttttgttttgtaacgccatcgggcagtagaggactgttgcgatgtagcagaatttgcgaaacagcgtcatatcagtcgaggagacgtcggtgtagtggtaaccgccaccgtacttgccgactgtgtgatgttaggatgggcttgatgatagtggcagtaggtaggaggaggtagggaggtacgtaccaacaatggcaatggcgcagtagcccatgaacaggatctaggctggttaacagagcacggtaatcgagaaatggtgtacttgcccacgcggcgaaacatgtccctagaggctcccattagtacggtgtattcctgtaacttgcagctatagaaggcgaacatacaatcctcagccccagcccactgtctataccacccacgaatgccgaaccgcaggccgacgaagagcgtgacaatcgggatacagagacattgcgtaacaaggttgacggtgtttaagatatcgggtcggtcacgactcattgactctgtagacatggtgcccaatccagcattcttcccttcctgcctactacagctctggcggatgtcccgatagacgttagagacgagggaaaagtgtggaggccctttagactgaagacccccggcggagtgcggcgcaatattaaataggtagggcacttaacaatgtcaaggaagaccagatgacctgcagatgagctttagttg

SEQ ID NO: 6724 - DNA, 432 bp, Emericella nidulans
  unsure (1)..(432): unsure at all n locations
cacgggcgaggtacagcgggatgtgcgcgtaccaacataaaattcttacttatcacgctacgattatattgttgagttaaggacgcaaccatgaggtcctggctcagtaggcggaccatagagcgggcatcacgagaaaggagagacgtgggagcactatcatgccggtcgacgacgcacgacaagcgtggagggcgtccggtactttgcacgcaactggcgagcggacccttctcaagtgaggtcattgttgagggctcgcactatatataccatgtgccacaccgagcgaaccttannttgtcggtactcaacgcgcagtcgcaacggacaaaatttaagtctctagctgagaccagacaaccaatgacgcggtagagaactgaatgctgtctgaagaggactgtatgctccagagcgaatgacagtgag

SEQ ID NO: 6725 - DNA, 398 bp, Emericella nidulans
cagctgaaactggtcctggagcgggactggtgctgtgttgtgttccatttctaccgcactttgtatgggagcctctgagggctactatctgatccaccatatacccatgtttgacatgcacgacaccaatgatcataagcccagatgccctactagcattgtcttaccaacgggcgctaaacatctcacgcacacacattgtcataatagacatacctcacatgtacatggaccccagccattccgctgtggtcggggcactgctctgcacgctgtctgcgataactggctgctctaaacctaactcaaactgaaactcagaagttggactcgacaagcatgcgcccatactacgtggactcactatggagatactaaaaacatacaaacagtgctcc

SEQ ID NO: 6726 - DNA, 527 bp, Emericella nidulans
ggggttaggtgcgattgccgatgctgtgtcaagtgaaactaagccctactgctcctttctgcttactatataggcaggcagtctgagtgcacccgtattgatcccgacaatcccgtctgttgtgggaaaggggcggatctccgtacccaaaccagacaagttaaagacagtagtatcctgtctcgtcagatctccctccctcggcaatttttctcgttacatgcaatcgcattgttcgaatccaattttcaagacgtacacggtccaggacaaacgacattcaatcatggcaacagtcttgtctgacctagccactaccataggaaccgccctatccagcctcccgcccccagaccaaattcaagatgccgaacgtatgcaggttctgggtgcaataagccggctccaggaagcgctggagcctcccgcaatggctgtacagcgaatgggtctttcggtgggttgtatcttaatgacattctaggcccctgtctagtgctgtgttggttaacgcagaagacgagaga

SEQ ID NO: 6727 - DNA, 848 bp, Emericella nidulans
actcagagtacttttcgctaatagcaaaaaccagggttcagcacagccagccatttactggtggggtaagcttttccagaataagcggcctcaaactgggacatgaacagtgtcctgttgaggagagggaaagacggggcgatcgagccaaaatagatttttacgagactctctgcccacggctgcggtggtaagagcctgggatcaacgggtgctggatcggtgaggtagagattgtcgacatggtagctcatagacgcgatagactcctcagtcatcttatcctgtccgccttccatcttgcaagcctcggtctcgagtttctgcatccatgctatctcagactctttgccaatataccccgctgctctgctttcctcggtgcggttcgggtcttcggtcagggtatcgacctcgtcgagtgatccgacggacgagggggacgaggaggacggagagctgcatcttcgtgtgtccccgagggctctgggatctgactggagcccgtctgaagttgcgcgattgcccgtgatctcctggtctcgtcggccctcgccatacccagcacgcagttccttcaccctgtcgattatctttccaagcttctcatagtcacggttatcaaacgcctcaacgatttcgtccaactgtctctgtaccgtgtcgagctcctgctccattcgtcgctgggcacactttcttcgccggtcaagacccgcgaagacgcattcgctgccgctctcgagacacctgtcgcagggaaatcccccgccacactacttcgtgagccattgaatctttcaggtcattttcttcaatgtaaagagataccaaagccaggttacccg

SEQ ID NO: 6728 - DNA, 440 bp, Emericella nidulans
cttccaagggattcatgcctaacaggtagacacctctcaataaatttctccacagcgtccttcgccctcccagcaaactctttcaattcatattcctttccacgcccatcagcccccccatcgaaaatctccaccgaaaaccaccctctaaaccctgtcttcagcaccgcgtttcccacagcctcaataggcagataccccccatcatacggcataggcctgtaatcatggctccagcggcctctcggcgctgtcccgtccacaactcccttctccaacggcctcggtctgccctccccgtcaagcgggatatacgcatccgagatttgcaaaagatagatcttttccggcggaattgtagcagccaactcggccatactggcttcaaatctctgactcaattccttctcgtttgtaacagtgtcctctatccgaccaga

SEQ ID NO: 6729 - DNA, 996 bp, Emericella nidulans
tggtgacaaccgcatctgttgtggaggattctccagcgggctgatgctcgacactgtccggagctgctgtctcgtcggggagttgtttttcaacaggcggctcctctgtagcagtttcagcgggagcatattctgctttactagcttccggagtagcgttggtggattcggcgggagcaatctctgcaggagtggtctctggtgccttgctctcctcggcaacctcaacctcagatacctcaggtgcagcggcttcatcgggtttctcggtgccaggctcgcccacggtagtctcttccttagaaaccccttctacgggaattttggatacagtttcctcagtggcaaacttttcaatgggcgctgcggcgattgcctccgctgttgtggtggactgagtctcgcctggaacctctgcgtcaactgtttttccagaggcgccatctactgtttccggctgctcttccgcaggtttatcgtgggcagcctcggtaacttcttccgtcgccacggtctccacggtaggcacttcagtgggagcctcacttgctggttctctaggtgattcggtagtagcaggctcagtcgccgatggagcatcagcggtctcggttgcggattcctgagttgccgattccacagcgtacgctgttggcatggtgtccgcttggagcttcagcgacatccttgtcggcttgctcctctgaggattttagcaccgcggggacctcagttatggaagcatctgcggctacctcggcaggtgcgtctttcgactctgttaccgaatctggggctgactcttcgaccacggtctccttacccggcacttccggagattccgccgtagcaatgggctcctcggctttaggctcctcactcacagcttccttctctgcagccggtgcttctgaaacattctcgacggcggtctctgccacagcaggttcggcagcagattcggcggcggcttctgtggcttccttagactcctcg

SEQ ID NO: 6730 - DNA, 983 bp, Emericella nidulans
ttcgtgcgccgacttggctccaatgctatcttctcactcgtcgcgtctttacccagtactggcgtgacccgtcctactactacggcaagctcttcacctctgttatcatcggtatcttcaacggcttcaccttctggatgctcgacaactccattgcgtccatgcaaaaccgcatgttctctctcttcctgatcatcctcctcccacccatcttcctcaactccaccctccccaagttttatatgaaccgcgccctctgggaagcccgtgaatacccctctcgaatctatgggtgggtcgccttctgcaccgccaacgtggtcgctgagatacccgcagccatcatctccgccacggtctacttccttttgtggtacttcgctgtggggttccctgtcaccgcatccgcctcgggctatgtcttcctcatgaccatgctcttcttcctcttcatggcatcctggggtcaatggatttgcgccttcgccccctccttcacggttatctccaatgtgctgccgttcttcttcgttatgaccggtctcttcaacggtgtcgtccgcccctacgatgactaccccgtcttctggaaatactggatgtattatgtcaacccggtaacctggtggattcgcggcgctatctccgctatcttccccagcgtcgagatcacctgcgccgccactgaagcgacccacttcaacccgccccctggctcgacttgctctgactacgcctccaacttcgtgaacaacattgccggcgctggatacctggctaacccggatgcgacaagtgactgtcagtactgcccgtacgagaatggaacgcagtacatgagcactctgaatgtgcggcccgacgacaagtggcattcttttgggatcttcctagcctttgtcatcatcaactgggtgcttgtttacttcttcatctacaccgttcgggtgaagaagtggtcattcggagtgggtctctgtttg

SEQ ID NO: 6731 - DNA, 749 bp, Emericella nidulans
tagacacggtcgacaccacggctcgtcctgtgtgctgtatggggcaacggtaatcataccgcatgcgaaatccgatcagagccgtcggcgctgcattgcccaccttagacgaacggtctggtttatatttgttgaaacacggcaccatagccaccgacctcgactgctgttggtgctttctctgtccctgcggctctgtagtcaataactccggccacactagcaccccgatctcccaactgcagacgcgcacttcgccagccgcgttagctgctccccacgcttgcgttgagaggttcgcagaggtgacgagcgcccaatcaatacttcgcatatgctggtctgcgaatcgtatgtaggtttttatatgtggagctgcgcgacgacggccggcgtcctgtagacgcttgggggcctgccccgatacgtcgcccgcccaatgacacagatatggccgtaaatactggagctgctttttctgcgcggcgctttgcagtttcatgtggatggacccgccatagccgtagcccttgagcgagcgccggatttcctcggctgttgggaagattactgaatatcgcggccgggtcttcgttgaagaactggatgcggcgagagcgttgaagaacacgtcttttaaccatttgtccgtctggcctaaggttgcgatggaggatatctagttgacagcattagcatttagactgtgattgattacgaagccgagatggacctgggtacaatatgtg

SEQ ID NO: 6732 - DNA, 601 bp, Emericella nidulans
atacgattgatgtgagacagtagcatactaggatcaaacagcggtctttgtctgaagactaagacaaaccgaacccagtatcagtacgtttgtgaggctggcaatcatgaagtggcacctaagtttgctctccctttcgtgcttcttactacctgcctatgcccacaagaaatacaactttaaccaaaattggaggtctatgtcggtgaccctgagggggcggaaataccttcctttgatggtggtgttggaaagaagttaccacactgtacgcttaaaacgaagatgatgcattccgcgcgagcattgcgaatttgtccacttggattgcgtggtatcggaaacattttgaactaccgagtacgtccagaggagataaagtattttccgagtttgaaggcattcgtcacgccggcgagttttatctcaacgacaaatggattggtcgaagtgagaatggagtaatagctttcgggttcgacatcacaaacaccgtaaatacaacgataccaatgtcatagctgcacgcatcgacaatgattgggcgtatcgtgaaatcgaaacaattaccccttatcagtggaatgacagaaacttctat

SEQ ID NO: 6733 - DNA, 626 bp, Emericella nidulans
tctgatgattgcgcgttcgagtcgcgtctcggtcgattattttttctcaactttaggagatacttttaccattgctctatacctgccttaataataagtaagaactcaagggccgttaacagaactttaggatctaatgatgcacgtccaacagtacaaggttccggaaattttgcgatggaggagctctctactatgactacctcaccttttttttttctgagaatgcagaggacgaatatacgaggtagtgtaggcgatccgttagaaaagtccttacttagtatacggcctgaaacacctacagtgcggtgctgaatgacttggtaacttcaagggagatatcgatacacggtgcaccgatgttacactggagcaggtataaccgcatgctttcagtcgctactcggttgctcttaactctccagcagtctcaccgcagacctcggtagtccatcgcggggggtagttttctggggccggaccaaactgcgattatgatatgtgctcccttggctgcgtgggtgcgaaggagaaaaaaaaaaaatcaagaccgaccgagacgcgactcgaacgcgcaatcttcagaggttaaaggtaaccgaaatctgacgccttaccattag

SEQ ID NO: 6734 - DNA, 861 bp, Emericella nidulans
tcctcaactctgatacgttcactggcctatcacgaagatttccagcagggaatgcttgcctttgatcctgtttcacatggaaggatcgcacgaggacatcctgtagcttgagaatcttatcgctggggatagtggactgcttgatcgagtccttatgccaaggatcactaaagatgagcatcgacgtcttatttgagggaagaattatgcggggccgacgatgacgcttgacaggctggtggtggattgctagtaaacgccgtccgtcagcccatccgcccatggttgaatctcagagtgacagcgccagatgactcgaccttacacgctcacaaagatggacaaagtaatccatcccatcgggaggcagcaggaactcgggaaagaaagaaaagttgtcggtgattcaataaccacttggcaatgactgcggcgttacacagcctgcctttgcgcgaggatgactctccattcctcatttcccttcgtttcttaatccttttttcctgagtgtgttctgccctcgctcaatacttcaagcctcctgttgttcctcctctagacgcccaggatcatcgtcttgcgggttgcagggtgaccgttagggcgtttcgcgttaattcgagaagcggccaaggagaggtggccgtgatgtgaatgggcagggtggtatcatatgctggcttgcaccaactgctgaaaaacgggacccggggctcagtagctggcgactaaatggcacctgctaagttccctattccttgcaaggacggccttgggagggtttcgcttctgtgacctatcccacgccctttctgttctgctcaatacttctgtatgtcaactcttttgcatctccct

SEQ ID NO: 6735 - DNA, 487 bp, Emericella nidulans
aaatgacgggaggccctcatgctctgacgaaccctactcatgttgcttgtttcattaaagcacatgtgtgtgaacggcgatggtagaatcagaacagaccagagcccccccattgacctctgaatgagtactgctgggtgcacacaagggcggaacaggtcactatatgaccaagtgacgtccaatagttgaggacctgtagattccataagagcgaaaggatggttcacatagaaaatggcgacacgaataagaccgacaagcaacgtcaagatggcttggaatgaacgaattgaaaaaggaaattgacaaattgcctatagatcggtaaaggaattcacagatatatgtacacccaatcgtacagagcgtgtaaatatccatggcttatcattgatggtccactgagccgtggcacgaaccgttctgataagcagatggagaaaggcatagaagctccataacggaaagcctggcggctaacatt

SEQ ID NO: 6736 - DNA, 550 bp, Emericella nidulans
cgcgtaaaacagaaaacccgagcgtaattacaaaaacgaacactcgcacaccattttgattatctacagttacttcgcaatgaagagggaaaagaaacgcctgaatgatctgcgtaccagcgctgcctacatagtaggtacaaccaaaaaagcgctacgtatgtacactgacaaacgacgacagaccaatgcgctgtagatggttgatactcttgtacccataaccggccgtggcgactgtcggcacactaacagcatagttttaagatcggtggtagaaaggttgctacatggacgcgcgcatgctaatgacattcaatgcgctattgcacaacactatcacgcgcaagtaccaaggtatgatgggcctgccggcggtacgataatgatactagtcctctcgggatgatggcgattcaagcccaccgagctgctttatcacgatcgcacgaagccagagggattggcgcttattgtgaagactgacgggcggatctcaaatgcttgctgaaggcactatacgaaagaccgctgcagatctttgttacag

SEQ ID NO: 6737 - DNA, 518 bp, Emericella nidulans
agattactccgagagtctccagaaggccaagatggaggtttctattcttcagcgtcagaagcgtgtccccgccattgtcgactttgtcaagtctggatcccgcttcactgttctagtgcctcgcgagaacgctaagcttaccctggttctttctggtattcgcgctcctcgatctgcacgcaaccctggtgaggcttctgagccattcggtaacgaagcacatgagctggccaacagacgatgcatgcagcgtgatgtggaaattgacgttgagaccattgacaaggttggcggtttcatcggtacgctttacgtgaacaaggaaaatttcaccaaggctcttcttgaggagggtctggcaactgtccacgcttactcggcggacgaatctggtcacgcgacggaatactttgctgccgaacagagggcaaaggaagcacgtaaaggactctggcacgactgggaccctagcaaggaattagaggaagaagaggaggcgacagcggcacgccgtggag

SEQ ID NO: 6738 - DNA, 520 bp, Emericella nidulans
ccggaaaagcggcggactgcgctaccttatgtagtccatgtttttttaacagttacagaaacgttcatgctgattggttcgatggggccgataacatgggtaatgcgtgcttaacgggaggtcagatcattaacagtgtggatggctctatccgtctaatatatcagaaatacatgggtgagcgaatggccggaatggatggcatgcagggatctacggccaggaaacaccctcttactaatgagtccaaaatgtaatggtcaggtaggggacaaaagacatggaccaatgcataatctgaacataaaatgctcctacaacacaataagcttaatcagtataggcatgctagtacgctgttgacgtcctaaggctgtctggtgcaccattacagataacatggattaaactgataaatatagttagcaaggcgtgatcataaatgctctgtcagatagcatagttgatgctcaaacattgcccaccggcgggtgatgcgacagaacttcttgacgttccg

SEQ ID NO: 6739 - DNA, 879 bp, Emericella nidulans
ggtataatctggcctgtccagatacgagaacgtggattgccaaatgtggctagaccagttcggccgccatggagcttcaatcaccaggccgttatcaaactgagcatcattgccccatatccgtaacctctaccctcaaacccgaagttgcaatttgtattaaattacctcaactcatccgctatcgttcagtctcacgggcattcattgtcgctgccaagccaaccagataactctccctttatcaaccagcaatagccaccagcaccatgaagcctgttgtatctgtgatgaacgcatggtcctggtatggtttcgccgaaagacatccctttgcattcggtatgctgatgagtatctgatttttcaaagcgtggtcatctccctcttcgccatcgtcatcctttccgtcctcggatcgctattcaaggtgcgttgattgctgcctcctccatcgaatccagcctcgatcgctctcatcgcttccctcatttccaattatcatacgcgccaagtatagccaaatataatcactaatatggccgcccaaacagagcgaacaccacggctttaccggctcggagggtgaaccagaagactgcggcgcggtcgccgcttcaatcttcactgctgttattgtttacgccgtacgttacgatctccctacaccctgacagatcttgtttcgcatatgcaggcatatactctgttgatgatcggctaggctaatgagcacagggattcttcgttttctgtgcttccaggcttacctgcacatgcgagctcgccggggcggagctatatcgctcagctaagccctttctttcgttttggcatttacttcggcatacagtgtgactggaatgtctaattagggta

SEQ ID NO: 6740 - DNA, 443 bp, Emericella nidulans
tgacttatgatccttgtttattatcccgaaggctatccttctaactgaacgatcatctcggggcaaatagggtctacggactcacgctcttataaaactaatacgtacctttttcgctgcattgtagataagtgcctaactgcaggatatttcggacagagatgttcttgactattaaatcattccgagcaaaagatgtctgaacttgaggcatagacaatcacctactgctgcccatgctgcggtacggatgatgtctacccatcactgtgatcaggctcgatacgcttgggacacacgtgactccagcccccacaggaattcactgtccgcgtagtccctgtgatgttccgcgcagccttggaccggactccatttgcttacaaagctcctcgtattctaacctgtgcccagcatccctgacaccccatatggactcaacg

SEQ ID NO: 6741 - DNA, 637 bp, Emericella nidulans
ttgagtccccaaggtactcgatcattactccctttagagaatgttgagatgatgcgcacttcgttgactgtatggggtagggctgaggaccttggggctgctgctttagatcagactttcctttacgaattccttttcgttgacagtacctcaagactctttgagtactggttttcacaatacaaagaaagactgtttcttgtcgagccctctaccctcttcatgggcgaaaaaagtgaagactgatctctagagtcgcaacttctgcctcagcctctgaccgcagtatcattgtatccccacctgtgatcgaatacgaagttaacctggataccccgtgtatctctcaaaaaaaaaccaaatgacaatggctgcggtacaattccggattcgtcattgtgaccccagcccgtggccgagcagtcttgccagcaccgcgggatcagcgccaggaagtatgagtgagcgagaattcttcagcaaccctcacatatctaccgtccggccccttcagcctctgctgactgattatgcaaaccatccgttgtctgcatgacgatatacatgtcttcgtttcttgttgctaatgcttggtgctagtggccatgttgtggaacaattcgcagcctcgccgggg

SEQ ID NO: 6742 - DNA, 795 bp, Emericella nidulans
tcccttgtctgttgtgacttgactgcctcggttaatgaatcccggtcatttaaggagaccatatatcttcttttatatatactctcctcttgccgacgtggaactttctccgcaccaaaaacagctatcatcaatatgcagctgaagaactctctggtcctgctgactgccttgacggccggttcctccgtggcccgcctccatggccacgagcgccgccacgctcaccacgagaagcgtgacgttggtgacctcgtcacgctatcattgacggaaaggtcgtttcctgggtcaacgagtatgctggcggtgctgctgccaccgctaccgacactgagtccacatctacttctctctctgagactgttgccgcgtcgaccaccgcttccacagagacccccagcgcttctgccgtctcctccgcctctggaacctgcgccaactgggacgacgagtccgatgagtactccaccgccggcttcggttccaggactgtctccaacaatgccaagtatgttgcctacgttggtaacgtcggaaacccttggggcagcaacatcattgaggtcgatgccgataaagcatgcaaatataagaatgtcgtcaagttttccggctctgagactgacgactggaccatcgtcttctggaacaagattggccctgatggattgctgaccggctggtacggcaactctgctctcaaactcacgatttctcccggcgagaccaagtatgtcgcattcgacgacgattcccagggtgcctggggtgctgccaagggtgactctctcc

SEQ ID NO: 6743 - DNA, 910 bp, Emericella nidulans
cgatatccccttgcttgtcctccctatcgttttgtgagcctcgcttgataatttggtagtcaaggctacctcgcaacataccctgcagccgtgatttacacttcgaagaatacaaagagctctaagtgttatgtagatatgccgtaaagtctatgagtccccttggcagtgctcattgacatccttttggcaaatttaaatattactcgagcatagcaagtataccataacaagtataaatactccgcctcctgtacaccatcttccatcgcctccttccgggaacaagaaggaattggcttcttggtcggtgataccggcgggcaggggacccagtctcggatgctccgtacgctcttcagtgcattgttttcgcaggatcgtggtcctttattggcttctagcctctgagacaccatgctcatccttctacattccgagtacgctcatgcgaagtctcacagtctgcggctaggagaaaaaatgccgatacgaacgacatgattggagtggtagttgctcagatccatttgtgctgctgagttgatggagtcagccacaaaactaggtggttaagagatcctagagactaagaagccctgagcgggaccatcgcgtcgataatattaatgggaattcgaaaaaattgttttgtttatgcaattttgcctatctggcttatgtcggttgatgtcaggggattgcattagtacttcacgttgctgtccggccagtttgtcaagtgttgcccaagaatacacctttccaggccaatgtttaaatagcaactttaacaggtgcgaggcacgagtgtgggagtttttacaaccatgtttcctaattacaaattaattttgttatttttttttcttctctcttttttttataaaatttattatatttattcttt

SEQ ID NO: 6744 - DNA, 443 bp, Emericella nidulans
gttgcctttacttctcgagggattgtctgccatgacgactgggaattttccagtatctcggtagtctgcggcttttgacctactctcgctgattctgaagatggatcatgctttatattgttttgcttttatacttgcggacccgtaaatggttgaaggcagtgccagatgcacggtggagcatgccaaggcgtgactcatggtcactcattgcagttgtggccagtcatcgttggcttagtggggtgctatctcatagctcacaagtttgattggcggatcttgattttaaggacaggatggagtgacgctgccctaaatcatccctgagaaccctagatgaactaataaaaagacgagctatccatgcactcatttcatatcaccatgcatagacctcgaaccaagggactctgagatcttgaatacttactctgagttga

SEQ ID NO: 6745 - DNA, 952 bp, Emericella nidulans
gtcaattcggcgggagatggagttggaagatctggtggaaaggttgcagtcggaaatgccgtcggaggcaccaaatcggcgaaccagtgattacttctcagattcagggagcagctctattcggtatgcatatgagtcggctgggcgtattgaagatatagagaagtataagcgtgctgctgagcaggagcgcgcccaacttcgcgctgagctcggtcagagacttcaggaggaacgtacccgtcggacggcatcggaatcccatgtccagattctggaagcacaggttgctcaggtaggttgccagactctgttgaaggggaaaattgtaactgaccgtgctgcagctccggcgtgaaaggacagaacattctgacttagcctccaaaactcgcgagcttgaaagcgccctggaaggcacccggcgcaagctcgctgaagaacgccagatcaaggacaacttcgaggatctcctaaccgccatgcgcgttgaactggaacagcttcgcacagagcgggatttgcttcgcgaaggccagccccttagcgaccccgccgaagtacaacgcctgaaggaagaaatcgaagccttgaagattgagaatgcagccctctctcaacttcaaggcagcagatttgcttccattgcagaagaagaggggcctgtgaaacgaaacagtgccttcggattgtcccgctcaaactcattggcccgcatgcctcggaagagctcatctcgctccggctcactatcacgttcgaattcggtttccgctaaggatcgtgcaacgcctccacaggaatcgctggcggaccgggtcgaaggggcggaacgcacatcgtgatgcgcttcacggtgccctcaagcggctattagaccgtcaggctacgaagcccggcagacggagaaacgcatccgagcgatggagctcgagcttgcccgcgcacagga

SEQ ID NO: 6746 - DNA, 618 bp, Emericella nidulans
aagagagatagcaagtcatacgggggcgagcagattgtcgcctgtcttgtggtttatgctgcggatggggaggggggtgataaaattgcacagcatgcaaataaaaatgctgcgcatcatcttgcgagctttatgtgcccgaccacctacacatttttttgatgtgctgcccatgtcgagttccggaaaggtctatcgaaaagcgttggcttgccatctgcaagagaagcctgatgttccaatcaagaatggcctcagtgaagaaagtgcagtatgttggaggcattcagatgaggccgcatcgtcagtacagcagctggtgattcgactcgttgcggatacaggggacgtgagtgattccgcattaaagcccgggccagagctgtactctggtggcatcgccagtctaggagcaatgcgtttctacaaagctgataaccattggggtccttggcttgccggcggggaaagctttaaacacatttatgtgcgaggggttgtttttttgccaaagctttggtgataataaaagggggcgcctgtggggtctttaagaggggggtttacaaacctttgctttaaactgttctctcgccggggatttcatggttgccaaaa

SEQ ID NO: 6747 - DNA, 496 bp, Emericella nidulans
tcggagatatttgagtcatagccgtacccacaaacccatccagtacatatagtatcgagttaaaagtgcacctgctgccaaatgcacctactgccaaatgcacctactgcttcgagggcaagctcactaccattttaattgcaggtgtcctgggacaataaagttccaggcagccgagttacgccgtcaatcccttctactcctgtcagcagcgggaccaggctaagcattcttgacctttgttatgaggataaatgaatgctagtctattaatggtgatgcgatagagttccacagacacgcaatagcaggattcgccggagtctctggccattaggctcagcactagacttggaactagggcatagtaaactgacactagactcggctatactgtcctgttatgctggacttgtctcaccatcccttgtggctggcctctgttcccgtgtcctctgccatggttcgagcaggaagcagtaccgctcatgccgct

SEQ ID NO: 6748 - DNA, 1059 bp, Emericella nidulans
tggcgccccctattctgatcaagggttagaccagtccaatcttgttaaggtgactgttgatgccaaccgttttgggcattatcccagttccgccggccacgtccagctcccttcgcaaaacacattgggtttccagcccgcggcccacttattgcccatcgttgtttgaccaagggccaattcatccaggtagtacgagcggcgtgcccagtgctccgcggttttattcgccgccataaaggatagcctgtacctcctgtcccaatgtgggtagctggtattcgacttcgtgttttccagccatttagcgatgttaaaacaaagtttcggtaatgcggcctttttaaaaattcggtcgggcaaaaggaaggatagaccgattgttctatcccaactgcatagggacgaatccttgactagtaagagctttgttcttgagtggtcacaccaaatgtgcccaggggcagaagggaagttttgatccgagttggggggtatccgtgttagagagcccaacctacatagactcgaaaatggaggtgccagtgggccaccctggatatacctgcgactgttgagacggagatgttatttggccactgcttgtagctaatactagagcatttctcacgcggctgctcctcgtcgtccgcgccgatactgtatagcagatacttttcatccgctgggctccaaataacctccggattatgccggaatggctcgctgatactgtcgacgtagtgatatggaccttgcggtccggtctttgattccgcgcgtatgatgaacgagaaaggtctccacccgctcagtccgcatccggatgcgaactgtgaaacaacaaggtggaaaagccccggatcgtgcgggtcttgcaagatcgttccaccccaggaggagttgccgtatgggccgaggtggttcgggtcgactgcatcggcggaatggttgtagccgttgttcttgattgcgggccggagatcaagatgtccgcagtcctcaccgaaccatccggggtcgcatttgcagacttttccgcctgacttggcccatggc

SEQ ID NO: 6749 - DNA, 753 bp, Emericella nidulans
cataagatgaatgtttcagactcatgtagggctctacagaaggaaagaggtatatggcgataagtattgcatttctttacgcctctttgactttgtctgttcgatgctaaaaaagtaaaaagagcctagaatctgcgacctcaagaacagtgaacaacagtatatacatgtacgtccatgggtatgtgcaagtgtatcaagaagccaaatacatactcttgatagagtaaaatgaagatgaggaggataaacaaccgagcacttgtagcgctgaaaggcgagggaaaaagtcaacaataaacgtcaacgtaccattcgtaaaaaggaatctcgactccagtataggcaatgaagagtacgaaggggagaagaagaaaaattaagcacaaaacacatatccgcctgagctaagagagctaaaacaaagcaaaaaaacagataatagtaactgggtgtaactagagcccagaacctttggtccaaaatggactgcggaagagaagcatttcatcctgctcacgggatgataggccagatttggtatggaatatgggaaaggccaacagagaaccaccgccaaccgaactagttataaccgcaaagcccaaggggtaacggaaaacaacgccaaccgtgcgccaatgcgatgttgaaatactaggttgggtcagctatcgaggcaagagtgagtcaagaatagtacgcacatacctagcaataattagtgcagaaatattaaagcagaagatagtg

SEQ ID NO: 6750 - DNA, 746 bp, Emericella nidulans
tccgcgagcaattccactgtgatgaccaaggtcatgtgcttttcttctcttgcgcacctctggatattgggtctgtagttcagcaaaaactggggcactcgctaaaatatctcgccgccaaggaagaacgccgaaaactcgttgaggctaagaagcgcaaagaaatttctgaacgagaggaacgcgagcgagccaataaacggcagtgtgctgataagcaaagagctctcgcggtgcaggtagaagccgtagcagaaaaggctgttgaaatcatgacaaacgagatcgttaaaggcacggataagatttatgaggcattgtatcaggaccaagccgagagtgctcgggaagcggatacaaaggctcgtgaggaacgaattttaagggctcgtgccatccaaacaaagacagcgcagattcaggggaagtcaactaagccaacgttcgtcagtcttaaagggagtgggatgtacttggacgagattgaccccgctgcataatcgcgcagctcttcgccctcataggcttccacccgcggtttattgggcttctgttagcggaggtattatctttgctgttcactcggtttggcgcatggcggaaggggtgttcaaggtttgaatcagtccaacataaaaaacattcattaggctcacctatattcccttcgtgtataatagcgtcattctaacgtcttaacgcagtctgtagctttacagccattagcatattttcttgtcgctgaa

SEQ ID NO: 6751 - DNA, 1158 bp, Emericella nidulans
aagcagctcgcaaacaagacaggaggaaaacaggaaagacgacaagaggcgaaagaaaagattagctcaatcgaacagtctgagcctccttaatcttcttagtcttcttcgtcaccgaattctccttcatatacatctcaatgaacgacaacgtctgctcatccatcattaaatttccatcagcatctctcctcttttccaactcctccttcttcttctgcttaatcatagccataagctcccccttcggcgtcatcaaagacctgctctgaagatactccttcttaaggtcctctagcttcttctgctccacaaactccggatcatggcgcgtccggtacttggagaacttatttcgcagttcatcaagcacactaggagggaagggcgcgtaatgaagagatggcacccaggtgggcgtttcaacctccatgcgaagtgtgtcccattcctcgtctttgaaggttggcttctcgggacgcggccagggtatctcgatgtcctcgccagcaatgtagcgggtgtgccgaggagtgtcgatgccctgctcacgttcaaggagggggccgccaccatagacgtgttcgactaggacatcgcgggtgacgcctgtggctgggtcgtcgagggcgacgacgaggcggacgtcgtcaatagagatggggaggggcacggtctggaaggggcttttgttgccaaaatgttcgctgagccactcgggaaagtagacgtcgggctgggtaatattaatacaacatcatactcttccattcacttcacctctcgagtaggggttggcgtcagatacataccacattacaatccttgaccgtcagagtctcattctccggatccacgcgagttaccacattgatttttcccttatctcttcccttcataatacatacccggtcacccggggcaaagttgatatactttctccgcagatgtttcggaatagccggtggctgcattgcttgcggactcagagcaccaaacatttttccgtctaaccctgcatctcgctgaggtgcaagcggtcctcgcatccagtcttcacgacgtcgtaacctctctgcgcggatattgtccagctgagaccagttgtagcgaccgctgccgcagctgtgttagcttcggcgggcatcatgacgctct

SEQ ID NO: 6752 - DNA, 590 bp, Emericella nidulans
ataacattaacaacaagccagtacgcaaatgtaatgggcatacaagatgagctctccatgtctggaaacgacttttcctggctagcaactgcgttctttatcgcctatgcagttgctgaggtcccacaaggtgcgccttcacttcattccggtatgatcgtcagcacggctgagctaaagtgaccggaaggatacctactgcagaaataccccgtcacaaaggtcctagccgccaatatctttatctggggcgtgatgctctgctgctctgctgcagtgcagaactatgccgggcttctagccctccgtgtccttttgggaacggcagaagctgtaattggtattccacccctctcccctgtcaaacatcataccagcctctgacttgcccgcagcacccgcattgaccatctatacaagcatgtggtacacacccgctgaagcaagcccgcgctttgggctttggtattgcggtctcggaacggggcagatcctcggcggtctcatttcattcggtgcacaacatgcctcgtcctcgcaatccttttccggttggaggattatgtttctcgttatcgggtttgcaaata

SEQ ID NO: 6753 - DNA, 347 bp, Emericella nidulans
agggagatccaagtctaggatcagtaatgagtggtgaggtaaaggagaaaaaccagtgctatcaaatagccaaggaaggaactggtggctggtgggaggcggtcaggataacttgtgctctgtcgagtcttaagagatcgctgatggtttattgggagccagacgagctaaaagatgtttcttgtattgctcacttctttctctttgtgtctcaaagaccctggtaattcgagtatagcgggcgaatgttgtggtgcggagtgagggacggacagctaaggaggggcgacgagcaatcagcgaaagtcgtcaacaatgggcgaatgagcttcagctgcatgcaaggt

SEQ ID NO: 6754 - DNA, 460 bp, Emericella nidulans
ttcaacaccatacccagcgctattttaacatttagtgtgaacccggcactggccctggggaccggtgatactgatcacagcaaacattcacaacaatactcaaccatgcatggggggctccttctaaaaggatgtgctgaaaaaactgggaagactgatatactgagaacccgtgcttgggaatagagcagcgaaccaatacaaagcagaaggacattggtcgtccgctgccagaagaaacacgcgtgattattgagacattagtgctgagactgagcattgctgagtacaggacaatatggaaatctggattcagggatctcagacaggcaactctatgcctagaggataacagaggggagctacagaccaggaatgtacaccagtcaagctaggctcttgaagcacaggcaactaaagtcacgtggcggggattacctatacccgactacaaagatga

SEQ ID NO: 6755 - DNA, 540 bp, Emericella nidulans
tcagtacaaccgccgcatgtacaagcccaagcctcaattcaccgaacgccgcacaactcacggttagactctacgaaacagcagacaaaatggccacgcaagacccaaccccacttcctcccacaacaatcctctcttcaaaacccatctctcaagccgtcgcccacgacttcctagccgcctacctggaccgcgcaaccactgacccagcgcttcaaccgaacgccgggattagcgagcacggccccgtctcacgcacaactgccgccgcgcccaatattatacttcacaatctgaagcgtgtgcaggcggggctagccggggaagttctggggagggatttggcgattgcagagatgaaggagggtgcgcagctcgcgcaggcacagagtgggaacgataatgcggacggaaagtgggaagataaggcacagtttgagcaggagcaggatggaaatcaggtatatgatgccaatgtccgagatgagcctgaggggatggatgtggataaagttgacgacactgaggggaaggtggctg

SEQ ID NO: 6756 - DNA, 499 bp, Emericella nidulans
gattataaccaccattggacgaatcttggatacttttttcttgccgactcatagccgattgggaatcgtgtgaatatcatgccctctttgatcacgatacgtgaatcttcaacaccagagtccgcgttaccgtaaaacacgtatgcgccaatccgccagggcacatatgttcatttttaatcgtcacaggactgggcatcaccgtggcagacaccttccgcaatcaacggcacgtgaatagctctaccgggacaaccagatcataacgatcgtgcgtatatgcagggctgcacgttgagctggcaaccgagggccagcttgcaccctcgatgaccacagagtgggctgactgttcacagatgagatctgtatagggtgcagtggcagaaacacccaaagctgaaacgatcgacagggtcggcctggagcggacatcgggaccgagcacatgttcgagatctcctctgatctggagagcctagagtatgtaaccccgtat

SEQ ID NO: 6757 - DNA, 582 bp, Emericella nidulans
tcaaacggagtgtactcgaggtcatgcggcacgctcttgaatcacggcagattaccatatcaagggcaaaactcacggtggattatccggcgagtttcatgctcgttgccgccatgaacccctgtccctgtggctatttcaatcaccccgaaaaagaatgcatatgcggcacagatactgtacaacgttatttaagtaaaatatcgggacctcttttagaccgtatcgatctgcatattgaggtgacgcctgtactatttgaccaactgagtacgacacgtatagccgaagacagccgtactgtgcgaactcgagtcattcaaacccgagaaattcagaaagaacggttcgattcttttccagacatccattgtaatgcccagatgagtacacaattgacccgagaaatatgtcagattgatgagcccggaagaaagttactcaaaacggctattgaacatctgagcctatctgcaagagcatacgatagaatactcaaagttgctcgaacaatcgctgatatggagcaaagtaaaatgatcgaaaatcatcatctcgccgaagcgatccagtatagaaatt

SEQ ID NO: 6758 - DNA, 878 bp, Emericella nidulans
  unsure (1)..(878): unsure at all n locations
catacttggggatagcagggccatgagtacctactatgttatcgtaccacacgactgaccttagcatatgcagccattaactatcatcatccgagcggagagagatatgataggtagaagtacttccaccggacttttcccagcacctctccaaccctcgatccgaccttgtgatgctgaaggttattgaatctaggctctggagaggtggcccgtggctctgtccccgaaggcggacggggaatgatatgatctgctatggcatgcaggtgtgccaatgaaatgcatccgatcgatagagtcaaagcgtgcatgcatgaactttggctggaatcgaatcgtcatcggaatgtacggccagccagagagagaccaggacaagccctcattgctggattgccgtagcgcgcagtgcaccgcattgcacttgcataattgtcctctcgactctatatgaagatactccggcttatctgcaggataccgatgcggtcagtgcgagtaagggctcaggatagggatgattattcatggagtacggaattaacgtagggatggtaaatccactggacatttgcggattgaaggtcaagatcgggtagcaaccattgataattgaacacagggcgagctgacaagaccaaggtttagtggggcgatacttccagggctgtagtatgcggaagaatgccctatgcataactcgaaaatgtggagtactttgtaaattgtaccttgggagtctgctaccgaatacatacagtactaccttctgcaagaanccttgtctgccctgatcttgtacgcacgggaacccctttcgcgtctgtctcgttgaggacgagtcgttcagttatctcacagttaagccacttaca

SEQ ID NO: 6759 - DNA, 590 bp, Emericella nidulans
aacgccgataacgaatgtctggcaatcagcttctgggaacttacctatttgccgacgacatcgcggccctatggggaaggggtgtttacgtccacagccatagcgtcctctgtcacgctgccttagtgagcgaatcatgtagtgtctacatctggtacacggacgttgcctccactatccctatgatgcttgtgagacttcctttgctaggggcggtgcaagctgaggacttacttgcggatcgcgggtggtccgaccaggcgcgttacatcacaattgatggggcgctttaaacgagcgtgctgagtgttgcatccaatgagcaggattttcgatatcttggacaagtatgcaggctattcatatgcatctgacgctacgcgaccttcaagtgcatcgtagaggtcactgatgacggctctaccgagtgtatacttagtggcggagggtagtgttttactgtcgtaacaggcaagtggtctgagcgacacgtcactacttgatgtgtagcgacaatctggcttgctgagatgacatgtgaacggttgcttgtttctcagggattgagaactgtctgcttgctcggtcag

SEQ ID NO: 6760 - DNA, 1071 bp, Emericella nidulans
  unsure (1)..(1071): unsure at all n locations
catctgcatcagcaacggaattctccactgcgtttaacaattacattagtgacggacccaatagtcctcacgctgagataattcgcactgtctctaccttctctggggctatcgccgatgtccttagtaacaccaagggtttaactcgctttgcagtgancgacaagagcgccgatcaactattaagcgctgctcgcaagtccgcccaggccactgttcgtttcttccgtgggctccaatctttccgtctcgagggcttagaagcctgcaaaaggcggatgtcgtcatcaacaacaactccgaggtgcagagggacttacaagccctgtccaaactcgttgatgcctttgcaccaaagagtagtcgactccagactaacggagacctgggcgacttggtggaccaagagctttcgaaagccgcggacgccattgatgccgccgtccaaagacttgcgaagcttaagagcaaacctcgcgatggcttctccacctacgaattgaagattaacgacgtgatcttggaggctgcgatcgccgttacgggtgcaatcgcggagctcatcaaggccgccaccgcgtcccaacaggagattgtccgcgaaggacgtggtagtgcttccaaaacagctttttacaagaagaacaaccggtggacggaaggtcttatctctgctgccaaggctgtcgcctcctcaaccaacacattaattgagactgcagacggtgtgatttccggccgcaactcgcctgaacagcttattgtggctagtaacgatgttgctgctagcaccgcacagttggtcgctgctagtcgtgtaaaggctactttcatgagcaaaactcaagatcgtctggagactgctagcaaagccgttggtgcagcctgtagggctctggtacgacaagtgcaggatatcatcgccgagaagaaccgcgacgacaatgaggcggtggactactctaagctcagttcgcacgagttcaaagtacaggaaatggaacaacaggtattcttccctcgccttcctgcttccgctatccgcaacattgaacatgtggatgattatct

SEQ ID NO: 6761 - DNA, 712 bp, Emericella nidulans
ggtcatactcctgattatcgaaatgttccagggcctgcacccaagtctcgatttcctgtactttcttgttaatgcaggggtggattaaagacgattgcattatttgtgacatacttgcttgagggacattttctttttgcgctgccagtgccagtcacagtcttaagtagatcgattgggtaggcgacgacgagttgtttgacccccgcgtcgtgatacctggctgacaccggctggagagatgatttatttgccaactggcaggggaaatatgacggcccttccggagcgcacggcagcaaatatatgtacgggccaaccagcagccaagatgtgacgggggaggggaccgggtgggcagatgaagagagtctggcgggccaagcaatccaagagcagccggactgacggcgcggagacgtgaattggagcgtcaggtcgagactggtgaggccactgagaatggaatctacgaaaacagtcaatcaagcagagtttaagcagcaggccggccgagacagaccatgcgcgagagccgaaggatggacttggggatcctgttgggcggaaggacgagatagatcggatatatatttagatcacaaattaaggcgcaccagccactggcaggagtagccaggattagcgagccgagagtcaatagtcttggactcgaagaatactccagatcgagcagataaaggttcgagcg

SEQ ID NO: 6762 - DNA, 1049 bp, Emericella nidulans
  unsure (1)..(1049): unsure at all n locations
accggatctgtgcgctgatagtctcgagcttgcagtatagtgcggttgtctttgtcctacgtgcgtctgcgtgcctttgtccctgccttgtacggatcgagtcaacaaagataaacacgagttcgctttcctttctgcaggcccagtgtccagccctagctattattggggcgtgcgtctggaatcagggtacacccaaagccctgggcgantagtagtcgacatagttcgcgacggaagggatcgacgacactaaaggatcgagaccatcatggttgtaggctggaataagtagggacaccaagccagctttggaggaaggaccaatattcagaatagctgaaactcgactcgttcacgatgagcggttccgctttatataagcatggatctttcggtccagatccagcgatgaggcggaatacacatcctcctgttacggcagcagaaggaaaaggaagaaaggaacgcagtctgtatgatgatgatatatatgtttcgccaattcttgaagggaggccgtcctggtcaggaacacgctggacccgctttttcccagaactgtcgtcgcatttctcgcttgtctcccctacgagtcctcgagagccgcaatacttgcatggctctctcacggcaactgtctatattcgagaaaacaagtccgaggaagacgcctctgaaccggcgacaggggcgtcttcgatatggtctgacgaactggttgatgactcctcttcgtgctatagccgcagatcgtctatcaccagtctagggtctgaacactccgcatcagcttacaggtctgccgacgcattctccatcatctctcccatcagggcaggcgtgtttgacgagatatccgtgcatcggtccggcacgaacttgtcgcggagattgtcaagatcgccatctgtgcgggaaaagccgctaccgtgcgaacccccgatccaaatggctccactctcaatccgacgcaagagaaaacaaccgccattgattcgtgaggatagcctggccgagattgtcgagggactgcgcatagccggcgt

SEQ ID NO: 6763 - DNA, 551 bp, Emericella nidulans
gacaggtgaatagtgactcgcactatacgaaacgcacgctggaagccctgcacccgagaatctctgtctttcgctatccggatcatatcccaggggagggcgtccgtccgtcgcagattggatcctattcggcaagaggggacgcgggtattcaagagattggcgacgaagcgctacaagggttgttcgaggctgcgggactgcggtctctgttctgggcgcatcatgagaaactggtcattgtggaccagcagctggcattcatcggcggcattgacctctcttttggacgatgggacctgatccagcatccgatcgccgactctcatccctgcaatgcgcgtcagatcgtcttccctggtcaggactacaataatgctcgcgtgaaggactacgaggatctcaaacactgggagaaaaccgggctcgaccgctcgaccacgccacgcatgggatgggaggatatctccgtgagcatgaccgggccggcagtggttgatatctgtcaacactttgttgaccgctggaactacatctgggatgtaaagtac

SEQ ID NO: 6764 - DNA, 575 bp, Emericella nidulans
gcgggtcgcgtatgcctcaacggaaacacccgaattaacatttttcttgaactcgctgataatgtgctttgcatccttcttgtcattcagcttgccgttgaacccgaatccgatgcaccatgtgcctgacgggcccgtcggctgagttccattatggtccgagaaggcgaagacgaagctcgagtgggcggagtcactgctcgtccagaaccagcctggtagggtctcgcagagtttgaagtgaatctttgcgcctttgttaatatgaccttgtgctattgcagcttgtcggagggtagagacggggggttgaatctaatatcggcaaggcagttcctaacggagtcagcatagttacatatcaagaaaaaggttaaggcgtacaatggaacggttgttataatagcttttgcagtgaatatctgtccgctcctcgttgtaatctgggcactgttccgtagattatcgatctcagacacggcagtattgaagagcctttcccctctgtattcgtctaagattgctgccgcaacgatgtcatacctccatttgcaagtttatagacgccagccttt

SEQ ID NO: 6765 - DNA, 570 bp, Emericella nidulans
  unsure (1)..(570): unsure at all n locations
gggtggggggacgaactnaccgacgcagactgtggctttattgaacaggaaaccccagacccgacatgggtagctttaaagcatcagccacacaaccatgcgcctgggtgcctatcctatggaaagggagcaaacctacactggttgagccctcataagctctgcgtctgtaaacatcatcgcctagcgctttgataccagtttcacggtgaccttgaacagggaactctttgttgtcgtctcctgcaacgacttgccacctgtcagagatgacgacaagctcttccttggccatatgcatatgcctcgtcaatgcagtacctgtatgtgtcccgctggagatggagcagcacaacccgactgtaacgcatcttagacaatagcgcacggagggccacacgacgcaacggggtcttctgacatggcttgactacaaagcagttgcctgaggcgacacgcggttcattctccaaccgctctacatggaggttgcgatccagaggcaactcctcggagataccagaggctgtgtggacagttagacaaccctttggttgccggtcaattaaa

SEQ ID NO: 6766 - DNA, 485 bp, Emericella nidulans
  unsure (1)..(485): unsure at all n locations
agaaaaaaaggcctcgagtcatcggtagcnaccccagcatttaaggcttaaccggactttctgttcttgaagaggtcttcgggatctaggtctctccctagctgctcgctgaccagcgcattctcgccgcgagggactgatctgttccaatggaaagtgagggggggactgtagggtaatactagcttggcctggcccttgaaagatggtagaaactggctcgtattgttagcagggtggatcaacttcggaccgaagacacactggatcaaccgtcacaccgttgacgatctggggtgggtggttgaatatccacggcggccggcctgtgccattcgacaacatgcctctgacagcgggctggagccgcccgattttcactggcttgcagccctgacactgcatacgctgctataaactgtggtacggttttcttgctacgaaaagtaccctgtgtgacgacacgtagccccaggaaccatgaa

SEQ ID NO: 6767 - DNA, 663 bp, Emericella nidulans
tgatcacgtctaggccagtttgagtatgataaacaggaatcgccagccggcgtgtagggatgggacgggcagcaaactgtttctttactcgtgctgcagctcgggtaaggtacggcgtatggaacggagtgctgaccggaaggaagctatgctgtatatatggttttcgatctcggaaaggaattcggctttggtcaatatctttgctagtaatttcgactaaatggctttccaatcgaagcagagaggcgaccggtccagctaccacaaattgatcgtacgcgttgatcagtgccaggtaaagccgtttatcctccggtagacttgcgttaacatggtcgatcgtagcctcagtctcttgtctcttgaggccccgtaagctcagcatgtaggacggcccgttcgctccatccacgtccgcgtagtttgctgcgggaaccatgctacaaggtgcagcgtggtggcactcccagccgaggcgaaatagaagctcaatgacttcctccgtggcttgatagaagctatcccaagagtgtgaaacagcaacaacaatggccgctaacagaccttgcgaatggccagtagcagtccgcaacatagatctcattaaccccggattgcatcccgtaatgtgacaggtaacacaatatctagcgagactga

SEQ ID NO: 6768 - DNA, 618 bp, Emericella nidulans
atgcttcgactatgcaggctgaaccttccaccggcggcgacctaggccggaaatatatttggttggcttcgatcataaccaaaccggcgatgtcgatataatgagaacccatgtcataatgagacatcaaactcctaccaactgtcacgcccccacgctctgccccctgatgaagtattaatgaaacgctcacgattcgatcgtcctaagataatgtacatacgtactgctgaacatatgcatcttccacatcttacacctacttctaccatactttatacttgggcaatgtcataagttagcaggcctattcgctggcttattggcagactcgattcatttgattccttggcctgtaacacttatacttatttagtcacgtgatagtacgagatgttgctagatgcatcgcggcggcgacgtccgacctaagtcgttcggttataacaacatacattagcccacacttagcaaactttcgatattttcggcagatttcttccagacgagtctgcaataaaactctgtagcacaataggccgtcttacaaggttgccgagagcatcgagagatcctgatctagaatgtgcgcagcacaacagaaccggaaaatcacga

SEQ ID NO: 6769 - DNA, 564 bp, Emericella nidulans
aagatgtagggtgatctcatgggtcaatacaggcattatgattcatagaaaccgtattatgtatctacaacttttaatacttttaaatagaatttgggaatctgtctagattgagcccctgtgtgttatgcaaaccaagcaaatgcttcatgactaagcttcgttatcagtcttatcgaaatccccaaaaaaggcgaaaaatggattttcccctcctccccgcaatcagctatcactttaataagacactatggctccgtctctatgcttcaaatgccagaaagaaagggccgtcattatccgtcccaaaaaccggcacaagctctgccgtgaatgtttcctagaggtattcgaaaccgaagtccacgaaacgatcacgtcaaactccctcttccaccccggcgagcgcatcgccatcggcgcaagtggcggaaaagacagcactgtgctggcttcggtgctcaaaactctgaacgagcgatatgagtacggattagatctttgtcttctctccatagacgaaggaattcggggttaccgcgatgacagccttgagaccgtcaa

SEQ ID NO: 6770 - DNA, 819 bp, Emericella nidulans
ccggtccttttggcagaacgtggatgtagctagggtcctcgatctgggacaggactgaagttttggcattggagtacttggcttgttcttctacccccgcgcgaagcttgatgctgacggccgtattgtcagagtggcccagggggagactgttcttgagacggaggcaagcaagttctgtaacgggcattctgatagcgataactggtgttgactaccattaagtgatcggatatcgacaggctgaatatatgcggtaggttggcggagatagcggagtttgtacctggcaggcagcaagcatgacgttgtcccagtgaaacagcatcctgcatctcttccagcgaccgtaccgaagcgcgaccggatagaaagttagagaatggtgacagtacacgaccagggtatatctgatgcggggagcagtagatacgccagaggtgcatgccgagggacaacgattggcgatcgtgagcattctgagagtgacagattgcggggtcggataacagggtccgaggctcattgcccgtctcaaatattcaaaatgccttgctgttatcctaccgctgtacgacaaagatcagaaaatatcttacaatcattgtctgacctcccaggattttcaaactacttttatctcaccggctaagtcgccctggtgactggaggtgagcttgtcttattcgggttttacatcttctctttctatcctaaccgcccaggaatcccgtggtatcgggctggatattagcacgccttttttgagagccgtcccgaaaacccttttttttaacagcgcgcaatgtccccggggtt

SEQ ID NO: 6771 - DNA, 555 bp, Emericella nidulans
aataatcgttgctcggcgtaacttggacgggaatgttgagagcatggccggtcagggagctgcgtgatacttgtgcgcccgccgccacgagcagatcaaaagcagccggtcttcccttgaaaatagctatatccagcggcgttttgccatctaactcggtgttaatgtcttgagtaagagcgtcaactgtgaggacgtattccagtatttccggcatatcacaggcagcagccagatgcagtgctgtcatgccatccttatccacaatgttggcggaaccgcgacggagaagtagttgcattgtcttctccagctggaagtaggtgtctatcccataccgcgccattcgcagatgcgtgttttgacactggatggcgaaatatagcagcccaagggatgtgtttccgtcgacatttataggataaaacggcgctgcatccagtagaatttccaacatctctgcatcatggtagctgcaagcaagctgaacagcgtccaatgcaaagctatgctgcttatggaagatagcgggccctgctgtacccattgaagatg

SEQ ID NO: 6772 - DNA, 724 bp, Emericella nidulans
ctgcttcggatggcggacactgagtgaagatgagcgtgcgcgtctgaaggccagggccagagcatcgctggcagacagcaccccggccacacagagcgctgcatactctcccaggctgtggccgatcagcaccgtcggtcggatgcccagcgaccgccagtaccgagcgagagcgatctcgagggcgacagtcgcaacctgcatgtccacttcggtgacggtagcgccttcggcgccgctaccgcggatggcgttgaggaacttcgtcggcagcccctgcacctcgcagatcgactgcagagagtccaagaggcgacggaaggtgggcgacgtgctatacagagcaccccccatgcccaagctctgtgcgccttggcctgtgaaggtaaagacgactgcgggtggcggcgcggattccaccttgtctgctaatggcttctcgagctgccgcacaaggtcgctagtagatgaggccacatacgcctcacggtggacgttgtgtatccggcgtgcggtcgtcgtgtaggcgaggtcggcgaggttggtgtctgggtgcgcagagagatacgcatgaaggcgcttccgattggcctcatgggccgttgcggtgcgtcccgaggtgaccccgacgtggtgtgttcgaagaccaggccaaaaagctggggctggcagggcaaacgccgggggatcttgtagcagcatgctgacattgcaaccgacagcg

SEQ ID NO: 6773 - DNA, 393 bp, Emericella nidulans
tgttgatgctaaaaatggacaggaaggccaggaggtcagtgcaaacctgtatgggtcacgtgggcagtggtacgccctaaaaccgttcggaatcatttaggttagcggggctgtctagggtagcagaccgctgtccgacaggacaacatatgactttaactgcagcaatgagacaattggacctaacccatctagtccacagggagagaagaacaccaaagtactttattgcatacacggaagctcagcacattctgatgacaccctgaaaccctaccatggaaggaaatgacgatgttcactccgccgtataacagcgcatggagcacacacctttgaggcatgcgtcatcactaatgaagaggacgggcaaatgttcaactgtcaagagta

SEQ ID NO: 6774 - DNA, 912 bp, Emericella nidulans
ggcgggtgtacttaaagaatatggaaaatggaatgcggtaaaaacaaggtagtcttggaacaggcgagcgaggtgaggtgaagcacaaacaagaagcgaggtgcactgcttaaatacgcccctgggcgtcttgtcgcgcttctcttctcctcaccaaacatgctctagcccctgattcaaggtcatggttacattccagccaaagtgacagtggagacaatcttaccgtggaagggagaatactgcgggggaagaccccgaggcatctggccaccgtctcaacctggccaaagattgccaaaaattgggcatttaccgaggcctggagagatgggtggagaggtccagatggcgttttccggggaagtgggaattgacgaatgcgagagtgcggggaaagatcagggctccgctatgtggtcatgaatttgcagcgaggggcgaatcgcctctggaccaaaataaccaactgcgagctctatcaacaagccctcaatataagggcagtgtatacaccaatcacggatccgtgatgtacttctccagcttgagagtttgcaggattgaccggcgcaggacaaaagctcatctctttggctcctcagcgaggaaccgctatggttgttttttaagcatgaattcgcggggtagggctgtggagacgggatcagacccagggatctgcacccattcagacgctatgagccgctcggcacttgttctctagcttcagcagccggacaccgacattttgtcgtcctgttgatcaatcaaggtgagtcgggcacgatgtcggcttagaagggtagctacccagccggcgttggaatacagcctgatgctgccgtttcttttgtagaagaatgtggtatgtaagtagcaagctaggataaggagctacttactgtggtg

SEQ ID NO: 6775 - DNA, 525 bp, Emericella nidulans
ctccattctgttgaatctgaacaaggtctccacgccctctgcttcattttccggtagggtgatagcctggtggatagcgacatcgccaagttgtatggattgaatggacctgctgctgagtgaagatgcagcctccagcgccatgacaatgtacccagttgcaggaaacacgggttgtgcttgtatacagtgtccgttaagccagtcaaggtccttctgccggatgtaatgccgccagcgccactctccatcggcactctccggttccaagctccctagaaggggatggggcacactgcgcttgtgcaggtggttcttgatcatgcgagattgagcaaggtaggatctgctgtgatcgaatgggtaggtgggaaagtctttgatgaactttgcctgtcccaagccgaatagacggagatatcttgtggtgtcaattgctccagctcctatggtctcccatagacttccaattacattgcttagagaggcgatactgctcgagccgcggatgcacggtgcaagata

SEQ ID NO: 6776 - DNA, 1068 bp, Emericella nidulans
gcagaacacagagcctaagtgctcagaatggacgaaattgaggatgccataaatgctcgtatatgctcgtatatgcttctcgagttttccatgactatggacttaggtggaagaggcaataaaccttagtattcggatctcaaaggtagcggtgttgatgggaaagagattttttgacctgaagttgcagcgtcggataaatgccaaattgaaacaaccactaagtgacatcttctcttcttctctgtgttttttttttcttctgccaaaccagactgctttaggtgatgaagatgacaatggcctctcagctgctatactccctagccccaccgcaccccgcatttattgtccgacgctcagcaatcctgtcttctccaactctccgcgacattcattcaaacgacgaattcacaggatgcagcttggtctcaccgagagtctccccgctctcgttgcgaaacgcttcacagctgctaaggacgctggccatctgatcttctcccaaactcatcttgaaatcctccgccccggtggcgttcccgtaagtcccctcaacatgacgcagttgactcttccattgaaccccatcaatcattaacgtggtgcttgtactagtaccaactcagatactgccctgctcttgcaaataaaccaaccggcaagccaaaatcggatgaaggaagcccaaagaaaagatttgaccccttcgagaatccttcccggagcttttgatcgcacattttccgaaagaaaatccaacccacttcctcgttctgaataaattccccgttatccccaatcactatattctggcgacgactgcctggcgagaacaaaccgatatattggaaaaggaagatttggcggcggcgtacgcctgcgtgaaggcgtggaatgatggaaaccagtcgggcggcacctcgtccaagagatttattgcattcttcaattccggttatgaaagtggagcaggccagccacatagacatctacaattcattctcgtagaggcaatggcacaggacgaccagactggcaccttggaagccgtttattcgacacggt

SEQ ID NO: 6777 - DNA, 490 bp, Emericella nidulans
atcacaacataggcgatcctgcagcagccgcagtctttccgcacacactgagctcgtctcgcaagacaaaccaaaaagattgcgtgatgttgttctgaagatgaatcttgcatgtataagagcgccgtagatatgtcagcaagacagattattactagctattctaaacatacgtcacagcctaatcatatgtgttgacacaatgctacaataacgtagacggcgccatagtataccatcccagcgcgagtcaataaagtcaggttaggtgagctagatcctcagcatagcttattaatagctgtattggtgcagtgataacgacaacggatgtccaagtactgatcgcgagcgtgtggtgacactaatctacttctacctagctcaagtcatctccgctgatcgactgactcgagaaagtacccactacatactctattatacagctataatatccctttcaatctgtatctcaactcttaactcatat

SEQ ID NO: 6778 - DNA, 867 bp, Emericella nidulans
caattccacaggcttctgcctcgagtccataaacgctgtaaatcctgtctttcgtagtacatgtctactgctcttctcttgcaagacattcaccatgtttgttcagtgggcaactcgatgcttgccgggctttagtatcctcgctctgctcgttctcctgctgagtacaagcgatgctatgccagggccatggagagacccggcaaaggacaagtctgacagccctgaactcaatctagcgcagaaaatattcatcttgtactcaatcttagtacatctgaatacccttctcttcactggccgtctctcgtgggccttgtcgtacgccttcgccgagacatccaaggtgctcaaacggcgagaccactcgctgagcggtgcttggaaacaaagcggccctcatgatgacccattttcaacggcgttgaacaagaaatctcctcgagtttctgttgcagaggttgcagaagaagtcactcacgccattatcatccccaactataatgaggacatcgacactctgcgagagacgctcaacgtcctcgcccgccatccacgagcacgatcacagtatgaggtaggaactagcccgagcgttcaggcaacgggctgacagattagatatacctggccatggagcaaaaggaggtctgcgctgccgaaaaggccgagaagctggtgttctcgttcgagaagtctttcgctctcatacagccgacctttcatccaacaggacttccgtctgaaatagcagggaagagctccaacgtcgccttcgctgcacgccatattgcacagatccaccaagcagagctcgaggcaggtacctgcgacgtgatcatcactgtcatggatggtaagtaggcc

SEQ ID NO: 6779 - DNA, 940 bp, Emericella nidulans
gtcttaaactgggacctgccaaacactctgtacactatcgagtcggtccatgggcggcgacatcgcatgagcctgcgcaccagccacagacacgtgagatgcaacgcccgcttagccgccgcaccacgccaaggagcaaaaaaaagccctagtcccacagaaacttcccaaatcgacccggtccatcttgaatcctcacgtggacaatcaaccattcgacaagataccgcccaccatggtatgtacagggttactgtccgaattgcaggagattagtgtcaggatgtcatgctgattccgaacttctagtcttccaaggtcaaggctggtcaactctggggaaagagcaaggatgagctcacaaagcagctggatgagctgaagaccgagctggctcagctccgtgtccagaagatcactggcggtgcttcgtcgaagagcctgcggatgtgcgtttgatttccctgttctcaatcacaaatcacaccagatgtcaaacccttgggagtggaaggatgcgaattggggattggaaagaatgtgctttttagtcggatcgcgtcgcatcgatagatgaaatcggctcgaaaaatgggagcgtactgaagaaacaaatcaagaggagggttcgaagactggaaattgcgacgagaaggactaccgaccgaccgaccgaaagcattcgatccgatcacaaatgcaccttccattcctcaccaaatgaatacatcaatctcaaatttctaatctgaaggaatactgatgatttcgtccgtagtcacgacgtccgcaagtcgatcgcccgtgtcttgaccgtcatcaacgccaaccagcgatcccagctccgcctcttctacaagaacaagaagtacctccctcttgacctccgcccccgcctcactcgcgctcttcgacgccgcctcaccaagcacgaggctac

SEQ ID NO: 6780 - DNA, 545 bp, Emericella nidulans
gtttgtcgcgagatttggaacgcagattcgtgctaggttgtcaagggttcatcgagacggattgtagacctgctaccggtcttcgctccatctgcatgaagtctcctcttttatagaagcaaacggttcgacctagtcctgctgccccaaatctccgacgcagaatcctctcttcgcccagcacaaccagactacgctaaggaatcaaaggtgatgtcgtaccgttggacttcagaatacggaggatcttgttacctgcgacttgttagcacacaaatccatcttcccagttcccgaacaggaaaatcttaccagtgacagtcttaacctgggcaacaccgtggctgtcacgaaggacaacaccaatctgggagggagaagcacccttacgggcgagcttgcagatgtggtcgacaacctgctcaggagtgatcttgacccagggagcgggggtgcgagagtaaggcagagcagaggaggcattgccctttcccttggagtgaagacgacccattgtgagtgttgaggcgagtggtgtgtgaggt

SEQ ID NO: 6781 - DNA, 579 bp, Emericella nidulans
  unsure (1)..(579): unsure at all n locations
gggnggggggaagagggacaactcagacgacaatttttcgttttttctacgaaccatagagcggggggggggggggaaaacccagaccggacacgtctgctaatacggacaggagaatatgttgaatcctgacggttcggccctcttgctgatgacacacttaataggcagtctgcttgaggggctggggcaaacagaggagatgcataacacgcgaacctttggccttcgaaatcacgacggccaacatctttagtccaccatagggctagctgaacaggctgccgactacagcattcgaaaggaattaaacgtctttggtgggaggtagaataggacaggagtggccaggctagtagatgttttactaacaaatgtggcgagggtatatcgatgagctcatgcagaagtagcatagaactaaggtacacatacactatcaagggatttgaccgcaaacagtgagtcatgcactgattgctggcttgaataatgcacacggactgctttaggaggaggaggtcagcataattgagctgcacagtaaactgcatgagttgggcattcggaagacgtcct

SEQ ID NO: 6782 - DNA, 491 bp, Emericella nidulans
ccgcattcatatagcttgtcaagctgtcaccgagaggataccttgtgctgcctggcgtggtttggcctcgtccgtcgcgatgagttgccccattctcagttgtaacacactggctttgccatattcttgaatacacctatacgcctatacaccgtagactgtaatcaccgctataatttcaattataagtttgtataccgccttccctgcgggtttctggtctccagctggcctgtgaagcgcagaaaccaacacctatcggccggtaataatactgtatagttactgtacagtgaacggtacaggattttagacccgcgtgactctctagtctccaccaaccattcctggtttccatgtagccgtggttcggctatcttccacgagatgatgataatgcccttattttcaaaagaagaaacgtatctgtatcacggcgccactgtttattgtttatttgcgtatcagttcggcttcctaagtgaaatgct

SEQ ID NO: 6783 - DNA, 1174 bp, Emericella nidulans
  unsure (1)..(1174): unsure at all n locations
aaaattagttgactatgggtctacgtcagaaaacgatgacactagccaaccgcaagagccggaggatgaccttggcttactgccctctgcacggtacgaccccgaagaaggcttcaagccaagcccccaaaccgctgtccaagcaaccgcagataaatttgccacaatcaagggcttaccatcgacaacgccgggtatcttcgaagcattgagggaacgatcggaaagtcacttaagcactcgagatcgcaagccagacaacttacacctcaatttcttgccgggggaatcatctcatgacgaagtccaatctggttccctcgcggctagtttcaggagccctgcttctaccgccaacagtttcagtacaacaaagagtcccagtgagagcggccgcagtatcgaccagtacatcaacagcctggacgaggcgagctaccactcacggaagacctctggtcatcgtcgtggcaggcgaaacactgacgactcgacaatgctgagcacgcgcaagacaaaatcgagagctgcatccaatgataccacacgaggacgcaacgagaagcgttatgttcagcctgcaaagcgttcaccttcctctcccgtgtccatgtctccagaagaactggcacagtacgctgtgaaacaaacatcaaaggctcgaagtacaagtagggtacggaagccacgatccagatactcgtcggaacgccggcagaaccgttccactagccgacacaaagccagccgtgctgatacgaccgagcagtcgactcgtgggcggagcgcggatagacaaggactacgaaacaattaccactcttcccagaccccatgaccaacccgaagatgcgctaaatttgttgaatgcaacaggaccgacgacttgtaaccggagtcgagccgtcgtcatccggtttgacgtgactttttgtgacgacgttgacccaccagctttgactcgaagaagccattcaaaacattaacaatctgttcnacaactttggagccaagcgtatgagcaaataagttcctttctgtaataggcaagacggacggtaattaatcgaccttgttgccaatcgcgccatatcttcaaaataatttttggtttagggcattttggaattaccttaggggacatgtttcaaattggattatatatttctattgt

SEQ ID NO: 6784 - DNA, 586 bp, Emericella nidulans
tcctcgaagatcgtctttttgagcagatgactctagatgtaatgcagtcgacctttgcggccaaagtccaaggaagcatgctgctggacgaactctctggccccgacgtcgaccttgatttctttatcctcttcggctccatcacgggcgtcgtcggtaacttcaaacaaaccgcgtactcggcggcaacaggatttcaatcctcgctaatccacgctcgtcgcgcccgtggcctcgtcgggagcatcatccatccaggtctcatcagcggcgttggctacataacacggaagggaagccggtgggttcaacatgtccgcaagacgacaggctctctccttctctccgagagagatattgataagctcttcgccgaggcaatccttgctggacggcctgagtgcgactcggatcctgagatagttatcgggttaccgctcatcgatcttgaacagcatccggatatcttctggagctccaatccgctgacctgggattttattgattacagcatcaaatcaacatcacaactaggaggtaccttgcattcgcgaggctcactcaaagcggtcctccagtccgactc

SEQ ID NO: 6785 - DNA, 527 bp, Emericella nidulans
gatcttcctcttaaatgcagattcgacctcgactctgtcccacctttccttcaaccctttgcagattaagtcccaggctctggacgtcatcggctccctcatcctcttctacaaatcgacacacggttataaatccatccccatcgtcatgctgcactacttctgcgtggctggggtccatgccgtctcaaagctccacccaagcgagcccaaatggggcgccatcctcgaaggttcagtcctcggcctctggcacatgagcctaggctggggccgtctcactaaagcgttcttacgcatcattgacttggctctgaaagccagacgtcttgaccgttcctttattccgcccagggtatcagccatctgcgaccagctcaatgggagcctctggacgggcttggatactgtgtcccttgctgccgattatatggtacatcatgatccagcggtcctgggccaaacatccggcgcgggatctaggcttaaggcgcatgctttgcaggagctcctggtggtgatggagg

SEQ ID NO: 6786 - DNA, 881 bp, Emericella nidulans
agctcatcgaggtacttgtgcttcctggcgacattatagaagaaaaccaagtcgtcgcttttgtgaaacagaggaaaatggaacttgaggtaagaagtccacgagcagggcgtgcacaatgggtttatgaaatggaggaggaggaagaggatgtagcggaagacatcctcctggtagaactagaagaggaactgcgggggaagctataagcgatagtaaccctatatctctgcatatttgatggaaatttgggatacatacctgtaatagaggaaagccaaggtcgtgaagtgagataagagagatgagagatgggaaatgtgatgactacattccacattgagaaatgagtgctatcagcgataagataagatgataagataagcatagctgtagatacctcagccaactccccgcaccacgtcatcgtcatcaactaccacgagcttcaagttctcatctgttcctcaatatatgtgttcagcacgtactgctgagtgaaaaatggaatatctccgcctctactttttcacctacaattgtgcccttagcttcatcaatgtagaacacttttccagtcacttcttcgacgcctaccccctcaccgacaatctcagctccccccctgagctcatcgtgctcagtctgcaagagattgctcctatgccatacgctttcctcggcggctcgttcttagctccgtacttcgcctcttatacccaagccgttaaccgcgccactgttgagcgcttcaacacccactatgtcaacgttctggccgatcacagcggcatgaccggactcttgatctttgcacggcgcgacattgttgaccagttgtcactcctggtattgccgggtgggcttgggtccaggaaata

SEQ ID NO: 6787 - DNA, 861 bp, Emericella nidulans
tcttttgccaacactatagtaatattatattcttacatgtcctgatggttcgtagattatgtgtcttataatatgtggcgagattctgagccgctgctctcttctatccttcatcaatcgcgggctagttttaaacatgaactattactggcgaatgctgtgggcattccgataatgcaacaacatggctcgcaagataaaaacgtcccagcacatcattcacgccttatgcactctttgctcgaggaagttgactggccatctcaatatgtcgagttgccaaatgcaggccattggtttgatggtgtgatgacaacctcttcattgctgaagttctacaaaagctcgctagaatcaacaagaagacaaaccgtcctcgcatttacaatatacgtcccccactctggagacatggcatccaaaggaggattatatgtagatcagctacaatctcctgataggttcggtcgggtgcatgttacaattgatgcgaaagaagagacgtggcacatccagacacagaatattcatcgcttccacctctcagctacagcgtgcaactctaaaaagcgattaaccttaaccatagacgatacagccaccctcttcagagtcgacccggcaaagtgtggattcacttggtacataaagggcactgaagggagctggaaatgctcagagcagaacggttggcagtctatttctcaaagatacgggcgtcaggtgggtgcaatggatgctatattgcgcacgaatgggacatttacgataaacgcgtgctctgtcaagagcgaagaaatagcgctccagattagccgcaacctcctacaatattttgctgctgactcctacatcgcaaga

SEQ ID NO: 6788 - DNA, 599 bp, Emericella nidulans
cagcagaacagctcaagcagcagtacgggcactgattcaggggactaggctgtcttgttcacgtatatcaagcgtatcagcgaggcctgttcgagttacgtcagtgttgcctgagaaatgagctaaggtccacatctcaggcagtaatcatgagcaagatgaagctatcgggctctcctatacgttacctactgagaaggccattgactaacgaagtctcttctgcaagcttttaatcgcttaactgggatgtcactcctgttatgtcggccaggggcaccaattacatctccctctagcacgagccacttagggtagcacggctcctgacgctaaaggagacggagtagttgccctattgacgagagagctgggattgcatcgcactttgctgccagttttaatacctatctggaaggcacgaccactgactatgaattggaagatcaactgataccccctgggggaaagaaggggagggttttgtttgcatcgcgccttctctccgcgtaagttaatgggcagaccttaaggaggcacaattacttggaaggaaaatgcaagggctcttcagtctaacagcctcctgctgtacacgc

SEQ ID NO: 6789 - DNA, 435 bp, Emericella nidulans
aaacagcccacttattggggtgttctctaatcgccatgatccacaccagaccgaagatcttgtcaaatatgcaccatgcctagcttggcgggggcacgacggatacgcacaatacggtcgtcagcctaaaagaagcattcacctttgagtatacgaagatctaaactagaggaccgggacagatcatgaccctactgaggggagaccagggatggatgcattcttatgacagaatactctgatcagttgggaaatgcagattaacataacccagaccgttcgcactgaagaggaaggactgcagctttacctcatctactggacgtgcagacatataatcgggacaagaaatccatatcgatcatacctacagtactcgtaacatggaacgtctttcaaaccctgagacagccctaggcgatgtacacacgctca

SEQ ID NO: 6790 - DNA, 684 bp, Emericella nidulans
ggagagcacgcttgagttcccgactgtcctgctctacccgatggatgcgcagtcggatttcatcaaggggttccccgaggccacttctatcgaagaccatctagagtatattttcccgcttccgtgggataccaagaaggagtacacagtgaagaatgtggattgctttatggatacatatacgggtgggctgatcaaggcgggcaagaagctgccgctcctgcagatcctcagcggcagtaatgttgagattgtggatgagctggtgaagatctatgtggtgccgagctccaagagtaaggagtttattacagcgatgaaagcgaggaagacgggttgagtgatgccaaaccgaagagcagtcccgacatagcagtgggcagtggctctactgagttgtctggtcgatacagtgctgcagagctggcctcttcacagcttgcactcgtgtgcagccacgccttgtgttgcgccgacccatgccacagaccaaacccgcgtgcgataagccttcaaagagattgccgctacgatatagaattgaatagacgtgaacaagggtggccaccatgcgcttcctaagtgtggtcatcaacatgtcgctggactcgagcaaaaaaggctaaaactcacggatttggctagtacagtacatgttgatgaatcaaatgaagactaacgagt

SEQ ID NO: 6791 - DNA, 1012 bp, Emericella nidulans
ccccacgctacaagttgttaaaaaaaaaacccccggcgtggagggggagagccccggaaaaaaaatttccgtttattttttttatttataacaaacaacagcccatgttatattttttctcaaaaactctcccaggggaggtccaccctccaaccataaaaacgccctagcgccaccaaaatgttttgtacccttccgtttgcattctaagcgaacttgggaaagtgcgctagaagcctctcaccacccggtatcatccaagttttctgctctagatgacgatcatccaagtccgcatcagctcagatatcgtaatcgacttgcccatcctcagtaatactgctcaagccgctccaccagtttcccccgctctgaatgtagctgtaaaaaccctccagggggatccgcaagaaaagatatgacacgccgcccgctagcctgcttcaggtaatatgtgattcccgcgagcgtaccacctgtcccagtcgagcacgtaaatgcatccagctttccgcccgtctgcgcccaaatctccgggcccgtcgtctcaatatgagctcggcggttagccgtgttatcgaactgatttgtccacaccgcattgtctagcgactccgcatgccgccgcgccttgtggttgtagttctcagggttgtcaaacgccactgcggggactgggtacacttccgcacccagcaatcgcagaagatcaatcttgccctgagactgcgtgttcggcatgtagatgacaagcttataccccttggaccggcagacgtgggcgagtccaatacccgtgttgcccgctgttccttcaacgacggtgccgccgggctttagaaggccccgttcctcggcatctttgacaacgtataatgcggctctgtccttgacgctgccgccggggttctgaaactcagctttggcgaggatgttggaaccggtttcttcagagagacgcttaaggcggataaggggcgtgttccaattgctttaaggtaattgttagtag

SEQ ID NO: 6792 - DNA, 617 bp, Emericella nidulans
accgggggaggaacaggggacaatcccactcccacgccgctgttgctgtctggatcaccatgcccactggaggggtggggggtacaagcgcgaggcacaccccaatcgggtgtccgatcaccaaagatgcgggagtcgacataagaacctgcgacaaacgtccgtgaacgcgcgttgcttcgaccgtgaacgcaccacgcagaaggaaaaacatagtgaacctgactaagggccatacaacatgggctcaccatgaatgatacacgacaaggctctgcgatgtgcgttcttggactgagcgaagatgttatgccaggttataagcatctatgaccgagcgcgtgggttaaaatgccgataagagaagcatgatctgcgcgcataggtaacatacgcgttcacattgcgaaccgatgtggtcgggcctgaggcaaagagctgaccaaagccacggtctatacccaagctctgtgtagcctgatggagacacctgaagcaacgtccaccgcaccttcaacgccagtcgctctgcgcatgtcgcttgcaaccgttggcttgcataaggaagctttatgatacaagccgaggttgttagctacacaaacatggtatggccg

SEQ ID NO: 6793 - DNA, 1103 bp, Emericella nidulans
  unsure (1)..(1103): unsure at all n locations
atcctgaccccaccgacagcctgggtcacgggcatcgccagcttgacctttttctaaaatgctgagaattgcaatcctaatgggcggaggaggtgcaagcttgtgaatacagaatacatgctagagggtggtgtttattgaagcccactttaggaaggctgtgcttgccgtgtgttgctatggccacatatacatcatatttgatattgacatggattttgtatgccatcaacagtgttgtgggctagttagtagcaagttatctgtgaaggtgccttggcatcaacatagttgattttatttgttatcatttttcttccctaatcaaagacatggctgcctgtatttgtagtttaatatctatggttatagagaaggcgcctgagctgcagactatggtctgaagcatacttggaggagcatataagaaccaaatatatgcggcacatggacgaaacccactcacatagtagcagagtttgtaagttcgaagctttgcgtctttggaccatatttctgctccacaaccacttttcccaactgccatcgctggtaaagccaattgaggagcgacacctgcgcccccgctactgtgaccacctatctatggtcactattgtcctctgcaagagggtctcttaccaagtctccagcagtccttaatcaacccatgcagggatacctgctgcctgcctgctttgccccaagggggatccaggattgctgccagaagaagcacagggattagaacagttactaagagcttgtaaaggcctgcttggcagggcaggctattggttgctagtttttctataatacctgggccagcagttattttctcaaggtaactattgtggttaacccaccgcgccagtagactgctggcccgagacaaaccccatagcagcatgcctaatcctaatacaaagctgctgcttgactaggctaccaggctatccagagtagccagactagcangatngaccaggtccagatcccgcctgagatataaagaaggctgcctactgtgtcctctgtgcttcggcaggatctcatgcaccagctgacaaacaccctatactcaaaacttagtctccactttt

SEQ ID NO: 6794 - DNA, 504 bp, Emericella nidulans
ggagtggtcgaggcaaacgacggccccatccccattttcattttcacccaccctgaaagcatcgggggggggggggacaaatttgagggaaagggtgccttcaccgaggacccgtaaccatcactaccatggaaaggaaattcggctaaaaaaaaacctaaatgattgtaggttacagttaacacatgaacaagtgctaaacagatcgcggagctggggatccaaatcattatacgggccgtcggtgtgacaaatgctgaggccaccatcggcgataagcacgacacttgctgcaaacataacgtgcggacatgccaagcccaccctacactatctcaaagccacacttgagactgaacaagcgacctacaacaatgacagacacttttaatgagttgtaccgaagcatataccgaccaactatgaagcataacgttaaccatgctagcactatccgagcagcattcacctaagaatataaccgatgctggctagcctgcacaa

SEQ ID NO: 6795 - DNA, 659 bp, Emericella nidulans
gggctgcaatttcctgccccagcctatcataccgccagtgtgcctgaccctcctccatcctaatttcattagccatcctcattcgccttcctcctgaccacgaaccccgtcgcgaacgctagcctgctgggccaagttgagcgtctgtggatgacatcaggtgatcatgacacgaaccagaggcccgcagctcctcattcttctagaagacgtccatcaggttcaaatgtatattgacggttgttctatttaaaccatctaaagacccagtaaatagtctgagtcttctgactccctgagtacgacttaggtccaactacacgattccattgtatacctccacagcaatctgagatctgccgtacacccgacgttcacaatacgccaagtaagcgacagatggccaatattggacgagagccttatgaaactcatccgtctctctgcgggtagcgttgctgttagatccagcatcctcaacgccctggacgcgagttgtaccgtcgtattagtggtccgagtttccaccactgtattgcaagacacgaaggcaatggaaggtctatatccaacccacagtctgcctcctggacagtgccgtgtgcacatcacccctatgttctgaatgctgtcagcttattcaatagcggcagacagac

SEQ ID NO: 6796 - DNA, 527 bp, Emericella nidulans
tctcctttgccatttccaagcgcctgtggccgaaattcagattcaaagtggggtgatcgtttggcaccgagtgcgaccgtttaatcggtgtgctggtgggcgagaagcgcacctccttgtagaggctgccatgcccgttcgggattttggtggcggtcgctgacttcatgactgtgctcgtagtgtcttgtcgaggtggaaagtggacggggggcctgtgactgagacaagccaggggtcgggtgttatttgcccctcatcaagggatgatggctggtttatctggtctgcactactgacagacggtcagtagacggtgtggaaagagcaacgattgacgctgatggtggagaccgtctccggcttccccagctcgcgctactactccgtcggccgtattgatggaacgctgggcaggttgggaccgtggatcaatcaccaggaaccaagtgggagcagtctagggagctggccacacaaacggggacaagtgggcgcacattcaacgctagactgcagcgtttggg

SEQ ID NO: 6797 - DNA, 553 bp, Emericella nidulans
ccccgctcttcgtcgcgagttgagactcatgatttatggccaagggccagtttcttatgctgatttctgttactcaaggtggcgttcgtatcagccacagtgccgatgtccccattaatcgattcaggaacagtatccgctcgcgagagctggggggagcatacgcatccttctgtgtatagaaaaatacgggccactctggtttgcagtagtgccacctgcggttcgctgtcaaatcacaattctctggataaagactccgttctcctaatgccaatcctgttgccacggagcacttggtgcactcagttcctgttcctctacggcttatggagtatccatcaaatcgacttgccaccgttcgactgaagaaaactcgacactcatgatatctaagtcctcctactatggcttcttgcagtagcccataccggaattactcctaaaacatagtttgtcaaaagcgacccatggatctagccaggcccgatggctctccggctacccccaatcatgctttcgcacacaagccatctactcggcgtatgtaaag

SEQ ID NO: 6798 - DNA, 689 bp, Emericella nidulans
ccacgttaaatatttagtctgcttgctttaggacatatttagtacagtcaagtcccagatgggcccgcgggatcctgaatagtttacagcgtaatggtttcgcttgttaatatcgtgttgactagagtttttatatgcatcgtggccgaagcgtcgcgatgtcagttctattacaagcaagagatatggacaaagtggcaatagtatacaagttgccttcataaatcataacactaccggattataactaataatactgctgctatggataatttgccccaaccacacacacacacacactatccaagggaaacgaaaagaagaggatagtgtccatgagcggaatttgtgaggtgaggaggatgtgataggtaggtgtgagagcgtcagaccatagcaagcaagtcaagtcaccgtccaacaagtcgagaatctgaggttagtcgaagccgggtcaaatcgggacgcgtgaacatccttcaacaagccccgtcagcgtcagactctcctcccaaccttgcacgtccggcgaatgtcagaaagcaacacagtagccatgtgtatagcccccgggtaatatgtggacgtaatccactttgagcgaatggataaaccatgcgagcaatcaagaagaaggtccatccttcccctctttctatatgctaatgcagagttcgtgatgcattgca

SEQ ID NO: 6799 - DNA, 852 bp, Emericella nidulans
atcatcactgtcgaattaagaattgggctgattaatctcgagtgcattgcatgcttgtatggatatatcgagattgagtacattaatttacggcttttttgcactatattcttgaagactgtctgccgaagagtaaaagcaccttcaaatttgtgagacgggttactgggagaccgacttactcgagttcaagacagtaaatgcccttggggacatagccagtaagtgcctaagtctagacaggttcaacccgagtatgcgtcagcggcatctcgtgttctcaagtaccaataatcgccttcaacagtccgtctcgtcaggcctttgatagacatgattgccaagagtgcagagatgtatctgctctgcgttaagggatctgattgggtcagaggaagcaggttgtccggtctcgtcgatgaaattgttgccagtctaatgttgtagggacggggttggcagcactgctcgcggtacgctcgctgctatcatgcaagaggtcggactagcagttcctttccaaataatgacttagaattgcttgtaagggaaattctctgtatcctggcacgagagtcgatactagggcagggcacaagtactcataaggcagcgaagtgagtagacaccgagcattcggtttatcatcattataggagacaactgaactatcatctatctcgtagtgtatccgccatttgcgaagatagtctgaccagtaatccaagtaccctcggtgcagaggaaccgaacaatgggcgcaatgtcctgaaccagagtcaaacgacagcccattccgttggccttgtggaattcgacggcttcgggggagtcctggggtagagaaagctg

SEQ ID NO: 6800 - DNA, 512 bp, Emericella nidulans
accgcgcgtaagagagggtaacaaacctcatcaaaacttttgtctttttcaggaggccgaaatccaacggggggggtggatacgccagcgcagatagggtccacaaccataccatagccaggatacacggcagactgcatgacggcaacctacgactggaccaacgggtggcgcataacgcgcacactgatgggcctggccctagatggctcaggcagaacgaagaaagttccgctactgactacgaatgcttcaacaactcaccggagattgtgcctgcacgatcagaccaacagggtagaatatagtccttgtcatgaaaaacgcggctatttggcatcgagcgcgcagaagtcacatggagaactgaaacggacgcatacataaacgactttagagatgaagcagaacactgactgtgggctacgtgtacgaagacctcttggggaagcggcggacgaacacttatgataacaacatcgacagttgacatattttgcagtgccactcct

SEQ ID NO: 6801 - DNA, 876 bp, Emericella nidulans
  unsure (1)..(876): unsure at all n locations
acgccgcgcactaatttcgaggaaggcgaacttacacctgacgccgccgtgaccctctcggaggaggccttggtactctacgtcaaggcattgtctctacttgccaagtcgatggacattgcgggcgcctggtggatgcgcaaaaatcgagccgaagccctgggtgaatctagttttagtcgactggaacccgtctcgattcggatcaataaggttgtgcaatgggtccgcagccgattcaacgaggtgctcgaaaaggctgagtttgttcggctcaaattgcttgaagcgcagagacgactgccgacagatcatccatcccaccccaacaacctctcgctcgagtcagccggttcaggcacctcggtggacgtcatggtgagccctggtgtgacggctgagaagctgatgtacgatcgcgcgttggagatgagccgggcggcggcgatcaatgagctcacgagtgaagatctccctggctgtgagattgcttatgtgactgccattaggatgctggaggctgttttggagacagacgaagtgcagccgtcagggaagggcactgacaaggttacactggacggcgtgcagggcgaggagcgtgaggtcttgttgaagtgtaagtttgcggactttgatgttgccaagacgtcaatctaactcagtcttagtggtgtctaagatacgcatgcggttggcaactttgcgacagaagctggctgtcttggccaagcgacaaactccgccgtcgagcggaaaaatgatcccctcgaacctagcacatgccacgcctgccacgcctgccacggggatggctactnctcgatgaacgacgcatgctgcattctgcatggntctcactggttcccttttcaa

SEQ ID NO: 6802 - DNA, 557 bp, Emericella nidulans
gaggatccctactcgactgcacagtctgttgccagacactgggtgtggtcgagtaagttggtcgagtgattgtaaaaactaagaaacaggcaatgagtacgattaagcgataacgataaaacagagaaataagatagacgagaatttcctaaggatggggtaatcgagtagagtggtgtcctagcctattcgaatggttaacaagcgcaatcaagctatccctagacaacaggttcaacaacagaccaattcactcccgtgatagaaatcctcaagcaaagctagcccagactaattcccattaacgaaatctaactatgcaggcaatacgaacagactgataaagtcaataaacgctctaaacggccaatcccttgggatagagacgcatatctcaggaactagtggatcaagcattccatcgaacaccttctgggtgcgggaatgcttgggatcgaattccagttgatcagaaagaaattagcagtaaacgcaactagtcctaaagggattcaatcaattctaaaacttaaccattctatagactacggattcac

SEQ ID NO: 6803 - DNA, 570 bp, Emericella nidulans
ctggatcgccgggggcacaccgacatagaacatcttctattttgcgccacctgcaatcatatggggggagaggtgtcctatcgctacgtaacgccccaaactgttggatttacatctacacagagcgtttcacaatcacaattagcaacacgtactggttgcgcgtcaacgacttctacggctatcaaagactgtgcatggtggatccataagatcacatgggggtcggaattgaggagaggacctaggacacatatagtatgatgagtgtcatttaaaaaaacagttgacgatcatgttgtatgtaacaaaaacccacactacgtctcagggtctggggggattgccaaatacttttactctgaacctctacacacatgctaagaccaataccatcttgcagattgttgcggacacgcctaccataataatgatgcaatcctttataacaatgtgtgcaacctagcttgcatccgaactgagggtgccgcagcccatgatagagcaggccgactcgcacagtctgccatgccatctatacacaagacgggcactgacatgccaacaagc

SEQ ID NO: 6804 - DNA, 816 bp, Emericella nidulans
caagaatagcaaagctaaaaggtggggttcggctgttgcagcttatgaagtaatgaacgagactctcggcactggcgggatggggggcttatggataacctagcgaggctgcaatccaacggggaaaaatggtgatcgggccagaggagaagagtgcgagaagcacaggtcatgaatacgagaaggcgagtggactggagaagcgtcctacaagggctccaggcggataagcacaagcgatggggggaggaagcgagaggagaatgtgccggctcacgctggccctggtactgttgaattttaccagactgttgcctctcgtttaaaagagatacacagactgtgcttcctaagtctcttatgaagcgtcaatacagacggtgtctgcttgtgagttactgggattgctggattgctcaatcagacgtcgcagccgtgccctttttttccagttgttcgctgtcatactggagccaggatggggatcgactctctgatactattaatactgcagttcagatattattattacacgatttacacgatttacatgagtttaccagtatctttcgataacttaccgctaacaaggttaggtttcggccgatgatgggacccaatactgagagcgctctagtctgtatccacggctccaacaagtgtatgataggtacagtctagtaccgcgcagaccgatgaggatgagaataggccaacgggccgcagtcaaggtttccattgccatgggccatcgaggagaacacccctctaattccaccagagctcccagccagcactaatcagagcatgaactga

SEQ ID NO: 6805 - DNA, 1204 bp, Emericella nidulans
  unsure (1)..(1204): unsure at all n locations
cactcaaagcaggtgttttcccactgttctgtgagcttctatgcttgtctacaggcggtagtcaagcccgactttgcacaaattgcattgcacaattgcattaaaatacacaaaatgtagactgaccgctcgaccgctccgggctcggtattgggctcagaattggtggccttgctggaacaggcaaggagaccgccgcttgaagtgacctcacctcgatcctcggcctcttatatggcctgcatcactcctgatgggtgcggtatggtctgatcagatcagatcagctccacttctactacccacaggccgcgtctccactgctaggaacaagtcaagatccagcatagctaggtagacagggtggaggggaatcaagacttggtttgcagtgctcagatctccatacctgtacggactggacggcatcctctgccaaactgtaaccttgaacctgctcagtgctatgcggggtttattcagccacttaatcctagagctttctattcaagctcctttcgggccttcccgccgtccctttagcacttcaactgctggtccccccctgtttctatgactaacagtttccttcacgaaccttgcatccctgaccgtctcgggcattgtctgatcagacgtgcagcgtagctgacaattcagccgatcctattggcgcccgtgtcggcttcgactatttgggtaattcgcaacgtgctcgagttcgggctcgagtcgtctcgatgcttgcttcgtgcctcgagacgagacgagtcgagacgagatggaagcccctgactcggcgggaagtttctacctgggacgggcggtaaaaaagcggggttcaaggatgacttggtcgagaccaagtgaagtgagacgtaatacccccctcctccgtgactggaaaagagtccagatacatgttactctcccccccccgaacaaagggggtggctttcccctttgggggcatccccctccggggtttccggcaggacagcgnacttgggtttctttaaactgccatagactgccggtattgagcctacttttttggtggctcgtctccatataggtagtttgctctggtggaggccccatgccttagattgtggaggggaaagcattttccgcgttcggcccaccggcttgtacccaggaatttggcgaaatcattttgaaaccccggggctagccttttggc

SEQ ID NO: 6806 - DNA, 295 bp, Emericella nidulans
  unsure (1)..(295): unsure at all n locations
tacgactacttatagggagacccaagcttaggatccgcatagtccccaggggaactagcattttataccaggtctcgtgggactcaaatatctgtatttcatggctgacgtcagcgatagagaaaatatgaagttatcgtgacatggacgtccccagagcagctaattgtggggccgcaatgctgggccagccttcccaccgagttttggctaatgtctccagcactattagagccaaccaaggttgcgttagtcttcaatgacagggatgtgttcaattgncancggctgtttt

SEQ ID NO: 6807 - DNA, 855 bp, Emericella nidulans
agcccggccatagctgccagtggatgacaacccatccacctcagatacagaggacggggatagaggagacccagcgatggagtcgatctcagcaggactcgtgtacccgttcgacgcttcatcgacgctgttgttccgggagctaggggcttcgtcgaattgtcgctgccacagggtgtaaagagcatagaggtggcggtcctgtccttgtcccttggagcattccttcgtgattgccgagtgcttctcagtagcctttcgaagggcattcaccttatcctcagcagggttttcagcccaaaatgtcttcacgaagtcgagggcttcattggtgacagatcgaatggcttcggtccgtccatgcaggaaagccttggtcattgctggttcataggtatttaccacttgtccgtaaagcccgtagtaagccgactggaacgccatctggacgaatgcgtccggtgagaatcccattgaggtaataaagttctttccgaatcccttgaaatcaagcacttggaattcatgctgctgaagaagatctgcgagatgcgattcggcaaaccggatagcaatgctaagctcaggcaacatgtcccattctaattttctgggggtcgggctaacgtcaccgaaactttgagggtggcgtttggacggtcagggctagtgggtgcccacaagctgggaaccctgcccgtgatgggtccggcaaggcaaaaaaatgtgtccgtgtgacttacttgcgaaccgagaacatatgtcgttaaccacaggggctaaaatggttccagactccttttacacacagatctgcagttggcgaccccgtttggcagaccacttgaccccttt

SEQ ID NO: 6808 - DNA, 501 bp, Emericella nidulans
tgccactggcgccgtagtacatcgaagacatgcctggtgggggaggaggagcacccaggccaggaggagcaggaggagcgcccataccaggtgcaggcggaggatacgcaggatagccatatccataagcagcctgtccaggtggagggggagccgcctgttgccaaggagcagctgtcccagcccctgggggagcgccataaggggccgcaccataaccatagtcgttgccaccacggccctgagtggcccatggtgcagcaccgccattgtcgcgggatccgtaatcgtcacggcggttgtcacggccaccccgttgctgccagggagccacgtcgcttggagggggagcgcgttgccagggcttgtaatcgcggtcgtcgtaaccgtcaggaccggcctcgatacgacggactggttggcatccggaccaggagcgccgccagacaattcttgcataagttgctagaagacattaataagagttcaacggcaagtatg

SEQ ID NO: 6809 - DNA, 545 bp, Emericella nidulans
gctgaaccgatttgatagggctatgaagaagatatttgtggtgcaatataggcttacgccggggtttgtggggtcgttgtcgaaagcgtactatatgaagagagggagagtgatggtagctaagttgaaggagagggggtttacgggggatgtgagaatgcggaagaattgagtgtaacattccgtcaatgtctgaattgtctctctgttcataatttatccagatctaatgtacgttcggtatgccgcacgcgtactaaattgatctcgtcatagacttagggttgcgataggcatatgactgccacccagcagccaccagcaaataaagccctatacttgttagtcataccataaggccgaacccggatgggagccgagcagctaactgttaatgatatcagaggttagttactggataatatacattagtcacatggggaataagatgaaagtttttagtcttcaatttcagctacactgatgacttatagcaaagactcagcggcacgacagtatacgtgacacctcgcatcctcaaccac

SEQ ID NO: 6810 - DNA, 1005 bp, Emericella nidulans
cgcgataacatacgggattgacgccgtgcgactggcagagagctatagaatcaggattgcgactgtcacttgtaggcgaggtggagtctggctatctgactaagggcgcgcaggtgtaagtgtctgctggcaaaaagaaaaggaaccgatgggagaagccagagaaagtaggtggtgcgagatcagaaaatggcttgaataaggaaaataaagaactaacacaaggatagacgcagaagggaaagtccctcacactgctgtttcactcacacggagataaccatccacaatacacccctcgacagtcctccacctaggcagctattaacggcgcgttcggcttacgtccggcagaagcccggtatatgatgaatgtggcattgtgctgaaataaaaaagaggagagcgagtcggtcacatcgcatcggcctaggcaatccggggaacaagtttgggaggttcggttggatttttagcggacgctttgtgcacggaccacataagactatgatttgatctatgcaaatacggatatctttcaaaccaaatagcaacaaatattgctgacaggttgtcctgaatattagagctatcgtgtatgtactataactctcattttgtccaccgagatctattcctaagttgaccctaccacatatgtactgcaagtctatacctactagacccacctccttatgatacacacttagcctctagattcaccttaagtgtgaaatttagaccgcgaagcccccagcatccaattgtctcggctcccctgccgcttcaaacgtcccatttggcaagaccctaatcgcctgcgccgtactagttccaggcgccatccacgtaacattatgcccgcgtgcggccatgaatgcaacagtcgagttatcgtacgcatactcaaacgcgacctggttcgggatcaactgatcatgcaatcgcggtctggcaagcgcctcagcggcagataagccctcatccacggcgtggataatgttg

SEQ ID NO: 6811 - DNA, 588 bp, Emericella nidulans
gaggaaagcgcaattaatctggaggtggatttgtcgagtctcggattggacgagaaattcgattcccaagacgaggaggaacttgaagcggcagcaggagttcgtctgggatcgatgcctgaacgaccagatgtttgtctttcaggaacacgagctggagaggatactcgatatcattatcaccaacatgacgccgcaacggtccccatctcagaagccggtaccggcaaatctcctttttctcagtgcgcggtatgcccactatcatgcgagcccagagctcctagcaacattactggtgtctgcgacagacaagataaatgacgtcgtggagcgacatcaatgggacatgacgattctcgcattctggatctcgaatgctactctcctacttcattacctcaagaaagatgcgggtctagttgagtcaacgattgaatttcaactccatttagccgaacttatcaacgaaatttttattctgattattcgtgatgctgagcgccggatgaataaggtgttggatgcggcgatgttggaccatgaaacaattcccggtctcgacgacatccctttccaaaacgagtg

SEQ ID NO: 6812 - DNA, 574 bp, Emericella nidulans
  unsure (1)..(574): unsure at all n locations
tactttgtcgacatccaattccctctatgcaggtgcccctcttctctcccttccgccagttgctcatccgttggctttgttctggccagtcagcgctgttctcgaccgctcccctctcttgcttatccctagccccacgcagttggcttaatagctgcaattcctctttctgttcctattcctgctgcgtccacccatcatcgtcgatcgcttcacgattccagagctcatctcgagctaccaagtcgtcgacttgtctgccggtaccttctcggtcaatataccaatccaggccattttcttgcacaagcccctctgctatctcgcaaaccccagcaaccatggcacagaagtataagctcaaggatatctcctccttgacgggcatcaataactttgataaggttgaggctgacgtggagggcgtgcaggatggaaaggtgctgctcgtgaaatacgaagacaaagtgcacgccatcagtcctaaatgcacccattacggtgctcccttgaagaatggagtcgttnctccagaggggcggattacctgcccgtggcatggaggtgagctatt

SEQ ID NO: 6813 - DNA, 782 bp, Emericella nidulans
  unsure (1)..(782): unsure at all n locations
cgaacagccctataaaccagaccaggtttttgggctctgcgtgtgcccaagccaacagccggaatcaatgctcctgtattgaggcggaaagatctgtctctgtttctggcttgggtagaggtgaataaagtggctgctgacactcgacttgtaagagtcttagtcgagagcccatttctgttgtttatggcaccccaaacagcggtcgaagacgcagatagtgggagcgggcgttggagctgacgactagcaagagacatcttaacagcgtcgacgagagagactgtattccgcacgtttgccagcgaggtggaaaatgacggtccacgaccagtaacccagtccccaaactcctggaccatggagtgaatcacctgcttctcgtctggctgatgcgtggagcttattgtttcgcagccttgagtgtcatagtgggtgactgcttgcccattgatgatcagggtcccgttggtccggtcactacgatggatgaaacaggcttatgagcgacgcgtgacaaccgtacgtggcctatgcagttccgggtcctccagttcatcataatgtacagacctcggccccaccgtacctctgggacggccgtacggaggagacctgctgcgccatcacagaggccggcagtcccagaagccatacgaggagatcgagcatatggcatncaagatcttctatcggaggttcagtcagcttcgncccgttgcgtactctggtaatgcggagtaactaccgtactcgacgcagngttgacgcatgtttctcag

SEQ ID NO: 6814 - DNA, 583 bp, Emericella nidulans
agcagcgacagtccgcgggcgtcaacctcagctttaaaccaatccgatgacaaatccgatgcaggttcaatgaaatcagtcggaagcagacgcagttccactaatctgagtcgacctgcctcggcggattcctccgctgcgtcacccaccgatgctccggatcctccgccgtcgcccactatgtcaagcagcttgaagcgcggccatcaggatgtagctgccatgaagcagagtggcgaggtggaccacgtctctgatgctccgccgtctgcagcgccgcccccgggctcgcaagctaaagtaggagaatccattcttatcaaacgggaggacacgtcgaatccaatcttagactttatcatgaaaacaccgctccactcagacgcatcatcctcttcgccaggtatgggtatgggtgccctaaagtcgattgatcttgatgatatgatcactcgtcttctggacgcgggatattccaccaaggtcaccaagacagtttgcttgaagaacgctgagattacagccatttgcactgccgcacgagagttgttcctcagtcagccagcattgttggagctttcag

SEQ ID NO: 6815 - DNA, 1017 bp, Emericella nidulans
cgacagggccttctaccgccaccgtataatccctaatcagctcgttgacacgaacctccgcgacacgacaaccaccatcttcggacacacggtctccgcccccatcggattcgccccaataggcatcaacaagatctaccacccgtcccccgaacctcccgtgccaaaaggttgccgccgacttgaatctcccatactgtctcagtacagctggaagcacaccgattgaaaaagtcggcgaggcaaatggaccggggaatccgaggttctatcagctatacatgccgcacgacgacgagctgacagtctccttgctaaagagggcatgggacagcgggttcgacgccgtcatgctgacgacggatacatggcagctcggctggcgccacgacgacgtcgcgaactcaaactacgcattctaccgcggtctgggcgcagatttaggtctaactgacccggtgtttcaaaaacgctgccgcgaagcaggcatcgaccccgagaaagacgtcgtggcagcctcgaccaaatggatcgactccgtctggcatggacgcgcctggacgtgggagaaaattccttggctgattaagacgtggaaagagatatctggtggtcgaccattcgctatcaaggggattcaatccgtaccggatgcaaagaagtgcgttgagctcggtgtcgacgggattgtggtgagtaatcatgcgggccggcagtcgacggtgcaattgcgtctcttgatgcgctcgagaatattgcgaatccgttggcgaccagatctatatcatgtatgattcgggtgtgaggggggcaagcgatgttggcaaggcattggcactgggcgcgaagtttgtgtttgtggggaggttgtggatttgggggttaagtataatgggagaggaaggggtgaggcatgttatgaagagtttgctagcagattttgatattctgatggctgtgggagggtttaagagcgtgaaagactttgaccggtcgatcctcggtaagttcatgatt

SEQ ID NO: 6816 - DNA, 789 bp, Emericella nidulans
  unsure (1)..(789): unsure at all n locations
agcagggtcctcgccaccagggtctgagggcctcagacctcttgactctcagatctcggccggcctcgtcatcagtcctgcaatctctatcactttccacatccggcgggcttggcagtggcctcgtctgatgcgcctctcagagctttcgcgagaatcggtcgggctttgctnggtttcatcggtgcttgaccagtcgaccgacttcacgatgacgaatcagcagccaatggcattggcctgctctcgcatagctggtcctttcggaaagtctagaaagcgcctgcctgcatgctacagttgccccagcccattgggctgagggcagcagccctgctggctgccaagatgcttacagagtatacggaatatgacaccttccataccgaattggccggatttggcaaaaaagaaatttttgttgatttttgacactttgacagatcaatagtttgcggaaaattctacggcgcagagatgcagaatgagatcaaactactgccgttggtgtcggtgtcggtgtcgcaatattctcctgagttccatcactgctctacgaagtactagtcctcccgacttatcgtcactagcctagtactgctaatgcgctataatacaagctagtccttgtagcgcatagtgccccgtcaacctaaccttactatggatgcgggcgagaagacctagtggatggagatacctgggcccccaaaccactctgatgaccgggccttcacatgttcatgcagacaccagaaatgcagtggaacttttcgttatcgccattca

SEQ ID NO: 6817 - DNA, 578 bp, Emericella nidulans
ggcgccctcgcgaagtcccgagccgctgaaaacaagcccgaaacaccacccaataatttccgttcaccgaagcaccccgccacaagctacttagtacctacgctccagtctcaataacgcactgcaacattttaaaatttactgaaacaaatattgagaattgaaaaatgtcctccgaccaaaagacaccccgcttctcccctgccaaaacaaccgtcgtcttcctcctaggcggacccggctcaggcaaaggaacccaatccgccaacctcgtccgcgactatggtttcgtccatctctcggcaggcgacctcctccgcgctgagcaaattcggcctgaatccgaatacggcgctctgatcaagaattacatcacggagggcaagatcgtacccatggaaatcaccgtcgcactgctctcgaacgcgatggctgcggactcgacgcgaacaaggacaagtatgcgagcgcgaaaccacgcttccttattgatggatttccgcgaaactcgaccaggcggtattctttgaggagacggtttcccgtcggagttcaactgttcttggattgccggagag

SEQ ID NO: 6818 - DNA, 489 bp, Emericella nidulans
acaaattggattacgtacctgaagaaggcctttgatatccagaggcgcaatgtccatgacacttgttatccacgcccttgcccgctcaagtaacacttcaagtgtccttcttctgtaaccataattatctggaagatcgaccttaacgtgaccaattagagaagtgaacgttgacttccattcaaattcgtcaagctcttcctcgtggcacgaacgccagacgaccgttagaagctcaagcaatgcaaataaagagttcttgtcacaaagggctgagggacactcctgtataaccctattcgcgcaggaaatagccactttctgaattctttctatgcggtgacagcaagctatgaagaaacctgccaattccttcgacaagaaggcagaattccgtttcccggaaagggtcaatgaaaggtaacagccgacaaccctatcggcgatacggacatacagctagccatctcagcggtacaagggctggat

SEQ ID NO: 6819 - DNA, 527 bp, Emericella nidulans
  unsure (1)..(527): unsure at all n locations
tttcttcatctatccacatagactttttcttttttcgctgctgcagactgtcacgcgggggtggggcgatcccacgactgtaccgccgttgccgaacgccgcaccctgggaccttctgactctccgggacggtggccattttggaacgtctctgactttagcgctagacacagctctttgacgctgcctgaagctcatgtccgtacatctnnntgcgccacgccaagcattaggttggctagaatgatgtcgcctcctacggcggtgtatagagccgcacactccagatagtgacgcgcatctactatacaggtggcagacggagaaacgcgcgtgcatcttgatacccacaacgagctttcgtcgagctatgatacaagatctctgacgtcttgcacagcacctcagaccaagagacttgattgtcagacacggcaattacgccgccggtggtctgacgactgttgcatcgtcactcgagggcaccgaagaaagcgaggcccataggcgctcatatcttaccgacc

SEQ ID NO: 6820 - DNA, 572 bp, Emericella nidulans
ggctcgtcgagtggcccaataggttctgtacagcgcacaggaaggaaaggcatatacgaccggtgaaggatgatgacggaaaggaaataggcgaggtgcatgatggtgtacgggggaagagtgttcttgtacatgttgatatgggtatcggtattgcggggagagtactgcagattacgagaaagggcatcgcggaattctgcgagtgatgttcgtagccgggagaagcgtgaatcaggatgccacggaggtaattgttcgtttcgtcggccgccagcacacgaccacttggcgatacttccccacactcggatgatacgaacggcgcggctcaaaaccgactcttcagcgccgatttcccaccgatcaatctcatcgtcagcagagtcttttcttctcgacacaggtgaccatgggcggttatccgagccattggggatcaatttctcgtcaccaaacccgccaatgctctgacggataccgggaatctggacgccttgggagctgaagctttgaggacgtcagccgaccgagtcgctcaagcgtgatgtccgcactcgctctccaaacgc

SEQ ID NO: 6821 - DNA, 697 bp, Emericella nidulans
caaatcactccattgaagtaaggaatgtctattttgaatggattcccttggatatggtcgatggatttgtgagcggcgaggcgttctcaatcattggagtataaatgagaaggcgaagcagcaggacgagttggcgaagaggtattttgggagcatttccctgaggtattagttataattctattgcatcttgatagtcgcctacttgggctcaacctactgggaatctgctacaaaatgttggaaaacagtatacctgacgcagactgaaactccctcacccccaagtataatccgctcaacgcgagcgagggtcgtgttgttgtcataacatccaacgcgttggtttatagggcctaatccttctctgatcttcttatcattcaagcttcttcgtttctggtttcaactctaggctatatgcggtgttgccacgttgaaaagccatcatgacttccatcgccgtcacagtcgccggcaaatcctccctctttgaacaagcacacccccctttgacacccgtcacgagtgcgcaatggaaatctgctttgtgtgagataaagctgctctacatccaaagacagtataaacgatgcgtcgcccgttcgtcatctattctcgcgggggcgagggagcctgtacgtcatctcaccctacctgatcgtatcgtcttctacgcctctctgacgagataagc

SEQ ID NO: 6822 - DNA, 535 bp, Emericella nidulans
tggcgtccttcacggagccggcgctatatgagccttggacatgatattccttgcatgtatcttttctgcgacaaggacctaggaattccgctggcggctcagaaatcgtttgcagaaaaactagggactccagtgacttttcatatcgatgcctcccactcaccattcctgagtcagcctggcaaggtgatcgagggaatcaggctggcactgaaggccggtagagagcagagtggattcgcaaattgaggtggcttgtgaaatgatagggatattccatcacacgcttgcctttcatcttgtgcggttgaagatattcgtgattataggtgttcctgctaggtcccttgggataacgctgctgtaagctaatggcaatggccattaacgtcatattctcccgtcgttccattgggggatgggcggtttgaacctcaacatgtgtgattgctttggaatctcgcttatagaaagtaagtatctcctcccaaatggtacctagggaactcacacgtgatggcatgtactcattagg

SEQ ID NO: 6823 - DNA, 745 bp, Emericella nidulans
cccagctttttattctccgagtctcctcgatggttgcttctagtgggtcgtcaagaggaggctgcccaggctcttgttgagctacgcggtctcggtctcgaaaaccctcgagtacaccttgagctgcaggagatgaaaattgcgatccaggaggagcaagccatgaacgcagaaggaatgtcgggtatcttgcgagaagccttgaccatcccctccaatttgcgccgtgtgcagcagagccttgtgacctatggcctagctcagctctctggtgccaactctgtcacctcctactttgtccctatcctaacatttattggcatcggcggagactctggaaggaacattttcctcaactgcatgtattccttttccaagttttgctttgcgatcatcgcgtccttgtttttcgtcgatgccctgggccgtcggaagtcgctgtttgttggtgcctctttgcagatggtgtctgatttgtaccttggggtctacatcaagtatagccaagagggtgctgagattgctcattcagcatcgaccggggccattgcgtttatctttatccatggatttggatatgttgtgggtatggctattgcccagataccgcgtccgtattatcatactgactaaatactaggcctctacatcctcccctacgtcttcggtggcgaactctggccgaatcgcattcgatcgtttggctctgctctcggccaatgttttcactggcttttcatgttcg

SEQ ID NO: 6824 - DNA, 546 bp, Emericella nidulans
cttgaggtgggattctcccagggtctgacactcgtattcatctgaccaactttgcccactactctcggcgttgtccgtctcattcccagcgtcagatgccctgggacagtcaaatgccatttatcattggtcgacccatttaattatcttcccaagaatcccgccacctgcgacgccgcaaagtaagctgggttcagagccaaggttcatcagctcaggtgttcatgccgagcgagccagtcaacaagcagttcaccagagcgagctgaacagattcacgatctctcccggtctatccccgatcaagtgctttcctccgccgcggcactgtgcccagcatgcccagcatgtccagcagtactgtagcatccggccaactcgcccagatcagtagtccatgtctagtgctgtcggggtcggggtcagtttcaaccgccccgccacgccgacatgcgttggtctcactatagtagcgactagcaagccgtgcagtcgcctagtgtgcatattgcctacaacgaaggattgatggaacgatcttggaac

SEQ ID NO: 6825 - DNA, 589 bp, Emericella nidulans
atgcccttgttcaccttcgtccgaaattgcaacaccttcaacagcgaataaacggtcgacaacatcgggacaggcactcccagtctttgcccctccctcacagcctcaccaacaataacctccacttccatgaagttccccttctcgatatcttgctgcatactaggccggaaatacccatacagtgggtctccattcaaagatatatcctcctgatccgccgcaagctgataccccgccgccctggcaacgctcttcacctccagcataacaggaagtagaagctccgtcacagctgtatgcgtgagtctgagcttggatgtgtccatccccgttatggcgcagagagagttatatgaagcattgtagactagtttgcgccaccgcataaactggacctctgcactgtactcccctgttgctttttcgctggcgttgtacagatctgtaaagagtttcgcagctcggcattccgtctcaatatccagattagggttgcgaaatgcaccaatgattaggttatcatggtcctggtggaagatctcgccaggtcggagctctgaagagttcatgagggatataccagaga

SEQ ID NO: 6826 - DNA, 438 bp, Emericella nidulans
  unsure (1)..(438): unsure at all n locations
aaggccaaaacggtngggagatgaatatcatgccctttgccggacgattttcatttttggccggcgtagatgtgccgtcgggggaggttgaactcaagctcgatgatgctctaaccgacaatgtgacggctgacacacacggttgccgacagtgatcttaaaggacgaccttgttgcgatagacatgttctacttaaatgactgcaaacgtagcatatcgnnnnnnaacctatgtgtagacatatgatggtgacagagagagagtaccagatgagtaatcattcagtgcgtacattgccaagaagtagcgcaaatcgactgcgttttcgtcttcagcttaacattcttcaccaccaaccattgaggtcgtttgttcctcctcctattgacatacttagagacatcggactgctagataatcccactaaatgatatagt

SEQ ID NO: 6827 - DNA, 2457 bp, Emericella nidulans
ccggtgcagggtgttggtgtgccgaaaccatggtggttgacctgtcgattctatccaggtcgagaattgtccttgaagcagcacgagggacagctcatctgctcgtgatttgatgtactcagagtaaacagaggccgcgatcgttccccctttttgctgctctaggcgttggccatctgcaagtgctgcgtctagaatgcggtctatctgttcgttttgagagagaaattgatgctgcaggggatgagctgcaaggattgcgcttgaggaaacgaaggtctgaaagactgagacaagatgataataaaaagaaaagacaataaaagagtgacggcggtgcccactactacgggacggaaattgcgataataataatatatgtgataatacaagcctctgtagctgccgcggccagattattgtaatattagcattgtgacgagaccgcaagattaaagattttcctcaggcgctggctatactcctgatggccgcaacgggccctcaaagagggaaaggccggggccctatagtaggggagctcttgcctgcttctggcctcgcgctgctgatcgttatatcacacgccatagagtcgcaacctcgccgttgctccgccgaagttatccctagccggtgcagtatgcactactatgattactctataaagcccatccacgtgaaatgtgtttatattaccatagtcatagccgctcatagtgacatagtcatctacagacggtgaggctcaatttactccgtctgcctaccagaacccctacaaagctgactttttcgtcctttttttttttcttgcctttcttttcgcctttctttccctgtatccgatccccaccattaataaacgtacaagttattagaaagttaaaagataaaagagagatacaaggtacagtccgaatgttgcaggcagaacagaacgcccgctgagcatacttcacacaactgttgccattcacgcatagacatttgcaggcggcagcagtttcgctccataacggaggtcgaacgatcgagaatcagtaggatcgaaccctgcggcctgacgctgttctaggtatagtgctgaaggctggttagtatcaagcagatcacgagaaggacgtagaaaggcttacgggtaatcttgatcatgtcaaaccaacggatggcgttctcgtcactgccctccacagctttgagaatcccgctgtccggcagtgggttcgccttgggtggcagactccgcatcttcaacaacatatgcaggatatccgagaaacggtcgccttgcgccgcataatactgcggccgcttgtcaagcggccaccgctgcgaaaagttctcgtcatcccaggatcggaacagccagcatgttctctcgacgcagttcaggaggatcagagagactaggaaagtctcaaaccagccgctttgctggcgctgaaggagctcctttccaggtcattcatcaccgatttgcttagtgccgctgcacgcttctctgtcgcagagcgcaactggccgcacaacagtgcgtacgactcggcgttcgtgatttcatctatgggaatacgcccgtcatctgtaggctgcgcaaaggagttgtatgaggcgggcggtaaggtcgggttgctgaaagtcttccagtgtagatcggcgtcaaccagaatatgtgtggctacccacaactctaacactcgctctaataacaaatcctgaaaactatcagatggattctgcaaaatacgtggccgtcataccttcttctgctgtgctaactccgccgctagcattagggtaggccgcatgacgtcggaggcctcgcgctcgtagaagaatgggccagccttcttgatgtacatctcgatttttcccgggacgtcatccatgtcattgtccagcagataaatctcttggagtggcccctggaattgcgtctcgtccccaagcccctggagctggggatcaagtgtggaagccgatggcttatggccctgctgtccagcaagcgtaacaaaaaccatgctctcctcgaaatgtgtgacctcaatacgaccggcgaagatctcgaatttgacctggtttcgaatactgctaacatcgtggaaagctaacgtcgcatgcagatctaagaatcggtcagtttgttcacaattcggctagcctagcacacatactagcatgatacagctcgaactcgtccgctattcgcgtgcgaatacacggatgcttccacagacgcgcgctctcaacgctagcgcaggtagtgcatgggctgtcgccggaacactaaacatgtcagtagacttgaaatggaaagtcagctccggctatagttacatacaggttttttgagcatacggcacgtatacacgcgcctctcttcctcacttcctgaacctcccggcgtctggctgcggagaatcggccgcgaactttgggcttagctggctt

SEQ ID NO: 6828 - DNA, 614 bp, Emericella nidulans
  unsure (1)..(614): unsure at all n locations
acacaacacgagcaggatgaactggctgttgactgcaaaactccgctaacattcgttcgtcctccgcaggcttgcgactagcgggcagcttaaggagcgggtacaacttggggtcgtcaagcagaaatttctcaaggagatacattcccttgtcacgattatgctcgggccgcctcctagccctgatcgagagtttgtgtggcagtacaacgacgcggatggaaaagnnaaggagattcggcagacgccgctggagtttgggcggcagggtttctcacagtcaacacgcacaagggtctccccaagtcgcttatacagtcttgtcaacgaccccaggaacgaatattatcggctactgaccgtggaaaagcttggcaatgttgttgagggcaagccgctgacctatgttaatgtcgaaatgaaggtgggacagtttagtctataaccctttgcgtcacgcatctagctgacttgttcaggccctcaaaaaagcggtcattgccatgctcaaagctggccaccccgttttcttcgttgcgacgtggtgaaatctctgacaggtcagcgtgtcatggactctgagcaatagacctactctcggcttaatgtacgct

SEQ ID NO: 6829 - DNA, 1026 bp, Emericella nidulans
ggcgccgctgatcatctgggagctgtcgcacgaactggagactcagctgtaaccccttatttcagatggacatatcttcgaccagtgatcaagtcgagtagtcagtctgacagcctattgggtgtaatccatacactcgcaatggtgtattcgaaactgcagaaagggcgcactggatgctctaagtgatggtcgattctgggcaacaggaccctggactcttgacgccaaaagcgagagagtccggcggatcggagccattactcagcttatcacgtgacttctcttgtgatgacgtcaataactagcaagtcctgcctaattgggaagccaagcgtattttccccgggctcgaccccagattcccttctcacaacctacaatgacctcggaaagaatcagcgtctggcttacgaaatatgtttactgtttactgtttcttggaagctaatcatatgctgagcccagggaactggattatgtgaaaggtatattattacacctacgccatggctcgaagcgcgtcgctaacacatataatgaagccgatcccataactctggtgcacgatctgctaccggtttaacccgagccaatcaggtctcatttagacatcctcggcctttgcaagagcggcattttgctcctgggcaactacatctgcaggaatctggtccggcgtgctgttcacaagcagaatcattggtagtaacgagaccgcaagaagaacaaatgtaacgatgctggaagccgtcagtgatgcccttgaggaacgaatggtggaaaacatacaatccgatcaaaggattactgtccgtttgagtgttcataccataggcaatggcctgtccaattgcttcaatgcaccttaacaatagcgccttaccgacatttgctgaatatctcgtaagctgtgccttctgcaagtgctagaatgttgacttaccttgcgcatttgtcgggaatgacgacagctaccagttcatgtacgactgctagagccggcccgttgttttaacaaaaaat

SEQ ID NO: 6830 - DNA, 624 bp, Emericella nidulans
  unsure (1)..(624): unsure at all n locations
gattaaagatctaatcgagtactgcgtaggaactaattaagttatggtaaacccggcaccttgaagtctttgtatttccatttctctgtcacctctttcttggcctttcgtggttgcgttacgggtttgcgcgcctcgagtttaccctggacgatcaacgtccggaatcggtcgtcgaggaggtttccttcaggcttcaaccggcgcaacgaatcttgcagctcgtccggtagtactacctctgttggtttttcaggggccctattgtagtcagcaaatggagccgaagaactcaagggacgaaacatactttaatttccccagaggcttgcggcgaagcttagtgtcatcgccttcttcagaagagtcatcagcgtcactgtcgttttcctgacgttccagctcctgttgcttgacgcgctctgcaatagccttatattgagcaagttgctcctccttcttcttctgctgtgcctcccacttcgcttgcctttcagcttccttcgtcgcttgatcttgtttctctgcgctttcgtcttcctttctgggcgcttcttgttcagccattccggcttctcgtactcgctctcaaagccttcccatgcgctntcatcatctgacttt

SEQ ID NO: 6831 - DNA, 685 bp, Emericella nidulans
aagcattagccaactccatataaggctttgctcctttgattatgagaggagctccgtatatcttcggtcctaatgtggacaggcttcccgtcgaaaggctgtccaagcggttcggtatcaacgcctgctgcctatgagctgccgttggttcgtcttggtttgatactggtcatcctggtttgggagaagcgatgattatgcgcatacaaagacaaactgcccccctgttcacaccagtacttgtacgatataacttggattacgagagaagacacgattgtatactacagattaaagcgaagattctcaagtatttaccattgcgcccttaagagctgcactcgctgcttctgcaagcttttattgccttcgctaaaccaaaggtgagcaagagcagctatgcctgtggcccgcaaatgacttgagctacgcatctcatgcatctttcttaccgaagagatctttctcgaccatacccctacatatggggtggtagaaatccttgtgcttttcgaaggtatcgatcgccacctggcggtcaaccttctgtagagcccggtacctacgtaattgtgttagctccaatgagtgatagtttcgcaatgaaatgtcttacagaggccgcacgaatttcatccttccaatccttcccagcagatctgtggtcggcccgatgacactctta

SEQ ID NO: 6832 - DNA, 513 bp, Emericella nidulans
accccctgttgcagcttcaatcgagtccacaatagcgcagagatcggattcggagaggtctatatctgtcagtccatgcacggaatagtgaaggggtaaggggaggaacgagggacgtactcttggatactcggctcgggttcgcagctaccatggaatagtcccggccagatcggtccagttcgatggatttctgcatggtcagtccacggtagaagactgcggcagtgactccctctactgtgaagacctcgcccatagcagcgagcgcggcatactcgccaagcgagtgtccggcatagcagctgtcctcgttgattagaccgcgagcgcgcatgtcgtggaaccgcgccacgtccataaccaccagcgccggttgtgtgaagatcgtctcgtgcagcagaccaccggaggatgtgtaggtgaacgagcgcgacgtgggggtgatctcttggaaggccgtactgatcaatctcgcctgctcattgacacttcaaagtccacgagatgtag

SEQ ID NO: 6833 - DNA, 706 bp, Emericella nidulans
ctataatcagcttcttgcgcaggcgcaatggcttcagacatgccactccctgtgccgccacggactcctacgccaccccccgatgagcctcacagccgctttagcttcccgtcccatcctccagatcgcgataccttgtctcccctagtagaatcattttctcaccggattggctcagatacggaagatcgcaaccgtctaagtcccaccagggcatcgttcaacaacctctccgcggatacaacacaacaaaatggccagagtgaggtctcgtcggggccgttcaattttcagaccacgaccatggcgaaaagccctgtcgtgaaatctgtaagatctacttagtaccaaccgtaccacgagtctatgctgaccgcaatcctatagaacattggtcagcgacgtggccacaaatacaaacacagtagtatctcgcatcagatcttcctcgaacctcctcctagagccccattggctttgcccaactctttacctatacctacgctgaaagaatgccgggctagcatgtctgtggatcagaaacgaaggttctggtggagtgtatgccatatgttcgtcgccgcttataccttgtggagtgcgcatgggtccctggccatgacagccttatctcacttaatcctgttcgactctctcggtgcgttgctctgtgtcgtggtagacgtgctgggcaattttgaagtct

SEQ ID NO: 6834 - DNA, 510 bp, Emericella nidulans
tccgcccagcgcaggcccacccctaagtttaccgtcttcttttcctccgagaggacaagctgcgtaaactcacccttgcagaaagagattacgattccgccatcattgctattgaaccccagggttctggagatgaccaccaccacgaatggagaatgtcacaccgagggagtgtgttagagcgagaatctgagtgacctgttttcttgtgataggagttaggatcacggtggggttaggtagcagcttcgggacttggaacagcagtaagtatgaaagtgcatggcgtaaagaggaatgggagagggaacaggaaagagggtaccatggctgagtccagtgctcttcgtataaaggtgagcccttgatgatggcgttgtcgcaaacaccaaggggaagacttttgctagggtagatggccgagctgactgcttcttggccatgagaaaagagttaaattcagagattatgggctcgacttgggagcgttgacgcttgttagcgagagga

SEQ ID NO: 6835 - DNA, 953 bp, Emericella nidulans
cgagtttaatgtctgtttgagcgtgcctctgttttgactcattctcgaacttcttcttgtgctcatcttgtgctttcttctgttccgctgctcttttccgcccgaattcaacatactgcaaaatctcctttttcgtattttccagcaccttgacagccggcaccacgttccctgacctttccaacatgtccgccacttgcagttttatccccaacacttcgtcagagaacgggtgcaagcctacttgtgccgcagccttcagagcctctttgtaatacttcatcgcggtttgcggttggagaaccacatctgtgtagtatactgcctggcgtagaggctttacaacctcgggggggaacttgtgatactggggcgcgttgtgcgtcacctcaatgtagacgatgtatgcgaaaaacaatgtagagccaacgacgccaaggattgcgaatggcagaaggacagggtacttgcgccatatacccttagatgcttgtcgtaggccgagtcgggtgcgctgaaagtaggagagcgatcgcgtttgtggcgggaaagcaaggacatggcgggggagggcaggaaatggtgaccgaaattgattatatcgattcgaaggctgtggtttaggcaggtgttgcaatggtcgccggtaggagaatgcgatagttcttgatggtagtgttgcgggtgtccgggagttgcgaggaaaggcgcagcttgtgcggcgcgctgctgctgcgctgagcatcattgcggaagcgaactttaacttgcaaatatatatcgactcatcaagggatccagccgttgtattgagggatggcggcttggattgtgctcaatgggtaaatgaggttagaagggcgtgactgaggagagaatttatacgagcggagcccattgctgatgacgtccaaggcatccgaaacaatgcctaccatcctcctcaagcatct

SEQ ID NO: 6836 - DNA, 758 bp, Emericella nidulans
tgggtctctatcaatccggtcttcgacaaaagtcccgtccatgcgaaacttgccattcgcaaagccatacttcaaaacctttcccagaaatccagcaatacaaataccgcccgaatcgctgaccgtcgtggcgctaagcaagaactcgcggtcctctcgtggcacacgatctccaatctctgcaaaggtattgacataaactaggcctcctaggagaccttcccagaagatcacgatgaagataaggtagacattcgggatgaaattgaacagcgagtgtagagtcaacactattaaattgatgatttgtaggattgacggaaggtagagatcgtgaatacggaagaacggggtagaagagcgagagatgaagacgccaacctggtatatcgcattgtatgcggggtagaatgctcggaaatgtgtgaagggcgtctccttgagcggaaagagtagagtcggtgatacaccttgattgatagtatactctgcaatatatacgaggagcagagggagcatactagagatattgttagccagctctcaaccaggatgctaggatccatacaaagggaagaacagccctcgcgcacgtcgcaaattggccctcaatctatgccatccacgcactcggtacgtggatttgaggctcaccgcagagtgggcggacgaactaagcagccctctctttctccgtcatcattattgctgacacactatcatccgcatgttcttccacatccgcgtacacagagtgt

SEQ ID NO: 6837 - DNA, 483 bp, Emericella nidulans
  unsure (1)..(483): unsure at all n locations
tctggcacattcggaggatttgttctgtgagatggcagtgttgttatggtctaaaaggagttacatacggggaggttatacatagctcagatcctgttcatcttgccttactgggtcattaaggcgcggactgttatggtgggcctaatgatcaatttcgtcctgcccaaagacatgctcacgataactgtggacaagggtacttcaggttattcgtaaaaggctgtcatgtcttcaccctctgagggactttnnncacaccctttttttttgaaattactttaatcttttatattttctacttatatccttttttctctttacttttgctcaatttctcttatcttttttttctattttttcttaatattcttaatctttttacatattttttttaatctctttttttcttctattcttttccctctcttttcttccctttctcctttcttctttttcttttcttctttatcttattctctt

SEQ ID NO: 6838 - DNA, 693 bp, Emericella nidulans
tgttggatgacattgacaaacgccgccgccgttcctcaaaacaccaaagttcgcctgtgctaggatggagtggaaccaccaaccctcggccggttagcaggcatgacgctagcggttccctttccgctcctggatctccggtagcagacaccgcacttggctccagtgccagcccccaggcagtatcaatgataagattggcatctgagggggccaaaccccgtccgcgagctggaagtgtttctccttcgcgtccaagtgcctcgaagcactctagtcatcgtcacaatcgcggccaatcttcgcggataagacgcactggctcaggaagttccaattcaagcgaaaactcaggctaccgtactggaagctcttccaacctgttagccactgtccttccgccatccaaatggcgattcctgcgccatctggggctcgccgataactccctcacctctgtctccgcggcgggtctagctcctgttgccaacaccttgcactctttggatctgtcaacaaatctcttcactgaggttcccgacagtctggcctctttgattgccctgagagctttgaacctctccaactgcatgatagaatctctccattctctgtctcgcaaccctcttcccgctatcactgccctgaatcttcgggcaaacagcattcgcaccctcgcgggcatcgaacgat

SEQ ID NO: 6839 - DNA, 449 bp, Emericella nidulans
ccgtcgaccagtcactttcagtccgttcagtccgttcagccgttcagtgcggtcaatcatttcagtcgtttcagtcgtttagtccgttcagtccttcagttggtcagtctttcagccggtcagtctttcaagcattcaggcctttagtccgttcagtcctttagccgttcaatcccagtcacttccaaagtgggctgcctcgattgcaaccagtggcaaggggcgatcagtctccagtagcatgtccccagtcgagtctggaccgcggattccaccccatggcgacgtgagtcgtaactatggggagcatgagtgggaacttctgagcagtactggaacctaacggcgcggtcctaggtcagaactgtactagatcgcactcaagccgccgcgatctatttttgaggatttaatatatcggcgcctagaggcttaggggatactctgag

SEQ ID NO: 6840 - DNA, 743 bp, Emericella nidulans
gttaaccaatatagactttgcctcaatcaagtccgcctccagaagaggattatctcgctatgtagcataattaattcgaccttcaaatatcattggttcgtggttggcaaatcgctctttcgctagcttcattatccgttcttgttctcactcagcatggtccgtttgagaggttgacgtaggcggattttgaagtgcagtcaaacgtccttggattcggttaatctggtcttgcaatcgtcgtatcaagtcatttgttgtctggggatccagaattgattcttcgtttctgtctagtggattggaggtatcctccggcttcaacggctcgtttagtcagatccaaatggtcgtctgctggttggggtattgggagatctgatatgatgggtttcgagtcgacatctcgaatggtactgcggatcctccgcctcttgctgatttgttgtttggcataagtctcagtgcctgtttgtccgggccttattcatggcctcggttgctgcacttcccttcttccaatctgggacagcgtgtctcaagcatccatagaatctaactctaagatgggctcactcaagggagtcgcactagccctttacacatgatacacacaggaaaacatctgcacctcacaacttccataccagggactggtcctcgcaacacccgcagttacagaccatactgttgctgggccaggcacaggagcacgtcgccacgtagattaattagctacgggc

SEQ ID NO: 6841 - DNA, 518 bp, Emericella nidulans
tgaaccacatcacttgtgagtaattgactgaggtatgtcgttaggatgtcccattaaccttgcaagccatctcaacattaagaatctaccccctggctcgtttgactctcttggtaacatataaacacgtgatgctaatcgaagcttatgcagcttaccttactaagctgcatattcgttatccgcataacacacaccatgacgtcggcaagatccaatgagttcagtgtcatagcccaacccaccccatggcaccagacattaagaacctgggcaagccactatgcgaccatgatgtaaaggctaaccaggctcttgatatccccctcatcatcccctggcactgatctgggacggttattcgactatcaaaactctccatccacttatgaacaaccaaacgtcaagatgtctgacgccccggactcgctctcctcagacaaagccaaagaagaagagataaatgccgcgtttgctggtaaaaatcccaagaaattcaaccccaacgaccctagcga

SEQ ID NO: 6842 - DNA, 1032 bp, Emericella nidulans
atcagcgccagtaggccgtggtctaaaaatggtatcaagacatgatctcatgcatgagactcggcaagaagcaaacagaagtccgagacgagacgctaatagcagagccagaattatagtggatatagtggagtcaatcaaaagacagggtataggaagaagggaaaggaaaaatgaaaagcgaagggctacacaccaccgctatgtggcccagtaccaggtcgtgacggattcccttcactcggcacgatgccgaccttgggatcaggaatctgaatatccagcgacatatacgctgttctccttaaactccatatccgtactccgtccttggccccgacttcgcgattccacttttccaaccactcctccacacgcttgagatggcttttgatgcctggcgcaccaatatcctcccaaagccacccggtgagcagcccaattgccccgtcgatccaattgcggaagctgaacgggttgaacgcgctgatgagttcctcgttcaccgtcgcaatgatgcgtctgaattcctgttcgggcagcaacgggtcgaggatctccgggtacagatttgagtatgtgggggcaagatctcccttgaccatccagtctcgccggatccggataatccgtgtcgtcaggtactcttccgaccctggtggaacatgcggattgatatgcggaaagcaaggatgggccggaccccaggccagttcctccgcgacgtccggctcatttggttgtcccgagtttgacgggatagacgcgattgccgactgggatcggagggaatgctgtgactggacataccgcgggcggtcatctccaaccgcgcgctcagatcgggctgctgaatccatctctaatggtatgtcttcaaatacaccgcttcgccgccctcgaggcacggcgatactggaccggccgatctcggactcctgttgactgcgctcgacaaccagaatatttggcgacggtgtcagccggctgcgacgccgttcggggatcgaaagtaacggatatgcgtctcgc

SEQ ID NO: 6843 - DNA, 1011 bp, Emericella nidulans
atcttcttgatgagaaccgcacaattcggcagcaaatctgtgatctctcaaagacatctaccagttatgaagaaatgctccggcgcaaagaaagcgagctcacagttttgcgcaacgacgcaaaaaagcatgccgaggagaagaagcaattagacgttgagaagtctaatctctccacaaggcatgataacatgcaaaataagctccgtgagcttcaggctcaagtcgatgctatggtatcagaaaagatccaactcgagcgcgaagccgccgacgttcagaagcttctgcaggcgaagatatccgaagatgccgaagctggagagagccgcaaacttctcgagcagcagattcaggacctgaagaatcaattattccaggcacaggctgatctcagtagggagcgccagtcaagggatgacgtacagatgctcgcggagcataagctcgcagagctaaaagacaagtttgaatcattgaacgaggctaaaatcaccatcgagaaggagatgtatatccaacaagatagtcttcgacgggctacggaggctcgggtcgctgctgagcagtcaaggaaagagcttcagcaagaattgatcaagcttcgggatcgatttactgcggctgaagatgctcggctgagagctgaggccgagatggagcaggcccttgtgaaacagaccactcagcgtctggaaagtatcaggaaagagcttgacaatacacagcaccgtttagaggaggtcgaagcggagaggtcgcgcctagcagcacgtgagcaacaactcatgaacgccattgctgagtctgaaagcttccgtatccgtcatgatcagcataaggaacgcttggaaagggagctagtcactctcaaaggccggttgacagcatccgaaaatgacaatcgtgctctcttgaccaaaatccagcagaaaaaccttgacattgctagatctaattcaaaagcaagtgaaagccaacgcttacgtgtcacaaccctacaggctgtat

SEQ ID NO: 6844 - DNA, 501 bp, Emericella nidulans
tttatgaaattgatgaacgcaatacccggccaatgctaaaagggagtcaaccgcgcaagaaaataaaccgacgcaatgcagcttaatgtcgtaagggttctcgattaactagagcagtagaaaccggtgtgctcatgcatttgctatggcctacttttcctttttgttatgttaacgactacgatattctctagttggacacgaaaaatatgatttgttcaatgttcattctcaccagtaaaaagtaatagtagtccctgtagttcatgctctgtcattctctatttcacctttggtacttgataagcatactaagttttgtgtatttgtagcttgttgtatccccaatcacgtgacgtactccatcccgcgctctgagtctcgcgcatccgaagagctcattcggttccgcagagctcgctttttctgctacttcgtccctgtcaattttcttgcaccccttttcatgttttgcgtctctacgggttgagatgctctgat

SEQ ID NO: 6845 - DNA, 929 bp, Emericella nidulans
aagttgctgatgtttttgggacttccaaatttacatgttggatcttgtctgacaccgtcctccttgcggtgttgtgtatattcctatccgcaggcgctgcttgaacctggaactcgaaatgaagtggaagcaacgtccagatgggacgcctcaaattggcgtgttagtagtcccctaagatctacagaaagaaattatccagcaaattctgagaaacagtcacagtattgacgatccttgcggtgttatatccctgcgagagattgagagcgacacgaggagatttcacggcgaagcccccgggctcaaatcactacttgacgtcgaggtgctaatcaaaggagcgaagcttgccaaagactccaatttcagaaatgacatctccatatccgaggtagaaagacggttgctagaagaagaggaaaaatctaactggcgcgggctaagggaggtgatccaacagtttggggaaggtatgcgcgtcacgatcatggcaacggcatgcgcagcagcagccttgtaagtcttgcaggctaccgtattctacaattatactgacgcatcgctattcaggggctggcagcagtcggctatcaatacttcaacacggacttggccagcccagttcgggctggctggcgatacgtggaaagttgcaacaatcaatgcgatcccatcgctgtccggaagttttatgtacgtttgctttgcaatcctctatttgggccagcacagagttcttaacaatgctcagtggaacgtgggttagcgatccgctacagggctttagctgcagcgggaccactcaacccctgacaacgcacgctgcgaacgcaatggccttgatacacacggggttaggcagtcgaggttcatctaggaagacggtttgcactcatgcttagtggggtggtccggtacgtgctgta

SEQ ID NO: 6846 - DNA, 448 bp, Emericella nidulans
gccgtcggggtgagttccagttcttcaagaacaagctgtgtggactgggcgaggttcatcgtatagctgatttgtgtaagcaaaataagccttgatgagataaaacgggaaacctacaagtgcagatgcttgatgccagagggatcaacctcctacacatgtctgcaatcaggcgttttccgacttgcttgacagctgcatcatcgttcttcacgggctccagagcctcaagccagtcaggcggaatatgggtcttggtccaattcgcacgtctgatgaaagcagcatatgtttggattggcataatgccggggatgatgggcacattgatgcccttggcgcgacatttctcaacccactttatgaagttgtccgtatcgtaaaacatctgagtgacgatgaacgagctgccagcatcaaccttctccttgagatggtccctcaatcc

SEQ ID NO: 6847 - DNA, 662 bp, Emericella nidulans
tgtctgagcacaaagtgatcacgctgctaaaaaggtccaatggcagagctctcggcatcctcgctgtgaattgtttagctccgtatagtcaagttgaagggcattcgaggggaagaacatactacgcggatgcagtggcgtcaatagtcgatgcgatatcagctgaaacccgctgaatgtcataaactgaggcactaagctttgccagaagctggccgaaagattcctgcgtaacatcatatcagcatcgcgaacgtactggggtgagtaatcgtgagacgcacccgcccagagcccgagtagcttccagttaagacatcaaattgcgcggacacctggctgaattggctgtaagtgctatcggcgaaagattggacatcttgggcgaactgttcaagttgtccatagtcgacagaaatctggggagccgccaggggtgcggaggccacaagggccgcgaacagaggagcagggaggactttgaggagctgcatattgtgacagctacttcttttggtggtagacgagcctgttgtgaacacgagctgagacgggaccagctggccttgaacttatacccaggaaatgatgagggtatccgccctaaccccctacccgacagcttgaatgggttgcttatttttggtatctgcgcgccccag

SEQ ID NO: 6848 - DNA, 581 bp, Emericella nidulans
  unsure (1)..(581): unsure at all n locations
aaaggcgaaaatgagaacttgaacgactctagcgcattaagtttccatgtcaacaacacctggacatggggtgggctatcctaaagcctcgggcattaacaggtgaaaggcgctatattgcgccacctgcacaaagggaatcaccgtaacattacggcacctggatgcggcttctgcaccctacgtaacataactctgatacattagcagccttnnnnttttttaactctttactccttgacagcctataacccttgaatcagtacgtgccgagctagggtgcaatgggcggcacagccctgcactttcagacgggacggtgcgactccgattacgcttgaacatactcgtgaccgcataatctttacaccgtgaccagcttataaccgaaggaacactgtcaggacaacaatcttttaattttactacattgctaatgaaggagggtcgcctatccggtccgtagcttccggatcgcgatcgcctctaagcggctgtcttcctggtgcttggctgaaccccctggagagggtggcactagtgaggcaacggacagtgcttgcaacactgtgtggggaccc

SEQ ID NO: 6849 - DNA, 1218 bp, Emericella nidulans
  unsure (1)..(1218): unsure at all n locations
atacaatttgagatttgaaccgcgtgttagtagattcttcagtgtggttttcaaaggcatacactggaaaagttcaggtaaggagagtattcccgtagaagagctacgtagggcttccgttgtagccaagccctaattcaaggtggcgcatttcgcagaatatgtacaacgaacatcgtgccactagtccagcctccttcaaagcagaaatatgactatgacttcttcctaagattgatcattgcagcgtgacggtaggagatggtagagatatgttgagccactctatccccggagtctaagtgggtcgttacactttcaaagctaaccgtcaagtcctttatacatgagctagatttggatggatattgcgctggccaagtacggttttgcaacaagtatgatatgaagactaaagaatctcgcggcctagagaccccgcagattcagatgaacatgggtatcattgtaaaaattgcctaataacctgtgcatatagatcaaggaccagacagaaatatgtcacgactggccctgtcacggtccacaaacgaaccatttggcgccaagctgacccaacaaaaaggcataggtaaaagcaggaatcaataaatgcaaatatcagaaaaccgcagttctcgcacaatggaaggcccataacgcaatagagagcaaaagagccgtgaggtaaccgtaaacaaccgaacacctgctatgcttgaacgagacacaacaccagagaagtacgaaaatagtactggctttgcgagatgcaaagatctatcaatagtaacttgaagaaaagacccgtgccaccaaaatgcccttagaagaggaacgtaaagtgaaagaatagagcaaaatagtaagacacaagagcatattagccttatcccnctccgtcgagagaacgccgacgggagtatctcggcgacttctcttggcctagttatggtgtggacggaactcgacggngtatgcgtccagttttgctcggataggaagtggtatcctctcattttcttttccgctgctgtcggtctccatctncgccttgtgagcttcagctttcttcgctcgagagctaagaatgcgcaacgtgaggccaagctcacgcttcagctncttntgcgaatgcagatgctcagtcgaccccataaagcttctttctgtatgcttttaggtgcngcagacctgtcaatggacatgttaaaactc

SEQ ID NO: 6850 - DNA, 808 bp, Emericella nidulans
cgacgcctctggctgaactattcctccggcactccccttttgttttggtcgactatcctggagagatctggctcaaccagatttatggcacattcaactcggcgattcttaagattcttccattgctacgtggttattccgagtctctcactaaggctatggtacagttctatttggaatctcagcaacggttcacacccaaaattcaacctcattatgtgtattccccccgtgaactgactcgatgggttcgtggtgtgtacgaagcgatcaaaccactcgaaagcctttcagtcgagggtctggttcgtatatgggcgcacgaggcactgcgtcttttccaggatcgtcttgttaccgaagaggaaagggcttggactgccgatgccgttcggcggattgcgttggagcacttccctaccattgaccaagaagccgctctcaagggcccgatcctcttctcgaattggctgtccaggaactatgtgccagtcgagcaggagcaactgcgtgactttgtcaaggcacgtctcaagacattctgcgaagaagaagttgatgttcctctggttctgttcaacgatgtcctggaacatgctctccgtattgatcgggtcttccgtcagcctcaggggcatcttatcctcatcggtgtgagtggaagtggtaagacgacgttgtctcgcttcgtcgcctggatgaatggcttgaaggtctttcagatcaaagtgcacgggaaatactcgtctgaagacttcgatgatgaccttaggagcgttctcagccgtgctggttgcaagggtgagaa

SEQ ID NO: 6851 - DNA, 905 bp, Emericella nidulans
tactctatcagcggccatttcgtgcggcccaccggcccagcccaaaagctgatctgccgcattgagcgcgtctgcgacacacggaccttccagacacgacaaatacgcgtggtccagtccaggaaatccgaacagctatgtctcattgcaacggcagatttccacattgatgagtcggatgagatggtgaactactccgctcgtccgcagctccccgtcccgacatcctcggcggcagaaacagagacagaggacacgccagaacccggactctatcggattatcaatatgctgatggaggtctgtccgcaccagggcgaccggaatgggaaagacgtttcgggaatcgtctcggctgagcggttccgagtccacgacactcttcgtccagaggctgaccggatcgctgcccttgcgttctacatggaccgcgggcttgcgtatatctcggcgaaccattcaggctacagcctgtctcaagccagtgcctgcgcgactctcgactttgcgctacgggtgctgacgcaccattcttatctgcgacgcaccattcttatctgcaggactggcatgttagcgaaagacagacttgtggcggagaatgcacgcgcgcttggcgaggggagggtgttcaaaagggatggctggctgctggcgagtatgacacagacgaccattctaaggccgaagaagggtgtgtcgagaattttacgttgctttctcttggacttgtgtttatcacttctggggagatagattggcattgtccagtgtttattatcgtatacattttgcattgaatcgctactccctgagaaaagtccttatatagtgatatactattatcactatagtttagattcctttttcccttctttcatttcctttttttcctttttttggag

SEQ ID NO: 6852 - DNA, 550 bp, Emericella nidulans
aaagccaaaaccccatgatacgagtgactgtgcacaaacacttgaagcatttcttttaatggagcttgaaggacatggtgggcacgggagggataactggagagcaggctccatggataggtgaaactatgtggtctgttatgagcgctcactgggacaccgaaccaactcataaacggagtcggacctattacaaagctcgtctctctgaccgaaacgggcattggactaaatacacacttctgggccacattctttgcaagaagtacatgaccaatttgtaagtggttctgttacctctgtcagtacctgacatgcatgacgttgagtatttgagctgagctggttacattgaacgaagagaaatagggaagaactgacactatcgctgaggtgtttgcagagacacatacgtacggcggatggtgcgtatgttgacctgacggcggcgatgagtgcgtcaacttatcagcgtaatgtaacagataggacgctacagcttgacgcagcagcatctgctgtgtctgactgcactcacgaccatgggagc

SEQ ID NO: 6853 - DNA, 820 bp, Emericella nidulans
  unsure (1)..(820): unsure at all n locations
aggtcggccactttgtacctggtcactccatcctggatcgccttctgataagtgctattgatactttgatctctgagtatacagtatactatcaaggctcttttcatattttagcttggtgtttattttattattattattcttattatttttttccatgtttcagtctacagccaaattcgccagaggttaagtatgtgtttgcatattcgcgcaagtatatataatgggaaaaaagtgaaatcctcttaaaatctagccaagttaccaacctaacgcacaacgtattttatgcaataacaataaagtctccattaccttaagccgtatacgaaaaagctggctactactggtaacagcagaaccccgattcaaaatccattacaaggtagtaatgtgacaagcaaagaatgtttcatgagcagaagcagaattatacaatactagttgctcgggttatctatcaaacagccaagcgaaacatgataacgattggtgggcacataagatacaattactgtacacatccacattacagtcgcaacagtgttgcgctgcagtgtaatgcgtaagtacggtagatcaagaataatcaatctacaagagaatcatagcagcgccggcaaaaatggcagtggtaacatacgcgccaacctggaagacaccaacatggacacttccaggggacagagcgaatgcagctccctcagaggtgtcggcaccagcatctccgctgccgccggaaccaccgcttgcagccgtacganacgtttgacagagcccgttccatcagagccagcctgactcagtagggaagagc

SEQ ID NO: 6854 - DNA, 757 bp, Emericella nidulans
gggacagcaagggcgcaagagggccacaggcttgagatagcgtaacgcaatatttcctatttcgtattcatgtacatatactgactacccagactatctttaatattttcctaatatgaatctatccgaccttccactgcgagccgacttgaactgaccactcatctgcccattgccgcagtggattaagggccagatataccagactatacctgtatatctagacgctgctactatggaataatcgactagaaatctggctcatcaccgggcctgcccaagagactgacgtacgaaatatgaggcatcactgagatcagtttctcgtcagtttgagctgccaggtgttgttggacgaggggacctgtggacgggaataaacagagctgtgagcttgatctttgtagagcagcttgcgcagtttgcgcgcaggcagaattgcaggatcaaagaggtctatgccgtcagaaccattctgcagtcacacctggcactaagatatccttatgaagtagtccagcattcgattacggtgacagtcttcctggagagagcagttgcacaagcgcggcgactgcttaaccctaatgggttacggcaatggaggaaccagcccaagacaatgttagagtgaactgtaaggttaaccctagagtatcaccatgaaatcttcttctagttcaagcatatgctcgaatgccgccacgggacacaatagctcgtgctagggtcgtggcaatagggtatccgtataccg

SEQ ID NO: 6855 - DNA, 512 bp, Emericella nidulans
cgaccgccacactggcttcagcgtgttaaacaacgcctgctggtcttgcggtgagatcgccgtgaacgagaaggccgcgctcgctccatacgcagagaagctgtatcacggcctcttagccatcattaacaacgaggagatcatcgactcggtcaacgagaatgcagccatggccctaggccggcttggcatttgttgctctgaccagcttgcacctcgactggctgagtacgctggcactttcctgaagtccatgagcagaatcgattttacgcgggaaaaggcctcggcgttcctcggattcaaccaagtcgtgatgaagaacccagcggccatggagtcttcccttgtagactacttccaggcgattgcgcctttcccagcaagtcgctccaccaggatgaataccacgacattcaaagttcatttcaacaggtagctctgattcaatcacatgtttgtctgatttactaacggggtgtgacaggttcttcaaggttataaaaatatga

SEQ ID NO: 6856 - DNA, 741 bp, Emericella nidulans
  unsure (1)..(741): unsure at all n locations
aacttgggttctcctctctgaagtcaacttctgcaggaggactccatggttccttcttgttcatgatgctccgcccgtccacttgccttttcctgcaagtttctgctgcaaatcacggtgaaaagtagcagaaaaaaccagagtctgcctttcaacaccaggaacaacattttcttcggacgagtcgtcttcttcaatcgggcggacctccatcctcaacgcggtcaagcgagcttagaatatcctcgacctccttaaagtgaccttcactcagaagtctatcggcctcgtcaataacaaggaacttgatgccttgcattctccggattaggccctgtcctgtgcgaaggacttcccaaactcgaccgggggtaccaataacaatgtcagccgtctcaagtagcctctgctgcttctgcacggagagaccaccagtcaaaagcgcggttcgagcattaactccgggtgcgttcgagatgagaccataaatatgcttctggagctgatgcgcgagctctcgggtcggcgacaggatcaatgcaattggaatcttctccttctcctcctcagagtcaatagtctttcttctctcgcgttcaagataatgttccaaaattggtaagccaaaggccagngtctttcctgaaccagttgaggctttgccgatacatcatggccatccagaatggnggtatgcatgacttctgaactgagggtggggtgctgaacttcaatttttac

SEQ ID NO: 6857 - DNA, 523 bp, Emericella nidulans
tggatagatgcaagccttatgcaatgcaatgcgtccagtaatcaaacccaaggcaaaagcaaatgagcccatgcgcgccagtaatcaaaaattgaattgttatataagacatcagaactgttggttggccctaatccctcggccttcctcagcacattactctggtgtattggaacgatggcttcccccagcccatcctcaccttcatctccatcctcatcagcgtctctgtcctgtatttcgctctcatctttcctgtctctgtttctctcatgcgtccagacaccaaagggcaggggtcgaaatcggcggacgcctaacctccccccctccacagccaccaccaccaacagcaacaacaatacaagagcgaatgcgtgcgccaccccatcatgacatgtacatgtaaaagcacgctgcctccagtaagcacagacctcgccaagggtctctatcacgtccctcccgcaagcgataattcaaacaccatctccataacgcagacacaacaacgacaacaaca

SEQ ID NO: 6858 - DNA, 897 bp, Emericella nidulans
ctctatgctcggaacctgaccttgggttccacttaaagatcagtccgaacaaccagttcggttgtacttcattaatcaaagcttctttccacgaacgggagcaaggcatgtcataacacgcctccttttacatgccaacggctctgggtgaatgaaggccgccggtctggcttgagtggccccgttgattactatacaccagtgcaaaagtgtccactgatgatcccttcttcatgctataagaaaggattgtcgactccctccaaggatagtactagcaagacaccacatgaaagcagcacaccctgcattggcggcagcagcatctcttctgcgagcaacatacaggccagcacaggtattgcttcttcaagcacggcattattcctgagcagcacccctccttcaagcagtgcaccctccccagtcgtcatgctctccaccactattctaagctctacaagcagcacccctgtaccagttgtggttacagtgactaaaactgtgacctgggtcacagtgactgagactgtatctgtacaaggctagtgcggacatcataccaatacttagtcctaagatagagctgaacatcacggtttattgtatttattttagctggtgagaagactatatatttccgtcaatgccatgctgctctgctcacctttaagttcaccactaccatcatcttccaaagcatcaagtatctcgttatagccaacagagtagcaaaatgcatatgctgcagctaggaacctttgctgccggcttagatcagtacatgtactgttatagtactcagctaattcacggatagtatcatcggttaatttaaaataagcctctcctgtagtgatggccatccagccaaccacatggagcatgcggtaggtc

SEQ ID NO: 6859 - DNA, 491 bp, Emericella nidulans
ttcagggatgactgcctcgctagaatttcttacatgtcactctcttcgcttctagcctcgacccgactcgcaactgagggggacatgatccgctttatcgtccgtgtccctcctcccgcagtactccggtaccggtacggctatagtcatggcacgctctgcaaggcgctcgcgaccggttcgttcgaatcgcactcacgttccctcctacaacgaagatagcggacccagcgattccctgggcggagacagcgagaccgaccaacaccgctctggaggcctgtcgcattccttacgatcacgagattcgaatcgcgtccctatatcataccgtgaagaatcgaccgatgatgatgtcctgaataactctcatgaggaagatccagatgattcgcttcatcggacctatcctctacccgacgctgatatgcgggccacgcctacaacacaatcaacggccagtcgtcctcgtcgtagaggtctgttaaaac

SEQ ID NO: 6860 - DNA, 492 bp, Emericella nidulans
  unsure (1)..(492): unsure at all n locations
agaacaaaggcacacgangggcgttagcccctggtacatataacccatattttcctttcatactggctatagtccaaccggggaggggggttgctcactctcgcatgaccatcagcactcataaagcccccatgattaccttcgctaaacacggaggcctggtttctgatcgtgccattccaggtctgtgagacgactacttgctcggaaacaacgaggttgaagatattaannnntatgactggaaacacatggtctgccttgtaccttccggcgtcctttgaggttgcaaacactcaccgacagttgatgaatggggcaacaacctctacgaatcgtataagaaaggcgaacaatttttcggattcctgcatggcttcaaccaagcgccaaccgattatggtgcgtttaaatagagggaacctgccaaggggaacgttctatgcatattccctacaagatgacgtatgaagaatccgcaaccctacgtgt

SEQ ID NO: 6861 - DNA, 823 bp, Emericella nidulans
tgtgtcgccgggtttcaggccgtagtccttgactagggctgtcgagacgtgggtcgtgaggtctgccagggcatcgtagcggattgactctttggtgatggcgttgacgaaggaacctaggttgttcgcattgctctgccggagaggcgagtactctgagtcgaagagccagggccaaattgggaggtttgttgggactggagcgtagattgttagtcaaaactttgaatatatgaccattatagactaagaaggggacgcactgtcgatgtgcggtctggtggatttgaagatcatcctgtctatgtcaaactgttaaggtcgattaactgtcaattctgagatcttgggccgcagtgccagagccgtcactatatttaaacgagatagatctggggaaaatgcggggaatggaggtggaggtgagtgggaaagactgggaccggacatggcccgaggttatagaccccgcatccagtcggttaaagagatattatcttgtataggaacttgtctgcgaaccgatcaccgaggatggtggacaaatcctagattgcacttcaccactgagaatgggtcaaaaactttcatatcggttcgcaaaccaccttggaatcgcttcgggctgtctaacaattgcaatcccaataccggccatatattctattataccctacagtacatatagccgatatggtttgccatatatgcttgaaatagagaactgcttactgggaccaacggacaaggaactcccattcttaatcaagacattcaactgcattcatcggttattatgcaacgacctagcatttcgcaagca

SEQ ID NO: 6862 - DNA, 650 bp, Emericella nidulans
cgacagatagcaccactgcaccgtcaactcgtggaccgaaaagttggctgctgctgagggaaggattgacttgcctgggcggccccacgcagtgtgcatcccgtccgtccatttggggtcggattctgattcaaccccaagcccaaattgtgcaaagaaagaattccggcgggcttgggcctatgagcggccgtcttcatgacgatgagtgttacgctcgagccgtcgactcgcttccagcatgatcagcaagcactcccaggcttaagagggtctcgctgatggtggattgtggactgtgaactttagagtgaacaacggcaaggtcgatcagaattaatttcccgtgctcgctgctgtgggaggattggtcgcagtcgcactgctcgcctggccctgtcgagtgccactagagtgccacaatcattgcagcgtcgccgcgaccgtgggctgtccatcgggcctgcgcggaagacaaagaagagtatacaccgaccggagtaatcaatctacatgagacctatagcaacggatattattgtggcgacgagcgaggtttcgaaaccgtttccccggcccagtcccaccgattgcccagaaggcaggaatatcgcatgcaatcctggttgggatcttacgagacagatctc

SEQ ID NO: 6863 - DNA, 527 bp, Emericella nidulans
ctaggtagtgcattatcatacctgaccaatcacctgtaacaagctcatcatgaatatgccgagttacatttgtgtcgacttcggtgaagtcctgtaaatgttagtcagaagccgttgtgaatggacgggtgactgactgagacgaagaagctggttgtcccatccgatctgctaaacatcccaggaaacagtttcagccaggtatcatccccatacattacaagttgctcgcccttcgctcttatttgggccagccacgtatcttggtatgcaagggttgacgatgtgtcagactcagctatgttgagaataacatcgagaaaagacggcacagatcctgtggtcatagccttcaatcgaggcattgtaactgtcggggaacctgcataagcggtaaagggaattgcagcaccggatcggatgaggcttctgaagtcagtaggactatcaggcaagatcgaataataatgcgaacctctgtgtgaagagaaacccggagttgttggaataacgaagtacttagtcgc

SEQ ID NO: 6864 - DNA, 377 bp, Emericella nidulans
cagatcagtatactgtgctctgaacaccgccggtatcatttagctgcccgcatgtggctacctggggccggggccgttaaacatcagctgcatgctcagaccagatgcacaagccgctgttgctggcatatcagccagcgttctcactctggatactcctcatccaatggagggcatgatgcccaattgctccagctccacgaactgaactggtaccctaaccttatagcatcgagcaaatcatcggacgtattcacatcacccgtcttgggagagataaacactgacacacacttgctctgacgctaaagcacgtctacgcagcgctaacgggaattcttcaggtcataagcttcgtcacacacagtgtagacgaa

SEQ ID NO: 6865 - DNA, 518 bp, Emericella nidulans
tcttttgctcctcttgaatcctttccagctcggcctcatgcaggatgcgttttctctcgcgctccttgatccgctgctcgcgagtcatgatacgcgaacgccgctcattctccatcttcctcaaccgttcctcctctttacgagcagccgccagctcctcctcccgcttccgcgctgcctccatagcttctcgttcctgccgctccttctcactcttctcggcgagacggcttgacctcttggcaccagcaaggagttgaaggttgatgagctccttttcgcgcttgatcctctgacgctcctgggctgcttgttcctgttcaataatcggcattacgtgctcttcgatcctgtctctgagtatcttttcatctgcgtccctcgtgttccgtatcgaatcaaggaactgttggtagtcctcagcgtaatggcaatgcattcccacttcaacgccgcgtaggggttctcaatgtccacattcacgtcagtgttctcctcttcagactcctcatcgtggt

SEQ ID NO: 6866 - DNA, 291 bp, Emericella nidulans
gtagaggccaggagccgatggcatgcagggcacaggttgtgaatgaactccgccttgtctactcgatagctttctctgctatctagatgctcactgcccgatgccaagcatatacatgacgaatacactcacgcgatacattattatttaacttgagcatggccatgtttgcaggcgaacgagaactttggcaggacttgaaccactgattattagctctcagtccgactaaaattttaagagatactcatgactgtatccagtccaacatctgcctaacaatatcacgac

SEQ ID NO: 6867 - DNA, 838 bp, Emericella nidulans
ccgtgtcatcgctgtcctcgtgtgacgtgtcaactgcgatatcctcagcggatgcattatcatctgactctgccgtggcatcttgcgccttcgagtagtgttctagtcctctttccgccttttttcagcatattatgcagcaatcgtccgccccgtgttcggatgctcagctctttcatcataagaggccattgaacagtctgagcacacgtaggacactttccagtgagcggaacaagacgttctggatcctccgtggcatccaggaacgttctcgacaaacacagcagatgagtagtactggtacagtccgcctctgggcaaacaactgcccagtcattatctacatactgctccttacagattttgcagtatgagcctcgcatgtcgtccagcaagaacgtggccttctccaagtaatcccggatgggcgtatagtcgactccaatctccctaacgctgccaacccccagactgtggtcacattggggggaagtatccgcacagttgccatccgcgaccatcttgatatgagttggaatgctctcgtttacgcggccacacaaccatctccattgctgtgagacgtccgcagcaaaaaatcgcaaactaagaggccattctttgaagtatgtttaacgtagcaaagatgtagatcttccaggtgagccttcaaggagttcgagtacgtcaggctggtggttcctctttgctttttcttacatcggttcacgctaccagtgctctggatctgtcaggctttagtcttttgtgaggctgtttactgatcatcaattcgatccttcatggtcttcactgctcctgtttgagcgtctgc

SEQ ID NO: 6868 - DNA, 459 bp, Emericella nidulans
ggtattacgtattagacaaggcccacgcgcacactcactgacacgaagcccacacaaaaggttgcgtttgaatcgatgggcctagagagatgagagagggcccacgagtgacatggagctctggccagacaaagacgcacaaaaacataaagagatacggttggaacggcttagaggatcaggcgcggaacaaactttggctacagcggggaggcgctgtgatgattactccactactggggctaagataccacccatgagggcttcctgaacgcgttggtcaagaacactatgctggattccgacggcaaggacaactggggctgtggaagcaaaagggaggggtaggtcgaatgaccacaaacaatgcccgagagatgagctcggcgcgtctactgttgatgaaacagattagtctgcgttctagtcaggcttcggagtgttctgaagattgcttga

SEQ ID NO: 6869 - DNA, 146 bp, Emericella nidulans
  unsure (1)..(146): unsure at all n locations
acagctgtnccatatcgataggttagtagagcaccggactctaccccacagctcagctagtatgcagtacgagctagaatgctcattttactatgtatcagtacgtacttactattcagtatgcagatggtacagggacattgagc

SEQ ID NO: 6870 - DNA, 944 bp, Emericella nidulans
gtcaagcaacatggagatatacagtggctagttggaatgaagggaatcacgaaggtaaccggtttctctgccaaaggttactcatcaagctggcgccatgtcttgatagagattgaatccctcttagtgatctataacacggctgcaggagttgggtcagtgtgtttttctgctcatagggattttttgcacttaaacgactttttgcgaatcaataggtcggcaagtatgaaactgcctccgattgagctctgaggtactggcaagagatgaagctgttcatctaaataccattagttatgccatcagagttgggaacacaatctgacatgcttccagctggctgcttccttattgtgttagatcaacgtctgctgaaattgcatctcaatgttgggtaactggatgcagacattctcgcagatgatatctatctatccgtcctgaaacattcccgaaagccctatataaggacagcagatggtgagtatcccaacggagacgggagattacagctcccgggcatctttcacggaactggaatcctcaaagaccttgtcgggactggcgtgactagaatggcagaataacttgcagactagtgtgccggatcaggatcacattgatatccaaaaggatatgaaattataaagactgtagactatacccggagaattcaagaagaaaagagctctcaagtaacgaaatccgcggttgtcacatcacgtgccttgattgtcgtagaattatatttcacgttcaagtcaggtcactggaatgtcggtactttgtcatggctgaaatgatctggtggaaatgtgcttgcatcgagtatattcggaagcctggactgacaccctcaagcactttcggggtgactacggcacagttaagcaaatgaaagcattcaatacctgcttccatgatcgggtgagtgataccgt

SEQ ID NO: 6871 - DNA, 734 bp, Emericella nidulans
ccccacctcgacccgccgatgaaccgccgacaaggaggacggccgtccacctggccgtcttcgttttcatttttttactcttaatatacgtcaatcagccacccagctcccgccgagccttcgcgtggagtaaagtccgctaccgtacgaccgcgcgttcgcttcccgaagcacgcggcgtctgcccagggctcgggaaatcaaaaaaaccggctctcgttgtgtctcatgtgcaatccgacggcgacacagaatggctgacaggcagcgaccttgcgaagaaataccatctctgcatctacgatgttgacggctccgacgacaccgccgcttccgcaaccctccgcaccccgtccaaccgcgcccatgaagcaatggcctatcttacctttttaattgacaattacgactccctcccctcttctggcgctgtgtttgtccatggaagccgctgggcgtggcacaatgacgcccccgactacgacaatgcatacctcctcacacaattggacgtcgaccgcgccctcgagcccgccgggtaccacaacctgcgctgcgactggagcgtcagtacctgctccgccgatacaccaccgcaggggtccctgcagatggccttccagagcaagatcgacccgtgggacgcgcgggctgcgtcggacgcagcgctgccgggcgcgttggcgacgatctttggacataacgatccggcggggacggttatgctgagtcgg

SEQ ID NO: 6872 - DNA, 527 bp, Emericella nidulans
cacgagggaaagaattctagcatgcccacatctggatcgttttctttctgaagcctccctggatttagagattgaaagcgtcggcataacctctctggcttaagagcaattcactaccccatggttctcaagacatattcaagcggtcgaacatgacccgaaccagcttaatgacaccatcgagtctctcatcgtcactggcggtgggggctaagtcgagcacaatacggtggaactggcgtatgcattttctatcgatcggtctgaagggctcatcgtcgccattgatcacgctctcaatccacagaatctcttgaaactcttcgaagaagttagcttatccggaaagattggaccaggcagtttaacgaatggtcaaagggtaccttgctctgagttttccgaggccagattctggtgggttacagcttgcccgagaagaggcgcgttcatcatttctggctaatcaagacagtggaaaatgtgggaggagaaggtttagtatgcagctttgggtagggaaaggg

SEQ ID NO: 6873 - DNA, 512 bp, Emericella nidulans
accaaggtggccataagagtattctaggcttttgtcagaatcctcttttcctctattgaaagtaggccttattggaactgcagcctcgacccttccccacaggcgaggaagtccacaccagttgcagaacatgtgaatcaggatgacggcgaagagagatcccgttcgcagatagacaaaagtggcgtaccagccaaaaactgttgtatacgcgaactgaaaaacggagcgaagcacggctgcgataaccgaagtatccggatgcgtcaatcggaactcatagaaatgatgcacatgagcgactccgaagtacaagggggccacccaaacaatatgtcctggactgattctggcgagtaggtggagaggtattattgccgatctgaacatgacctcctctgtgatgggaccctgaatcgcaccgtcaatcaaatgtgctagttggactagcgacagtcttaccgcgatatagtttcgccacccaatccaaccacctaacgtttcagagattc

SEQ ID NO: 6874 - DNA, 542 bp, Emericella nidulans
gacgacctggggtataactggtatgcggcgatcgacttctattgcttcttatgctattattcctatcatcaaagggtgatgaccgccttgagttagacatagatccaggcgcagaggggcgtttggcgaatgtgccattcgaggattgagaccgtcgtctctgtccatgatagcggtcagcggtggtatctctgcgcccatttgtgaaaggactccgagcgcgaggagctggacactggtcgtcatcaaatgataatccattcctcggaggtgaaccaggtctcgtatgccggccagcggaaggtgggcggcggtttgctctataatacccgtaatcgcggccagaagagtctcctggctgcctcgaggtcgaggtgttatggctccaagtgctgtcgcgagctcgatcttctctaaaaggcgatcttggccgcctcgatgacgatacaggagatctcgctctcacatctcgacgaggcgagaacttccgagaggcgtatgttttcgtgtatgaaacgacaccaacggctctgttgtacggg

SEQ ID NO: 6875 - DNA, 525 bp, Emericella nidulans
cgatcaggctcctgagcgcgaaggggggttgaccttccactccgtgggggcgaggcgacagtgaggctatttgcgctaagtgcgcctttcgcagcgttaagctctgcaatacgcctgcgccgtcggcgagaggtgatatagtcacgaacaagcgagacctttctcggagcccacttggtcaggaactcctcgcctttcacatagtcattctgtgtattcatacgccagaggtctgcggcgcgctttgcagacactggacgtaccgcaacagaatacatacggaccgtagagtgcacaacgcgtgtggtactaaagaagttcttgaacatcgattgcgggcgtatatacgtccgcccctgcacttggagcgtcaggtcgatctcgaacgacacagggtcctgcaagcgtgaagactggagatccatctgaccgttacttgcacgcggtacttttccgcagtcacccggtccaggagtagcgagttatgtaagctggagtccattggcctacaagagtgatgttgga

SEQ ID NO: 6876 - DNA, 846 bp, Emericella nidulans
acacggagcgacattatcgccgtgtagaggagctcgaagatgagagctacctcgtcgaatgggttctaggtgagatggatggtggtattggattaagtgcgcttggagctcctacacagggcatcaatgagattgaagataaagctgagcacgggaaggatgttgttatgctcggtgcttaaacatgataaaagcaagcctttggctctccaactgagggataattaaacatatgaggccatgtacgctagacattgtttctgttcttgttgtctgtttctgtcggatcgacacggtatatacctatgggtgtttgtcaaaggagtacatattgcatttacatcaaggtctataaaaagttttgtttcctagtttattcaagctgctagacgtggagcagcatgtactcattacttggcagtttggggatatccaagatgaaatgctgagattcatcgttatacgtaaggtaacaaacaataaactgaggacgaagtatttgtcctaagcggagtgcgatattcttccatctacttccgtcgacgggaatcacgatcattatctcggtccctgtctctgtcccgattccgctgcttgctggaggcagtcgatgatgaataccatgaactattcctgtcatcatcgtaatatctgctctttcgatcccggttccgatctcggtctctaacggggtctgaacgacgctcgcggtctcggtcacgataatatcgatcgtctcgcctatcgccatcgtcaccctcatattttcgtcgcctagaatgccgatcacttgttgaccgactcctgtctctccgtgatgaaccattccgccggctctcataccga

SEQ ID NO: 6877 - DNA, 529 bp, Emericella nidulans
cgatggtatggagacggaaaaagaatccgaaataggcggcggtatgcctattgctcgaaaattcaaagaccgacaaattaagtgtaaatactctatttggcccaaggggttagtttacatgcagggaaaaagaaactagtcgacgagtgcagaacttacttccgtatactgattcacctgtagtccaggctccgccatttcagcatccttcaggaaatccaatggcatccaaacgaggtgtcccttgatcttatcgagcttctcccggacttcctggactggtatgaacggatcgtacaaatggcctaatttgtagccatctttggcgcggtacttgtcatactcctcaaaggtcctaatattgtcgtcgggatcggtgcggaagagctgccggtagatgttagtgttaacagtggcctggtctgtccacgtcttccaaagattgtcgttcattgggtccgtgacgaagtcgttttctgggccctcgagaatctcattcatgcagatggtcggcggctgtgcgttgggg

SEQ ID NO: 6878 - DNA, 480 bp, Emericella nidulans
gagcgacaccccggcgggaagccaccgtaatgcggttgctatctttatattccatttgacaatgtacacgaagtacaatgaaagggccagggtgatgctagtggtgactggacggttgatgtgctctccactcttgccctggaatattccatcactttagatacgtggcatcgtactgtcatatcgtgacctacgtggcggatcatgtactcaataacgggtgtactttacgtataggctgaccatgactctgttgaggattgacacgctattcggtgcgctgaaacccgaacttgcacggaatgttccttattttagctatatgcacattatacgatggttgaaacaggtaaaggccatctgtattcctgcgtcgtgggccatctcatatacaggtgacctatttcaatcgcttacatggatcaccggtataaactctggggactctgcctatctactgattctatgctcttaggaaag

SEQ ID NO: 6879 - DNA, 534 bp, Emericella nidulans
tccttgcttcaacaaaacgatgggcactgaaacaatggacgccaagccgcgccagcatgcacatacaagcagtgcttaacaacatgagattggcacgctccttaaggatgtcccaccacactgtacgtattatcctgacagcatgctttgggcaactgaactaaactgccctgcctaatcaggaatactggagcgctggttatgccgtaggctacgttgagccttgggggatagctccgaacatactacgactcgctgccgtgtgcaaatacacgaaggtataggtctgctatgagggtgccgtttgcgcagacgaacgcatggatccaatacatctatacggcactattcgcgacctaccatactgggcttgaactgagcagcatgcatttgttgttcactgaaatgacgatgactacttgcttggcattgtgcgctttaccgtgcgtcgagacgatccgtgccgtgtctatcgagccgacgaacatgctgagtacggagcagagcattgtacccggagacgggcactcttac

SEQ ID NO: 6880 - DNA, 646 bp, Emericella nidulans
cctggcttgaatgggggcatgcaccccagggatatgatcgtccagttgcgtcctccactcgccactcaggtcctgtcacagaaacagtcggtcagcagccggtcgtcgacaccaatcccatccggtagaggttggaatttgatatttaattgattttattcgttttttttcttactgtgaagattcccaagaacaacgcactggcaaagacctcatcccggaccgccgattccttggtgtcaattaccgcagcgagagccgccagtgctgcgctatagtgcttccttgcctgaatccagatggtctgggattggtggcggttattaaacagtgccagatacccaagacttaggactgaaagccgcaggcacgactcagaggacttttcaaggtagaattccggcaggaaggcgaggtggccgccgcggcgggacttctcgacaatcaggacatatgtccgcatgaagcacgatacagagacctcctcggggtttcttgttcgaatggaagggggaatacgcataggtacgggggcggggcgcgccgcacggtgcgaaaccctgttgagatggcagatgtagacgtcaggactgagatctgacatgcgcacgggcacgcatgcgtgggtgcataagacacacgacgt

SEQ ID NO: 6881 - DNA, 693 bp, Emericella nidulans
  unsure (1)..(693): unsure at all n locations
ctactatagggagaacaaagctaggatcccgctcctcngtgatgatatatgtccttgggaaatgggccaagaattttttttttcnccagaacctattnttggtttttggcgggtttaaaaaaataatttccccctttttccctttttaaattattttttattcaatattttttaatattattaataattatattattttctattttatatttcttatattctttattatctaattctattacaaattttatttttaatatttaactataatattaaatatatttataatatttatatttaatatgaatataaaatttttatatttaatatttatatatattatattttttttaattataatcttttttttttattttttatatttatataataattaatatttatttttttattattacttcaatatttataattaattatttcatttattataatttataatcataatatttaaaactatatatttttttttaaaattatttatatcataaattttaatatattttattttatattatagtattactatattattttattaatataattttaattttatatttataatttcaaatttatatatttactaataatattatattaatttattaattattatattaattatatataatttaattataattaataaatttttaatataatagttat

SEQ ID NO: 6882 - DNA, 780 bp, Emericella nidulans
gagaataacttcgtcaactcccgccgggtccagcccgccttccacgtaaccctgatttatatagccctcaagacagctcatccagatgtctgggtggacctggtcaaccgatacgttgggcagatgaagaaaaacccaccgaaagaccacgcactcactcctcccttagggtctgcgcgcgtccgccttgagcgccttatctgggatgataagattatgacgtttgttgcgcggatcatgcctggtgagccagaaaacagtggtgacaatgctgagccccagccagactggatctgcgttaatccacttccccatgtcacggtaggcacggtttcgccagccgtcaagccaaaggagagtaatgatctgttgcagaggtggctgcaggagggatcgcagggtacgggcatctgggagatggagatcccgggggtgaaagtcgttaacgggactgtaaatgttactatgagtcggggcaaataaggcactcactttgtgagggcatgaggcgaagtgccgaatgcgcaatgcgcctgtattgtgagtccattgagacttggttatattgctagtactccttggtgagtggtggtagccggatattcctccggtactagcgatgcagatacaaataaagtctgaaaaaaaaaaaagcaaagcaatcggtgaacataatatgatatctaacctagtgttctgagtgtatcttgaagaaatcggcagggaaagagttgatgcatcgtgacgcttacggtaggacggcgttacgaatagtcctct

SEQ ID NO: 6883 - DNA, 627 bp, Emericella nidulans
aaaccgacctgggctgggacacgatgtaccccctcacctttctggattttttatctacactccaggaagggggcactatggaactgtaccacacatgccaaattccacatccctcaggcttacattttactaacactgcaccactaacaaagcttctttaggctataggggtatatctacctctgtttaacaatctaccttatccagggaatgccctagcacgacaaatcaatacccctcccgcgaactataactcataccgcaatgaaacacctccccagacattcaagagcacggcttcaaggcatctgaaaaactatacacaccaccttaaagcgcacgtgataaacatccagacacacatgccactgcaccattgataatgactctgctgtcaatctctactctcgctttacctcttaacatctgaagcctataatgtttttagccaccggtacgaccggctaactttccgccagaaagccatagtacatctattcggtacacaattttgatacccacaccacgttactttatagcaaagacacttttcacctgcttgcctgtggacacatttaaactactactcgcctcctgcaccatttctgctccctatccaccaccatc

SEQ ID NO: 6884 - DNA, 1053 bp, Emericella nidulans
acacctacctatgtagatcacttgatcgggttaactcgtttaaatgtgcacaaggcaataagagaaaatattcgtgctatcggtatgaccattgaatggacgatatgtgaagattccatctcaatcttcaatctcgccccaccgtctccaaatctcaatatagaccggataccagttagtctccgaccaactgagatccagaaaagtctgccgcaccacccgtggatggatttctttccgtttcctgccatgcgcgacacactcatatctgcggcgcacttgttcgatgacgaggagctgtgccatgatctcatggcgttctgggatacgaggaatacccaggcgacgctggttgtctggggagtgtcgtgggagccggggaactggaaggtgacagaagggtttgcaaggaaatggggatggttgctaaaagggtccccggagctgctggttagtacgaatatttggagaatgaagaggggagagaggccattggattggcggcgtattttagctggtgtatagcgtggctttgggaactgatgcctgaacattggtcatgtttatagatatgtgatatgtatacctgtaatttgattctcttgcagttcatacccatcatgcataccggaaatacggcgtcgacgccatctccaccccgttaacaggccgaggcgagtatgccgggggaggcatatacatttgccttgccgcagcagcaggacggaggggtggttgcatcagtacagggctcatactctttggcctccgccgtcgacatgcaacaacatacaaggcataccaaaatcacgagaacgagaaaccccccaatacctgccgaaagaccaatgaccagtgctcggtgccgatcaacccacgaccgatcatccgcataatcccgtgtagagctctgacatacgccccccgaacagagccccccggtcgcagggtgtcccgtccaggacggtcccggcattagagcaggagccagtagcgaaaggcgagtactaggagaggatacaggtatcggcatcgttatcgcaggatgatata

SEQ ID NO: 6885 - DNA, 895 bp, Emericella nidulans
aaggtttctggctgcgtccaagcccgttatgctcataacgctggactgaaccgccgtccagccttcttgagagacaatctggaagagaatgaacaacgaattcccgaaattatcgaagtcgtaccaaggattcgacacagcccgaggggcgagaacgtcccaattaaacggtgagctcataaactcgccaacacaagcgtccaagcttcccgctatcccgtcatcattgcactccatcaattggccattgaataatgttactccatagattgcaaacggaatcagaaaactcatcgaaaccaaggcagcctgagagcagttagtacagggaaaggtgggaaattggcgaaaaactcacagcaataactttccatcctccaacgattatgacggagtggaatgtattcttggcgctatcactgaagttaagcagccttagcgctctcagagctttgaacgccccgatcgcccgagaaacaccgggctccgaactcaacgcacttaacacatttatccagaggggcaccagaacaatcccggaaatgaagccccatgagccacggaagtacgcattgggaggtcagaaagaaacccacggcgataaccttgatgaggggttctatgggaaacaaggaggcaaacctaaacgggggatgggaaccaagctttataattgggaagttgcagcctgaaaatgggggggtatgccaacgaggaaaaccctggcataatgcttaaaaaaacccattaaaggttcccaagggggaaagggttacaccctcaacggtgaaccctggccgggcttcctgcccggtaaacctaaaaccgtaaacgggggaaaaaaaaaggccttgtctaagagggaaaaaaatttgtggagctttttttgggccga

SEQ ID NO: 6886 - DNA, 581 bp, Emericella nidulans
cgcttggtggtatctgtaagtgttaacgctgtttaaccagttttcctgagcactaatacagccgacagatacctcgtgaaagatatccaagacgacgtggctggggaaagattaaaagcctaaaatagctggaacaatgttctgaaggctgaagctaacacagccgcggctgtaggtggtcagctcctgtgtccatatgaccaattccgggtggcacggcaaaggtatcgcgaaatataaatatatcaattgccaatgtacattacagacaaaacttcgtttctagtttaggtatcctagtctacggaatagtaaacactcacattgtgcttttaggggctgtgatttgttcacatcggcaagccgttgagcccaccaaaattctgctgaccgcttaaacgttctccactctgatagggtcgaagaccggccatgttttgctggcaccgccgcagcacagcaaggaaccaggcctagtaaagttgtctcactcctgctcgtttgcatctcacattcttttcttttcttccttcttcctcgcccaattacccagattaccactgttcatttcttctctttct

SEQ ID NO: 6887 - DNA, 569 bp, Emericella nidulans
ctctgccgagagctccgtaaaccgatcgatttactccgttgccggtgaagttgcaggggggggagcgggggcgtatcctgctagagctgcgcgagtataacctacatgacaatcttcatccgccataggctgggcagctacgcaatccggttttaggatgcaacaccggctgcgaccctccgtgtcaggtctcgtttctcagggtcaagaccctgggccaaccgtaaattttaagagacgcatgctgcctggagacggaaattcgtcattagaccttcgggctatggatgccatcacgagggctccggcatgacttttcatatgatccccaatagccttagtgattcacgccccacataggcagatggtccgactaacggttggctgtgcaggtatgtatcttacattgcaaagagaccctcaagagttgtgtcttaatcgtctcgtactgcaccaaatgattagtcggagggttagcctagtaaatgaacggctaggaacggaatccatcgttgtcctctgttcgaatgagcacgaataatccaatccaatctgttgaagcaaaggag

SEQ ID NO: 6888 - DNA, 473 bp, Emericella nidulans
taagtttgtggcactaatcgtgtattgtgctatagattgaagtcagtccggaccttctctactccgactcgcttcatggcatgaccgcctgcgcagactttatagcctactctgtcttgacggtgatctaccgcgcccaaacacagacacaaggacaaccccgcccatccgcactggccatatcctcccagtgctatgaagccgcctgtctagccctccacagtcacctcaaagcgataacatacttcagagatcggaaggctcacaaacaggcagaatatgtgaattcgtatgtcctcgaaactcccgactttctattgagcaagctaactgggcttgatgctgaaggatattgctctacccgtccttcaccccattcatcattgtctttacgcacgcaatcacaacatcttcgaccaccgatcttcgtcttctgcaagagactgtccacagtctcgacctaatcaagggtg

SEQ ID NO: 6889 - DNA, 692 bp, Emericella nidulans
gcaacacatcttttactgaacgaatcactgagcgtctcttcccaaacatcgtcttagcagcaaatcgagcgagtgccttccctgcaaacgagcgccattcttcacccaacagtctatttccggattggacaccggcgcgtcggcgtggaaaagaaggctcacggtgcttgaggactgagctattacgcccatcttcccacgctcgtccttttatagttaggaattgaggcggtttggataatccccggttgatggtgacgtgatcgatccagggtctgttcctgaggtcaacaacagcctcattgatggcgtcgcatggctggactagtgctgtagcagcatgcagaatggggtccatgtcgcctgcgcctgggcgcccttgttgaggagaggatagtagtagtttggttcattgtaatcgtggtggacagaaaagggaagagtggggaagtgattctaagcgccgcagtggccctaatccctgctctaagcaagtttcacacgctactaaattaatccaagatcctccaaacacaagcctggagattaagcgcccatgaattgcgggacctttttgcatgtgacatttaagccctgcatctagtgcttctcatatttcagtctcattcaggggcagcctcattagctcgagaatcccatctccgatcctcatccccctatccacactcaat

SEQ ID NO: 6890 - DNA, 871 bp, Emericella nidulans
  unsure (1)..(871): unsure at all n locations
ggtcgttatatatccaacatcggagaagactgcaggcgcaggctgcaatgccaccccccacccctcctgctcagctctcggacagacgggatgtttcagctatgacaggtaacatacatccggacagcagcccttcattgtcgagtccaacaacggcggatgtcacaatgaaacatgtctcgagctcatcacaacccgcgcattctccatcaatttcctgatcgactctcatcattcggtcattggtgcggaaatggctggccaatacctgacgaattacttctcttttatacatgtttttattaccgctatctcttttattcacttgtaaacgattggaatggactggcgttcgtcgtggctttgggtgcttattcttgcgagaggtttgagggtggcgtacttggcgcgtttggcgggaataactgatgggttacggctctctatggaatggaagccatggtcatgcgattctctacgcgcagcctttgcttgcttcacgctttgtcttctagcctttcatctcagaatatgtccgtagtggtcctgggatagctagcgtcaattatccaatgatatctgcggctttaccttgactaaatgtttctagtcctatgatacttcaatagattcactagcagtaaatgaaggaattcctcgtccattaactactttagtagaggcggtgcacctgacttctggtctgtaccgtgcctgaggcataaaatgtctgcctgattgttgaacattcatncttcgagcaagctacaagcattgaccaagacccgcgactcttcagtcgtggagaaactcgtagtagccgatgcgcattatacccatttatatgctcccctttgctgatgaacagata

SEQ ID NO: 6891 - DNA, 798 bp, Emericella nidulans
gatgctgagattgatcgattaggcccaacggtcaatcaaccagcaatgcgaacaggcatgcattgcgccggcgacggcatgccttctcaaggcaccttcgacccttgtcgacgataccgccagcagcatccttctctctctcgtcagaaagaggagccggagccgcagccgaagtcgaagtagaggcgggacagcgacctcaaagtgcacatggatagtctgatcagcctcctttggaggcgacggtgtctcaggctgagctgggcctgagctcaggtcgttcacggcctgaacttcaagctcagaaggcgccggcgtcggtgccggcgtcagggaaggggtgagagagtcgagtttctgctgcagctgttcagccttcccctggtgcgcctcctcatcctccgactccgagtcatcctcaaactcaaacgaggtgatcttggacgcggtctcctgctgcgcccattctacggacaggcagtgcatgcggaaatggtggaggcagcggcggatatccgggtctggggcagtcgcctcacgggcgagtttttgtttggagaggttggtgagcttgtaggagagggaggatctatcggctagaggagggaagcgcttattcattgtggtggccgttgagggtgcggtggttgttggggagacgttggaagagaggacgttgacggccatggatttgatgcaaatatagatgcaatatgcacgcaaatatggttgattagagttcctaaggctgtggctatggcagtaggaagcgaaggggcgtattataggcgattatag

SEQ ID NO: 6892 - DNA, 607 bp, Emericella nidulans
ctcctcgcggcgaagaaccatctcaaagaactcaggcttctccttggcttcatctacgggctcccacttgattcccatctctttctcggcgaagtgaaaccagtcccagtgctctggttcggtcatatatgcgccaataagcccacactcgctactaccaagaacattgatcaggttggttctcttagagagcaggtcacccgctgcgcgcctgacggaacctggaacaaatcagccctagtacgagagcaggaatctgtatcaggcaagccttaccacctccgtatgtgaggaacttgagcttagcagcttcctcaaccatggcgggctcctctgcgatctgatcgattacaagaggcggcacgaacgcgccctgggtgtgcgttgagtgcaatatttgcttgaacatctgaggactggagggttggtcggggggtccaatgaccgtgacgcagccactaaatacgaggaaaaagctcacgacgaaaccagcagtatggaagaggggacacccgttgtaggtggcttcctcagcataaaaaacccgatgaacactaacgcggtaggagtcctctgagtacagcgcccgtaaactgagacagctgcg

SEQ ID NO: 6893 - DNA, 704 bp, Emericella nidulans
cccatctgcgcgactagccacgcgtgcgacaaactgtgcgacccatcgcgcgcgatgtactcgacgatactgtgtcatccctttcctcgcaggcgattcgtcgcatccagtgcggacctcgcaggtgtgcgagtacgactgcgcgatcaggttacggatctcgcgctcgtaattgggctgaaactgtgtgatgttgttcgagacggcttgctcagcccagtcgacggtgatgtcgaaattcatgaaagtcggctgccgaaagttgccacggtgaaaatgaaggacaccaatgtctggcagacggtagaactgttagagaaagagagtcgtatatgcttgtacacacgtgcatacctttgccgatcctgctcgtcaggccctccccgatgccgatctggtatgagatgcggactgcgtcgccattgacgacgattccccgtggatcctcacacacttcgacttctttctctaggattagaacctgtgattgcccgattgtaagcccatgtgcggctgtgatggcggcgagtctggctctcctaccttgatattcatgcgtgcaagtagagcccctagggcaagtccacttggaccggcaccgataatgagtacagctgtttcctccatcaccccgtctgttgagagtcggtcatttgtcggtatagcgtggaaaagagtaagatatactgctgcgcatgacaagt

SEQ ID NO: 6894 - DNA, 1017 bp, Emericella nidulans
tgggtgtgcatttctccctatcgggccaatcgcaatcaagggtgatatcaatggcaccgaaacaggtttgtgcgcggactgaccgcagcccgtcggtcaccgaccgaactgagctggtgtcgcagcgcttggattagctcaagtcggtttcgcggcgcacggtcgtctggggttcgataccccgacctcgctgcgctcgaaaattttcttaggctccgtctgtcacagcatccagtccagcccgttggcttcttcctcaataggaaagacctcgcgcgcgtattcctccatgtctcgccagcccgaccacagcttccgggcctcgtctgtgacacgctgtgagattacccctccgggaccctgcatcattcccgccccggcgcccttgccgttggctggacccaatcccttgggagatccggctgcaggacgggagaattccggtagagggaaataaggagccttgtgctcaccgaagaccacctcgatggcctcaagctgttcccggtacccgactggaatgttgactttgatctcgaccttggggacctggacgtacgttacccggcggttgagagcgcgcgaaaaggccgcgcatacttgtacgggagatagcgtctcgaatgtgagcgcaatcctacaccagtcagcaagttctcaatcttcgttttctttcacccatcccccattcaatcggcaacctaccgatgaccgttccacttctgaggcccgtctttgaaaatctgcagcagcgccgggccgacgtcatgctctgcatctagccaaggcagcgggatgtccgggtcaaagggtgcatgccactcgaaagtgccgtctggcatgagctccatctggaagagcgggtatggcaagcttgtaaagttgttattgtagatgcccgcataaacgaaagtggacggcaggccgagctggcggacgtagttctccacggtaaacttgggcgccacatgggcacggcgggccagggcccgtagagcgagtggtctggcatactgc

SEQ ID NO: 6895 - DNA, 756 bp, Emericella nidulans
gacgcttctggatgaggtgtactacgcgtcatgctcttcagaggttctagctttaaggctggaattaccatggtaatcaggtcactattgcccagtatttggaggaagatacagactgcattcattataaatcaggaagggtgctattacgatgaatcgcatatcatatcaaggccgagtcatgagtcatgattaggggcatatcatcaacatcaaggcaaaacatcaaagtcatcataggtaacgtcaagtaagtgtaagaaataaaatctagatacccgcctatagaaggacagaaatgactcaaatcatcatataaatacccggttgaactttctcagcaaactctcgaccttctcggccagcggatcatctcctggttgaggaagaagacgaccatcgcggtcaaaccggtcaggaaggtcgattgtagcatcagaatcagattcaggggcgcttgtttgtttttgtatttgtgcagcgctgcggtctttcgccgacgacgcatagggatcggacgatgagtaacggcgccggtcagaacggtgacggcggtggtgacggcgacggcggcgccgacctgaactcattccatcaaccgttgaatcgctatcgtccgtctcgtatcccgttgttttctcgtttgtctgcggatcatcgtcaaaggcaacagatttggactggggcggttcgctgccggcgcgcgtccgcctgcgccgtgaacgtggacgcggcgttgctagacgggtagagtct

SEQ ID NO: 6896 - DNA, 608 bp, Emericella nidulans
gtaagaccaaacacgctggtaaagggcgggtatatttaacgaggcctctttttagttttcacactgcgcccaaagtccttaggggtgggttgattctccattcctgtcgatgacacgaccttgcctaatcactatgacttacgaccttgtacatttcctccagacaccccaggcctgtccattgtctgaccgatcacactgacgtgacacgcatggaaatcgcatacataatggctcccaagatgaatgtacaaaaccttgcaatgttcttagcacgcagcatggtcacttataaaagcattagctgcgtgcttaacctaacatacgacctatcgtgcagacaatgaccttatttatcggcatcctacattagtactcggcaaaacatattaaaatatgccctcaaacccagtctttaaacgaagttaataacgcctattctttcagagccattctatattgcgatgaataagatacatggaatcctgatgggagctcctttttccccttgaagagtgatcactgtgggaaaaccaatgcacaacctaatagcggccgtcaaggcacgttggtttctaacgttgatactcaggcccttaatatagaaa

SEQ ID NO: 6897 - DNA, 560 bp, Emericella nidulans
ggtcgtgacgagagataaaccggtctccatacgggtcttgtccgattttagcttgtccatctaacccttcgattctgcggggtaatcctgcagataggctatcctttttctctagttccaacataggaagggccaggggcaatggtcctgtccccttgcctaatgcgtctctatacggcggtagtcaagagatgcacccactgagctctagtctccccctcagggttttcaaatcaacgtatttaaacgcggtaaacataccaggcctaccatctacctctgcagagcatcttcatcttcgtctctgttgaatagcgaaaaatccgagaaaagacatcctagctttacaacccatattccacgcgccatgtcgtcgtcaaacttcaccttctacaattaccccggcaccgaagccaattcagaatccttccactactcgcaagccgtcaaagtcggcaacattgttaagacttccggccagggcggctggacacaggacggcagtatcccctcggacatcgagagacaagtcgcgctcgcctttgagaatgtcgagaatg

SEQ ID NO: 6898 - DNA, 569 bp, Emericella nidulans
aaaaagaacctctgttatcatttcagtttctttcgacaaggatgcgccgaggtcttgagcgcgactgagtgtttggtcagaggagctgaaagacagcactaagaaatcccctcaacgtatggaacatcaacatcatgactgtgggtttttacgagccagtctcatacctacgattccctcatcaggaaccagctgagttgcacacgcacgccctcaggcctaggacgactactcggcgtgcccggactgaggagaggacagagaagaactgagtgcaggtgcttggacatagagctgctagtacgactgtacggagttgtacggtggaatgatgtaaagtaccgctaaaaccgatacgggcaagcggacagccagtcgcccttgctgtgcccccttcacttgagcaagcgctggtaagaatcgtggcccgctttgcggtcggtcggtcgcctcgctctctcctactactactctcccctcatcctctctctctctctctgctctccctcactacgctcatccatacattttcgctcccatacaaaaagtacaccgcataggtgagtata

SEQ ID NO: 6899 - DNA, 647 bp, Emericella nidulans
  unsure (1)..(647): unsure at all n locations
aggtagaccaagncccaatattggcattaaccaacaataaatcacttaaatttgtcattaatccgaaaggaatactgcctatggactaaggagatcatagaggacagactcgagaagctagtcgctattactactcatttgtttatctttgctgccgctgcttgtctttccttgaagactaagggttctcaccagaggagtgcctgccttaagattggccttaagcagtacccctgcagtctgccacacttgaacattttgcattgagacaaatagccagtgttcaggaaattgtcctctcttttttctgaggaaatttggggagctttaaaatttggtgtgtttcctaacaataggttcttttttgggaccccaaaactggtaattcttgaaacccttaaaactctttctcaatctgggttttttaaaggggtgaaaaaaaacgttttaacctcctctgaagtgcttattatgtggggaacacccaaaccccgttttaaaaccccgcgtgagggcgcctaatcgggtttttccttctcgtttttctcaacagctgtttttttacaccttctttcctgtttttatatacgtgggtgccctccttcttcccaactttgttatttttactattctctccccccctcact

SEQ ID NO: 6900 - DNA, 655 bp, Emericella nidulans
ccaggcgaatgaaatggttgcgcaggagcgaaggcccgggctaggcttgaggaaagggtcgcggttttggagagacgggatattgaaaaaagaaatcgattggagagattggaaaaagcaatggagagggttgagcggattagggcgttggttgggtaggctttcattcggtcttgcattgctcaataaagcgcgctggaggagtggagttggtcttcttgctttctgggctttgattgatatatataccctgagactcgctggttgtgcatgagtttgtttatttttatctgcgatggacgggatttatgagttacgattacgtgcatggttatggatggatacggatatgaatacctgggctcaatttttctcgttttgttatggattcaggcgttatatactcctagctgttgattatatatcattaaagaaccctctgagcttttcttagtcccttgactctcttctacagtctcaccgtcctccaatacactcacgtctattttgaataacgtcccaacatacttgtaacccgaagtaattaacgaccacgcctaccagacctattattcgatatccttacttcttctctctataagaagtcgccgttgtgacaagcaaacccaccgctgtaaccgcaccgatgccccca

SEQ ID NO: 6901 - DNA, 555 bp, Emericella nidulans
tcctcgattacatgctcttcatgcaggagtaagtcaatcaagtcttattacctttctcctctagtcctccgatcccgattttacaccacacctagcgcatacctctgcgatctacaattgaacatttctgacgatagcaggctgatgcgtgaagcttcaattcgatcgcataaggctggcgaaaagagtatcagtccgaactctgttcgcaaagtgacggaggtttgtgccgatgcgcgcgacagttcgaagcataatactgacaggatctggtgttgtagaaaacgctacggaagttcaaaggatgattgagaatcgattcccttgcaatagacgcttgcacagaattacgcattttgtttggggtatggaacattggcgcagaactgaagaattgtcattataatttaagctggatgaagtcggatatcagggcctagtggagtttctggcgtcatttttttctaggaaccatgatacccaattcaatgatcacttgtataccataaattgctgcttcacgttggtggtttactcggcagagtctcgtatgtg

SEQ ID NO: 6902 - DNA, 972 bp, Emericella nidulans
ccaaatcgcgtcagacaatgcttttctccgcgaccatgactgattccgttgacaagcttatccgcgtcggactgaaccgtccggtccggctgatggtcgatacgaagaagaacaccgctgtgactctcgttcaggagttcgtgcgtctacgacccggccgtgaggataagcgactgggctatctcctccatctgtgcaaggaggtctacacaggacgagtgattgttttcttccgccaaaagaaagaagcgcatcgggtgcgcattgtatttggactccttgggcttaaagccgcagagcttcacggtagcatgagccaagaacaggttagtcctgaggcccctaaagatgtcaataacagctgctgacatgccacagcgaatcaaaagcgtcgagagtttccgagacggaaatgtgaacttccttcttgccacagatctcgcctctcgtggtctcgatatcaaaggcgtcgaaactgtcatcaactacgaagccccgcaaagccacgaaatttacgtccaccgtgtcggtcgaacagcgcgtgccggtcgttccggtcgcgcctgtaccatcgcagctgaaccagaccgcaaggttgtcaaggcagctgttaaggctggtaaagcacaaggcgccaagattgtcagccgcgtagttgacccgtctgtcgctgacgactgggcctccaaagcgaaagacatggaggaggagattgacgctgtgctggaagaggagaagctggagaagcagcttgcgcaggcggagatgcaggtgacgaagggcgagaacctgattaagcacgaggcggagatcaagtcgaggccaaagcgtacgtggtttgagacagagagagagaagcgtgttgcgaagaagatcggggccgcggagttgaatggtcccagcaaaaaggagaaggttaagctgagtaataaagataagaagcggttggatgctgcgaagttgaggcaggag

SEQ ID NO: 6903 - DNA, 569 bp, Emericella nidulans
gggttacttaaccgggaaagaccacaagctacgatctccaaccacatctctacttctacggttgcgaagtagatggacagacattcggtcttggagcacttctcgacttcaaagcgctcaaaccgaaccattaccacacaaccttgtatccttgtttagcttccgacagcctctactcgtttagaagatatgcacccaattctccgtccaaaatcctatcacaaacgactgcttaccctccagcattggaccgcgctgagaccgagcacaagtagaaaaacacaatcagcttcacattcatggtcaatgagaagtccaactgtcctgcaaactgctagagcaagaagaatacacactgggccgataccacgaacgcctccaagcatgtccaacgagccaaaagttgacctggccatgtttctcggtccgtccttgccagaccacgtctacaacttctggttccagcatgttgccgaagacgcgaacctcacccttccgacgttagacatgttcaaaccgtggcttacaaaagatgcggtgttcgacctggaatgcgcgtgagtctgcat

SEQ ID NO: 6904 - DNA, 1221 bp, Emericella nidulans
  unsure (1)..(1221): unsure at all n locations
actggaggagaatgtagagtctctgaaggtgcaatttacggaagaggaagagagaaggtttcggagcattatcagcgaacgtgaggttgctgggggccgatatccagatgcctatgcagggacgctgtatgttgatactgtgctgccggagtgattgcgtctctacaattgtaaaaatattacaaatgataacttgatctacactgaaaatatactgacaatgcatagaaaggagacctttgatcttgtttcgactcatttcaaagccttatagacctgcatcttgatcttgagctttggggatgaaccccccacatatagctgcatacggatgatgctggcagcaactgtgagttgacggcgaacatgcaagggagcgtcgggttgatcgttcagctcgacgagctagtcgagaatgcccttcataagcaccgccacagccacttgccgctgcccctgcacctgcacggactaatcgcctacctacgagaggactagctggtgcctagctggcttagcctattttaatgcctaccgtaccccgctcagataatcacgtaagccagaacaggttctgtgtgataaagagcctcaaatatgttatggctgagcgaccacatcaagcatacagatgatcacaacgacctccttaagacaatatgcctactacttgagactacagacacagaatctactttgcttacngtatcaatatgcacttatagcaaataggcaaagcgatgcccccacaacgcagtatcttcggggttgcaaagctttccgggtcagatggcaaatcaacgagaggggctatgcgaatgtcatcgaggcgtcggctgagtctcgagcgagtcactacagttcagggctctgctatctatcggcgccgagatgaactgactgatcgtgtcagggcgtcccgccgcatatagaaagagtgcttaggtgggctagtctgcgagtcaatctggttgcagagagtgatgagatgcagtttcttgtgaaactgaagttgatctgactgtgaacccaatgtgaagatcctttttacaagattttaaggtgtcccaaaagcattgtgtagagcattggataggatcctgactggtgcaagagttccggtttaaagagttttggtttttggatgggtgtgctccttttcctcccccccaaaaaaaattttggctctctcccccgaatttttttttttattaaaagaaa

SEQ ID NO: 6905 - DNA, 501 bp, Emericella nidulans
ccagcttggttgatcagttgatcagctcatatgagaaagggaaaagctaaaggacaaacttccgacttagcaaaaccgctgctcaccaggaaaaaaaaggtggaaaaggttgctgagggataaattgcatgaacaaggctgggagatttgaaaggtaacagttaattcgataaggagaaccaaatacgacaacacagagcgcctcaggctcgaaaggcatcaagttcaaaagatcaagacgactgtttggaccctatcgtgacacttcactcaccatccctgtccgagctgcaatgatactctagcctaccgcaaacacagagatggccacttgggtgactcaattgttcgccctcaaggagttgctctccagtacggtgttgatctgcgctctctaaacggtatttgcgataactgcctcgcgtcccataccaccggagcctgggagggagaggatgacggcggccagtatgtgtatgacccattaacattgctatgcat

SEQ ID NO: 6906 - DNA, 449 bp, Emericella nidulans
cgggaaagccgcaaacgaactacttacgtaataatactcttttaatctttttccggggcgccggacataaacgggggattgagggcccaacaacgaaccatggctcttgtacgcaacttggattgcagcgactggggtcttaactgctgttccatactgtaccaagtgcctgaggccatcctatcatgtctaaggtggacggtatccagccatttgctgttcacaagcatttggaggggtgcattaacaacgttatgatccatcacgttcaacgaacttgacctttcaaccttgtgctctctacttactactatgtgtaacccagactgggcctaaaattgcgacctgccatgtgagtatgttaccagcaccgagtgaacttagaggcttgatcattagagtgactgcagagtgcatgttacaataccagagctgactgatgtaaagaa

SEQ ID NO: 6907 - DNA, 585 bp, Emericella nidulans
gctcccaatgctatttcgaattaaattggaagctgattgaaatccttttctcggtgagcatccgatggcggtcgcagcgatttattcgtttcttctggatcggcatcaagctctagatttcaacggatccttaactgtgaacatattgaaggtaagtagtcgcatcttttttcgccgattcacaactttagctaattataatctcaagctacttgctcggttcgtcaccatggatgacgacaccctcactaaaacaaatgtcgccaaggtgcttccaaggttcgcgaaaaagggaagtgcggaagtaaaagccctcgcacaaactatacaggccaacgccgctgcatccaccaagcgcaagcaggagaacgggaagccgggctcaaaagaaggctcgccagctaaacctccggtgtcaggtgccgcagtcgtaaatggggctcgtagggatacctctggctctaaacgaccacgagatggagaggccaacggacagacggctccaaggaaagtagtagtgacgttcaatcctaaaccccgtccgaaacccagcggcgcctctaccaatggctccgtcaaacgcac

SEQ ID NO: 6908 - DNA, 837 bp, Emericella nidulans
atcaccgtcaattacattctctctagctattaatgctgtctcggccgaaatttataacactgtaaccatacactagagcaattattggtatcaccagtaacagaactcctgagataggagaccatccggacactaaagcccgtgtccaaccgggtcccggaaacggcatcggaacataatccaagcatggagcaggagcaataatacggctgaaggtgtgcagggccgcgcccggcgtgtatggatacacatatcgccctattatctttttgatccgcccttgtcgggcgtggacacgggtgacagaccgagatatagcgtgcactgcccgcaaacgcttctgctggcgcacggtgtacccctgtaatagccggttgatgtcatcctcggatggtttgtcaatctgactgatcctgcgcaacgtgtttgctagcgcagagcaccctcgatcgcagtatttgctccctgcgccatgttgggggtcatctgaacaactagtcagtgacggggcaccaggccaagaatcactggggatgagaaggagagcgagaaccggagagggtagcccaccttgctgacgctgtccccaagacacacgattcgtccatggtgccaaatctggaacaggccttcttccagtattgtgaaggagtacttcggtgtatttaccacaggtcatggaatttcagatctttgcataggccaaggccggcgtggcatcttggccataataagggctgtttcgccgtccgaggattgagttgttgccggagagttgcatggcctgttcagcttctggatgagccccatccaatgtgtgcgtctttgccgggaaag

SEQ ID NO: 6909 - DNA, 355 bp, Emericella nidulans
  unsure (1)..(355): unsure at all n locations
ctggcgacgtactcgggtctataacttcgctaacaggtgtcctgcctctaacaagttattctcataaggcatgttttgataaaggcgtactcgtgaattgaacattacattacggctcttactttccacgtcacagctgactactcaacatacttacggagggggccgcgactgctcgtgcagcgacgcaaataatccgctgacatgctggtgcggaactctttnctaatcacaaaaggcgatgattcacgccttgactaaccgattcttcgcgacctaggcccaaactgaagaaacacacccgatgatcatgcggccgcagcaccgagcaccgctgacgctgcagctcaactaa

SEQ ID NO: 6910 - DNA, 674 bp, Emericella nidulans
ggcagctttaaccagggtatccccggccgcgattcggtctatggccgtactggatcggcacagccttctgagagccagcagtcggctgcaggtgccagcgcctttgggacaggcatgactgatgtctttgggcgcagtcaggccgggttcggacaaaaccagcccatcgcccagcagactcccgtttcatcggaagaaaccaaggcttttgacgcttccaagaccggtggaccaagtccttcgctgtcccaggccaaccgccctggttccgcgaccaacactccaggccaatcccagagccagaccggtcttccccgctgcagggtcagcaaacacagcagggctttggtggttaccctcacctgaaccctcagtacggtggtcttgacggcctcggcgggcaccagacagctgccaaccagacccatcaccaggcgaccgggtatggcaactacggtggtgccggcttcggtaactactacgggaacactggacgaggtggctggggtggtaactatggtcactaaaggatcaagctctgatgttccgaggtaatgaatccttcctttttcatactactgtcagggcgcggatgatccctggactctacatcccagtagagctcactttggcgtgtgccgtttctctatactattgtctaaatcgctctccgg

SEQ ID NO: 6911 - DNA, 947 bp, Emericella nidulans
  unsure (1)..(947): unsure at all n locations
ttaaccacgtgatttcccaaataattccgtcctttcagacgaacttccttactaatcgcgcaaacactagtctagttcaggaaaggtggtttttcggggagagcttcgccgacgaatttctaagagctcgtgttgaaagcaatgcttgaggatcactgctgctttcctcatcggcaattctcaaatactgctacttgagcgcggatgagacaggatgattaggttgtgctcgaatcctccgcatcattttccgtttcagactgatgcgaccggctcttctccgattgttgaagaggccatcggcactctcagtccttgattccctggtttcgtctccgcctggtattgaacatctggagtctcgattgcataaaacatgctttcattgctattcttccctgtcagcgtcctcgaatcctcagttccgcacaccgcgactgccgccggaggataaagattctgatgtctctacgattccttcgaattttcactttcaccccattcaaatacagccagcaaatcctaccctcgaaaatgagattacgggtaatgcgaacggacagcaatcattatggaaggatttagggacacagctggagagattggattacgagtctgatgttggtcataccgatgatgtcggcacgcgcttggtggatgacccagcacatcggaacgattttgagctttggctagagctgctgcggtaccgccagcgtcactatggagacattggcactttgcacatctgggagggaatgactaaccggtgggtgggctgcagcttcctgtggacggagagtctgcagaatcttctngcagagctttgngattaccgcctaaatgcgaggcgacttaaacaggtgtggatacgcgtggactggacaatgacagtaacttgcccaactttacaagcttgtggactttgaaacttggatgcaacaact

SEQ ID NO: 6912 - DNA, 473 bp, Emericella nidulans
gatgctggcgtgcttatttctgtccaggctggtcccccgccccagctgaggacgtaccttcatggcccatccgaacccttttttggtctctctagcctgactctcgctctctttcgcttccgattaccagttgcgtgctatcgaaaggaaaaaaagtgaagaaaaagcaatcagggtcagggcccggccgatagctgtcgctcctctctcctccccccacacgtggctcttgaggctctagtgccataactatatatatatatatgcttaacggtagcttgtcaattgcactccatcatcctcttgagttggcgttctgttctagtccttcgcaggtccagatcagcccacttgatatacttccatctcagaccagctcgcgactccgaaatgtccacccgcagaggccagtcttcacggaagcgtccctcgcacctgcctgcgattgacccaaggatgatgtgacactttga

SEQ ID NO: 6913 - DNA, 545 bp, Emericella nidulans
cgttgtccatcggctccgagcttgctcttttatgccgtcccagctgactattctcttcctctgtatctgtgtatcactgggagtggcagtggcactggtatcgaggggatcaatgcctgtatccgtgtccacgccgacatcctcatctgaaccgacgtctgactcaaagtcgggttctgaagcgtaccgcacgtgaactgtatgcgggatgtttgtacctgggaaggcatagacattgtcatccgtgtcgtgtgtatcgtcgtcgttgttgtctacgcggtccccttccatgttcattcgctttgtcttgaggaatgggatcgaaagacgaaagacgtacttggatttgacgcgctggctaactcccatttttcttcaagaatttcttgtatccgacaaaagtgggtggatggcaggtaagaagtgtgtcaattggagtacaggcaatctccttgttcgtctcgtccggtctgacttgtttcttgcagaccctaagaatgaaaatgacgactgtgggcaagcaagcccaggcgcataattatata

SEQ ID NO: 6914 - DNA, 455 bp, Emericella nidulans
aagccctacactgtcaaacccttagacctaacaaccaaattttcatgtttttcgaacacaccaaacaaacgggggagggttaatttcacaccttcaacagtaccactcacaatcaacactgactcgcgtgcctatcccataataggcaacacctttaacacagtggacaaaatttcaaccattagacttggtacatgccaatcccaagccaaacgagggaatagaagctctacaaaacgccttactcaacgagcaccggcacatggatgcttaagtaacatactaatactttgacaaacaaaacctgactgcaattcatatcgcgctagagtacatccacgaagctgaagccaaacaaggtatcaccgatgttgcaaatcctaccgaggagatctggctcaccactaagttggccaacatctgacaccaacgtttaatcaaaagcttcaacagct

SEQ ID NO: 6915 - DNA, 571 bp, Emericella nidulans
cacacgcataatttttccggccaaaaaacggcaaatttgatttcgcaaaacgaccagtcaatgctggtggatgggggagtaatggctagtcagccaaggtatagcacgcatagctcacacgaagaacgaacagaggtgtactatggcgtctaaaaactgtaccatcatctttaaaagacgaagtgcatgcaaaccagaaaatcaaccgtcaagatctggtcgataaggagcgagctgaccccaagtattaacctaccatgcatcacgagcttgaatcaatgaaacgatatgaggactgccagcacgctatagctccaggagcgctgacctatattcttgctaatgcacacgaaaccactatagctgatgcccggaattgccggccttttcaagggataggcactcacactaaagggcatcaatgcgtcggcagatccactacaatggtgaacggcgaatgactgcgacatgccatgcaaccacggccggctgggccgcacgctcttagaacatgctccaaatgcgctgagccagacgacatggacgaccgcatgtccctgggtctgccgac

SEQ ID NO: 6916 - DNA, 498 bp, Emericella nidulans
cataatggtcagatggattttctataggtaactgcctgccatgactttggtgtcatcgcctctctcaccttgtcagtaaatgtcactttaccttcatcctgatgatgactgtcttgcattctcgatgacgctgtgcttcacgcagcgatcctcagctccagacctgcctgacagcatcctctgcccataaacacacgtacttctgaaaagaaagatctacaggtaggacacagctgtcttagccctgggtttgtactgacacagatttccagcctacttatttagacagtctttctcaagtgtttgctgggctttcttattattcatatataaacagaaattagtgtgtggcatcactttctgtctttttactttcagtctatgcccttatatctcgttgtgtctgtaaatatatagttgcttttcttggagaccaatctgcctttcagatatctagtttcttgctatttatcatgcgtgctgatgtatctgagttta

SEQ ID NO: 6917 - DNA, 586 bp, Emericella nidulans
gaacaccgtggaaggggtcattgctgagggtcatgtcagtatacgaaggaaaaagtagtggataagggacagtgaattttgcccttttagcgcattcttgcatttcttctccccttctagcgaagcgaattattcaatcagtctggagtgcggggttgctatcagtcatccctcggactccaactgtccagggttgcatccgagtattcacattctatcgagtaagcttgcaaaaatgaaacctcccagtacctccagcggtgaccaatccaggtgttctacgttttgcacagtaccaattcaagaaaaactctttggtagaaatcaccatcgaccgccctataaagtcagggctaagatggccgcttgtgggccggcaatgtatatagatagaatgcaaaactataggattctggttcggcttgaggtatcgaccggtcgatttgccaatgtttattctcatcctcctccattaacacaaagtgcactataaagtgcattccaatgttctgcacagattgatgttcttgtgccacattcgaatgcttcgaaaccacatttacggtgatcgccctacgatctaata

SEQ ID NO: 6918 - DNA, 842 bp, Emericella nidulans
agggtatctatatagaggcgcttagagtgcagactaagtcgtctacgtatcactgatttccatcagtttgtcacggaagggtagtgttatcatcgttgggtatataaaacagccccagctgaattttcagagtttagaacagacttccatccccaattgagtagctcctacatatttcaatgctcagacctccaccttttccctgttatatgcaagaataccgtcggcgcaaagctacacccgacaatcagcgccgtcacgacccccgagctctttgcaacgcccacgctctcaaacatcgacgggaaccaaaacggaccgataaacccccacgtcgaccgaacaaaattgataaagacccctacaccaccggcatcttgcggataggtgtcgaccgcatacgtcgtcaacacggttgtaacaacttggttcccgaacgccccaaccccagtccctacaatgggcgcgacccgccactgtccctcgggggaatgctcagtgcagacgagaaagacaaccatgccggcaatagtaaccaggtacccgaagtagctgagccagagacggaactcgggtgggggacggccggcatttttggttctgtgcatgaagtgtcctgcgcggctcatccagagatcagacatgacaccgcccatctgttcgccgaggagggagccgatgatgagcccgaggaactggaggccgagttgctgcgcgttgagggcgaatttctcttgaggagttgtgggacttcgacccgagtgagcacggaggcgaagaggaagaccatgctgtaggcgactgcggatagcagaacaggaatattggcgacagcgacaacg

SEQ ID NO: 6919 - DNA, 782 bp, Emericella nidulans
tgtcctttgtgctgaccggaaatccgcccccaacctcacatgctggccataaaagccgagaatgatacaaggttgcacccgaggctctttggaacagtggacgtactatgtttatccagggtctcattacccctcctaccgaatatgcttatgcccagctagaaaagagaaccgctagcgcaatgtgaatatctgttagccatagcatgttaaaaggacagtaaggcctcgcgtttttagtccaaagccctcggaccctttgtgcctggtagctctgcctcacaatacatttaaccagcattccgtgaattggaaatcaaagctccaagccacctgcataagggtcggatcaatcgcggttccatcgatattattgcggcgtgggcgttgagttcccaacgccggcatgcaaccaatctgagtaagaagattcttcttggggcactgatggacgagtggcccctggttaagaatgtgctcatgaaatgctgaacctcttctttcggattcatttatgcttttgtatgtatcggcaatgttgaatttgcggagtcgctcgtgaaaggttggggcttaagctgccagactgggggttatgctgcaaggttataggcgttacttctagcccactggaagcaagactcgctagaattccaaaaaaaggtattggatatggacaacttgaaaccttgagtctgccgagcccggccattatacctacgaactatcttattttgtgaactaacctatgaaaggagatcagtttttgagtttagtataag

SEQ ID NO: 6920 - DNA, 620 bp, Emericella nidulans
ttccacagccaatggcgcgatgcttcccaaaggccaacttctcaatttcattgtggtcatggttgtgaaaagaacagagttgatatagtcccccgagctatcgatgcaggctggaagaggaccacaggatgttgacaatgggcatggagtttagacagagcaaaagacgaggtcagaagtggttcatgatggggaggaggaagaggaaggaaagatgggggcggcacggggaaacaaattaggaagggttacaatgtcactttataaagccctcaattgctcacttcattcttcagcccccagcccttttggaagacctagtgtcaatggctcgtacggaaagtccatgacttgcgggcagaagtaagccttttcttcagcgctgtgagcggatccaaatggaaaacatcacccaaccaggaggtcctgcttgctgcatatttcatattctgaattgactctcacagaggggtactaaaatgtagcgtgcaatttgaagttgaggttcacactaaagccggtattgtccgccacatggtgggcttgtaaggactagtttttgcggacttatgcataaagggtacttctgtctctcccatatctttctaactcagttttat

SEQ ID NO: 6921 - DNA, 489 bp, Emericella nidulans
tcctcaaggttgccataagctattacacaaccgactttatccagttcattatcgatcatcgtcatgatatgcttcgaagtctgctcatggcaacaaacgtggatgagatgaactgccttcattatgccttcaaagagacactgattgcagtaatgccatggaccaacaaaaagtctgacaagttcatatcgactatgtcaatgatcacaaaactgctggaatatgcagatagcgagattgtcaccgcaaaagatgcccttgggaacacaccaatccactatgccatggattacagactatgccacattggtggcgagtaccgatttgacgggcatgaccatagatacgaagatgtcattcgaacgctcctaagcaaagctgagcctgcgatgaagaagccagatgtactgttcaattgtcgtcatcgttctccttatcgcttttactttctcgtcgaggccggcatcgaggaacttaaaaagcaagagg

SEQ ID NO: 6922 - DNA, 517 bp, Emericella nidulans
acgacgtcgctcctgcccctaccttcaaaacccgccggaagagaagcttgctctgcagcccgtgcccagtttcagtgttacaaaataatccggagtcccgacctgagccaagagtcccatctttatatccgaacaggtctcaacgtcgccggcagccctcgactgaacgcttgctaaatccacgccagaaccgcttatctgccccaaattatcacatcggcgtttgctccgaatcgtccctcgatataccgctcgctagaaaccttcctcttgacaatattaccactctctcctgacgatctgtttaagactcaaaggcacaccgcatacttgttagttgcatttcgggtggacggccggagggcaatcgacagtctacgagggtggaggtgtttcgagcggtaacgtggcctggctggacattggaatcgtacgctggaaaacttcgtgccgtcactactgattttgtctgacaattaagtctggtttatgtctgttcgttcgatattttgagatc

SEQ ID NO: 6923 - DNA, 615 bp, Emericella nidulans
ctactatggggagaccaagcttaggatccatcactcaattttctctgacaggacctggctaatcctggccgtttttcacctatacgtatacaaaatctgcaagtgtgatattgtaaaaaagaaaaagcgcccaaacagtactcagctagctgaagcagcgatccacggttagacagaacgcccaccggaggctgcgcaataccagcgtggtttcataggacatgacatcttgaattccttatacatggaatgcgttgtgctgattctcggaaagaggatcggtctcttaggttaaggaccaatgattccatctggctctccgcggtcccctacaattgccagatttaaagaaatggcggaaaaatactggataacaattatttttttatttaagggtttatttgcccccctctctttaggcttaaaaggatttttggcaatgtttgataaccaattgctttgtgggttgcctccggtaacctaatgaagacccctgcctcttcctgtaaatgtgattttacttttttaattgaaaatgtatgaacgttaaaaggaattattgtttggttaaatcttatcatacctcctttgtatattcatgttgtatctgatttt

SEQ ID NO: 6924 - DNA, 518 bp, Emericella nidulans
ctgctgaattaggggtgggcagatggtgagcgtcatgaagatggagaataggcgagactgcatgtcaatatagctgttgccaagatgccagaaagtgaaggtgttgaagaggccggtaaatatatgaagagcgaatttaccctttagggatcttgttagtatcatctctcaatgcatgtgatgggtttacttgtaagggtagaggggcgggcgtacgatgttgtactggggtgtcctccaatacgcagtgaaagagcgcttggtaacagccagaatctgtacccatattggcattgcgtattcacggtcatcgtctttatttcgttctttctcattgttccggcgcatttcaaccaccttgttaatttcgtcggagagcttcttgcagttctctgagttggcccagacgtcgccccagtcctggcctttgtagtttggatctccggcgccgataacctcaagcatatactggacgttattagaaaaggcccatccctatgaactgtggtggcgagacg

SEQ ID NO: 6925 - DNA, 511 bp, Emericella nidulans
tggagttgggtgaccaagacgcaccacgggagcgagaggctcttgcacggacactcttgacctcagactatcgttgacggcttaaggcgtacagtagactcagctgagctatgcctagcctttagtctctgaaactctgatttggtttctaaaactctgagagccactcctgattctgaaacctcgtcttagcgggagaagaaacctcagtttactgaagaaatgagtttagatgaatgtaaaacctgttgaactatgaacgtttagttcttggcgtataattaaaggacaagatcagaaacagattaaatcaaaacctgtcaatactccgagggaccccagaaactccactgagtacgatgcaacgatcccttactccgtccatgatgagagtcaagaaacaccgcggaaggatgagatactccagtcgaagtaagatcaggctgcagacgcatgaaccaatccattccattccctcccaagcactccgatacgtatgatagagcagatc

SEQ ID NO: 6926 - DNA, 491 bp, Emericella nidulans
aagaaagacgtcgacgcgaaactgctggcgctgggcgtacagcaaccgcgctcgctgcttcgtctcccggccgcagtcgccgtgtcggggaagtatttgttggccaaggttcgcgctccggtcgatcggactatacctcctccgctagcaacgatgacgagtgggaggacatggattcggagggacaggcgtcgagcgtcagttccgccctggcattcggcacaagtggacattttgcgcgtgaagactcccactcgtcagattcgtctagttctggatggggctggggatggggatcaaagagcaagaaaacgaagaacaaatcgaagaggcggccaagctcgcccaaagaccgcttccccgctggtactgctactgccgtaatgactggagcattgggggcagcgtcttctgggtatcatcgaggagataaggagtctagcacgagctcagcgagtcttcaacacgtggccccagtacctacttcggat

SEQ ID NO: 6927 - DNA, 743 bp, Emericella nidulans
cggcatcgttgccgggacaaccctgttggcaagatatcgatcggcggatataagcacatgacgtggtagatcacctactggaacttgatccggggcttcttggagcttgagcacttgctgatccacaaactgggacttttcgtgggcaacaacgtatgggtcaagggggcactgggtgtcgggctcttcaccgggttggcgctcacgaccgcaccggcttggaagtgttaggccggagaaaccaccctcgacccggatattctcagcgtgatcgcaagatttgcagcgaatgtggacggtcgttgctttggaggatattgttgaggcaccgattacgatacctgggatacggacaaggtgggagatattcgttgcattcaggtcgcgaatggagatgtgagtggctgaagagtggagcagaagttggtgggttggaagcacgatatctcgttgcgagggatagacaattcgctgagtacattgctgcagagctgcctcaaactaagttatcatatgtcagtaagtcttcgccactcagccaagggagggctacttaccagagggataatatctgcaggttcggtggtgagcttgtgggccaactcttcgttgtaggaaatcaggtgggcaatatcgatgtcgcagtaataatgtttgacgagaagattttggcgtaattgatccctgaacctggttagcattgcaatgggctcgtcgaatcttttccgcatccaggtagatga

SEQ ID NO: 6928 - DNA, 925 bp, Emericella nidulans
  unsure (1)..(925): unsure at all n locations
agttggacttaccaagacggaatcaagcatatctacaactcccggccgcaagaagcagccatgattgcctctatgcatggcccacgtggcttgcccaatcctttcacctgggcaccaaagtaccttgcccagctccagggtaaaagctggaaccctactattttaaatgcgaatcgtttggcttggtgggaaagtggtattctgcttccgttctgaagttggtgcgtgcttgtttatacgagcaaccaggtagagatgataaattagcattcgagctcctcatcggtaacagcacgggagacactgagcctgtcgtggtcgttacttggagcaaggactacactaccgatttgtctaagtggacagagttgatatctgattgcaagtcgagactgctgtgtgcggacgagatcgtggtaggcgaaacgtttcgacagtgcttcttggggtctgcgaaggtgatatcgagcctgattacggcctgggggctggtgctatgggatatgttcttgcaagcggagttctcgtatcacgaaatatgcattctgtccctaagacatggctgctaaagtgatgcgagtgaacgcagatcctttacagacaggatacgtcttaggcagggacaagtggcttgcatatagctcaggaccatacatagttatcgcgagatcaatcccccctctgtttcttttctgtaggtaggtatatacttggaacagaacaacctctctggaaactagctctgtgatgctttcggccggngctggtgagacattaaattagttgtggaaatagcagttggttaccagacctttacatcagttagcatgccagttggtcaatgcaggaagtttctgtctgtctctgtctagtccgaagcccggattctttggtgaggtactatggttgcgtggggtttatagcg

SEQ ID NO: 6929 - DNA, 545 bp, Emericella nidulans
ctcttctgattcctccttgtgctgcaccaactccgctggcgtcgccttttccaggtaacatctgtttgtctacatcaagtcagatccagtccaaacatggcgttgtcgctacttcttactcttaacataataggaacctggcccagttccctaacctgctccgtccagtctccattgttgacgcgatactcaatcttcgcgcggagttttccacgatatgtcgcatgcctttctctgcactcagacgggtagatattgcggttgcgagcggtatatttgttcgtcagaggaatcgtcggcttctcgaggaaaacttccttgatgcgaacgtggagtttattccgcctgggcgctctccggccctccgctagacgctgttgcttttgttcggcagtttcgacaacctcgtcaagaaacgtcctggtgccaatatccttcagaccggcctcgatgattccgccttctcgaacagggcattgaacgagtcgacatggggcttgatagattcggcgagggaagggtatgcggtcttgtcctggggaggg

SEQ ID NO: 6930 - DNA, 534 bp, Emericella nidulans
aagtcggccatcagaacccctttttacagggtggctttaaaccaacccctgcccagtaccggaagatgcttcagaaagctggcccgaacaaccccaatcctgatggttggcgaatcatctctaaattcggagttgaccatgttcccaagttccaaaaccccccacgcgaagatggaattgcaaaggctactcggaaacgcaaggctgctgaacttgaagcggctagtcgagccaacgagtctgatgaagctgcagttgccgaaactgctacgcccgctgagcccgaccaagattccgcaaaacgccgttcccgcaaccgtcgccaaggtgacgaaccaaatgccgagaatggacggagctccaccccacgaggtcggggtggtcgacctcgcggaaggggtgcagctcgtggaggttcgcgtgctgcttcagaggcccgctggcgccacgcctgcagccggaaaccggctggctcaacacctgtatcagagggcttacacaagcacgaacaggggtctacagttggtccaattg

SEQ ID NO: 6931 - DNA, 534 bp, Emericella nidulans
caataccgacggcctgctaaggaatgtgccatgcacctccaaaattctgcaaagagggttgttttgacgcccaactatggagaaagcgagctgacataaaacctcatgacacccggtgcggataggctttgaggccgacgtggtggacccggctgtcactcacaaggacaatgatcatgcagcctgtggtgccaaatgcgcactgcacatctggaacgagatcgtgctctgaccaaacttcgaggaggacgataaccgcaatggccgctgacagtctcaatgtgctgtcatccgacgcccataccttgctgaagaactgcaacctgtgccatctgggacagtgggtacatatgcagatacaacacgaagacattgctgccgacctacagaatggcacctagagtgcttatgatcggaccatatatagcaccgcgtatgacggtatgacaacgacctggcagaaactgtggctctatcatggagagaccgtgttggtcctatcaaccgtataagagactcgctcagtatagctgc

SEQ ID NO: 6932 - DNA, 509 bp, Emericella nidulans
  unsure (1)..(509): unsure at all n locations
aaaaaaaaaatggacccgtctggcatcncctcgccggttataaacgccaaagcctggccaggatggcacaaaagctatgaaaccattttttctgctttcaacaatactatgaaatgcaggggggaatgggaaaactagaaggccacacttataatcctaaaccacgactgtgtaaacctggactcactcaactattacatcgaacataaccgcttgacaaacacaggtcagtgtacaccataacaagcgcgagaacatcctcgacattgctaaagactataagaatatctgtctgaccgctacgactccaacacataatacacactagccagacgtcatcatgtattccaccaaatgacactcctgaccacgagaactttgatggaaactattcgaaacaaaggtgcactttcatcctgtagatgaatgaccaaacactgctaaaggaacttcaaactatattcgagcaatatatcccgaaactctgtacgggcatgagcttcaggatg

SEQ ID NO: 6933 - DNA, 756 bp, Emericella nidulans
ataggttgtggtggctaaacggaacgcatagcataagatatttaggttgcttatatatagatgatggacacagtatcggattggttagcatgcatatagaacattaatacagcacccgtctattttccaacccggccattcgctatatactcttttagctgccaaaccagagccgagcgacgcccaaagtcatgcttgttcatcggcacgaccacactttcctctaaaccaaaacatcatagcacgagacgtaaaggagaatattacctcaatacaccaccgacacccgcccaacccaacacaaacccactaagggcctcccctagcacgccacctccaaaccacacatccctccaggcacccttccgcataccactccctgcattcttaacaatgccatctttttgcaccacaagaccctcaatttcgcctcccgcgccaggaaagtacccacctgcgcctttccccgccgatcggtagaggagcgcgagatggaagagaccagagactgtgatcgtaccgaggaagtagaaaatgaagccggcggcggattgaagcgctaggattcctgctgttaaaccgaggaggaaggaggtcagggagtgaagctgggtgaggacctggaatcgaccttattagttcagtttgactttaatggcataggcggtgggactgactcggttattgtgttggacggattcgggaacaagcggattgatgaggagggagagtcactgttttgttggaggcattttg

SEQ ID NO: 6934 - DNA, 447 bp, Emericella nidulans
gattgttccgttcttcaactgtcggtaatgatgcaatgaggccgttgatcaggtcgatgtgagcggcgaggtaattagttgcgtcccactctacgccgccgacgtagggcgcggcaggaacagggggacgaggtgcgggaaagtgacgctcacggtaactttccaggcttttatcagattgcaccacggggattacgttgaggtggtgcagaaagatccagaagacctccttggtgacgttggaaatttccttgcaccagacgcggtaggggcgggattggtagatattggcgatgaatgagagcggttgattttcttctggggggtctcggaggtatgagaggatacggttggtgcgggctgcaccgtcctcagcggacctgctgtggaaagctgggtaaagatgaggttgatgatgataccgcgggtggtgactcgctagggcct

SEQ ID NO: 6935 - DNA, 539 bp, Emericella nidulans
actctgcagtcgcttcgtcagtttcagagtcttcggtagacgggcatgaccacgctgatgacggtagccggcatggtgaccatgatcctctccagctccctgatgcagtgaccgattccgtgtcggttggtgagtcggtgagggtgtgtatcgatgagttggatagattaattgttggactcggctgactccatatggcttgggactgtggcgattctattttcgtcggtagatgttcagcagtcgtatctgaggtaggggaaagccgagcataaggctggggtggaagggcggctatattcggatgtgacctggggggctcttggtggccggatgcacgacgaggctttgctttccccggagccggctgtgacccagttactggcagagacaatccccgaaacttgccccgactagccactccaacgccccatgtcaatgttgtcttatacccgcacactcgaccccattttccaggcactgggagcaatacgggcgtcgacggtcgcacgaagagccattgcggccacaggtgaagc

SEQ ID NO: 6936 - DNA, 811 bp, Emericella nidulans
gcagaatggttgcgccgacgctctggcgtatttctcgttgtcatggttgtagagtggcacatctccagatactgggacctcactgcttgaagcgttaagtgacggcgcgacacgcgtccagaggatcacgctatcggcataagggtcgccagaggcaacactgtgggtgaaggagagctgcgagggcgcatagggcggctccgaacgtttgacgagactgcgccgcgtgattttggcagtgtctatgccgaggttgatgtgatccttgttgagagaggggctgcggtagttgaggttcacagagtagctggccagggagggagctgccagcgagagaagggaaagaagtccaagagctgttgtggtgaccattttcgctgtgagctgctgcagagctcaatgccagaaccttgactgccttgtctcgattttgatactttcgatgagatctggacactacactttgagcgggctatttatactattcgttttcttttcgaactttttacctaattcgtacgcatcttgcacgagacacatctatccgagtgctggaaatataacaccaatagcaaacgcattctcagacacatggacagccaggtacccgtattcttgcgctggatcctgctctggaggacccgcgagatccgagatccagccatggtacattgcgatagacgagcaccgcggacagggcatgcatgtagccgaagattggaagcgaggttagattgagagcgcggtcagcccagatgaattggagaaacgaagcacaagcattaacatgacatcgacaagttttttttcc

SEQ ID NO: 6937 - DNA, 539 bp, Emericella nidulans
ctgcgcacaataaccttgtgtctttcctcgcccacgccatcaaccctgatcctctcggcgagctcctcagcctctttagcctaacagtcatactcggctgtcacaaagagacaccgcatcggaaagcggctggcatctgcgtaagctggcgagatcctaggattctttaagacgtcctcaccattcctcccggtggcgttgggatccgactccaactccagctccgactttgagccctcttttggttctgcgcccgcaaatacgttcaccagataacacttctccatgatattcatcatgaatgttgggacagagcccattccgcccaacggcggcttttttttaccatttcccgaacccctatttccatcctctcccgcctcggatccgtattccgaaggagccactttcatctcaggaggtgtacatgcatcaagaacgggataaaataacacaagaccccaaaaagtgccgggtgggaaagaattcaccgcaacagacgccgcaagatttcctcctgcactaaaccctccaattaa

SEQ ID NO: 6938 - DNA, 605 bp, Emericella nidulans
agccaagacccacaatgctcgaaccctcaggtatcggtgaacattttccttttaacggcaaatcatgggttccagtgcttctcaacgagtcagcaaagcataaaaaatacgcattctcggagggttgcttcttgaagtccgaggatctgttgctcgaaaaggcacaatatccgtacgatatcaaggcaggccttcaacacgaggtcactaccctgattggcaaagcgatctctctaagggacgaacgatatgcgtacatctatcggctgtacgagcccgtagagctgtacaaccgcgctgccgatccgcatgagatgcacaaccttgccgcggagcctgaataccaggatctgataaatcattacgagaaggaagttcttcgctggcttttgaagggcagtgacttcttgtcatggcagaaggacaatagatcccgcaagtaaacctcaagagtccacaggaacaaatggaggagagtctccgaacggctggctagattcggccatgagtaggttcaacagagttcacgaccacgatatctggcatagagaatcactgtggaggatcaatgcattatcggttgtatcattctctgagattgagta

SEQ ID NO: 6939 - DNA, 797 bp, Emericella nidulans
cgtggtgcaacctgtgaagccaggtcagagaatcaattgaagggacagcaattccgccaagtgcgagatgacggagggctaaaggatatatatgcgatgatagacgtacatggtagacaatcagcgcatcaagcggggtctgccagatagtactgctcaaaggatcaaccgaaatccttgttgctgtgcctgagtaacaaacagtcccagtggttgcaggccagataaacagaataaactgcaataattccaacgctaaaatttggggagaagcaaagaagcagatgccgaagagataacgcttgccgtttgttccatggcgccgtcctcgctactgtattccgtatattctgcagcaagcagctatgctacgctgagacgcaccggctgagccacagccttgagggtgacgacccgcgacgattaatttggcaaccagcaaatgggatgatctccacgttccggtctctgggaagtgatggaactctgggaggttgcaatgcggaccactggctgaggaattagaggccagccagcgaaagacatcccacgaagagccgaaggatgcgagggccacgaggccgagtaagttgttgccatcgcttaatctggtggagctcgaggaaatgtcccaaagatccaaggctgggtttggatcggctgatcaaagccgtcattggccaagcatagtggatacgctaacaaatcgatctccgggctcgagcccttagctgaaccttaatatccttccacattccactttcgcttggattacacggccccaaagggaccacagt

SEQ ID NO: 6940 - DNA, 1640 bp, Emericella nidulans
acagatatggggtaagaggatcaaggctgcactaccactgaacaacctatgactgacgatcaccgtagtggacgagtctggtacctcgactacgaaggagtgccccgtacttgagcccggccaagcatcgcaccgctctagcagtcgatagtcaccacatggctcgatgttgggaactcggatccggagagattaatttaattgactttgcagtagattttgacagagatcgcgcaatctggatcggcatagtttatcctgtccactctcctgaacatcccattctcaccgatgcgtcggagtattctgagactcgaggattcacatgaaagctgctcgaattttggcagtcaacgtggcacaacagtcagtgcaggagactactacgactagcccaggatccgcggcgacctggaggacctggaaggcgggaaaaagaaaagaaaggctggtccttttgacagctgtggggtgcgctcgggttggttgccttgctagacctgttcgtccggattccggagacttgtggacagtgcgattgtctcatctactccgtactccgtcgacttagactctggactactgtagaccctcagctcaagacgaagccgacggacttgttcccattgctggaaaggcgcagatcgacccgcgccctgcgcatctgccagctgcgagggggagagcgccggctgaatgcttggcgggcacgtgaggagaagtattacagcttaccgggactgtcctccgtactctgagtactccagagtacgtcctgcgcgggactcgaatcccgtacgaggtagttgatctgaggtggaggcgaagacacgagcgtgtggagagtgtctagcagcagtctagctcctgcaagcctgttccttggaaacctatcacgaaggattaccctgccaagtcgcccattccagcagtccaatgcatcgggggccagtccaatgggaaattgcttagtgggatttaactcgcagccatccaatcactctggacatcgtatccgaccagggggtctggctggatgattttttgggatctttcggtcatcgtgtgggagccaagtctgtaagtgtacgcacacacttggccacgccattcgaggtgagtccggtaagtgagcctggtgtgagggctcctcttactcaaaccagccgcctacatttgtgccactgccactaccactaccattgttcctgcctgcatcggccgatcaatcgctttcgctcccactattgacgcttcagctggtcgtcgagacccgtcggtgcatcgccgcatcgccgcggggtttcctttttccatgacaccgatcggtttcagtgccttgggtccgttgaaatccgcccaagtcaagcatagttttttattggtccgacacctccgttcctaggtaagtttggcccgtcggtttggggctttgtgctttggttattggtggctggggcagatcactgttctgttccaccaccgcctttgggtaatccggaagtttggcatggaagtgccacgaaaggccaatttttttcaaccccgaaagcgtattgctgaagtttaggttctcgggggtttggacctactctaggctaatttttaaaaaagggtccacctttttttgtactaatttt

SEQ ID NO: 6941 - DNA, 691 bp, Emericella nidulans
  unsure (1)..(691): unsure at all n locations
gacagacctcgccgccaccaaacctggcagcgagcttatccatgaacttattcagagttttgtcaataagcggctcgtattcgaggaccttggtcatttgccacaaatgacggatcggaaggatgttgtgattgtgccatttttcgtcttgcgtgttgaagaggttggacactcgttgaccattcaagacaacgtcgttggggcggtatcttcgctctgcaattcagcaaattaaatgcctagtcttatacatcacattcgatgatgacagaaggtacctttttccaggggtttcttgtggaatatattacgcggatcatgctcgggtcagagatgctcaacgcatttggccctatccgcatcactgaaccatacttgcggtgcagcttggtgtacgtgcgatcaatgtggccatcgaaggcctgccatgcacgccatatatcggtaaactttgcaggtagaggtccgtcaaagaccctcaacgatgagaagaaggcatcccagataagtttggacagcagaaggaccgcaaacacaacagggatttgcatccacaggctggcattggcaccggcaagaagtactcctgtcatgctgatgctgtgctctgatctgaaagaaggcgatgcttgtctgtctaatgttcttcgagtggctggttttcgcggcggtttcccaccaacnntggatc

SEQ ID NO: 6942 - DNA, 745 bp, Emericella nidulans
gggttgaggtgcgggggacatgcccatcgtggtgccagacggtatagagtactcgattctacggccattgtgctcgccttgatagaccaacgtctctgtgggagcaatccgggaaatacgctgcgataccccgtatgacaggcgtagaccttcgtgaatgacagcagtcaagtacggcagcctctccagggcaaaccattggagattaagagcgtcggcatcctgcagctcacacctgagacggttcagtgtgtccggttggtttagcaggtggaaggtgatgacggtcagcgtccactgcgaatgctcagtcactgataaacggtctagcgcagggtatataaacatacggccgttgtctcggtgccagcggcgatcataagaaaaccttcccctcccaatcgctggtctgttttctctgcttctggcaatggtgcgtcgagaagcgcagcaaacagactgggttgggtctcggtgatgcctctcttggagtcttgcctagcctttcgtattcgggcaggcatcttctcgtttgactcgattagcatctccctgataccaggactggcccatcttgcacacagtggcgcgatgtctgttagccgtttgaggaagggaaacgtccgaaatacatggaccggagccagagtggctttcagcgcatttctatagtttggctcccattcttcctgtgcgatgaaccaaaagcctcccaaagcagtacttggaaataacgtcccgctga

SEQ ID NO: 6943 - DNA, 493 bp, Emericella nidulans
aaagccagaaacacagcctgccatacactatacaccattatgatgtttcaatacaggtgcaggaaaggccttgccgtggtcaattaagaactggaacctatcccagcctcaaggttacgcatgcgctacataaaataaagaaagcaaatgaaacgaccgacgatgtgctacagctgaagatgaagggcttcctcatctcaagacggacctgctaattaactaggccaaaatagataccagcttgatcttgagcctgacacacattgcctgttttcttcttataactgtgctggtaagaactatataccatagtaaatcaacacttctagtccggcactgacatcgaagctggcacagacacacccagcatctttaacacagaggaaagatgcaagagcgagaggccgaccgagtaactacgcatgtgtctatctaagccatgactgagtggacccagaatgacatgactcgctatagaaacagtgccagatga

SEQ ID NO: 6944 - DNA, 473 bp, Emericella nidulans
ataccttcttcaaccaattctattgagtttcccaataaatcttgcgcaaagccgaagtacacgggtggacctgaattgaaatgaaataaacatatagatagaagaggaaacgcccgctaagaattcaccattccaaaatccagaaacgaatcatttaacatgtcatcattatcgagactgggtatctgtgctttggaagcggaaacagaagcagactcttgcatcatgatatcggggtcgaggcaccccgacacaggtacagactgaggaagcattgagaactcggttggttctaacgtatatggttcgatattcataccggggagctggtgttggtcttgaccagctgtgtatgaacctgtacctgcacctgaagtttcggcaggcgtagggggatacgcaccattctcaagtcttgattatatgtgtgctctcgttgtcaactcaagaccgtagatccaaagacatcacta

SEQ ID NO: 6945 - DNA, 909 bp, Emericella nidulans
tgtactacctctcctcactccccccaggtccccccggagaagaaaatgatgacggtctgaccccagcagaaagaggtgcccatgtcgtacgtatgattgaaatccttgatattcccttcgaccctatccacgcccgaaccctcatggtctatctcttccgtaacggcgactatgacgcgttcatgaagtggtggcgcacgctacctctaaagaatagcccccggacacgcgaagactatgagatgcttttccgtttacatgctgattcaggtgattcgcgtctgacgcgcgagtgtatttccacttgggcccccatgatgagtcgcgaggatccgccgatttggcttgagggagacctcgttgcccatctccgggactgtcttttacttgctgacgaaagaaccccagccagggctgcggaggggactcagagtctttttgcaaagctgtggcgggcgtgcgagagagagttgaataaatcggaggtagtatagtgaaattctcgtggccgtagtgaccatctgttatacccattattctctaccattgtagctatatgtactctactggatatcaatgaattgcagcgagtttcacgtcccgattggcttgtgctcagtggaaactgtgcgatctatctcagctttcactcaaccctcaacccaccagaatacaataagaggagagcctggcgaaacaggagtaggagataacttatatcagccattgcaaattactgcctatttgactggacgtaggtgattgatgctgactgatcaaccacgtgccgaggagcctcggcccagataagacaaccaggtcggtcggcctctccagcccattcaaaacttatctacttgagcaattgtagtcctcagtgctgcaaagcagcctggtatcttgcatcaa

SEQ ID NO: 6946 - DNA, 569 bp, Emericella nidulans
cattataccttttattgatttatatgatggtatactaatgtacaacattcagcccctcacaatataatacccgcccatgccctctcgttcaacgccagtcctcactccaactcgctcaatcatcttttgccctcgcgcaagaacatttcccgccccgtccttggtccgatcaaaccagccgcgacgatctgccgcctcgggaccccacaggggatgatccagaagcgcctgcacgtactctgtgtcgtactgctccgccagtgcagctgcatctgcagctgcttgacgtgcggcagcaaggtcgttttcggtgcgtggagaaggtggtgggatatctggatgaagaaagccgaggatgcggacgggaagtgtggatggcggatttggcatcggttcgtgaagaagccggaggaccgagactttgcgggtggtctgtgagagagagactgggcctgcttgttgagagccatcccagagtcgaactgagagaataatcatctgccagatgtcggggctggtgcgagcccaaccgaagaagtagccacggagcttgcttgaatacagaaggg

SEQ ID NO: 6947 - DNA, 647 bp, Emericella nidulans
ccgcccgcgaagcattttccgggaggctactgtgcaacctgagtttttttacacaacgagtgcacccgctccgcccgagcgtgtgttggacaagggattatggtgctacatctgaagtttcattgatcgcatacgctcattgcataatataaatccatcgttgactgtgaactgcccgtcctaacgatctagaatatgctgagcgtggatgcctccattggagtctgacgttaaaatccctgcaaacacacttgcctgggatgaatgataaatggtggatggcatttcattggagtgcgggacacatctaagtgaggttgtgcactctatttgattactatctgtctacaatcgactgaccactctgcacataaagttactgatggttattacctgaacttaatatgacatctagctcctactctgacgccatagtggcatcacacgtctccttgaaagtctcaatctgatgcactttctttacaggtgggcaagcacatacaccaccttacgtggtctatgtcgatgatagctggccctgtgttacacaaaaatatgttgagcgcacaacctaaggattgcttattccgaaccacaataatcctcccaggaaagtcctagttagccactacttgtgtttcaaacat

SEQ ID NO: 6948 - DNA, 1022 bp, Emericella nidulans
  unsure (1)..(1022): unsure at all n locations
cgagcggcgtcggtaggggggtatggatatgcactgaagggtggtctgttcgcttggccatggttcgctgggcctaaatatgctttgggtacagtcgtaaagagtaccggcatgttgacttcagtcaaaggtctagcaaagaaacagtctattctaaacaatgcaaagaaataacgccctgccttatcacatcacgcctaactcaatgtcattgctctgatgaagatccgactgtcgtctcttccgtctttgtctgttccagaatattttccatgacaggaatgtcccagcacttaacggtatgcataaaatacagaataaccagaaacctttggatattcgtaccccggatggcgcgttttcgttatcaaacttgaacaagtccattcctaaaaacgtctgaatgcgcgattttgttagacaagagtcaattgcggtagtgagggatgtttcagacgtacactgacgaagctcggcggcaaatagagcattgtgaggaatgtgataactctcattgcagcactgtcgtcggcgctgtcacttgccagctggagcattcgtttgtcaatctttccagtcgaatttcggtttcctagatcgaccgccacctcaagctagaagggtcgacttggtcagtcgatggtgaaatcagaagcctcgacgggtggtgagagtattacaagatttaatgtcccttgaagcttatgttccagcgcctcgacgctctgcaagtgtccttccacaccttgcagataggattccagcaaatcgtccgtttgctctcgatcatggttgggacggcgctgtgcgttgacaaaggagtttatttcctttagcctggctagaatttggtgtaccactttcagtttcggcttcagaggtagcaatttctctcgctgacgtgatagtctgacaagccaatcgagcgctgtatggttcttctcatccgtgaacctcgccaccatcacaacgtncgtctgatcgggtaccaatcctcattagcaacacggatggacgcaggc

SEQ ID NO: 6949 - DNA, 566 bp, Emericella nidulans
cgtgtgtgtgaagcaatctcctcgcagatagcctcaaattcatcgtcgttggttgactcctcgtacaataacatagcttgtctaaatgcggtatacgaataccccaacggccctcggaatagagcgctcaacggatcctttttgcctcccttggtctcgtggatcttccagaagcgtgtgcccgtatcaaccgcggccagtgtcttatcagcatcgaagaaaagaacagtctgcagctcatcgtagctcggagaaatgcatttgtcaaaaatatgctcggcaacgagtctattgtggttctcatcatgacactggaagtcacgaatcaagctcgctagcttgctcttcagattcgggtagatggtcgcgaagagaatgttattttcacgacaaaggtcatggatttcctgaatttcggtctcttgccaccgacgcaaatgttcactcgacagattcgaacgcgcccttttggtatcttccgcccgttgtttcgccgtcacttcaagagagagagttgacgtacaggatatgcgtataagtcgccaggtcagcctgagagcaaaccc

SEQ ID NO: 6950 - DNA, 551 bp, Emericella nidulans
atatcacccattaacaagtaaacaaccagattacccaacaccataacccagagcctccaactcctaaccagtactttgggaccaaccctactttagtcaatcaatgcactcaataccctccagtgcgcgcatcgcccgcgccccttctctctcgaactgcccgactagtctttcgcattctcgtttgagcctttcttctccattctttgcattccataggatccattcttccaccgtcatcttcttttctgggcttgtcagatcccccttcaggttgtccaatgcaccttggagatcgacattctccttgtcgctagcaccagccatcaggatttcatcaatatcaatgggaacccagggatgattggttcgaagtttgcccgtagaagtatgatttcgctttggggaaggagtactcgtcgtcagaggaaatcgaacagaggcatttttggagggagacgacagcggccggtgcgctggaggcttcgaggacggtgggtgattctctgatttggaggactgcggtgacagagaaggacttccctagaagg

SEQ ID NO: 6951 - DNA, 581 bp, Emericella nidulans
ggggggggcagcagggggatcactcccttagaacttttactcatcttggccccagtacctcagccatcaggggggaggctttttatgaatgaactgtggataccatctaaagtgtatactttatacaaaaagaatatcctagcatgatgtatcaaccgtggggaatatcatgcggtgtgcagacaccacacctgacgagagaacgcagcgagccgctagaccgaggccaagatagaccaggcgccataacctcgcgctgcgcatattatggaagagtgggaccccccgtcctgcccttaaaatacattgcatcgccattgggcctagaagaccatgtactacttccaactcatgttcactggcttcacaactcgtgtaagggactccttaacagctgtcactgtgacagtgtgacactaacacgttggcatgagaagactgtgttggatcacgcagttaaccggtggggcacaaaacactagacttcagtatgcaccatgaataatccaggcctgtcggtatagatgtacctgtgggaactggggaggatcccttccacatctatgggggccttcagcgtt

SEQ ID NO: 6952 - DNA, 633 bp, Emericella nidulans
aacccaggcccaccctttgggccgccatgaccgacagctttgtgttcagatgccgcaaccgagacaacgcagggggtgctttctttttgcggacaacacttatcacccataggggcgattcacggcatagaaacgttcctaccccccacatggctgcggggaggagctgcaggagtgtcgcccttatccattgcccgttgacgataacattcttcttggggacgccgaaagtgctgaataagcccagaacgacccccaactcgctgacagggctgggatatctgcacgaagtcaagcagaagccttcagaatgagccattggcgcgaacactttttcgagtggatcagaccaggcgggaacaactctatcgtgacaccgggtcccatgccacatatgacccggctgggatacagaccctcaagactaccggcggacaacccctgtcccagtaacaaccgatttacacaaatggtcctagccgcaccgatcaaattttcctgacccatcattccttgggaccggctgaaaatttccgccttcaccgctctctttcgctcgttaccgattgctcaagacttacgctcaagcagcccaaaactggtccacaagtgcaatcgctcatccaccccttg

SEQ ID NO: 6953 - DNA, 836 bp, Emericella nidulans
gctgacggttgtacagacgccctcggctggggggcgctcgccacccctagttattggaccttcgtcttttttaccaaggctggaaatgcccaagtctcagtcgacacgtccatcaagcaggaacagaaggattttttgaagcagactggcgtccagccgcaaaatgctgaacttcccgcctccggtattacgggcgataccgctatgagcccggctgccggcatcctcaagcaggctacgatcatggaccaaggaacacgaccgatctatcttgatgcgcaagctaccaccccgaccgacccccgcgttctcgacgctatgcttccgtacctcaccggtatctacggcaacccgcattcacggacgcacgcatacggatgggagtctgaaaaggccgtggagcaggcccgtggatatgttgcgaacttgattggggctgatgcgaaggaaatcatcttcacgagtggtgcgaccgagagcaacaacatgagtatcaagggtgtggcgcggttctttggccgatccggaaagaagaagcatatcatcaccagtcagactgagcacaaatgtgttcttgacagctgccgacaccttcaggatgagggcttcgatgtgacctaccttcctgttcaaagtaacggtctgattaagcttgaagatctggaggctgccatgcgtccggacactgctcttgtcagtatcatggctgtcaacaatgagattggccgtgttcaaccgctagaggagaatcgaaagctttgccgctccaggaagatcttctttcacaccgatgccgctcaggccgtgggcaagatccgatcgatgttacaagataa

SEQ ID NO: 6954 - DNA, 799 bp, Emericella nidulans
tatgaaaggtcattcctgttcccagtattttataatactgtagccgagcgaagtcgcagttgtgggacgaatacggtcagcatcagacagtactcaggaacctcgcgcattcgattttcaacgaccaccccagggacaattcaagtcgcatctctgcaatatgaaacggtggtgggtgttcgccaggtttgatgactgtccacttctcccaactgacgaaggagtatattgcgaatgtggaatggcggaagaagggtgtggaaggcgtaggacgcgatggtcagaaagtgccttacagtcctatgtacgacgcaaagacaaggataagttggtactgtccaacattgattcaattcgttcccagctccacaaccgtactgtacatctggtgcaaggtatattcaacgagtacgtcagaatcagaagagattcttcatttgccttcttataacttgaacttatcctgactttcattctgagctgcggataagcgcaagcccctatactttaccagtccactaaaatttattttaccagcacaggaaccatataatcacacaagtattacaatcgtattctttccggctgtcgtcacaggacaaaagattaagcatgtcaggaaatagcctggaagtcccgccgtccaaacgaggaaaagtagagcttccatgtcttctggatatttgactaccggtttatagtggctacctatatttatatttcatgacaatatgttgcttggactatggtcgtacagttgcggtgtcagacgcgctggctaacaaaagtccaggggttc

SEQ ID NO: 6955 - DNA, 850 bp, Emericella nidulans
ttttcgcgatatcaaccttcacgcatctcccgctcattatgcctttacttcgccgtcttcgcctgatgctccaacgctagtggtcgaacgtccaacgggcgacttgcgcttgagcaatggctcattgtcaggtgcaaagcgtatctctagtatcgccgggattctcggtatcatcaagttgaagcttggtaagtcaaacttccggactcattactcccagttgtcgtctatactcatatttgtcatttattctagacaagtacatcattgtcatcaccaaggcccaacccatgggccggctgcgcggccaaatgatatacaaggttgccggtactgagtttcttccactccgcgagcgcccgctgcacgatcatgacgaagatgcctacttgactatgttgaaggaactgctacgaacagggcctatgtatttctcctacaccttggacatcacgaacagcttccagcgccagtcacaaagcgatatgagcctgccaatgtggaaacgagccgacgatcgcttcttctggaaccggttcattcagtcagatctgattgacttcagtttgggtgaacataatacgacgtccgttcgttatggtccgcaacccggcgttgatccttatatcctaccagtcatatttgggatgctgcgtatcacaccggctaaggttaaatctaccacttttacgtttgctctcattactcggaggtcgaggcatagggctggcacaagatatttctcccgcggaattgacgagcagggaaatgtctcgaattataacgaaacagaacaaatcgttatcctcccagcagccaccggcggtctttctgggtttgctggaggccc

SEQ ID NO: 6956 - DNA, 552 bp, Emericella nidulans
gatagcacctccaagcaacaggttccgacggcccagctggtcgaccaggaaaagaagccacacaaaggtcatgacggccttgataacgccaaagatacccgtcatccagccgacatcgctctcagagacaccgatgctctggaagatcgtcgggctgtagtagttaattgcgttaatgcccgatccgttttgccagaagaagagcatgcatccgaggaagaggcggtacaagatcgccttgcgtctggcaacggcctggaagggcttccaaaaaccaattcccactgttacggcctgctcctccagggcttgatcgatagcggccacctcttcggtgatatagatgtcggtttcgtcgagttggcggatccagcagaggttggccatggcttgggcacggcggcccttgagaaagagccagcgcggagactcgcggatccagagggagccgatgaagaggaggcctgcggggatgatctggatggcgaacgggatgatcactgctggtgcgtggagggcatatcatctcgactccgtactagtggctagatt

SEQ ID NO: 6957 - DNA, 751 bp, Emericella nidulans
atgctccaccaggaagtcattgaaggtctccttggtcaacgaaacgacgtctgatggtgtttcggactgagaatccgcagtagaaaccgtcgcagcagcttcctagaaggctcagcgcccacggaccaaaggaacgcattctgtctggatgctatggagcggctggatgattctgaaaatgcatccagctgcacagtttgagacttctctaacgactcgtatatctcacttgggagacagagagtcaatcgagttgccggtcaaaggtaaggttggtgaagaaaagagaaggaataaagtaacggttgtacacgagagtaaatgcaagagtagtcaacgcttaggtggcctgttatataagatgaccctgggtccgtatgtaggggcaaatagtaaatgaattagtgaatgaatgtatggggtggagttgaggccagtctgttctttcggcggcacagcttctcactggctggacgccttgcaaggggccacgccatttggcaaccgtcgggggagtgatacgcgcctcttcacatccttgatttctagggcaatccccgtttcttcctgaccgcgtgaggctagctttcacaatttcaatgttatgagttgtgtacactaatatgtaggtatctgcttcattttgtttttccagatatgtgtataccgcagagaggcagagatcggccctacggcataaactatggcgcacaggtaacacaacaacctcttgctttgctttgataagacg

SEQ ID NO: 6958 - DNA, 1389 bp, Emericella nidulans
  unsure (1)..(1389): unsure at all n locations
ctggcttgttggtagaggcacctacgcaactgcagcaatcccttgctgattcgcaatcacgattttttaccaatggcgctgccagcaagagcctgggccagttgattgccgagtgcgatgcgatgaaaaagtccttaatgcgtgacttgcaaaaccgctgcgagcgagtggttgagctagagatctcgctcgacgacgcccgagagcagtacaataacgtgctccgctcatcgaacaaccgggcccaacagaagaagatggcgttcttggaacgcatccttgaacaactcacccacgttcagcgacagcttgtggagcagaatagcagcctaaagaaagaggtcgccatcgcagagcgcaactcatcgcccggaacgagcggatatcaagcttggaagccctcctccaggagagccaagagaaactcacccaagccaaccattggtacgcctgcaccttttactctcaggagattccttctttggaaatccaagagcagtccctcttttataaggtcccttctcagaagaaacatatactgacgtccactcccaacaacagttttgaagcccaactcacagcagtcaaagagcgccttgaggccgccaaacagggctcaacgaaaggtcttcccggcatggacagcaacggcggcttcagcttcgctggctcccgaatcgctaagcctctccgtggcggcggcggaggcaacgaacctgtcgcggccgtccagtcccaggatacaggcaccaagcgcacaagttggttttttgatagacgatgatccacgaattttcctcttttgttgtctattttatccccttcctgcagatatctagatggagtactctctcttcacctgaaacgctgatgtgttcttttcgtttttgttccatttccttttctttctgcctagtgagggttactgatcgattggcgcttctttaaaccggaatggcggggatatcctatgctatctatgtatgcctgttatgctttctttggggctacctactgcctagatcgcggaccgcagaggcgcggctatttttctttcggatgttatatccatttgctctcaatgttatctccctttttatctttaaggttgctaatggttctggggtcgttgatacgtacctattttgatgtctttccgattgagaaccgcgaacctagtccaacatttcttcaaagagctacaccctctacngagtacggattgattcctttcagatcattcttgaccaagctaaatattacaaaatggttgagatggtcgcatatctaaccccaagcgtaattgacatgtaatctcgcaggtagagaacgtttaaatgctagtgcaagctcaaaactagnacttgcgagaacatgagctgcatcatt

SEQ ID NO: 6959 - DNA, 1501 bp, Emericella nidulans
  unsure (1)..(1501): unsure at all n locations
gtgagggaaataggaaatatagagaaattaaagtaaagagtaaatataatagaaaggtaataagatagaacaaaagaggataaagtataaataattatacagaaaaagaagagaaatatgggacaaaaatttcttagccaaagaatgactaaggcaagaacccaaacattgtacttacggatattgaaatatgtcatttgaacgtactacaaacctccaacctgttcatgaggccatttagacaacttaaattcagttgcagggtcagcggacggacaaaagctcccgacagccgagtgccaaaacgattgctcgcacaaagtacggtgcaggcacagccttgggctatttttgtgtctccaaacgattcttgttcactggcaattctccagcatgtcccgtcaatcttacgcgcatgctgttctccgtcgccaataacttgccgccggcgcgaagcttctcgacagctgacagctgaaccagataaagttgagacacttgagacactcctttacctgtagctgcttttgcctctttcagattcgccaccacgacctttcattattcctgcctcatctcattctcagcactcgagctgccacccaggccttgtctatcctctcgagccactgctccgtatagacctcgggtttagaagcaggaacttcgaccgacccttgggacttggcgctgtttactctatctcgtctatccgcacgatctgaagtcgctctttaagcttactcttcgatcatcgatccgtgctttatgcaaccaggtgtcactcattccggtatcgatgagtaaccctaggtcgcctttacttctgtacgatggactttccacgactttcaactccttcaattaacatcgacgagtccaacagcggtagcctttctaccgcgagggccatgtctgggcagtcgtttccttcccagggccccgtaccgattcgaacaaacacaatgacaaactttgcgccgccaccattaccaccgcccccgcggattagtgacctagagaatgggtacgatgcgggctggatacatgcgaattctagactctctcaggggtctacaaaactagctcctatcaaccctaactcaagtcttcttggggaccatcgtcgcccagaatattctttaccgcgactcgatcccatggcgctggatgaatcagatggcagacagaacggtttaccttctgcgaggagccctgaagcncatattaagattgnnccccctccaccgccgataagggntcccnaattctgtctaattggcaaccccggacctttgaagtgtccaattgaccggcgcagttgcggagagtctcctgaggttgatagcgcctgttcggttcgctgaaaaatgatcttactttttcaacgcttaaggcaacatatttttcacaagcgtaaaattctttagctacacaaatttttttaaaatggaaaccattcacccggattcgtctaagttcaaaacagagctcatttact

SEQ ID NO: 6960 - DNA, 525 bp, Emericella nidulans
atatatctctaaggtcgtttaatttgcttacaaatagtcataacattaaggaagtatgaggaaggtttataataaaatcaaggttgtcatccttgtactttaacattttcactgtacattaaaagagcagcaaaaatgtgaaggaaaactaaacattctgcctagcttctaaacatagcctaacttctaaatgctgccattaatatgtaaagagtggaagtaacacattaattaaatatgcagagtagacatgtcatatcaacactgtagagtgcattaaatatgcagagtagacactgtcattgaaaatgacactatcaattgacagtgtcagttgatatgacactgtcatatcaaccaagatgaaaagaatcaggatttagagatcttagaaacatgggcaagacatttcaattcacaaatgcagcacatcagtaagacagtgactattaaaacacaaaataagcacacaaacaatatagaaaaagaacataaaaatgcccaaatgttctatcattgttggga

SEQ ID NO: 6961 - DNA, 879 bp, Emericella nidulans
ttctaccagtcatgctaagggtcctcatataggtgaccccttgaccgtcgtacttccaggacgaggtccctgaccttcttcgtgacttctatgcgcaacacgacggcctcgtcaccatacagaagctcgtcgctcaacgcaccaagcggaagatcgcgcgtctcaggcgaagctaactcggctttggccttgagcttctgccatctccttcgcatctccccaaatactgcttcagtatcaaccttctgcccgaaagttacactaacttccttccccggccgtgggaggaatcgtggaaattcgcggctctcgtgcatgacctggtcgaagccctccaaccacattggaacaatgtccgggcattcgctggcctccagtattaacctcgcaacaccccacttaaaatatcgcatggtcttattcggtgactggtggatctttccttcagggaagatatggacccatgagtaagagttgcaggagtatgcggatggcgcgaggtgcgaatcttcaccatctgtagtgtaggccgtagggagatccgaaaacgggtcgacgcagacgttctgcaggctccagctctggcgttcaggcttcgcaaggtgcggttcggcgggaaacgggccctttgacagaagtcgaattgcctgggtcacggctggttgagcaatgccgccgtgcttagaatgagcggatctatgggtaggtaagagttgacccattgagaagaaaaatgccaatggtctaactcgacggtcagtcaagggtgacatggagaggccgggatcaaagcataccgggcctgatagcatatatcatgactggccatccccatcttcggtttgacgaagatagcccgaagttatatttcaacgggag

SEQ ID NO: 6962 - DNA, 471 bp, Emericella nidulans
gaacggatgccattagggttggaggcatacgggaggaattggttactcgcgccctgatgccggttagcggatctatcagaaggagggtggttgtggttgtcagtggagttaagacagggttgggttccttgaccctgggcatgggggtgagaggccgtgccagaagcagaggggttgcgagtattaagaaaaacgggacgggactggttaccctgaccctgggcacaggaatggtaggccgtgccagaagtagagggggtgcggtccttatggtaaaagcggcggaagatattgtggtaggccatggccgaaggcagtgaagtgggtggattagaagtattaggaggggagtaagatagcagtggcaggagaagatcccccttattgaatctgacaggatttaagcactgaaagttgtcaaggaatatgaaaagaaaaaagagaggtagactaggacgagagcactcttat

SEQ ID NO: 6963 - DNA, 565 bp, Emericella nidulans
tgcacggatcgaggatgtctacaagaaacatatgagacggatggcgaaactttagcaagcggcgatgtgcaagcacataggtgttggcctcttgccactcaatactcgcttcggttgttctaatatcatcagcaagtaatcagcactttagctgtcaatgtgacttacatatatacctatgtggatagatagacgcagttgtgagcaaacgggagtgttgagtatcatttatttctatctgatcccacgaaacatcccctcggctgtgaacacgatagtagctggattggcttaatgcggcgtgcccatatgggtagttcgggaatggaccagatgcctctctaagccgattttctgctttggccacaataatatgtttttccaccgtggttggtaggactgcagttcgacaaggagctctagcacgagtgctgagcctgaattctgggcccaccatagccggccatcaagctcgtggatgaggaccccccagcgcataaggattagcagagcgagaaaatgccaacacctcagtgcatgaacaaaccccttatctgccgcagct

SEQ ID NO: 6964 - DNA, 494 bp, Emericella nidulans
tcttgcagtcaacaacgtcgcaatcacgacacatgaaagtcgccatgaagcgacaatacctgagcgaagaagcatttctgccgcgcgtgatatccgacaaaatatactagtcaattgtttgtactgtagtcgtatgctatcaggaaatagatagctgtgttcaagctcctaacatcacgacggggaaaacttcaagtcaatgattcgatcaaagaatcatcagtacagcccgaagtaataaaacagaatcataaaaacagctgcttagcagcgaacacattgtcgaagagaagcgcactcccttgtcagctacaggccacatctcaagctgctacggatggcgcagcggccaaaagtgcaaaactcccgagatcaggacagcacttaggtcagcaatggacatctaaaccaaccaaaggtcgaatctggggacccagtaacaatatagatacataacacaatttgaacccgcttatgcaaacagcacattgatt

SEQ ID NO: 6965 - DNA, 763 bp, Emericella nidulans
gatcgagctctggaagggagcgccatgctgcacgcactgcctggatgacttcggctcgaccacatttatgtttcaaatgattccgttttaaacaatgctgatacagcatccaatcggaagcaaaacgcttctaatgaggatcgaaatgcaccccgggtggtcaaccccgcatctaataatcgtggtctacctgaccctcccagggttgaacccgctgcttcaagcaatctttggccagagaataaactccccagcccagtctctcaaggggaacagcctaggaattcaacctattctccaagtggtcctttgcagtcgtccttcgcagatgatgaaacacagcgcctgcgttaccattctactgaacaactatctggtcacttctcacgcgctaagcccatcctgtttccaccgattctgcagaatcagctacctcccgtcagatattctctagataccctgccatttcagggtgtttaccagatgagcgcgccatacaacaacgggcctttcgcgaccagccggccaatggcgggcgcttcagcaccacaagcgaacacatccagcagcagctctaagccggatataatgcctttcatggattcactcgcaccgatgatgccagaacatcttgtgatgcaacgcaggatctaaccacaaacacctcgtcgaagaagaggaggcagcagagcttgactttgagcagcagaaatgatcataagaatttgcattttttagggccgaaccgagcaatcgctatgaa

SEQ ID NO: 6966 - DNA, 644 bp, Emericella nidulans
  unsure (1)..(644): unsure at all n locations
gcatacgtgagaacgagacaaggactttattgcggcaacccacattcacttgcacttttcaggacacatgcatacctgtagtccgtcgtgtgctttattgggggtggagtacaatgatgttacggcaaaaagccacgcgctcgaactggcgacgcaaggggcaatctcctcgatttccacctgcacatcagcagcagaaaaagatttattcgtggcagggaattgccattgacattccaaacatgccgttctactgcacgagtcagactcgccacgcgagcgacgcgctacggcgttccagtaaggagtggtacgacgttcacaccaactccagtacgtaactgcgcctcggctacggtagctgccccctcaccacgcccttactgattacctgcccgcggtcatgctcacacccacgcctatgcctatgcccaggtctacccgaggatgaggagtcgcaaggagtcaggtaactaagtaggtacccagcccttgaatgcagccagtcatcgcacaaaaataccttagtcgttatctaaactcgagcgtggctgatagattggatccaataagaaacagtagccgagtgagtggatatacttttgtagctattaacttcnaccgtcgatgatccacatggaaga

SEQ ID NO: 6967 - DNA, 1028 bp, Emericella nidulans
  unsure (1)..(1028): unsure at all n locations
tctacggcacgagattgatgcaagacctctgatgtgttgggactgagactttggagacttggattctgacgaggagagtatcgagagggtgggcgcaaggtatgatgttgaggtttgcgtcgggtcgcgccaggcgccgccgtgaatgagtctaaaacaaaatcagtacatatccgtagatatctaggaaagtggcttggtgaaatgtttgaggaattacatcacccagtaaccgctttcattgtcaatgttttcagcgtggaggggagcgcgtgcggggtagggttttgcgacggtgacagtctggaggtcgtggtcgccgtaggggaacgtttcaagagacatgccggttatttagagagtccctaatgatagttacgcgatttttatccgggagaagagggatgacggagtgcgtgaaggtaagatagctacctaggttgtttatatgcatgcagaccaagaggtggggacggatgctgaccggatcttatcgagagatcgcgattccgatagcgacatcgtagatcatcctattgatagtaaataatttgacaagttagtttcttgatacgggtatgtacgatccaacggtccatgtctcttggaaattttgcagagaatatatttggtgtcttctcatatcttcattcgttctcggtttcccagactatatgcttcggattagggcttcggcttctagatacgacattccgataccgcaacgctatactttcccggtgcaatggcaattggaaaatttctaggtacttcatttgccatgatgaggtcagttttcccaccactattagcgtggctactgattcgttntgagtgtgcaggaccgatgcgtcctgaagagacaactctggggtaaccagcgcataccaaggcttcagatatattgtgcacagtataatcagctgatagtgtcaatcaagtaccgactatgctgatattctgagatatcttgcacagtgtttcaagtacaaagactgcagtatatctacttaagcgtagcgaggcat

SEQ ID NO: 6968 - DNA, 511 bp, Emericella nidulans
caaatggatctcagttgcacccgaacgccgttaacctaataccgtcccaaatcgacaacgtgttataccttatcatcgacatcggttatgttcataacgaaatgcacgttgaacttgaagtaatcgcgcataatacgccggatgatgtccgtgctgacatagttcctagcatgtccaagatgcgcatcgtcgtatactgttggtccgcatgcataccaggtcactttcttcccatgagggtcgatcggaataaatggcgtcttcgacttggtgagggaattgtagaccttcagcgaagggagcgattgcgcttcagggtgagcagtcggctggcgccatgctggttgctcgcgcgcggtacgcatgaatctagcaagaaccgatagctgagagaaaagaaccggccggggggatcgaagggacgaaagaaggcgaagatgccgaagggggaggaggggcatcaagatggaaacaaaagagtgggggatcaagggcctgagcaataatagag

SEQ ID NO: 6969 - DNA, 592 bp, Emericella nidulans
tcggcgaattaaccctcactaaagggatcagaccttcgatgttccagttccacccgcagtgtcccgaattgatcttttttttttttgccatttatttctgccgatgatctgacccaagagtcatacttaaccaaccagggactgagctccgtacaactgaatggtccccctgtgtcagtctcaaccccaggccgagctagagctcctgtgcatatgccgcagtgggcatccatggctccgctccgtgtttgatatacatacatacatatcccccctccttccgttcctaccgttcctagttcttaccgttgcgacgccttccaggactctactactatgttataaccgacactccgccaacaacacttctcaacactccaactccactccagctcaacactgccacatctttactacgtctcctatgacctactatcctcaacctgaagcctttgcgggctcgcaatggccactgaacaaccagtcaacggcccttcagcaattcctctatgctttccctaagcctagactgagcggccgaatcagcaagcctcgcagcgctggaaacagtccttctgcgagcaggaggagg

SEQ ID NO: 6970 - DNA, 666 bp, Emericella nidulans
ccgttaattctaacaccaccaatcaccacctaccactcaaagcggggcttcatggcggggtaggaaataaaacacactgaaaagacgtcttgattctcacaaaatactgattcttcattcgaaccatcatctcttgatctgctggtagagatctcagctgagaacacaaggtcctcataacccctgctccacaggcaacggcgccgagcctgctaaccagcctgatgtataggaagaccttattccagccaaagcgaacaccgttaacatagaaaaaatggctcacaacgcttgccccaagtgcggtgctagtatctccggcgacaacaagagctgcaactcctgcggaagcgtatgcctacctcccgttctggctttctgggcaaccatgataagagctggactgactgcttatcacagacttgccctgtctaagtcggactcttcatccggagggatcatgatggtggaggtgaactttttatctgcgtatatgggtagggctcagggtgcgggaacggtagcccgttcatgaatagtgacccaactgatgagaataaatgtgatacctgtttctttgcacatgatacgtagattctctacgaccatcacactagattccttggattaacttcgtgatttagacgctggcttgcttcttgtggg

SEQ ID NO: 6971 - DNA, 579 bp, Emericella nidulans
tatcaagttgttgatatccaacagagactctttggcgtagacgtgggaagggccgcttaaacataagttcagcgtctatcttaattgcggctattcttgctaacacaagactagaggacggggctacggaggcagcactctgtttaatatttatacgatctcaggctgtatagtctccagccaagctggcctgcagagtgaagaattgatgtcgtacgcgttttatggtggtgcatcttcgttaaggaatgttatatctgtactctgagaatcagccgcttcattttgaccaaacggcactttattctgaccatgagcaattgggttggtagaggggagtgaagggctgggaaccagacagccctgtcttcattttccgtgctaaactcgccgtgctgatatacacctgcacaatttacacgaagatgttcggcctggggcaggacacagtgttgcccattctgaggcagcgcatggtttcattgggcaactggtatttaatagggtcaaagagctgcgctgtcagcatctggtgcagaatgggtttgtgttgactttccaggtaataaatgggcgatg

SEQ ID NO: 6972 - DNA, 709 bp, Emericella nidulans
gcagcggccctcttttgaatgaggccgtcctctttacaggacacggttctcttcacgacatacgctagcaccggaaggcaggggtttattgggctggtccaacgcgcataatcctttgaggacgcttgcgctcagctgcaattactcggcctcgctggcctggtaagcatttaacgttcacgactactaaccctatacaagctagggccaagttaaagtactcaaggatatttgactatattcctataattcttggagacaaggaactttgctcaaacccaatcggtggcctctccaggacgtggctaaagactacagactctgcaaagacggtattaatatatatccttggcactagcaggataaagctgggaaaaatcgatgtcagatgaatccaccatgtaccctgtttcgcgaagatctgcccttgtcgagatgcgattaacatcgttttgatttgtttaaggagctggcgaatctctcaaagttcggacgaggaaagtactctgtaactgcatcctaaaggatggatatcattgtcgtttggctgtattgcttgtggtcttctacgctgatcttgacagtatgaaaattgatgactggcctgcgattcctggtttggtcataaactctggatacgcagtcggaagggacccaaagctcttggacatcagtcaacgccttatgcaggcactaaacgggcttattg

SEQ ID NO: 6973 - DNA, 598 bp, Emericella nidulans
tttaggagaaacgccccgcgggggacactccgtttgtggaacgacttccggcttttccttttctggatatcatgagcaggccatgaggagggggttttccaaaccattttccttgtacatccgcctgaatgacctgcacaggtgactgactgccactatcggcaacagaaactgcacccttgccacctgcttttcgcactataaccctctaactgatggatattgcgctacaaggtatctactcagcccaggagaaccgtcttttgatgcgagcttgcttgggggacctgaatctacatttaggtctatgcacatctcttcttgccatagacaacctgcttgggcatctcctgactatacagctcacacgcccgactccctaggtacgcttgtggtagccggcaattactatacttgaaaggggccacctgtggccacgtgattatccagacctggtatcattttcggaaaagtgaaaattatttctctgtccaagcaatgaacagtgccttttttacggaacattcctagtgcctcatggtcctgcggcgggtgaatggtctaaactatggtcctttagccttaaaacaaatgctgg

SEQ ID NO: 6974 - DNA, 572 bp, Emericella nidulans
cctcgacgctggaatcaggcacaggggcggagggctggaaggcggggtttccggcctcgaagcctttgctgggcaagtcttggccggtagggggttcaaagcggaattctgaaccggaaggagtggtgatggagtcagtgacagggttgaaggtggtggagccggcgtaggtaagggcagtgacgagctcgggagaagcgaggaagttcattgtgcggcggttgccgtcattgcggccggggaagttgcggttgtaggaggtgaagatggcattatcggtgcccttggggacatcgtctgtgcgcttccattggccaatgcagggaccgcaggcgttggcgaggacggtgccgccagcagatgagaaggtggagagggtttggtcacggtcgagggtggcgcggatctgttcgctaccaggggtgatgaaaaggtctgctttcggcttgagaccggcggcgttggcttgtttgacgaggtgctcggcgcgtgtcatgtcttcataggagcatgttagtgcagccgccaataaggccggcgttgagagtctccggccagttgttttccgacga

SEQ ID NO: 6975 - DNA, 1073 bp, Emericella nidulans
ctggtcccacgaaattcaattcgttctccgcgcgatcctcttcaaactctcgatatgggaccacgacgcctcttacggcgccgccctccaaagtctcaaatatgtcgacagtcgcagcaaaggccctgttcactcaacgccaacgatgcttcagaaatctctatacggcctcctaacagtaggcggtcgctacgcctgggacaaatgggagagctggctcatctcccgggaaggcggctacgaggaaccgtcaccggaagtccgttcattgtcccgaatcacgaatttcctctccacaacacactccattgcggcatttttctcttttctcatcttcttagtagacggtcgctaccgaacactgatcgaccggctcctccgcatgcgccttacacccccctccgcccaagccagccgcgaggtctccttcgaatacctaaaccgccagctagtatggcacgcatttactgaattccttctatttcttcttccactcgtcggcataagccgctggcgccgctgggtatcccgcgcatggcgcaaagccatgtcggcaatccgatcgacaagcgtcgacgaagatgaggtttccgaaaagcaaggcgaactcgccttccttcctgagcgctcctgcgcaatctgctacaaagccaacaataccgcaacaacagaaactgaagtcatcgctgcagcttcgtcgggtgcaggagggatcatcggctctgcacagacggacattacgaacccgtacgaaacgataccctgcggctgcatttactgttttgtttgtattgcgcagaaactcgagggcgaggagggtgaaggctgggtctgcttgcgctgcggagagctcgtcaagaaatgcaagccttggaatggcgatgtccttgaagaagagccaaacggcagtcaggctccgggagaatgtgggtttgctgtaggtgcgacgtcctttagacagaacagcgcacgagcagagagcttgtaagctgatgatgccattttactactgattgaacaatactttggcgcgattcatattatgtttatacattgaaccctttccccggctg

SEQ ID NO: 6976 - DNA, 839 bp, Emericella nidulans
  unsure (1)..(839): unsure at all n locations
agcgagtgcaaactggcaagacggcatcgcacttgacatggcgttgacggcaaggaagacacgctaatgaagatggccgcgatgaagaatcggtgttgccagtcatttttcttttttcttctttctcttttctcctttttcttctatttttctcttttttgtctgtcctcttccgagcgttggctcatacgaaggtgaatagtagtctatatgaatactataccacacaatatcgagaccggcaaaactcagtcaataatattattagaccttacttcagctcctcaacggaccacgcaatcactcggctcatctcgagtcgaattcccaatactgaagtcttcttgttcccgagatccccgagtcgccgaccaacccccttcatccccggcccggctcagcgcaccggccgcacggaccactggccctgggattcatggaagaccttccgacgaatcggggccctgcagcaggttgggttcgtatccatcctttaaagtgtgggaacccgcccggtttcatgttccccacataacctcacttccgcacttgagcctccgcgggcagcgagaggtggatgccgcctcaatgtttgccctaccctttgagtcttcatatcacgtgcccagcaacttgactgcccactagttagaatggtcaacgtggttttgccgcaatcgggccatcttagagcgatgcttccaaggaagaaccgagcctgactgcaggagggatgctaagctgatgacgctagggccaagtctgatccccgcgagtgggaatggcgtattgttcggngagcatccctccccgcgacaggtaataaatcctcatattaa

SEQ ID NO: 6977 - DNA, 646 bp, Emericella nidulans
cataccgtacccttgcttaaacccagtccaggggaagcgggcgtgtagtttctgcaggatctcgccggagatcggggccgcgcccgacgagaagcgctttacatgcgagaggtcgtagttcgatacgatggggtcttgcaggagacggattataattggaggaacagagaggatctcttcgatgcggtattcgacgatcgtgtcaagcatcgatttcatagtgaaggaggggagcatgtacactgtgctgttgcggatgatagggaggtgcatttgatggacgaggccagttactgtggatcatgttagtgtgtaatcgctagggtacttatattgatagggccaacgcactgtggaaaagaggcaaaacagcaagtgacttcctcgtgtcctcgtgcgtaacgtggataatctgcatgcactgcgcgatgacattgtgatgagcaatcataacctgccaatgtcagcaccatgttccgtctgctcgccattgcccaaagcagagatgaggcgtctaacttacagccttcggcaacccctgtcgtcccgagctgaagctcaaaaatccacagacatcgcgattcgtcttgccctccgggatgcgatacggcgcggcttgaccagattcccttatctctgcccctct

SEQ ID NO: 6978 - DNA, 533 bp, Emericella nidulans
aaatccccattccacccccgtcttgatctctctttgaaaatgcctcgagctcccggcatcctgatcccaagctgcatgtcgcacagagctgtgcaggttttgatccaagctggcgtgttttcctctggttgagaattcagtcttgaagcagtaagctctccagtacttcaccgctacacctgctctccgctagcgtcggatgaaggtgtagttacggtaccttgcatacatatcacttggagatagtcgagcatggcaccgtcgtcatcagacgtagaagcccaggtgcttctcgagacgaaagagtacgactcgtacgcctgggtccttctcgacgaccatccgcttcgtgcgtatccagctgacaccgattgtcatcccgaggtcactgcattcgcacgaaaatggtatgcggccgtgggaagacaatgcagggagcgtggtctgcctctgctttgtcttgtattgatgttcttgtgagttgatcctgacaaattaatcaagctcggttggatggtctgaccttgaattag

SEQ ID NO: 6979 - DNA, 306 bp, Emericella nidulans
tgatcgaataatacgactcacctatgggagaccccaagcttaggatctaccattctcatgacatcaagaaaacccacaacacgcgcagtactggaattactcggcgtactacttcgtgtaatgcatgcagtaccagacaaaagccccggctatcaggtctttcggcctccgactgctaaccacgatggacctcccatacgacaaccatgctgggatggtggagacactccacaaaccgcccgtggccgaacctgaaaaaatatataggtggcccgcttaaaaacccccaaaaaaggggtggaccct

SEQ ID NO: 6980 - DNA, 721 bp, Emericella nidulans
  unsure (1)..(721): unsure at all n locations
acgttccagtttgatcagcctcccgaggacaatgtttggcatgagaaaccggatctttccggccagatggaacagctgaagtctcgcttcagcaagaacaaggacaaggctgtaagtgccattgttcgcagcataccttaacatcactaacgtctgcaaagcaacaagaggcatccgatgttgccaacactggtgcccaggctgctactggtccaagcggtgactctgtcgacccttattctggagttaatgcttcactccaacacgcccaatccaaggtccctgaggaccagaaagcggaggccaacaaacgaagccaggaatacaaggataggactaagaactatctctctggaaagttccctcaagagcgtcgagaccagaccatttatcgcttgaagaagatgattttggaaatccagggccaccgggactgtaagttaatcagccttatacactatgagcaccgctaatgcataaaagaccagcaagcaattgagactttgcttgaccttgcggaaaagtaccgcggccatggaaggcacattgctcagcagggaactggcagtgttcaaggaacccgaggccagagcaaagtccaaaccatggagaagaaccttcaggtatgcttgtcataaacagnacttcggaccggggctaactcgtacanacttaatcgacgattcccaacagcacgttatgatgattcttgacttttgaa

SEQ ID NO: 6981 - DNA, 553 bp, Emericella nidulans
tctagtataaattagtaatatattattattttagttacctgaattaatctctttatatattatatagtagaatatagctaaaaaaaaccccctaaaattttaaatttgctttctataccctggctatgaattaggatcttaattagaaataatataaaatgaattagtaggccctagttagtagtttatataaataatattaactctatttcaattatttagtatctttaataagcccaggactgggcctttctattaaatgaattatttatagctactaggatctagttatttttttattagtaactagtaagcttactataaagtttataataaatatttagtaagaactatctagtatataaattagctagaaatatctgtagcgtttatagtaagaaattaataataaatattataaatatatctcacacccgtcgcgtgggtagtgagatatctttatagaatatagagttttatattttagtcggttctatatcaagactataatatccctggttattatagattatttagagaatcttataattta

SEQ ID NO: 6982 - DNA, 908 bp, Emericella nidulans
  unsure (1)..(908): unsure at all n locations
ttgggtcttgatttcggataattggaaatccagatgctttggcgaacagttattcgaaacagtgagccttcaactgccggctgcgcggctttataagtgctttgttccaataattgacgatcgccctgtgacacatactactctcggcaaagctcaatgtactccgtaagggacacggcaaaatcacaccgccatagcaaatacgctagtcctcttttagactctcagatttcgtccgttatttttgtctagtccgatctgaagacgctgtccttgctagcaatctatcactcccgacttctgcaaagagggttactcgctgcctggcgtgcacgaggaccttactctcaacgaggggaaaaattttccattgaatttctgcgaggattgtagtcgcaatgcctcctcggatacgcctcacaaatgcccgggttcctcaacccattcggtgccagagggtcctccaccaatttgatgtcgccattccagtccgttatgccagtaccgcaacggctacgactcctgctccctcgattgagcagatgaccatttctcccgctcccatcgccagattccctccctctcagcccccatcgcaccgcagacccgagttccgacgctcccaacttctccgccaatacacctccatcattcgcactacgcctcttatggtcttccttcaacatgacaaccttcaatcagtcgaatgggccgctattcgacgagaactcagcaaagctatgcaaaaagttgacgcgaagatcgctgcggaaggccggtccactccagctctggcccnccatatcaaaattcaaatcatccagaccagcatcttcgagggtgcactgcgaattgggagtacttttgacagacaggccacactggagaaggcangtcctcacgcagtc

SEQ ID NO: 6983 - DNA, 536 bp, Emericella nidulans
aaaaaattccataagtaaaaaacagacggtataacgataaacaatcaagcataggaaatacgctatgcttctggctttgcgaaataccaccttgggagcagaaaagagcgtcggaacacgaagccacactagacaaaatcagggaagccaatttgccgctgaccccagaccatcccagaccatcagatgcacaatggcgtatgcgggcgatggtgcaggaaatattatagtccttcctgttctgggctgaccgtcgaggttacaactctcgatccttcagtgccgccgacaacctttttgacattattgtcccaccctccaccgtcgagctcaaaccaagacttgacagaccccgtgctcctgtcaagaactgtccagaatccggttgggtatattaccaaccatctcgctcttggactcttggattgaacgtcgccaatcagtaagttcagttaccctcgctaggaggaaataggaatcaatcagcccatgcccgaagctcctctggtccaggatattatactctacgaggtacg

SEQ ID NO: 6984 - DNA, 574 bp, Emericella nidulans
agcgggaaatacaggagacggctgtgcacattgactgagaccgaactttatacaaattcgactaccatcaaacgagtggatacatgggtagacttatgcttggtcacaactgtgaaaacttactggatacaatacagactgtcaacgtgtgtgaaaacaagcagaatgtgtgaacatgtgttgattataccgatattgctgagctgacgggcctgtgtgagggagactgtgggtccatgggagggtggcgaggctcatcttggaggaatggagtccagccgctacggaaccatatggagagatgaactatcatgatatagctgatgctggcggtaaatgggcctctgtctgtgacattatatagaacgccaaggacactatgaatattagtacagataacatacataggaggagaactagtggccgtttatgtatttatctaacagagggcactgattgcacatagttgtgctgtgtgcactgttacgagatcgggccctacgccttacatcgagactactgctgagcgatgggagattgtgaataatgatatgcaagctctcgattggataga

SEQ ID NO: 6985 - DNA, 626 bp, Emericella nidulans
cggggactgagagttctgggatcatcctttcaataatcccatttttttaaacactgccactcacggtatcttttatcatcgtcacttctcataaccacacccatctgccccacatacacctatgatcatgcgacagtcctgagtgtccaacatccacaactccagacggccagaagtccacaagagaaccactatcatatattaccattttccaacccaggccaacatgcaaaacgccagtccaacccaatgcaacaccatacacatcctcacctcacacacatgaacagaaaaccaacatcctgaccacgatctcccacatagcaatgtgcatttcctctaaacaatactccaatctccattactcaaatccctatcaaaacaaagtaattccaacacccctgccttaaccgcctattccgcaagtcacctctaccatgactctccttgcacatcccgccggatcaatgatacaaccctactctgctcttgccaaacacacaaactccaacgcttaggccgttgtaactgcaatgccactcaatcctttgccccgagggtaccctttcatcgctacctgcccacatttaacgcttgttggatacatataaacccctctgatcctt

SEQ ID NO: 6986 - DNA, 610 bp, Emericella nidulans
tcgcacgttgttcttcatgctgcttaaaatactggccttgccaattcacccgctttttgtctatgacggcaaggataagccacccttcaagagggggaaagctgtcacagggcgcagttacgggaatgcaccgatcatccaactctcgaagatcctgatcgatttgtttagattcccccgtcacgatgcaccaggtgaagcggaagcggagtgctcaaggttgcagatggccggagtcgtggatgcggtcatgagcaacgatgtggatgcactgatgtttggatcgggatttactgtcatgaacttctcgaaagaagctgggagcggtgctggtggcgcaacacacgttacctcttatagaatgggagacggcgcggactctaacgtgaagctggatcgtccaggcatgatcctcttcgccatgctcagtgggggcgactatctaccgtcgggtgttcccaaatgcggcagtaaactagcggcagagatcgcaacggcgggattcgggaaagaccttttagaggcactggaagcagacggggctgagcttgaaacacgattaaacgagtggagagaaaggctgcagtacgaactggaggagaacgagagc

SEQ ID NO: 6987 - DNA, 725 bp, Emericella nidulans
cggtgctgaatgatgataagatgattaaagattgggcgagatctcatcatgaagcagcagctcggttttctattcgttgatggcagttgtataactgttgttgatagctacgtcccagcaagaatggcatttggagtacagtggatgcagaccgtaacttagggctgaactcgaagaagtgattgactcgcaaacagcctggattcggctactgctttttctgaaaattatgtttttcctagattattgattcatccatttccttaaaaaaaaatacgccaagtatgtttttaagttattatataaattcttaatatttatatagttacctaaggatttcctcgagtttatgaacaccagaggctataggaagccttgactttttaaacatatttgagtgataactacatcccaaaacaagatactacacggttatgtttctctctagctttcagagttgatactggtctagtggcgcgaagatccaacaactaggacatctataatgttggacaagatcacgtagatgttagtgggcgtatctgggatttgaagaagcagatgtatagagaaaaggagtactatataaccgatagcctccgtttgcagtagcagttgcttatatcacaggctggcgaacaggcggcaactaaaatggtataactagcacagtaccgtagtggagtccatggacgggaaccaatcggtagatccctatagtgagt

SEQ ID NO: 6988 - DNA, 825 bp, Emericella nidulans
cttatcacaccccgacatacgatacctgcgctagacccaatgaaccacctactgtttgttattcacgcatgatatttgacaaataggagaagcgattcttctatcaatggtgttgtactaactattatagtctctgtggcatccacgtcctcaatccattcctgctccgacgacaggaagaagacgtctaccgcaggggtttcacgcctcctgaatctgaccagcaacactctcagaacgacctctttcgcgcctttatgttgctcgctatcggagcgatccatccctttcgccaggggtcacaccagggccatccctacgggtacttcctgtctgccatgcagcatttccagtccgacagtctctcccacggaatccagtcgatccaggacctgcttcttattggccgcttcggcatttaccatcacattggcacctcaatctgggagatcacccagctgtgcatgcgtctctgcattgagctgggccttcacagaccgccaaccagccgcaaaccgatcctgcaagagcagctcgagcgacgcgtgttttgggagtgctacatcatcgatcgatacagctccatcactctcgatcggccgctggcatcgcggatagagatattcacgttttgctgcctgttgatgcaaatgatgaccagctcgaggctgcggaagggtctatcaccgatctcgacctcttccagctgactcctcaggccaggatagggaatacagagctagcggttttcttcacgtcaatacgccatcggcagattacctccaagattcacaacctgtttcagtctgagggcactcggatggt

SEQ ID NO: 6989 - DNA, 1177 bp, Emericella nidulans
  unsure (1)..(1177): unsure at all n locations
tcgctctggctagccaggtgaagctaggacggagctcgatagggtacgaaggcctgagagagttgcagccacgacatgagacgagtaattagcgcgcaggcctatagctccgcgatgtgacctacggtctccgttactctagtagacacataagacatactgtcaagcgaatcgtaagcggatgacgtgacgtatgcgctaatggccgtgttcactaccttcaagctgagagggtgtttggctctcattttttcttcttggggtatgctcatatgcgtcctcttcctttggaaactgatctgatgtggccatgacgttgcgatgagggaggcaaggacggaacactgagaaggaggggagaatctaacggtgactgggtggatggatgccgttggccgtctgtatagttgtcgaatagttccgagcaggattctgcgaggctctgctggtgcataatacgaatacagtgccccgtcaggacatagtgctgctgttcttaattgtcgagagtcaaaaaaaaaaagaggaaagaggaaaattgggggttgagagctgcttccagtgatgtgacaacctacatattacggagaagcgccctggagggcatccatagccactgcagcctccagctcaaattccttgcgcgcttctcccaggacaggaattcccctcttagtgtctgaactaccagcccaggagaggagacgacatcggtctcagcgaacactacccgcctagttgcaatggtgaatatgaacagtatagtgctggaggacgggtgttatctccgtttcggtttctgtgcataagccgccatattccctccgtacgtacagagtaccgggcctctaagcaaccaaactatggctcatcgatgacctagtgcagtaccaagggaaaagaacgtgcatgagatagatgagccagggcaagggcatggatcccttggctctggtcacatacgtcagaagtcagagtcaggacccatgtcagcgcgcggttcgccagccacttgcaccatgttgacaccagagcttgagatttcagctccgttactgagctgcagaatgccatcatangaccgatgtcttttttacagcacagcggatgtgtgtccgcaggaccctcccattggcgtttgcattgaagcctttctggtgctctttaagtgttttct

SEQ ID NO: 6990 - DNA, 915 bp, Emericella nidulans
ggtgcgttctttgaccttctacttcgggtggcagtacttcggtactgctctgacggagttaacgctcctgggactcggacaaatcggaaatggccttgtccgctcagactcaaagagaccacctctcacaaagatccaacggcttccacgaagtgacaaagaccaaatcccgcattatcctggaatgctccgcggtcgacggattagtcgagttcaaccgtcgagttcctatttggaagagctagcggtcctcagtgtgctgcggactgctaaaatgtgttacaagagtagtatttacgcgtcttcagttcgttgtaggtacgaatggtccattgagatagtggataagtaatctcggcccagatagccaattctcggcttaatcggcgtgctatgccatcgccagttgcaatcgggaatcggcacggttctgcgctgccgtcggagccatatcaaagccaaccacgggattggtaccagcaatggcgtgcgagtaccgtggtagagcgaaatctgtctggaacgcagtcatcgcaatctgaaagaactttcccggagccagagttgggcgttttctgggtgatcagatttttccagaaaaattcgaagacttgtccctgtccgtgccgagcctggtccctgtccctgctgtccctgaaatgctgtcccaaaaatgccggtatgtgcggaaatggattccgccagcacctgctcgtggttttgtcggattttgttcgcgttcggcttcatgcctgcaaggagtgcagtgacgtttcttgcctttaaccaccaagaccatcaagtttacgattggaccagccgtatagtaggccgtataagttttgacacctaggatcctattccggactgcggacagtaaaatgaccacctggcgggatattcaacaaataattg

SEQ ID NO: 6991 - DNA, 636 bp, Emericella nidulans
ggagtataaagccccgatatcctctgtaattggccagccctaatcaaatccaggatttccattcgctttggaagacctcccacgcaaagcgacgaggttatgagtattgacttacccacggcaacaccaatggatgatggtcaaatatcgtcgtcaacccctaagcaggggaagttcgacgccttcagggcaaattgtcagctcgcaaccatcaaaggccaactctataaagatctatactctgctgcagcgaaggatagaccgttgtgcgaaataatggcttcaattgggactttggatagaatgcttcgaagctggagagaagacctgcctccagaatatcgaccagaattacacggcttgctcagtgtgtcccagtcatcaatctcggtgacgctactctacctgcactattcctattttaattgtcttattgcaatgcaccgattgatcgcgagccgagggcttcgaacatctgaagatctactcaggaaatacgaagaactctgcagctcggctcccccaccctacacttcaagagtttttgaagccgaaactctatgcgccaaagctgcgcgggcctcaatcaggctgctaaaatatatgccagaagggcatatatcctttgacgggtag

SEQ ID NO: 6992 - DNA, 906 bp, Emericella nidulans
  unsure (1)..(906): unsure at all n locations
caagggcacgcttgatcggatacgggcagatcttcagctttttgttaagatgattgaagatgaggacaagagactcccgcactttttgcaaggacgtggcggagagaagttcgtcgagagggaaatcacgcatcagttggttgtacttctgcactagatccgtcgcttcacgcagtccagtgtctgcgacaaaactgagggtggcttgataacgctttgcatggcgtagaatgtccatggtcaactggacaccgtctccacgtagctggttctcaattccctccagcgcagtttccatggataaccagaagttgatttcctgcgctgccgacccactatccgcatcgcggacatttttgtaatggtttgaatagacttgatccaagcgttcacattgttttgaatgctgttaatgaacgcactgctctcgagaagagtagaatcaataagatccaccgaaggcttgacgcctcgcttttctgcttcgaccagagctgcctggacaacttcatgcaggggcaaattcaaggcagggatctcgacgttctgctggaggtgtaggagtccgagttccagctccgcgaatttcttcttagtgcctggaactccagttttgacctccgagtccgtctttgctttcgctgcaccatcttgattgcgggtgttggcttcaaagtacgggctaagaccatggtgcaccagcaaatgtacgatctcgtagggcgacagcgaagttccttgctgcgcctgggtgttgttgagggcggccggaccgggaagattcataacctgaatctgcgacgatatgggaagcgatagatcgatcgcngccggccgcttgataaaagctacggacgcgacagttgtggaagaggacgagatttctgcagagagagtgtaaacata

SEQ ID NO: 6993 - DNA, 696 bp, Emericella nidulans
cttttcgagggctacgcgggacggacgtgttatggattctataccccctatttacgattacgatttcacggtgctcagtttattcgcttcttatcgttctggttggtgagccgatgacgggatccggccgggttctttgcgacgttgcacatcgcttgtatataggtcgatctccgaatccattgcagtcagcgctggtctgaaactaaatcgcgagtaccgaaatctcccgtagaaactgtagtttgtgactcggtctatttcttatggtctcggcccgttgatctgtcgaactgtcgattcttactccaaggagaattgaccgaatggaatctcggcatggaatgacgggcggtttacaccaaagcaccttctctaagctagaatcagcggcggtcaagattccttggctaggctcaactacatgcctttcgtagatggacaaatagatgctccatctttctagagtttttatagagctgcgatccatgaaattaaaggtatgcgagggtctgcgcccaatgcagaaacatgcacattacaaggacgcgtctggtgtgtcgtaaacaactcaaggacagtttaaaattttcaggctgcaagagaatagtaacgacattctcaaaacttgttgaagcattagatctccatagcttgcgcgctcgatgtaaagggagatagtggtggtgtgcggca

SEQ ID NO: 6994 - DNA, 495 bp, Emericella nidulans
acgaaagcgggggcggattcctgacaaccgtattgctttttaatcccagccacacagggtccatggtcttcctctaactctacatacctaccttccacaccacgacagacgttaagaaaaaactctaccatacttaatgacagcgaaccgcgtgcccacctcaccattcggaccgtcaccgtgccaagcaatcgcagcggtctaatccggacccggcacgccaccctaacaaaactacgccgctttcccttaacaaacccttcaccagcatccagcgccctgcctgtctctgcgagatgttccgcgtccggctcaaaataccacgttcctttcaggacggaagtggaatgctccccagcggaaaaccggccctggtgggggagaggttagacaaaagaaagcgaaccccacatcaggatagagctgtgatgtgagttgagggagcagatccaggctcattgcgcaagatccccctgtggggagagctgtggtcaa

SEQ ID NO: 6995 - DNA, 781 bp, Emericella nidulans
  unsure (1)..(781): unsure at all n locations
ggagataatctgatgcactcatggggacgcgtgtggaagcgatcgctttacagtttcaagagccttatttatcgacatcgcagaaacacctctagctgggcaatctaacctgctgaggtgctggcaagatctatcatcccctggcaagaaatggctcaccttccttgcctgcctacagcccaaatcatactacaggggaagctgaggttgaagtagctacaaatcttacctaagagagctcttgggtcatcttaaaatggtataccatcttgcacaacattcattagggccaaggaggctggttgtccttgattccctattttgtctctgtttttaccgtataactcctgatgcgaaggtagaagtatatgctatattatgatatttgtcgaaccgagtgtccaaaaagtgcggcgttgggaaatgtatcagagtttaagaagaataccagcgtcttccatactacatatcttgctttgggcatgaatgagctatagaccatcctatagcacttgatgtattgtgttttgcctggtacctggctttacgcacatggtgggacagctcacatgcatatgaccaccccgcacccgacttgcactaagcaacccatcctccagaaaccatcgtcgctgcttttctctcttcaacgtacaaaagcctcattcattcatatacgcacgttccacttcactgttactaccgncaccatggccactaccaccatcactcattcttgacgtctgcttggtaaagtcgcaatgggtacggggggctgatc

SEQ ID NO: 6996 - DNA, 300 bp, Emericella nidulans
attacgacatcacctccctcctttactgccccatgatggaaggtagtacctactttcacacccccacattaaacccctcaatactacactccataacccatactctactatcacacatatacttcccaatccccaattccatttacaaatccttatgattactggactccttctgcccctcgctaacacctatgaatttgaatggataataaatgatcgtgacggagatcatgttcctgagcaagtccaatttttcatgcacagccagatcatatatttcctagcaattaatgcttttcc

SEQ ID NO: 6997 - DNA, 670 bp, Emericella nidulans
ggccctttccgtcccttgcgttcttcgctcaataacagcctcatcctcgggtctagtatcgtagtaagtcatctcgagacgaatctcgccggcgtattttccacgaaactgaagagtgtgccattggtcactctggctgcctccagggatgatgagattctgtagatcaatccaggtctcgccaatcagatcggtccgtttatcatcattgaagaccgacagtttcattcggaaatagtccggcgattcgtgcacggtgaagcggagttcctggtccctatacaaagttagccgaggcagtcttgcaaactggtttgacctaccacttgggcgtctggcctccacgcacgtcagtgccagttttctgggcctctttgcctagacgtgcagcgcagtaagggttctgctttcccattgtcttcctgttggggaggttctttgcacggtccacgacggccaccagggtgccaattgccgggccgtccactgacatgtcggcgaagatgccggcagcatgattgatacccgacattcggagagccatgatggatgttctgagaaaagaaaacagactcgagagacggctaccacatctgtcaaaaggtcgacggtagaaggtaaagagctggccagacgcggacgcaaggcgggtatctaggtaaggagtgca

SEQ ID NO: 6998 - DNA, 600 bp, Emericella nidulans
atcctcactttagccaaccttctccgctcaggtcttgtccgcaaccttggcaacatcacctcgcctaagctcttcttgcatgccaatgcgggtacgaagttgttaattgatgattacattacgcaggtcgctctctctattcaacatgtgacagcgctacataccgcaccggtgcacgacagcggtttcacctcccaggcgaaagtagagctgctacacgacacgcgccaggcttttgggaggtcaacgttgttgctccaaggaggttctatttttggcctctgccatctcggcgtcgtcagggccctccatctgcagggtttgttaccccggattatcacgggcacggcaacgggggcacttattgcggccctggtcggcgtccataatgaggaggagctgctagatattctagatggcgaccagattgatctttctgcttttgatcgccagcgggatggagctctgtcctcgtccgggcttgggcgcttgctgcttccatcaagcctcgcaaacggcggacttatgactttgcttcgacggacgaagcggtactttaccaagggctactttctggaagcagaggttctggaggagtgt

SEQ ID NO: 6999 - DNA, 1114 bp, Emericella nidulans
agagacgttcggaaaagaactttgaggcataggtagattacctagaggatgaaaagagagtgttgctgtccgcccaaatacactatgcacacctgccctacacatgtgtttccctctcttgcctaataacctgtttcaccctgataaaatccatcttggatgagagtgattctgaggagtcatcaaagtcaatactaccacggctctgacgacttccagcccaagcattggtgcaaactgtgttcgagcttgcagggacgaccaggtgcggtgtggagcgagaccgtatcttctcacggcacgcggaaggtgagagggagaatggaaattgattccccagccaagcgaaaccggtctttagccaccctttcttcgagactacctggttctctgtgacgctggacactgggatacctttttcgaggtcttcgtccttggagctagcgcgggagctggaggtgtagtcaatcgagttttttcgtgcatagtggtagaggtcgcttctgtctgattagtatgtagtcggcgagtaaaatttggataaacagtggcttactgtgctttgcccctcccaggtatcaggtgtgctcggcttccagcagatcccgaagtatgggggaaactcccagatgttttgttttccatagggctaaagcagcaatccagaccaaacggtcggaggaacgagcggtacatccgcgatgcatctcgacctgtgccaaaaaaggcaaatgcggtgtatgctgatgcaacagggatccaacggtcaaaatacaccgcgccgccagttggaattctctctatcactcgccaagaggaccccggaccatgaagtagtgaccaggagaatggatgccacggcatgctgagcttgacttgcacgtagaccatatatgcctgtattggggtgagcgctagcagcatgatgaaggcgagaaaaaaaagccgcaggaaccgtgacctgctgagtccggagttagcggcgcgcaggacctcgttgaactggcttcggtatcgtctgagacgaaatagaaggagccctaaattcttagacatattctctggcaaggcatagaagacgtaccgcaatatagctcgcaatgacgcataccac

SEQ ID NO: 7000 - DNA, 819 bp, Emericella nidulans
ggacacttgatctgtatggcgcacagaaaaagcagtgaactgaagatcaaatacacagcccgtcatcgtagctatatttataccctttccacttagcagattctagcaagattgaacttgtggaatgcttgaaacatcaacacgagacctaggccatcgtcatgattgtgcagtctgacctctcctcaatgtatgctttttgaacggcgtcgatttgtacaagggtgcctgcagggtctgtccttgctgccatccgaccgacaccctgtcgccgggccaataagaccatctcgagcataggaaacaagcaggtacctcgcggagtagcggggttctgtgtccgaagggtcaagcatggcctgtccggtgagtcgtcacttgactcgaacccgagctttggaagccactgtaggacgaacatccccatcccccgacgggatcctctcccacaccacatcagcctcttcagcggtggtaagggtgaggttactgtatgtgtgcatggcaaagtttgttttatctccggctcgagtagcgaggccttggagggcagcttcacatgatgggaatgtggatgagttcgtctatctacctatttactggacgtcgcaggctgtcgatggggccgacatcatgggaacgcatggatctggggttgcagtgccagtttactcttgttatgggtatgaccatgggtagtattgacatcgatcatcttgggacaatcaggctatagtcagtgattgtaagcatatttaaatggacggccttgcgcactggtcaaagtcttggttgaagaatgcaacgaatcccagagcc

SEQ ID NO: 7001 - DNA, 536 bp, Emericella nidulans
acagaggcagcgaatactggtctttcgtgtcaggacgaccctttcttctgttatgaagcacttacacctgttgggcagcacggggaagttgctccgcaaggcccatcaagacgacatccggacgattttgaatccagtcattattcaactgctcttccgcctgcgagcggatgttgtagtccggggtgctcagtgcgcgtagcaactgacagagggcggtatgaacttcggggggcagcaaagacatctcgcccgctcaacctcaactgccgaaccaagacgaaaagcagaacgacagatcgcgcttccggacaaatctcagaacgcgagccgagatgtatacccagatagtcggatagtagtgagttggtagtctcgtcaagatgatattttttcttaaataaaggaaattgtttccctgggggaggcggtgggaggtggatctaccgagtgtagctggactacctaatggaggggcgtcgagtcctagagccttcacgacccatcgaaatgaatcaacatcacgcccttaggga

SEQ ID NO: 7002 - DNA, 612 bp, Emericella nidulans
tccgctttgaccgtgaacgctgcgaagactctgtccatgacttatgtaaccgcccttgtctattttaatttgtacctgctcagggcggaacctggagcgtacgctacgcacattaaccccaacgtgatggcctgacaggatgcccttaaaggagtgtggccggctacccatactgattttgagatgaccggtgaaacactacataccactgaatgatatgccacagcctagattcgcttgtttggaagccacgtgcagctaccctgcaatgacctgaacaattaaatcccactaacgtgctggatagacagggccctcgactggaagcaagtctgagataaatcgaggggactctactgattcatttggcacacgggctgatacacttgtctgagaaaacacacagagcgtctgctgccttgctgaaacgtgatctgtacaccgtgcatagtgctttcgacgtgactgagtgcagaacattattagatgcgacacgatgaatggatagagaccggacgtgaacttgtatcttctacactgcacgaggactgcgagcttataacgacctatttatattcacgcagggtatacatatcctattctggtcgatct

SEQ ID NO: 7003 - DNA, 524 bp, Emericella nidulans
tgctatacgaaattctcttaggagcatcgctcacaaccaactctaccgagacagacagactctacaacgatttgactatccccagcaaccactccagatgccgatacgccacgcgcggttgatactccggcgtcatatgcccactctgatacgtctcagcccacatgagcccgcgctcataatgctggactcccatcgtcccttgcggctggttaacatccagcccgttttctgcgcggacctctgcccactcaagatccggcaggtccgcaccaaggtagatcggctcgcttggccgttcctgaaagccgagcttcccgttccaagtcatgttctggatcgagagcagtgtgccgttcgtgatgatgatcatgtcgtagtcaccgttgccgataagcacgcggttcgtcgcttcgatcacttgcggaaggacgtgctcgatcggattggccgagatgtcgccttccgactaggggccagcatctccgcccatgaaaacggcgtggtgtagcaggtagacattg

SEQ ID NO: 7004 - DNA, 754 bp, Emericella nidulans
actccatacttatgctctatcgattggcgctaacgtgtacccgtcacttctattcagcgactttccttcattattcggagctccttcgcagtcgcaaacacagagtccagcgcatctagtatgggcgaatgccagccaacgtggcgtgcaacagactcctgtccaaagacagcagcaccccacctcgcaagccccttcgcgagggccgcaaacacaaactcaacttgcacaacagcaaaatcaatcgtcgcacgatgatgtattcccgtcgggatctcagtttgccaatcggttagacgactacaggaatggtggccagggaatcagtggtcagttgagcggtggtgcgcaaccgcagacggggaacattgaggaattccctcctcttggccggaatatgcctgccgatattggccaggatcgcaggagttcattaatgcaaggtgccgggttcggtgcgttcaataccaacttgcccttcactggcgtcaatcaaaaccaggcacagaatcgaaacgtgatgggaaactcgatcagcggccaagaacggatagcttcaccgggagtaacgaactcatcaggtagggcgcccccactcacacacaccgagtgagcactgatctcgtcctctagcaattgcgtcgtcacggtcgccagtcaatcatcagacagctaatggtattccaggactggaaaaagaggacgccaataatgccggggtatcaagccagcaacagtccataacctcggcggg

SEQ ID NO: 7005 - DNA, 519 bp, Emericella nidulans
  unsure (1)..(519): unsure at all n locations
attccggtttaggttttcctgaaaaaccggctaccacattacggggaaagggtggaatgcgcnnnnnatgactgcacatcctgactcgggggaaggtaggtgacatattaatagctgatagcggggctacttttgggtcactgtaatatggaatagagaacgaatttataatacacttaacagaggtacaaattggacgggcaaagtctggtcgccagcgatccgttgtaatctccagactccaataagcgtatattaacagttgttcgcacaataaaaagactgatgagttgaaccgttggattatgagctggcacggtccgctctcaccaacgagtactggtaccagctggacactttcatctctggggatactccataggccttcactgggctatggggaggaacgcaggacttttaacttgggaaaaaatcagacgtggtcaacagaaaggcttggctaggatacattagctatggaatcatagaataagacgtgcaggtctattctgtcggttt

SEQ ID NO: 7006 - DNA, 455 bp, Emericella nidulans
  unsure (1)..(455): unsure at all n locations
tttacccgtattcaggaactttttatccttgtacgcgcatgacaacgcctgcagagccagtgccggacttacgcggtagctgttcaaaatccccatcattagcatcgcctcccgtcaacctataccaaggagaacatacaatattttatcgacagtctcgcatgtttgagtagtggtcggattctcacagaccaccgcgtcggtcccttctgtcggctcaaccccgtccaaaactagctccacccacgggttcaccatcccattttgcgtctcgaacgtgcggatgttctctccggacgaggtataccgcgcattggtgtcgccgtacacgagcaccgcattgccaattgagttggcggagatgtagtcagagccccgntggccgtttgcgctacggatggagacacaatcctcaacgatctccagaaccgttagcatcgctttcaagcgccttg

SEQ ID NO: 7007 - DNA, 627 bp, Emericella nidulans
  unsure (1)..(627): unsure at all n locations
acgggaagcccagggggagaaccnngacgaaaacaatactaatcccaacatttctcaaaaacgaccaggaaggtgttttccaagcgcttattaggcttccccccttacatccaattcacaagacgggccacacattctcggaggtgactcgcaaaggcatcgactataccctaaacggtacaaacctataccacttgtattccacaacaaccacaacatgctagacatctaatctattttacacaacagatgagaatatcactagatgcgctgtaactagatgaactaactactctatatagcgcgctgtcctacaaaataacctagcagccacctccctgtatgcaagatatttgccaagaactgataggaacaaacagtgccatacctttagccagagcactatccagttgcttgagatctactttttcctatccacgatttttaaatcgctgcccatatactaagaaccaagatatttttaggattgctaaaaaacatcaggctccatggccatggaaggtgaagacctctaatttcgagacctaaattccccctataactgcgttcctttaatatgatataacagtataacttatatctggaataatgcacattgctccaggc

SEQ ID NO: 7008 - DNA, 797 bp, Emericella nidulans
cttgctgggttgcgaggagtgtaatctctgttaggagaattatcccttgtctggggcgcagggaagtcagaagcgttcatcgcgagatgcggaatcagtcattgtcggcgctgattgagagttgatagttggagaaggggagttggcttgactccacggccttagcatccgccaagacgcgtgccgtggacggttcctggcctagaggcaccaccaaccataacgcactagttgttatcttggtacctgataagctcttatgtttttatctactagtatatccattgggctagcgtacttgattgcatgtattgaaatcagacaaggcgcgaggccgatatatattatcaggacgtaaatcctatctattgattggggaagtgccgctggtcaagtctgggtatgcactaaaaaacggaatcgaccgtatatgtgggtagtagatgataacaagaaaaaggaaaatgaaaaagatagagatggaaaaaaaggcatttgaaaatgatgggccatacaggcaagtatgagagggtttccacgagaaagcggaagtgagactgcgagagagagaggctgcgaggctaagttatgtgaaacagcgttcaccaatctcagggtaacgtattagagaatgtattccggaattatataaaagcaaaggagtggaaaatgaaggttattcagaccttatgtaggactattgtgggtatgtgctggagctagtggaacatccattgggccagttggcgcccaagccgatggcgccccgcgcgtgctagccctacaattgctgtcat

SEQ ID NO: 7009 - DNA, 513 bp, Emericella nidulans
atagggagccccgctcaggatcatgtacggtcggcaggcggctgctgacgagctgatcaacggccttcttggtgaccctgacccaacccttcgttacggtggtatcatgacaatcgctctcgcgtactgcggcactagcagcaacaaggctgttcgcaagttgctccacgtcgctgtcagtgatgtgaatgatgatgttcgacgtgtcgccgttctgagcttgggcttcatcctcttcagaaaacaccaaagcgtaccccgcatggttgaactgctgtcggagtcttataacccccaatgtaagtaccgttgccgcgaatgcttctggaatcctaaggggccggcacttgtcttcgatgaaccaattggatctcctcgagccgatgctgaaaggattcaaccgacttctttcgacagggagccctgattgctctggccatggtgttggtgccacaaaatgaggccctgaatcccaagggcagctcattcccaagactttaagaagatggtcag

SEQ ID NO: 7010 - DNA, 927 bp, Emericella nidulans
  unsure (1)..(927): unsure at all n locations
agctcgcagctttgttgacggggttcgcgagtatgagggggaaaagttcccgagggacttggaggtgggggaggatgagggagaaccggaggtggaggtattggatgtcaaggctggttccttggtgcttattcatgggaatgttctgcataagagtgaaaagaacacaggggataagagtcggtttgcatatacgtttcatgtcatcgagggcgccgagggatgggagtatgatagtagaaattggttgcagccgccagaggggggcttctcgaggttataccagtaaggccggacagggctaactgaaagatcgctatggacagatatctcgggattgaatcttgtgatgaatatatctatcatgcattagtgctatacaatcgaggtccttttcccaaacaacctaaaactccaggccaagccatatagaacatctagggcataatgttaagcacgcagcatatccaacatccccttcgtctcgaacgcctgatgcgcaaagtccacttcatccctcacccgccaatgcagccgctctaccattttgtcgatctgttccgactgccccaggttcgcagagtagatatccaacacattcattgctacctccacactcagtccaaccagtctcggctccgtgatgttcttgtacacccactgcagcacgggctgaagcgtgacctcatcacgaccccgcagggccgcacgaagcgcagagcggtgccgcagctctgagaaaagggtaagctgcgcgatcctgtcggccgagccaaggacctggtcgagagcagtagcgtagcggnctttgcgcagatcaagttcccaccccttctccttcttgcgcttctttgcctcattaccgtcgatgatgatgtccactccttcaccgacaaaatccagacctcgccatcgtcgttcccacgc

SEQ ID NO: 7011 - DNA, 614 bp, Emericella nidulans
gcaacgactcgggaggtgctgagatgacggtgcaagagctttactttaaaattaagggggatgagacgcttctgagtaaatggtttcctttcctgactgttttatgaaagaaagaatgccttctgaccccccagaacgcgtcatgagggttctctgcgcgcaccgtgtctatgaggcaaccgcagcaggaacataccggcctttgccgctggcaatggcactagcgactggctctatgccggaaaactttatgaagcatatgtatgtgccttactacatttaaaagatattggcactcactctaattccaggcatactgccatgcaagtgtctgcgaaactatttgagtatttcgagaacagaggctaccggagccccgaagacgcctacgacggaccattccagttcgcgtacggtaccagcgagcactacttcgactggctgaagaaacatcctgagccacagcacgctttcaacgtgaccatgacggcgaccgagcaagatggtgctgactattgggttcgatgtttatccagttaaagagacgctgaccagtcctgacccggatcgagtgttggctgttgatattcgcgcgggcgttgccatactcttaa

SEQ ID NO: 7012 - DNA, 581 bp, Emericella nidulans
ctcccctctttcggtagggcactatgcagccagttcgactgtgtctcgccgcgcattaccaccatatcacccgacgcaagcgagaacttcaacggctggttactcaccccgggcgcctggctcggcttatgccgcatcagaaaatcccgctgggcccccagagagatggatgcaatagacgggtttgggcctaggaaccgctcgtcgtccgagtggtaagagatgctgtcgtcgccggtagcgtagtagttcactaggcagaagttgtagcttgagccatcaccaaccgccgcttcaaccgcttgacgcaattgatcgaggcatttggggatcgggcgcggtgtatactgatacttgttgtcagggatgggtctgcgagttttcacgtccactgggaccagcacatctggccccaattttgattcggactccgtcgctgaggctggaacaaacgccgccgttgcatcgatcccaaacaccgtcgtgaaccgtggggtgttgatttgcgtggtctggcccccgcgtttgatagaatactggaccctgtaaaagggagctcgcgacgcaggaactgaaacagg

SEQ ID NO: 7013 - DNA, 265 bp, Emericella nidulans
atacatggataaaaatcacacccaaatttacctacaattttcatgcacccacagagagccacttacggggaaaataaaaaccccccaacatacaacatacccctgacataatgcctccagcggcctatcagctctatcacaggcacaactcctttctaccaccttctagttctaccctcccctacaagcgacataaacccatccgaaattcgcaaaacattgacctcttcagctgacttgtacgcagccaacgacgtcacaatac

SEQ ID NO: 7014 - DNA, 585 bp, Emericella nidulans
cgcggttggttagggaccttgaggactaaatccccattttgattttattccaggatcactccacacacccgtgatggtgctatatatactcctttcgacctataaatatcccgccattgaagatcgaccatctcatctaatgttttaaaattaccgtttcaaattcctccaatcacaactaacaacttgcatcctaccgccttcaacatacttccctctacgccttttgcctctcaaaaaaacagagcacaattaatgccctatcaaagtccatcaaactttacagctaacatagcataatattacacaaataactaacatacgttgggggaaatacacctccattcttatgaagaccaggcctctactaaatcacgaaaccccttatttgattcaccaaccctaaagaacaatgctactcttattcgccgaatacaatatgaaaaatgaccgaaaaccaatttcatgactatgcattccctgcgcctattgcccgaacctcttaatcactgttgccacaaaaaccatccgttgcacaacatagcattacattctcttaagcaaatacaaataattaccaatcac

SEQ ID NO: 7015 - DNA, 763 bp, Emericella nidulans
cgcaaaattacctgtgatctgtcgccacagcaggttttttctttttacgaggcttgcggctatatgatggcggggcaggggcaaaaaggactccaagatcggctaatcgagaacttaatgtctttacccaattccgcctgggacactatcattgcgcaagccaaccaggatccttctgtccttcaggatggggagactattaaaataattgggaacatcatgaagacgaatgtcgcagcctgctcgtcagtcggtacttatttctattcccagctaggccgcatttaccatgacatgttgaacatgttccgggcatccagtcagctcataaacgatgctgttgcgcgcgatggtaaggtctaccaagctttccctgtattacagctaacaatcttccaggggatattgcaaccaagactcctaaagtcaggggacttcgaacaatcaaacgggagattctaaaacttatcgacacatacgtgcagaaagcggacgatttggagatggtcaatgcgaatatggtcccaccccttctcgaagcggtcctagtggattataatcgaaacgtacccaatgctcgcgaagctgaggtcttgagcgttatgacaacggtcatccagaagttgcacgtatggtgttcccttcccggccgaacctatgctactcggccaccaatatctattgaatgcatgctcacgttttctagaatttgatggatgataaagtgccgctaatcatggaaagtgtcattcgaatgcacttt

SEQ ID NO: 7016 - DNA, 858 bp, Emericella nidulans
atggcaccctgtcaatcgcgaaggttcgttgaaagctcgttcatatgacatgaaggtgtcacggtcaatccgaaaaaccgggaatgaaatccttgatgaacatcaaacttttggggatcggcacaaaaccagccagttacggtcgatgaaagtcaccagcaaatgagttgcatcaataagcacggtcggatccgtgaatgagaactcgaactgatgttttggcacttgaaatccgctcttacgcagatttttgctctcctcgtgcttggcttgaatttcagtctgaatatgcttcgccacaaaaagcttcttgtcaactcccttgctggctattgcttggtggtcgagactgcgccagtaagccttctgcatctgttcgcgccagatcttatcccattcgcgctgactagccttccactcctcgcatttctgtttcagtcggaagagcacaattggaagaacatggcaagggcgctcgaacatctccttaatgatcctctctccgcgctgcctgtcgtaaattttcttgatcacacgctgatagattgcttcgctttggcctccaagaccgcgaggaagctggaaagctgccctctccgcctcggtcatgacgaggaactgctgaacaatgggctcgataagctggatagtccggttgcaagcttcaatatggtgatcatagtcgtgcctgtcttcctcaatgcggtgtaaagcgtcttcgtactgattttttctgtgggcaacgaagccagattcttcagaggcccaagtcgggtgggaggcccactcatcattcaatacacttcgacatagctcgtcacggccgttgcagggcttttgtcgctcgcgcttgggtag

SEQ ID NO: 7017 - DNA, 480 bp, Emericella nidulans
gcgggggagggtatagaccccaatctaaccgtcggattttgtttccatggccgccgaaacacgagaagggaggggcattcggtcgatagcgaggggacataattgaccttacggtacttagccagatcgatctgtccgactacatgcaggatgaatacaagcgcgtccttttcatatccaaaaggggaaagcctaagctacattccatcatgcctgggcctgccttactaattggcgacagacttatccgcgtcatgcctttactgattcacactattggtttgggtggggctactcttccaatccataaccttctcgcaaggaccgctatggcgctccatatgcagactcaataccatccaaatcgaggaacaacatactgtcatgtgagacctgacctgctgaacacaccggttgagatatttgttccgaattgagccgttacatcactccttctcctatatctttcggagggctgtt

SEQ ID NO: 7018 - DNA, 404 bp, Emericella nidulans
tcttgggttggcgcatccatacagatatgagcccggagggggcgtaccggggctggaaggttaaagttcttgactggggaaggagtcacgtcttgcgcgaatgggataaccatctggcccttgtggtaagccaaagagtcgacattgactgggatgcatgcatatcgttgcgcggaatgggcgactctgttgacggaagtatccggggctaggacgaatgcgagaagcttggattactttcaactgaccaggcttgagacaaatagatcacctggatgctgcaccgtagactgggctacacctgatggcaagagctagcgcacgacagtgatgtagatgccgtgctatgcataatgcactatatgacctgtactacgacacacagcacggatccccctctagct

SEQ ID NO: 7019 - DNA, 331 bp, Emericella nidulans
ggtggaggaccagacggacgaaggggtggatgtactgccaccgatgggaaagctaaatgcgggtgccacaaccgggggatggcctgaggcgcgctactggacgccagagatgatctggccgcccgcgacaccaacggggaggacccatccactggcgatgcaccagccatgggtgcagtgtgcacttattacaaggacgaactgtggggtcattgcacccactgccatgaggggagcaaaaggaccctgtagatgatgcacaacgtgaagagcggccaggcttgcatgcacgagatccctatgcttcaggcactgaccaaatcagatgcag

SEQ ID NO: 7020 - DNA, 612 bp, Emericella nidulans
aaggtaaaagcccagcccgccttggattattggcctacatctttcagatacaaggttctttttccccaaaagccagacataacaaagggggggggttgaataaataggacaccaccttctgcgatgacgtactgcacggcacggattgacaggccaacagggttgaggaacccactgcaatcatttaaaaacgggtaccctgaataacactcaccagagcccgcttgcactcgaattgaccagaacacgagcgcaatatgaggtggaaattgaagctcaccattcaagaccactgatcatgatagtcaacaagacctactcgaacagcgttgacggcggtgaatcaaccccggccgacagtctaacccagcttccccggacattttgtcgaaagcaagacataggccttcttctacgggaaaagacgactgtcatcccaagccctagcctccatcggagagggccgtctgaaaagggcgcaatgctaaaggagctcgtggaacacaggacgaagccattgggtggatactttggtccgcctatgagcaaaaaaacctttggggaacgtcagcgttactcactaaacattgattttaaaagaaaaaacaggga

SEQ ID NO: 7021 - DNA, 394 bp, Emericella nidulans
gagcccaacattctatataaaaaatctgatataaaataagaacttaggcttttttagaaaaaatagtattttatatgtattttagcgtcatttagctgtttaaaaggtgtgtataaaataaattcttaaagatgatttctatatatattaggcaagctattaatacttatgaaaactaaaaaagagttatcttctgtaaaaaacatataaatttattgaataactaataactaaaaatatttttattgtatatactaagatctgacggagtactgtaacaagtggcggtttagcagtgacgcaccgtttgggggtccgacgaacgcatgtagtaattaccacataccaaacattttttctaacggctgacaaacttacgtactaagaaatatat

SEQ ID NO: 7022 - DNA, 689 bp, Emericella nidulans
acgcgaggcgcatggggggttttttttaaaagaactggggctagcacaaaggcataaagtctatgcttatgcattatgtgagattgattccatatcttactagatttaggatcggacactagactaactgcatttaccggaaacagatcgaagagggccagggcgtttagcaggtccttgactaagaggaggagatttctatgcttgaatttgctaaatttgaggagaagctctgacaacaaaaaggtgcccaggcgaccgctccctcttctctagattcggcgccctagaggagacctcgtatttgactttgtagataataaaacgactagtaccaattctgtacaatatattacattggggtcaaagcctggccacacttgtgacgcgttgaagaaccaatataaatacatccagcactacaccactaccaagatgagagctttctgtactctctgcctagttcatgcatattattgaatgatagataaaacttgtaaataatcaataattttgaaactgaactgtagattcaaattttccaggaaacaacccttcacagtgaagcagttggaattatttgagggtccaaggttaacacataatggtcacggaaggaagaactctcaagctttactaactctgggcagcccctcgtaagctcgacagtcaattgcatcaacaggaag

SEQ ID NO: 7023 - DNA, 386 bp, Emericella nidulans
aacttacttccgaccggaaaaattgaatccaatgttcacagtgcggtcctcaacgataggctgttaatgaccacattactttagtcaaaactaccttgacacccctgcctcttagcaaacgtgtagtgtgatacatagtgctactacaggagacttcacgagatagagcacctgggttgagcccatgctttttagttggcgtcgtgttatgtggataaggacggcgcttacgtggtggcaaataacagtgacatgctggtatgcaccagtggtgacccgaacttaaatgaagaaccagcctggtcccttgatgccagcgcgatctcatttgacattacgtgtgaagaaaggtactggttagcagtttacggagtgttgactgcgct

SEQ ID NO: 7024 - DNA, 474 bp, Emericella nidulans
cttttacatgcatagaacaacgctatcctgttcattatacacggacctagaggttcctaatcacaacacacacacataccacactgagcagaacgccaccacacttctgaacctgatctgtggctgcgcgctcaattccattggcgcatcacgcagaacatcatgagcgctccgtgaatccctcaaccgcgcatgcccactgctactccgggcgaggactacatgtggacggtgaaggtgtgactgagaattcagcgtccttattgcgcgaggctcacaagctaccttacccacaacagcgagatcctagcctatggcctgcgaaacagacctgcatccttggcttgcatgcaggcacgcacaaaagaccagcctatacttggtgtgcacgacgcacagagctcaggatgccacttaccatgtgctgttacaataacatgacatgacctcgattactgacacagagaccggcta

SEQ ID NO: 7025 - DNA, 515 bp, Emericella nidulans
aaggacgggaccaccagaggaggttctttgtcaccggtcgcccgacctgcaaacggtgaaactgatgatacagcagacccagctggtcagacaggcgaggacaaggatgatgatggggcgagtgtgggaaacacggtcgaagagcggttaggttataatcacgcagactaggcgagggaggagacggagaatgaggtcaatggtcagggcggtagggtgggggacaaggtggacaactaggtataggataggatagaggatagggtcgaagacatagctgtcaatacggccgaagatcggctgggcgagacacataacgagcagcacaatatggctgtagaggcatgcaattcaacagatcaccgaggcaatcctggtgactgacgaggcgacaactgaggagggaatggaccatggagaatcccggcccgctatcaaggacaatatgttcccagaggatgacctagagtgaactgtccatcatggcctgactggttcgaggtaaacccctgcaa

SEQ ID NO: 7026 - DNA, 552 bp, Emericella nidulans
agacgcgacaccccttactctggggcggtttcgagcctggctgggggatgcctactatgctcttgtgggcaatcttcgtcgggttgggctcatttcggatccacccttctcaaggctaaccagatggctcgcaccggcttacgttctacccaccatgctcgtgcctgatttaccgagcattctatggggcgacgccatcggatccgtccttggggaccgattgcaatgctacggcttcgaggccatgctgcccgacccttacgctggctgcacactctgattggatatagagatcccacgctacaattcttgactctgttaccgctcgaccatacactactcataccgtctagaccacctgtcaccaccagacgacccgaaagctgccaccacgaaacacatctggtatcagacgcctgcttaatccacacgcccgtactgttcgacaccatttgaatacctccggaccagcctaactacgcataaacgtatgctatgtgatatgcggatctcacacgcgcctcttagatgcctgtataccggcaatgtgtc

SEQ ID NO: 7027 - DNA, 652 bp, Emericella nidulans
agagaggagtgaatgtcagagtttgatgagttagcgtgggcaggaagggggtatgtggaccgcttgttgtgataatgatggtgagggtttggatgaagagggtaagtagatgcgggacgaagaaagggttgtgggagggggctgttgagctgtttcgttcgtagttagctaggctagttctttcattttgttgtgaagaaggccacttacgaagtgaactgcatcatcatgatctcaaaacgcccggtcaatggatagaagaagccctctgagagaaccttatataggtctttcactgtggacttctgacggtgcgcctcgcgctgctggcgccttttctcgacttccatacgggaggagaacttgcgtactttgagcgcttttggaccagaaacggagtctgctgcctctgtcgcgattggctgaagtgatgctcgctcaatgccccttgttatgctcgctatgggagactcggggctggcgtagaacgcttcgagattagccggaagtcgcttcgaagggaaggaggtatctgatagggccgggagtcccattgctttcgcgtcatccgtcccgactccagccacctctctggcgctgaggcccagggcaataaggaccgctgaccgctgcgcttgagataggtcggcgt

SEQ ID NO: 7028 - DNA, 989 bp, Emericella nidulans
atgatgttgtctgaccagccaattttatgattattttatcgttattattgatattattgtgcatgtcggcacgtagtacgacatacctccggttgcagcactaatgcttgattgtccaaaccttgcgaagctcttggataggtcgaataatccctctttagaaggatcaggaatccgctagggaagtataaacgaaccagacaaagtgtatttccctcagctgacgagggacgcggacaaactcccttatccatcttcaagtggagcgacaggggagctcaaatcgctttctcggagtcacggccaaatgactcgcatgagcaaagcagcttttcagcctatcatgtgctcgcccaactgcgaaactccaattgggtatcggtcaactgttgctgcggttgtcacactgtgttcagaccgatttatgcataatgtgtagtggtgcatcaggcgtcttgcacttcgtacggactgctccgtattgaaagcagtatcgcattacttggacggcagccctgttcggtaaggtcggcgatttcgaggtgcagattcggttctcggaagccgtacttctgatggtcgccaaaagacgctgttcgatgcgtcgggcctacccgaatgtcttcgcaaggcggtaccgtacagcccactggtctacgacccctttgctgtcatatctattgacattgttttattctcatcacagcttttggcgggtgagctaaagatgtacgtttgaaactttatataatacaccaaactgatcatatgctcttcccatatatatctgtcaagaacctacttttattggagtaggcccttaagaccgtaatctcagtaagatgccccttcggggagcccgtgggtctttaaacactcaaagtcatagggtcgagccaaaccttccagaaagcccggttggtagttctatgaattcaagaatatctctacttatcctggggtaagcccaagtcccactagaattcaac

SEQ ID NO: 7029 - DNA, 616 bp, Emericella nidulans
  unsure (1)..(616): unsure at all n locations
ctagagtgagacccacgctcaggatcactagaaccgacctggacgatgtcgaccggaagacacgtcgcctgctcgaacggagacagcggaacaggggaggggaagggcccaaaagagcggcaagaccgcccgcacgggagaaggccgcggccccggnacgcagcgacaccacagcggcccggaganncnnnaaagaccgccccgncncgaggggcncaacaaannngaaaaacagcgngacncccgacnccgnacaaggaaccgaagagaaccnggncccaaaaaannccgggggaaacngngcgccccgccagacccgcaggccgcccgcaagccagaccgcgacacgcagacaccgcccacaaccacaccaccagacccacccaccaagcacaacaaacaacgcacaacacgagcgcacccacccacgcccgaacngacccacgacccaaccccccaaagacaacagacagcgcacagcacagccgaagacgcgcgcgaaaacggcccaccggacacccaacggacagcaacaacaacaaccagagaccaacaccccaangacaacccaaccccacccacaacganaaacccagaccacaaccaaccaagagac

SEQ ID NO: 7030 - DNA, 227 bp, Emericella nidulans
cgttatggtaccggcgcaatggtgttgtgctggcactgcgacaaccaactgcgtgaccagacatcggaatcactggagctgcttgctcaacaaaatctgacagcatgggtgattgacgtcatccgtcacgcaataagcggtaccaggagcgggaattatctttggctgaattatcctggtgggcggtctgcaatcaggcggtggatgcactacctgaggctgtatcg

SEQ ID NO: 7031 - DNA, 579 bp, Emericella nidulans
gatataatttagatccagggcacccttcaatcattcgaagtgatattgatggcgcagttgactttttccgtcttgagaaaggtctgacgcgtatgtgtgtggagttgaacaagtctgcagctggttggaagccattagatagagatgcaatcacacctgaaagtataattgttaaatgcgaatatattattcggccgtataagggtcgccccttacactcaaagtgtgcctccaaaaatgaacttactgactttgggttgctgctttcatagctttacattaaggaacacgtatggtaagttccagttcgcatgcctctcctgtgtacgcgactaatatagatccaggtggtcagcatttactgttgctcagcgcatcagcaattcgatggccgaccacaatcgcgggttattagttggcgacgcggtccacacacattccccgctgtgcggcgcaagcatgaatactgctgtgcagtatgtagttttgctgaatatgcaatgaatcaaccactgacaggctacatagagacgcatacaatctggggtggaagctcgctggcgtacttaaacaccagct

SEQ ID NO: 7032 - DNA, 646 bp, Emericella nidulans
ttaccaataatgggcaatagcccaatgaatgttgttggtgagacaaggttctccaaagatcgtttagaatccgatggcgaaaaagccggcgaaggtgctaacaagattcacaaagcaccccacagtaagaagaacgaaaataaagaggcgatgtcgtactgccccttcagcaagcaagggatgcagactgcggttgggcttggattagggttacggtatctgctcgaacggctcttgccgtacatgtgcttttaatgtcatctgcatgctgcccatcagattgctagatagcgctgataaatcgtatactatatcaatagcactttagatagcaagtaccagaaaaagcgttatcagagctgatatggtaagacggcccggagctcatggctggacccagcctcaggatacgacggctaggacttcagacgtggccttccctctaacgaaattagggagaaactgcatagaagactgaccagaagtcacgaaaatagcatagatcgaaataaaattgaattgtagaaaggattggataaggaccaactagtagtccctgtccttactgctcatgcccgtaccgtatgatgtacactaggttggattgtgaaacaagggcattatctgctcattaagacgagcatat

SEQ ID NO: 7033 - DNA, 520 bp, Emericella nidulans
catgtggatcggatggcggcggaacggggattttcgataacttcactgacacattcgtcaatgcattcacaaaggtccataaaccagatcgccggtttattgaggtgcgggagaaggcggacaaactggatgaggatctgactcatgtcgagaagattgtggcccgagttgcgcggcgggaggctgacttagagacggactacaatgatctggcgacgcagtttcgtaagcttgtcccactggagccagaagtcgaagtgccgctccaggtctttgctgcctctgttgaagaaaccgcgcggggaatcaaaaacctcaaggatcacacggatcagaactacctgggctcgctttgcgacatggaagcctacatattgtccggtcaagtcacttttaaagacccgcgagcaaaagcagctcgactttgaagcgcctgtcgactaccgcaacatagcggtggcggagcgggacttcctcgccggaattcaacttatactatggcctcaacccgtgacttatt

SEQ ID NO: 7034 - DNA, 1021 bp, Emericella nidulans
gccaccagactccccgagaatatactggatatttgtcggacatatggccgtcaatattattccaactctctatccgactaggtagccgatctaagagcgatctgcgttcagcgctgacttagtaggcggcttagaagccgctcttcatttggcatacaaccagactagaccccacgggggacaaaaccaaggtgtcttcaaccagccgttcgctatagatgcagctacatggaccagaagttctgccagacgaaaccactacgacccagctgtcagccgtcccaactatcatttcctctcagacactaccgtggcgcgggttatcttcgatggaacgcgagccgttggtgtcgaatatctccctagcagaggcggcggtatatccactgcattcgccgcgaaggaagtccttgtcgctgctggtgctctccacacaccacaggttctccaactctccggagtcggaccgcgtgacttgcttgaggcgctcaacatcccaattatctccgacttacctggagttgggtctaatctgcaggaccagacgacattcccgttcgtgtatacatgtcagtagtcggtgcagccttctaatctcgctagtactgacttattcttgctaggggacagtgccgtcaccccaaacgtcaccactttcctcacaaacaccacttgggcaacggagcagcgcgtgctatacgaccaacacctcccaagcgtatggactctcactaggccacttgcccccaaattcgcgttcctatcgtacgaggacgcgaccgcaaacaccgcatacgcaagcatactcgacgacgcccagcccgtgatccagcagactccttacccggagacattcatcccactgttcttgcaagctacgccgtccaaaggcaaataatgtttaatggatttcgcgatgcttgactggcagtttgaggcatgtcgtgggacactgatgcaaacgtgccaagtcttaacgtgaagccttcaaccgtggtacgttatataaccagacgacccg

SEQ ID NO: 7035 - DNA, 764 bp, Emericella nidulans
gcgcgcagctgcgggtaccagagtttctcgacggggacgcagatgaagatgaataagaaagtaatgcagatgacccagaggacaatgaacgtgctgataatgtacgcccagcgtttgaagtaaggaaaacgaaagatgcggtagtagaagagcagaatgctcattttagtccagaccagattgtagacgtacaggacctctgcgacgaccagatacttggccacgagaacgactttcccaggaggcattgtatctgcatggaggcccatgccgttatggtacataagaaagataaaggcgacgacgatcaggttccagccctaccgccgttaatacacgcgacgctcacaacgtttccaaggggggtgtataccatcgaccaaagaatcatccagtcgtcccaccagagcttttgtttccgttcataccgggcgagcagccgcagagcaacagtcacaaaggccaggacggtgacagaaacgacagtggctagcgtccatggttggaggctgtcgttgtcagccattctgcaacggcgagacagacggacacagtagaacgaaaggacatcgacacagagcagcagcggtttgagacgagatttaaagaaccggctatatatctgcctttgttagagttcgcccgtgcggccagagagcttttaaggcatctggacccagacaaaggactagcaccaggtgggagcattctatttcatattgacttagactagaacctaatacaagcccaacagatgagttcct

SEQ ID NO: 7036 - DNA, 1105 bp, Emericella nidulans
gataatgggtcatttgcggaacaggtaagcgaacctgtcgtttgttgagattatctcggctcgttctgatattgatcatccgatatgcacagaatgtacggatatgctggtcgaggggctacaacagcggcttgcggaggcgacgaaggagcgggacgcatacatcacctttctacggaacctgaactcgtcggtcccaacacaggaggaggttgaaacagctgagaagtctcttaaagagactttggaagccgaggaggcggcatacgcagaactggttgcgttggaaaaggaaaatgctgccttggacgaggagattgctcggttagaagaggagtctcgccaactagattacgaagaggaaaagttttggcgcgatcggaatgcgttctcgttggtgcttgctgatttccagaatgagcgggatgcgttgaatatgaaatatgaccacgactctcgccagctggaaagactgcagcgaaccaatgtttacaatgatgccttctgtattggccatgacggctattttggaacaatcaacggcctccgactcggccgcctggcaaacccttcggtcgaatggcctgagataaacgctgcctggggccagactgcgctgctgctggctaccatagcggagaaactgaactttcagttccaggggtaccggctgcggccgatgggctcgatgtccagaatcgataagatcgagtatccgcgaccgttaccggcgcaatcgaccgttgaaggagctagcaatgcccatcaaccagcggcacccaagatcaccagccttgatctgttctcctcaggcgacctgccgctccatatgccatggcttcacagtcggttcgatgcacgaatggtggtctttctggaatgtctacggcaactgggggagtttgtggaaaaaacacgcgtacgctcgagtcggcgggaccaggccggagctggcctgcccggtttgaagttgccatactctatcaaacgagataagattggcgatgccaggattaagcttgcgttcaaccaaaacgacgagacctggacgcgcgcctgctagtataccttgacgtgttgggaattcttgtctgcccatgctagc

SEQ ID NO: 7037 - DNA, 407 bp, Emericella nidulans
ccctagttggaaaatatatgtccaaccgatgaggctatacccaactacactggggcgaccttttacctgaaaaggccacgcttccaaaggtgtaagcaagcaccgtgcccgccttgggctgcaacgtgcttgccgccacctgtccagggtagagcttacagagactattctcctacggaaagcttgagctgatccacgctcttttactcccgaggaggataagtctactctgagcgcactggcgtcgatcgtatataaaagccctcgacacaagggccccagaccctaccaacttctacagcgagatgcttacctaaagtcttgttgcatacagtatacacgaaaccgagaagtcacacgtgagctcacaatcgctaggcaacgccctttatggaacggtcccttta

SEQ ID NO: 7038 - DNA, 1373 bp, Emericella nidulans
taggctgtggacggatctggttatagagacatgttcaagatcgtaacccgaaatgacgcatagggtcctaattagtaaccattgaaggaacttttccgtcagtacgggctggccgtcttgaggaatcgatggctgcttgccttcacccttggggcaggatggggccgagttccgcgtgcagggcctgactctgaaatccccaatggaactgcggccgagcgacaagtctctgtctgttgaactagaaaattcagtctggggccatgctccggcaatggtattatatcataccttggtcctcagtaataccttacagaagtgaatagtccattagttgtgtcccttgagttgaagattgatgcaaccagagcacgtcaagttttagatttcatcaaatctcaaacgaaagagctctctgacgatagcttgaatacattgttgcgtaaacagagcattaaaatgacgtttacctgctgcattaagttgtacaaatcattgctctatgttagcgttggcggacatccatatctacgtatatacatccgtcgagtttttatacttttaacgtaaacctaggctttccactcaatcctcattgttatatttacgccatcactaaattaaacgacactcgtccctattctccttggtcatagtttcgctaaactaagaatgtgcgtttatacatcaaatcgccgcctgtggcagtatgatatccgaagtacattacgtgaaaggcaacaagactcggttcgagtatcaaaaaattattcgggccgtcatatctgatattttgcttagctggtctaggtcatcaaattgtataaacgggtagaatgctcagtccgacctctacgacgctctttaataaaaaagttctggtaacaaacaccgcaagcctacttgaatgatcaccatcttcccagaagaaaaatttcaattctgttgaaataacgatctatttactccgcttcctttcccgggtatcataacatacagacgccctccaatgaccgtaaaaacgccaaggctatatgctttttttttaatgcgaaataagtgaagaggtcctttcattcccccctcttccaataatccttcagattgttcagaatcagtccaagcgactcgctatagttgtttgaagctgtatcgatccaatgttgtgcgtagtaatcgcgcagcttatggtttgtcaagcggacgcccttggtatttttgcgtgtccggttatccagagccatcagtggtgcgcacttggtaaagaaccagatcagacctaggaatcgacatctagatcagggacctcgggtccagcccctgcccggcccatcgtccagaggggaagtatacacgttgtcccacactccttc

SEQ ID NO: 7039 - DNA, 687 bp, Emericella nidulans
gacataaaatatatttaagacgtacgtatggctcgtgtttgatcagcacctaacatataggcgccgataagttacaagtctattctagttctctaagtgcactcagaaatcaggtatttctcgacgacatgaatgaacacctaacgagaactgcagatgattattaagacctggccatatttcgatataccccacgaaactctcagtgatgcccgacctcgatcttgccgaggctttagagggacatgggactctagcggagcctactctttatatctcatccacgtgccgatgaaaaacaatgacattctttgtagaggtaaaaagataattggcgaaatcatgccatcgcagtctggacacagggtttacaagaaaatcctctttgctgcgtagtcccctgtaccgctatcctctctataagcgaaaatggattattcggtgctcattcagttttcgaggactgactttgaaacgtggcaatggagcgacagtaatgcaacaagacaatacgataggatcagagcattttaagcagattggtaaagcaacagagcccaaaaactcggatagtctcaatgcgtatatttattcaaaaacatggctagatgcacctacagtcaaagaactagctattttaactcgctcatgccctattatcccgaggtggttaggtatcctcacata

SEQ ID NO: 7040 - DNA, 826 bp, Emericella nidulans
  unsure (1)..(826): unsure at all n locations
atgcttgtaacagcactgaaccttttgccaaagtgtttggggacatcttcccgtcccttgaggaattgatcaactcgctcatgcatcgcacgcttgtgggcctcctgctgaacgcagaagtgatcatgatgagacacttcaggacagggacggacgccttctaagacgatcattgatgacctgctgcgagccaactcttcgtcttcaacagaagaggctgggccacggattgcaatgatgtggtccctgatttcattcatccgcaaaatttcttctgctactttgcccattgcatgcttgtaagcctcttcctgcgccctgtaggcaagagagggaagctcggacatggaggcatccaagtcaggaaaaggctcagtggaaatagttgaggaacgggaccgagggcgtaaagggaggacagtgtcggcctcgttggcgttagagcatttggtcgaagtagtaaccacctcgttctgcaagtcgtcgcttgactgcgcgtggctttcaacagtggcatgacgatactgatcaggcgcctcgacggcattcttcgcatagggctgatggtgacaaagcccggtttcctcgttctcgtggtctgtcaaaatatcctcttcgggttcctctggagtaggaggaagagtagggtatgccgaagcagctccttcagacccatgtctggagaaataagacatagcttctggaaggaaggtgctgggtgtaattcgcaaaagagagcttgtcgcgatgaggtctagaatagaagccgagagaaaccttcangtgggctagatattggcacatgcgccaagcgaatgtgaatgca

SEQ ID NO: 7041 - DNA, 460 bp, Emericella nidulans
ggtccggaaccccatgaacgacggggacaagtgccctaacggctagacttgacttttttggacaaaaccggatgccatttggtgggtgcggccctctcagggcatgagggccccaacgacatactgatgagaactgcctatgacagtctatgtgtgataggggcgcaagttatgacagaggggcctatgcagcatgctgctggactggaagtagacacgctcgccccttgacgatagtagccattgactataccttggagcctgacttcaagtatatacaaatattatgtggtgctaggaatagacatataatatatacccgaacgtgctgatctatggacggtgaattgcagttacacggtctactgcatgcttggagcatgcgactaggcgaacctcagcgcgacctgaacgactttgatctttactgcctagcgtcatgctatcagattcaacactc

SEQ ID NO: 7042 - DNA, 926 bp, Emericella nidulans
gcagaactattcaccctcctgaggctgaagaagctcggcttctagcggacctccgccgggcgtgtctctactttatatatgatgctctttcttccctaaggccctttgagctgcggaagctaccaagccaccacgccaaatatcacagctggatgcaggtacaggtctcactcgccgctgaatgtcggcttgcagaagacagtgcacgctggtcaagtgacacgcaagaacagcgccagtctttgattgagcgtgttggacgttctagcgtcaacggagagatggtttgtaagttgggacctcatttggccgccatcatccgccaggagaagatgccactagaactaatgatggagaacaacatgttgaatcactactatcaaaatgccctcaaatgtgaccgcattctttcacaggccgctcacattttgcagaacctaatccacaagaatcctcgcgcacgaatcctggagataggtgcaggcactggcagcttcacacgatatgccctgccgaagatcggtacggtagctactggaggaccgcttgcggagctatatcactttaccgatatctcaccggctttctttgaggcagcgcgggaagaatttgcagcctgggatgatataatggtctttgaaaagctagatattgagcaagaccctgcgagccaaggttatgatatggaaagctatgatatcgtagtcgcggtacaagtactgcatgcgacaacctcaatgtccaaaaccatgtctcatgttcgcaagttgatgaaacccgggggccacctgcttcttgtcgagactactcatgatcagctggacacagaattcgcctttgggctacttcctggaaaatggcttagtgaagagcctcagcgtgctctcagcccttccaccagcggacccctttggaaaaaactctta

SEQ ID NO: 7043 - DNA, 539 bp, Emericella nidulans
actccttgaatccttagtactggtccaggatctcattgtacaaatcccagacattccagaaactctggcccaagaaatgtgtcgtcgcgctcgtggttgcacagctcacgaacataactagcactttactgatcaggatccccagcgactgggaccaagtcgcctgcgagggtctcgtcgcgtatcttgcaacatcgggctggttgaccagaatcggacagagcgcgcccatgacgctgttaatcgcctgaatcataggccagacgagtgctgagccatgaagagtcacctgagtgtcgaatgcaaaatctcctagactgccgccgttcatgtgcacagcccatcccaagacgccgagtaaagcgacagtcgtgtagacggccttgataacgaataaatgccgcaaaacagttgggtgcagaaacatgaccccaaactggaggatccagaagataaagaaagccagcaggtcgcgactggtataaaaacagattcaggaagccgattcggcaggttcacccagcccccccgggatattg

SEQ ID NO: 7044 - DNA, 780 bp, Emericella nidulans
catggtatcaggtgaagctgacacgtactgtgcctctgtcgctagatgtatgagcgcctgcatacttacgaatgactcggatcttcttctccacgacctcggaaaatatggttcggtcgtcttcttagattcggtggagttacgagcaggctttgagcagccactatttcctcaaatcaaagctacgatgctgcgcccttcacttgtggctcggcgcttgggaattcgtagcttgctattgcttgcatttcagatatcgaaggcccggccagaaactagcttggtagagctacttcggcggacaaaaatgggcatcgctgaggtggaaatggccagatatcagcaattcgccagtgaatatcaaagcgaccatctccagatgcaagcacagggggcgaaagagctcctcgggatcattgataccaggatctcggaattatattggcagtacgaaatgcgaagtgagtatacagatatgggttacccacatgtctacctttctgttctcaaggaagatcatacaagacaatgcgcgtgggccaaaggccgcaaatatcgccaacttgcatattcaatcatgaacctctcccgtcctatcgatgagaggcattgctttatagcagaattcgtccggcgcggtcggcgaatttctgaagataaattgagactactagatgaaggatcaatatttgccgagttagaactgcttaaagcccgtctagagtctttgcaaagcagcttcaaaaagagcagtgataatctagactactgggcagcttt

SEQ ID NO: 7045 - DNA, 555 bp, Emericella nidulans
tctcccaggacgacgcaggcacatggaccattggctggccagcactttccacatggattggccatataggatcacagagcgtgcgctgaccaccgttaggggtgaaaaggcccacgtccacaggagcatgaactgaacggtgcagagggatacgctggatatgctccatgacggccgggccagcacgcatcgactgatgttacttgactcagataccaaagggccaggccggattgccaaaaccggtcgagatcaaaccggacaactgggcgatccgaccaaacactgggcaaaatagaccggcccaccgcgcaagggactcatgaacgatgcactcacaaatgcattaaggctgtccatatgctgactggcatactctgaatagcactacgcaggcctcggtcacactggactggacaaaacagccgacgagctcgacgaggagagtacatgtgagccgaccggctggaaccatagaatggacgtgctggacgacacaggctagacagcatgactctgctagactgtagctgagatatatagcgacactgccat

SEQ ID NO: 7046 - DNA, 637 bp, Emericella nidulans
atacgagcttgcatcagtccgcctggtggcccaagacttagcggcggctcttgaaacatggggacgcagatttgttcccagagagcgactacacgtggagaagcacaggcagctaatttccccagcttctctttgccaatcagaggcacaaacttctgatcatcagagccctttatgaatcaatagcgcgaatatgagcgggcgctctccagacttacatagtaatcacctatattggacagaaatgtcgccgcgtaatctagaaacagttggaagtcatgaaagtcaaggcccgcccagctggcgaggcggtcgcagtcgccactgcaggagaaaattagagggctatgatgaaatcaaatatcgagtttgctccaggagatacctgtcgaagaataacatgcgtgccattccaagcagccctagttcagagcaccagtatgtgaaaagcttcaacctgtgcaaagatcagcagactaacctggacatatgatggggataaagcttctggcccgaatctaattgaccgaaacccgacgctactgataactgaaacatctcaggtgctgccattgcaaatgaatggcactgggcatctaaatgtcgttgcgggatggcgtagagccaagggcagtcc

SEQ ID NO: 7047 - DNA, 1275 bp, Emericella nidulans
atctgatgtattgacagatgggtgattttctcgctatccagccccctgatcttcaatggtctttcggatggtatacacacatgggtttattttagctgtcctcatagatagtaaatgtccgtggtaactgacccagatttctaggggcagagtagaaggagtagagtggagggcaagttctggggataaggcacgccggccatggtggtacttcctcgctcacgggctaaacccagcgaactacaggagcggaacagtgatattcactttgcatcttcggagagacagtccaaagctgttcacacagttaggagatacttgatctgtaattacattccagcaaaccgccaaattcagaaatggggggtggtggtcactggagactgatattgcttaaatacggctccctagacatgggttccggcccacattttctcctcagggtctcttaatcaggggtctctctgtttggtgttgatcaaggcatgaataaggtcacaagtgccggtaaccagtggcgacaggtttttctgcgatgccttggagtctaaaaggttgcggacgcagagcaatattgccctagtggcatccggtgatagcgaatttcggggagaagagactgaatccataaatcccagcatgggagtgccggaacctaggggaatccatttttgtatagatggggaatttgtcgaatcgagttggaacttgctcctggcattcgaggcatctgaaatgcccgtgaggcctgtgatttgccaacggcctatcaaatataacaccagtggcctggaggtgcaactgcgagaacttttaaaattttttaggaaggtgtaagcagcattaactgggttgcctttaaatgtttcctgctatggtttacccactgttcgatcgatggcggtttgttttcaggcctttttgtgcatcccttttgtaatggtaaagggctaaatgcttgttgcaatattccttaggtgggtttcttctttaatatttccgttagttacattttcgtcattttgatattctttcttatttatggttttactttttatctacacattttaattctattcctttctcaatgtatttatttacaatttattcattttttttgctctacttcctctattatactttgtcttccttattctttcttcaattatttctctataagtgtcttccttatttaccttattttttttttttacttttacatacttaatatttttatcattactctatttatcatttattttattttcttcatct

SEQ ID NO: 7048 - DNA, 934 bp, Emericella nidulans
agctcttgaagcactagtcctacatacaccactgtatttgataactgctccgtgcctggaggcatcctagtaatcttgaaggatttgtcttacccagatttataattacccacctaaaaccggaagaatcatcgacggcagtgctcattgagagccaggcggcatccagtcaatcacccaattggagagggaaacgaccctgcatttttgtgcagacttgagatttcaagacctgcaagggaagtctgtccaggccagagggagtacaaagtctttttctcagaggagttttgtcaatgatgggagacttcttgttatcgaaaatttgtaaatcttcccagctgctagtgaatacggcatgcataagatttggttcagagtagcctatttgcttgttaattggtaacaacgcagggggttgcttgagcttacaataagtaggcatagaggttgcacagttgttattgatccagttactgatcataccatcttttatccaggagtggtaacggccccccttctggaaacgtgatatatgttcatggacccgatctttctcttagaaagttcaactgcccactttttttttggaatccaaaaatcaactcgacctcttttgtccttgaccatttcgacagggtcgaacccttttgccgggattacttgaacagcggaaaacccattttgtactcgttttaaagggtgtttataggacccccttggaaaatttttaccgggcggggcccaggggcagaaaatttttaaaagcccaacaaaaaagggggggggtgtgcctcgacaaattttttggggggggcccccccccggataagcgccccccaattttggttttgggtttttttggcaaccaagaggaaattttttgtttttacaaacagttaacccacaaaattttttttttccccaataaaaa

SEQ ID NO: 7049 - DNA, 697 bp, Emericella nidulans
ggaccagggaatctggggttttttttccacacccaaccatcccatttcgactatggctgccagcacgaaatgcgggttcgcatcggctccaggcacacgtacctccagccgagtggccttcgggctcgcggttggcggcgtaataagacgaatagatgcggcccggtgctctaagccccaagacacggttaccggggcccagaagttctccactaagcgcttgtaggagttgacagtcggcgcgaacattggcataatgtccggaagccccgtaaggatcccagccaggaaacatcgtcccaggtcagaaaggtaagccacgttagggtacggaggagagggatccggggatgaacgggggaacccataggggatactgctggctcaccagcggaatgtgcatgtgggcactggtgtaccggaagaccttgcgcggctttgttatgaaggaccggggggatgccctggttcgtgccggtggattttgacgacctatatattcctgctaacaagggctttgtgctgccgccaactggacatcttttaaagggttttttattcgcctccccttgggtttccgaactgaaaggctgatcccgttgtagcaaccaacgggccagttcaagggtaccccccggtaataaccccgggccgtttcgtgggcacctctattcacgaaaatgtgcggcaaaaaaaa

SEQ ID NO: 7050 - DNA, 494 bp, Emericella nidulans
agacattgccctggaaccccctgacctgtgactggcgaatggacccagacactggggtgacctacagaaacaccctcaatccacaacctgtactaaaactaagcgtccacacaccatggtgctacagaaggcattcccctcttttgaactcttgatgtcaacgcgcaagagctacctcagcagatgagggggcccgggcctgccagatctatctagctcaggggcccggacaaatgttgagcgctaatcccgagcgcccatgtgatggcggaccacctgcatatggataactctttgcacacgagtaacctaaccagactaagcatacttcaactgcccaatactccaagcacgtgctgggctagagggcaaccaaatcctgtaaaccacgcctgctagctgggacgattcaatgacctacccttatgacgcgatgcattgcaccactactacataagtgtacaccttgctcagcaccctgttcaccgcagtac

SEQ ID NO: 7051 - DNA, 750 bp, Emericella nidulans
ttgaaatcaccttgtgaaccttgcaagacgcccgatccgactcctgccaaattattcataggctgggtcatgctcggtccttggctcgaaggaccagctcctaacagagaagctcttccgaggccagcagatgctgcagaggcggcgccttgaagttgagatacgccccgctgatcctgcccgtgagtcgcaacagcggcgcccgccggggcaggctgctcttgctggccagtatattcataatgatggtcctgcggctggccttgtccagattgctgtgggaataagccgcccatcatacgagcgcccggtgaatccgaaaacccgccctgcggttgttgggattggggctgctgttgctgccatcctggtcgagagtgttcatagtagtcagggcgattgtgaggacctagcccagcgggaggagccaggtcgctcgggccatctaacgtatgtctagcacggggcatactaagagtatttgtacctgaaggtgtcgtcacccggattgcgtctgggttatcttcagtaccacactcaatccggtagccaggaggcaggaaggtgttaaatccttggatgaaagctggatgtccattgaacaagttcgaaacacgctgaatcacgcccggagtgtcgatactagtggggttaatatgggatcatcgactgacagactttttttcccgttcacatacgcttgactaataaatccttcattaatccagggagcggttgttcgcgtcaggc

SEQ ID NO: 7052 - DNA, 933 bp, Emericella nidulans
ttgtgattcagcaatcttagtcaatcactactcggtcctatacggattaggaatcctggattgtctaacgtcaatatgacagacaacacactcgcaccaaccttcaccatgggttccaatcggggcgaagttgaccccacagatctgccttaccgtacactgacggcagatgccaacattgaagagtacgtccaggagacgcagaccggtgagatcgccaaacctgttcggacggccgatggtaggacagaagactacaagctggttaccttcaaagtcgacgaccctgaaaatcccaagaactggccgaaatggaagaagtggtacgtgactatggtcgtggcgtttacctgcttcgtcgtcgccttcgccagtagtgttatcaccgccgacatcgaaggccccgccgaggagtttggtgtctctcgtgaagtcagtctcgttgtggtgacagtgtttgttattggatttggtgttggtatgtctaagattgctcttcgatggaaggtgcatggctaactttgccaggtcccatggcgtttgctcccttgtctgagatgtatggacggcggcccgtttatgctctcactctcctgctagccgtcgtcttcttattccatgcgccgttgccgagaatattggaccctattgctgtcaggcatcacggtttggattcagggccccagatttgtcggagtcctttgccaattgtggggaccagagcgtggggtccctgccgtttctggagtcctatttgccaattttgccctagagagggtcttcaccctcggtggggggttctgtaacttattcttttggccggggttaacttttgccagacttcccgcctttgggggaaaactcaataaaaaacaatttttatgtggcgcgcggggggggtgttttgccccacttttacaattttagtaagcc

SEQ ID NO: 7053 - DNA, 958 bp, Emericella nidulans
gagatggccttcaaactcgcgtattatgttctttcttcgctgggggtacatctcgcccgctctaactgataaacgcaacttgtcggtctatcacttgatattcattcgtcttttgtgacaagttaacacaacctcgattgttcgaaatcgtcagtgccgtcgagtgacgcagtcggccattactgccgacccgcccgcagatcttcgagcttcaaaccaaacattatatttcattatacaaattccacccagatatgcccgcagattacgcatctaccgcgcgcgctctttctgtttcaacaacttcgtctcgctcaccatcccctggggaaggcgctcgtccactatggagtcaaggtgcgactgatacgcggaccaatgcgggctttgccgcccggaggtcaacgcccatacccaaacaaggaatcatggctcgaatcaatgcatttaatgaacgctcactagcattatggcgaaaaatgaccttttggcagaaagttggtagcgtgctcgctgttctcagtctcaatattctgggcttcggattcctgtatattacagggagggtgtttcaatggctcgggccagttgcctgagaaatgggagcactcggtgcctgtattcatcgtgatgtggctcggtgtatttttcgtttctttccctccgttggtagggtggtcaacgtttgggacggtgtctgggttcatatttggcgtgtggaaagggtaagttgaacttggtttccaccgtcattgatttactatagccgacacctagaaggctttcttattccctgggcacggtgcttggcccaaaaatccttcttaaagcaatgtgcaccgttcctggcaaaattttacccccaccttgtttattgccccaaaaggttgcttcttcttgccttaccattaatttgaaggccctaaactgtctggatattttccttttccactccctt

SEQ ID NO: 7054 - DNA, 615 bp, Emericella nidulans
gcacaactctctagatgttcttgctgccttttcgcaggaagcagctcgaccgtcaccaaccctattcaacttgagagatctggtccttcttggacttcaatcgcccaaccgacagactgttctagccacattgcggctgctcaccgtaattctacaacgatattcctcgttctcgattttcttgattcggactaatcctacacagcccgccaaacaacggacggtcggggcattgaacgcggaagtagggcacctactgacaatggccacttctatcatggaagagccaacgttagaccagtcattcgataattatctcaaggacgcgtcgtggattcttgagtcccggctggccactcccccaccggacaattgttcggaaactcttccatgtgaaattcgccaagaagatccaattgttcgcgagctgctgggctgtctagagacatttttcactaacaccgtgatcgtgaatctggctttgacggaagttttgatgagcattgcgtcctcgcacctgatggcgcttgacgggtggttacttgtcgatccctgaaagtaccactttttgcagtccgtggcggttcagtaatgataagtcagaggatatactcg

SEQ ID NO: 7055 - DNA, 1004 bp, Emericella nidulans
  unsure (1)..(1004): unsure at all n locations
gagagatctactggacagcgcccgccgcagtccgcatgtcgtggtcctgtgtgttactttctgagtctaggtagtttttctgcagaagtaaccgaaggtacaccgtataattatactgcgccttgtcaggggctcaaagccacgctagttctgcaccgggccagtcttaactcagccactcagggtctgcacctcgtgcccgataatgcagaaagttgtgtgtgtggagcaattagtccgccagttagaatgagagttgacgggttatgctcagacagcgtgcatagctctgtagtccgagcggcggcctcccaactccctctactccacgacccagtgcttgagcaagccagagagcttgattgagcttggacgagtttgaccttatcttgagttcgccatgttcagcttttttcgaagaagctctagctttgattcacggaagcagcaccagtccagtgtgcgcaccgcgattttaccctaaatagcttactacgacgtgtctgagtctctctcccacagcttgctagaatgaatgaacgaataccgagcagagtggctacggcaaggtcgaacagtgggatgtcgatgcttatagttgccagggacaagcttacctagatacatccattgcaaatcgcaccacccacttgaagcttgcttcttccgatatttcatccgccatgcggattcatcataaacagcagtatcctcttcagctttacgcggcaggatccgcatcgcaaacaccgaccagtagcctgctcgcgattaagagtaagatcttgctaaataaaaggtccaaggttcaccgatccggatgaaagtcctctcggcattgtattcatagaggcgcgtatagcaatggtcagaggtgctcgtcttccatcatttctgttaaggcacgtacctggtctacatnctctgcgcgcggactntctcagcagaaatttctccagatagcattgatgctgcagttatgcactatgaatatctgctactaa

SEQ ID NO: 7056 - DNA, 415 bp, Emericella nidulans
ttggctttgacgcgggagtcgcgcgctagctcggcggcgttcttctcgcctccttctgggcgtgaggcgtaggtaattgcgacattggcgcccatctcagcgcacccgcgcgctgcttcgatgcccatgcctcgggggccggaagcgccggtaattacgacgactttgccctttaggctgaagaggtcggagaggtgggaggcggtggggacttgctgcggcattttgcgatattggattgagagagataggtttgtaggtgtgggtaagctggtagttaggttgttaattcagagaggtggttgttcctgtatgcacagcgtcgtccagggcaggccaggatggtttcagtacgacacaacaggtcatcacgccgacttgagttctctggacatggcgggcgcggggagacagt

SEQ ID NO: 7057 - DNA, 676 bp, Emericella nidulans
tgctgcatgcgcgcaagggcttcaaccacgggcccatgttccagaatacgctgagaatcctgcaggacggaagggccaaggagccgcagtgcgtcttcgatatcaagatcgccgacgtatcgagcagcaaggacagcggccggatgagtcttctgcacccgacgacgctcgactcaatcgttctctcctcatacgccgcagtacccagctcggatccgtccaacgacgacagcgcgcgcgttccccggtccatccgcagcctgtgggtgtcgagcatgatcagcagcgccccgggccatacgttcacctgtaatgtgaagatgccgcatcacgatgcgcagagttacgaagcgaacgtgacagtcgtggacgaggccggagccagagctgagagcatggtcgagatgcagggtcttgtctgccagtctctcggccgcagcgcaccagcagaggaccgagaaccctggacgaaggagctatgcgcgaacgtcgaatgggcgcctgatctctccctctctctcggccttccgggctcgtcagacgccatcgacaggcgcctcaacaccctccgcgaccagaatccagacgagaggagcatcgaagtgcagacggtcccgcccgcgtctgcgctactcagccagatgccctttctcctgacagaaacgacgtggcaatc

SEQ ID NO: 7058 - DNA, 595 bp, Emericella nidulans
gcctcaatacgccagtctcttatcatggcctccatgctctgacctaaccctagcctttatcggctgcggtacattcctctacttttctcctcacccgcccagtaactatgcagcaactaacgtctacgaacaggcaatatgggctccgcaatcctcagtggtattcttgacgcctctaaagtcgtatcaagtccattttcgcgcatattagcctgcacaaaaacccagtcctctgccgaaaaactggacgcccggttcagagaccacggctccccactaactgctagcttttttgcagacaagaacactgccgctgcggaagaggcagacgtcatcattttgggatgcaagccgtacctcgtcgatgcaatgttagcagaggaggagcttgcggatgcactagctggaaagttagtgatcagtattattgcaggcaagacgatcgatgttctgtctgaggggataagccagaaccagacagaaaattccccgtctaaaaaggctgttatcgtccgcgcaattccaaatgttgctgctagcgtgcgcgaatccatgacggtgatcgaactgcatactccatcgccatccaacgacc

SEQ ID NO: 7059 - DNA, 572 bp, Emericella nidulans
aaaacacgatgaacttaaaatcgggcgcttctcgtcgcacaattttttattattgacggatcttggtcgatgggagaacctggttttcgtcgtctccgggattcaagtagatatcatcgtcagagtcctcttcaacctggggtttgcggtgagctccccgctgactaggcgattcaggttcgtcatcagtttcagaatcgtcagaacgaagccattcgccgccgccttctgcatcttcgtcgtcggaaccgccgactttgcctagagatagccctgtacgctgactttcgggaacaagccattcaccgtcatcctcttcttcgtcatcactatccatcacgatctttctatttctgcggaagcgagccatgcggttttgcagtcggcgttctgatggagacgcggcggggtcggcaatatgctcggatgccctcttcttgtttttattatcctgctgctgcttctccttcttctttttgggccccgcttgaacaaaaggcgtgttgaaatctttctcacaagcacttgatatggttccttctacggcagattcgctttgcttaatgttattt

SEQ ID NO: 7060 - DNA, 1174 bp, Emericella nidulans
cttccggccatcgactctactaccccttaacaacattacatcttacctacagcggagctccctttttgtatctaactgttcgctatggctaacgacgagtatgatgtgagtcctaggcctcttacagtcaaaatgaacatcactaactggctgctacgtagttcctcttcaaagtcgtcctcatcggcgatagtggaacgggaaagtcaaatctgctatcgcgttttaccaggaatgaattcaatctagattcgaagtctactattggtgtcgagttcgcgactcgttccatccaagtggactccaagacgatcaaggctcagatctgggataccgctggtcaggagcgttaccgcgcgatcacatctgcctactatcggggtgctgttggtgcgcttctcgtctatgatatcagcaagcatcaaacctacgataatgtcaaccggtggttgaaggagctccgcgaccatgccgattctaacatcgtcattatgcttgttggtaataagagcgatttgaggcatctccgagctgtcccgacggaggaagccaagcaatttgccagtgagttctccttgcacgcttgcatggattatctcttgacacttacgctcaataggcgagaacaacctttcattcatcgaaacttccgcactggacgccagcaacgtcgagcttgctttccagaacatcctcacaggtatagctccagttggaatttctaaaagacgctcactgaccgctattcttttttttgtagaaatctaccgcatcgtgtccagcaaggcgctcgaaggcgaatccggcggagcctctgtcggggagcgtcgtcagatcatcgatattgagaagacccaagacaccgagaacaagggtggatgctgttgaaacgcaacaacgatttgcggttctggcccccacatgccaaccggaacgtctttggaatttgtgatgacatacttgaatggtcttgacgtttctttttgcctttttatttggcctctgcgaaatgatccacagaggggccttgttggcaccgcatattagatatgaacctttttggcgaggttattgggcctgcaacatccttggacagatattttgcaattctacttggttcttttgggagctttatttatccttttttccttttacctcactgtggaaagaattt

SEQ ID NO: 7061 - DNA, 1160 bp, Emericella nidulans
aatacaccaccacctccttcttcaactattcctgctaggcactcaatccgaccaacgcgcttgtccaacacgtgtcgggggttcggacggcagtcaagaaaataagctcgttggagcgtgatacccctccgccccggcgcaaatcttgcgacgcatgcagggcagccaaacgccgctgcgacctcgctctcccggcctgttttcgttgcctacgaaggaacattgtgtgtgtttacccaggcttaccggccccagaccagatcccggagctgctagcggttttgaatggacaagggacggcggaaccagatgaatctatcttcgtggaccagttcgcctttgacgctgtgcccgagcccggtctcccgtcagtggttgacctagaccgtggtctaggaccgtcctcgcgaccgtcgccgtcaccgccgccggcagaccaggctcgaacctacaccgttcctgtcccagtgtataccagtgccggtcagatggtgcacgtccgatcagagatgactttcacgctatcggagctgatgtcttcgcggttccagtatgccattgacatcctcaaggatacgccgcggatgatggttaccgagaaccagacggcctggtcgcacgcgcagttgtacggcaacggcatgccaagggtcatgcaaggtacctccctctctctttgaaatatcgtaccttgctaaatgacaattaggcgcctacgcctgctgtgccctctacatcaccaagaaccttataaacgggcccatgatcacggggcacattcacttcggggatcaggaacttgctctcttgacggtgtctggcacgccaccagaccttctggacaatacccaggcctgcttttgatcagataatgcaccttttgacgccacctcccgcttgtaatcagccttgtttttgaaccctagaatttaacctacaagagagcgttttactttaaacagacgaattcccccctccttgaccagggttggcacagacggcagattccacctagccgggctcttccgcgaggggacttgcccacctttgacccttgatcttaggagcgttggcccattttttaattatttttaaaacggatgcccgggacagtatatatgcgaactggtgttgtttgacattgttttggaaggctcggc

SEQ ID NO: 7062 - DNA, 766 bp, Emericella nidulans
tttctcgaaaccttttacgtactaagcagcccagcattaaaatgcgcaatctggaccagattaaagcgctcacgattaggaccatgcttgacaatgattggctgagctcacctgcgcaagcagtcgtggattgacgttaagcctcgttttcagttatgtcacagagtgcctcaacgcgagcaggtaatcgagcgtatcctcccatgtataacatatcagccagccagctttttcgcctcgaatcactcaccgtctgactgtgtccgacaagtggatactcgcgaatgtgatattgccgaccatctcgatgctcagacggccttttccgtataccatcaagcatacttgttggctacatgcttcatccacaaacttaacattggagcgtcttgggaagcatccaacgcccagtacgcacagcacaattccatagacagtgttatacccatagctccagcatcaggttagaacatgtagcctcgctactccgtattcagtgaaacaaattgctttttaagacctaatcccaaacgtgcactaagagcattccggtatcctcttggaacaaacagaagagaagatataaactatacagtacaccccctctcttaagacatacatccaatgcagcaatcatgcccgtcccctagccgcagcccgcttactcttccccggacgctttgcgccgccgctcgcacccttcatcttcttcacagagaatccacgtagatcaccgctagaaatcgaatcaccgtttttgcatgcc

SEQ ID NO: 7063 - DNA, 573 bp, Emericella nidulans
  unsure (1)..(573): unsure at all n locations
tctcgatcatatggaatcgtgacctggnacgnncaccgccttcnncacacccaaccgacggccncncaggggagagctcgcgcganacagcacgcagccccccccccgnccaccggcaagcacgcgccaccgagcgccacacacgaaccgangggcacggacncacggagacgggcccagaggccggcgaaaccgacaccaccggcaagccgcgggagagcaaaaccaaaccccacgccgggcaaaagaccagaacgccggcgggcgcagaccaaacccaggagaacccggacagcacggccgggaagccaaccgcggcgggaacccccgaggagacgcgcagcggccaaggcacgcaacgcagcgaaccgccgaacaccagacaccacaagagcaccaggccacccacaacagaagcaccaaaaacacagggaacccaaacacacgcacagccaacgcaaaaaaacaaaggaaaacacacacaccgagaccgcggaacaaagaaaccagggaagcgcacacagacgacgcgacacacgcaaaaccggcacaggaaacggagagcacagcaca

SEQ ID NO: 7064 - DNA, 578 bp, Emericella nidulans
taaggctcccgaagacaaggaatgacagaggcgcagcagcggtctccaaggacggaaaataaacagcggattgtgactctgaaaaggactgagcgagatgggagaaaagagaaacgatcaggaggtgggagtggccctaatgatattaaaagcgcccatctctgcgttgcttgcgtgtgcccaccgcagtcaggtacggtaacctcccactgagtgccgaaatgagtatggagcaggccccgtctgatgaaacaggggccgatcatttaaacaagaacaaaatatatcattggtcggtatagagtaaggttcctgaaagttgagaattgggtcaatggttggttgagcgcaaacttggctccaccaacggccattttggagagggctctagaccttggatgctctgtccagcacagccaatctcgtatggtgaggggagtcgcttgcaccaagctatccgactggtagagccgatttctgatgggtgtctgtactgacagcaatctgcagacgttcagatccagtattcaggttagttggaaacaacacatccactgccagatggacgcgtaagagtc

SEQ ID NO: 7065 - DNA, 512 bp, Emericella nidulans
cattattagggccacgggccctacaaagagactctcccattgcctgttaggcatacggttgaatctttggccaaccttacctcgggtcactcgcaatacccggtatgacatcatgctggggtgccagcccgcgggacccagacccacggcttgaataatgatgcacccaccaggctctgttgtacatcgcagtctgcaacctatccatttgtgattctctaacgagggagtgctgagcggcagtgtgctcagagcatttgacccaatctttacagagtgcataccatacttgcatagcgcacgtcagagcatacccatatgagacacactatatggtgctcaaccatgaccatggactggggcaggacgatggaacagttgacagcgacggagcagcatgcacatcactcaagaagtctgtgcttggacagagagccatagcacttgatgtcaccagctctgtggacagcataagccgatagcccctttatcaactgtgcacgccaggtgcg

SEQ ID NO: 7066 - DNA, 493 bp, Emericella nidulans
gaaacaccatggatgcataactgaccggtcgggcttgtattactttttgttcattgatactattgactagttcccttgacatacccattgcctctatgcattaacccatatcaaggggcggcattcgtcttgaacagaatgtcttaacaataacttatcaataagggcctactccactaatagtataccgaacaggatctgcactactgtgcctttgacctgcttaagtttaaaataccatgtgaatggttaacactgtgtatgtgtcaccatttgctggatcttgctctgaccggtccagattgcaaatcttggacctgactgagaatccagctatctatcctgctataatgacctgatctgctgaacctgtggctatctatagatcattcatcattgcgcaacactgcatcctactactgactagtaccactaggccatttgagatcatctctcaggtaccgttaccacactttatgaacatgacaaacgc

SEQ ID NO: 7067 - DNA, 719 bp, Emericella nidulans
  unsure (1)..(719): unsure at all n locations
aaatccccgtgccatttgttatgttcattgttgtacgtttgggtaagttatattgtagctgcagcagccgagtgttatcggccatatgcatgaatgtccctggaagaaacacagcttcaatctgaatccaaccctccattaggtagcttagctatcgaatgacctccctagttcaaatacttaccccccgtctcctgatggataacatcaaaaagtggcttcgcactaaaccaacctgccatcggtgtcccaactgtcttatacgtaaacgccgcgtccgcatcattgatcttcaccgtcgcccctccccgtcccgccgcagccgcatcggcgagtaactgcgcatggcagcatttctccagactaacgaaccagaataccgtttcttcaatcgtcttccccacggtgaggaggccgtggttttgcaagagcgcggccttcttggaccccagtgcgctcgctatgtttcgcccttcctcttcggttagcaccacaccgttgaattggcgggagacgacgtggtcctgcacagcatccggtcagatccgctcaccgcatatatattgaaaggggttctacattatagaatgcgcacgcatnctgcgttatgatatccacctcgcgcccgaggctacataacgcccgccattagaggaatgactatgcgccgacaaatacatcagcctcggcgatgattgccgatgtatatgaagctgtgc

SEQ ID NO: 7068 - DNA, 862 bp, Emericella nidulans
gatcggcacattagtggcttatacagccaaacgctgtgctgagtacactgttagtgtacctcgtgtactcatagtttaacggccgaacgatgtataagacgaaggcggctccgtaagccgaaagtgagtcagtcatgccaccccccgagcccgcgtcgggctgaaagcaaaccaatagggcgatgagcttaccatgaatcattattagagcatccatccaggatccagggaacaagcgccatgccatgcccatgtcgaggtgcgtggcgataagcgtgctcctgcggaaggcccggatggccgacaccgccaagccagggatcttcggttgggttgtcagatgagactcagcagctcttgggcgaattgctggtgcctgctatagttacacaatctcctggactctgagtatcttccctagaaggtacatacagagtactcgtcgcgacctggtagcaaacgccctctggcgtaactaccttgatccctgatcgagctctccactgtctttatagttctcggctgggctccacaccagccctatggatagtatggatagtatgagcgtatggacatattgtcagcacaactcgacgactcgacgactcgattacttctacgcttccgcccatacgacaaatgctgcttattattatttgcagacggcttacagataaaccaagcacgatcaaccccagcttctgaccatgactgctactgcgtatatcagaaacaaacgcgaccggcgccgccggcacagtacctaattagcctgatgaggtcatccttcatgggcttggcatgttgaagtcgcttctgccgattgctccgaacccgaatttcgtccattttcattattact

SEQ ID NO: 7069 - DNA, 773 bp, Emericella nidulans
ctacatcaaagtcaaggacagttttccgccgcgaaggagggaactttgatggtaactgatttcgcccgttcccatccaatgtcatttcctcctggaggctggtagatggcacaggtttacgcttcggtactgagacagaatttcgcttgttattgactttcgcgggcgtcggcagcggaatgcctggaggaggaaacggatgcccacgcccaattggttcttcaggggttcctgcgggtcgtgataagccaactcccgagtttgtatgagactccttgcttccgaacatgttcaatccccatttcttcgctatcgaggtcgctgcacctagtgacaacgagctctgaaactttttatcggaagatatatgagaagcggacgagactgccgagctgtctagagtagaagaacgacgcgttttattgcagatcaaagacgagctcgattgactggccgcgtctctcatgtccagagcagaatgaactgtcttgattgaagaccgactttttgacgggtcgttgtttgtttcccccaattcccaacaaaactgcgtcgaacatttacagcctggttatcatatccgcaggtttgtaatccttgaggctactgccgggtttcttgtgtgacagggttaccgcggatttttaatttgactagaacatgcccttttcagttgagctatagttatgtccctgctctcgcggagacagtctgttttcaaactctgtcccatctctgtgatttgttttcaagggagtggggctatctttcac

SEQ ID NO: 7070 - DNA, 701 bp, Emericella nidulans
tatgctttgtttggcaggctcctcataccacgtcttctacaaatggctggtcctgcggaagatcgacaatgccttctcgccgggcttctcgtcgctcgagcttgcggcgctcgcgcagcacgggtacaccctcggggaagggattgacagtgatgacgagaccaagttccgggtaacaaggccggagcaggctctgatcgataatattgtcagtggaaaggtgaagggacattactacttactcttcggcgagaaggggacgggtaagacaagcatgcttctggagagcatgcaaaaggtccacggggatggagtgggaatgctggaagcacatggcgatatcgaagtattcaggctgaggttgggcaaggcgattgactacgagtaccatgaggactatatcggtgggatgtttagtatccgagggccgcgtgattcgacgccattgctggatatcgaacgtgcgttgaacaagctggagaaggtggcgctgcgtcggaaagagagcgaccggccgctgatctttgatgatcaataatctgcactatctgccggacagttcaaaagggcagcagctcatcgacctgctttagcagcgcgcggaaatgtgggctgcgagcgggctcgtgaccgtcgttttcaccagtgaccagtaccgcacgaccgagatgctgagacttcatgcgacgcggatgcgggtc

SEQ ID NO: 7071 - DNA, 615 bp, Emericella nidulans
gatacagaacctttggcctttaaaatcttcgccctggggctcctttcgagcttgaaacaaagtgagcaaggggatatttcacttgggcggcgggatagatccattccccacgattgcgcgagcagtttctggaaatagcagaacaaaaggaaccaagaaagcaccggcaaaaatggtgaggaaccagaaaaccgagcgccagccgagatactgcgatagaagaccgccgatgaccgggcccatcgctggtccgaggagagaacctgccgttacgaagcccatataggacccgcgctcagcggcgatggcgatatctgagacaacgccagcagagagggcaattgttgtgctgctccctgcactttgcaggcatcgcaggacgaacaatgcggcgaaattgtcctgcagcgccagcccgatgttggcagcgatatagatcaggaagcagaccatgtatgcaggccgacggccagctttatctgcaaagtcgccaacgaacatgggagagacaccctgaaagatctgttacagcatttagccacatgctgtgattggaatgacggcaaatataccatgtagctcggcaggcggagattgattatggctctgttaaac

SEQ ID NO: 7072 - DNA, 814 bp, Emericella nidulans
actggcctctcagccgagcatgcagcgctggaactcctgagtcttgccgaaagtgaagaggacttataaaccggcctggctggtcttggtcatctcgacatccgccttcatgaagttgtagtcggcaagcacggcttccgagtcgggcgagtcgttcttgagcttcgcgaggacctcgatggcctcagagtcgtagccgcgcatgatgaaccaacgaggggagtcagggaggaggatggcaccggtgacgacgatgagcgcgaacaggacctggagagcgacggggaaccgccactgcaccgactggtcgacgtaggacagaccgaagacgacccagtaagcgatcagggtaccgacggcgatcatggcaccctcgaagcagacgagaagaccacggttgtgcgaggcggaacactccggactgccagacagggatggtcgcggtgttgagaccgttaccgattccggagacgacacggccgacaacgaactgccccagaccccagtgcgggccgaagccggcgcacgagatgacggcacctataatgaggatggtcgcgccgctgatgatgacgcgagtacgaccgactctctcaccataaaacatagaaacgagcgcgccaaagaaacaaccgatttcgtagcaagcagtgactgcaccacgcaggacgttgatgtgtcggtactcggcgtcggtataatccgtaggcatcttgagcgcctcgaattcaccgacgaactcagttccaacgatgataccagacatcataccctggttgtagccgaagagcgagggacccatacagatgtaagg

SEQ ID NO: 7073 - DNA, 635 bp, Emericella nidulans
  unsure (1)..(635): unsure at all n locations
gcacagacccaatattatggcagtgttataatgcggctgtaggtcagcatgaggctgtactcagagactgtggtgagacttacgaagccctaagttagaacaacgatgcaacaggtgaccccgaagcgatgcctaaagcaatgcatgtaggcagttcagtactagtttcgcactaattacttattcagaatcttaaatgacgccaacccatcccggggttacaggcgtcgattagccctcagaattgttctacgttgattcgccgctcgcaagcacctgtatcgagcggccattctaaatcggctgcggaaatgaagctcttcacatcatgagaatattactatttgtcgcagagcaggagagtatgcccctaggttagtgattatctgataagtgccgtctaattgccaccaacttagccaaaccctcatccctccttctttccaggtcacttaaatcaagattcgatacccaaacgctcactcgcttcttaaggtcatctgtcttttcttgtgactcgaagtcaaatccatgcttgtgcatatcacccaaccagtacttcaatgcttgtcccaaatgatccatgaaaatgcccgtaatctccaaccncgacgagcgttttggtcataacaggt

SEQ ID NO: 7074 - DNA, 694 bp, Emericella nidulans
  unsure (1)..(694): unsure at all n locations
tctctagttatatgctgtacagatatctctaggctacaacaatctaaacctctactccttcgcaagagctatgactttcttcgctgcatcttcaaagctatcaaaggcatgcagcggaagcccactttcagcgatctgttcggcaagcctggtcagcaccccaatcaccatccccaaacaaaccagaagcagttgaaggattaaaagaaaggtacataccatctgctgcccactctcctcattagtccccctcagcctcacaacaactggcacactcatttgcatatccctgaaagcaagtatgatcccctcagcaatcatatcgcacctcgtcaagccgccgaagatattcacgaagatggcctttacgcgcggatctgaggtgataattcggaaggaggatttcaccgtctcggaggtagctttgccacctgtgtcgaggaagttggcgcatgagccgccgtggtgtgtaagggcgtcaacggtgttcattgctaggccggcgccatttactggcaggatttgttaggtgctggctcttgaatggcgagcgggcagtttgtcttacctagggcaccgatgctccctttcccgtgagtctatgacgggttaggcccagggatgagtggcttgattggaatatagataggcgtactngacgagacaattcatttttcagctataccttcagcac

SEQ ID NO: 7075 - DNA, 792 bp, Emericella nidulans
tggcgaataaccctactaaagggatcagaataaggactcgaattctgcagggcaaaataaagggaaatctggcgaggtttcgtttacaacgcgccagaattttgacggactaaatgtgctggccgaagcgtcgcgacaggtgggtgcttctgaccagacaaagcgggggactcctgcatttccccagtccgtcactgttgggggaaagactgttgttgttgatcctgcgctcgaagcggaggtttttcagggccatcctactcaatctgaccaaatggatgaggatgttaagattccgggtaagagttggttctagctagtgtttttacacgctcaacccactaatggatggaatcatctactcgcagtttcccccaaatcgcctacagacgcgaccacaatcccttcgcttcctcctaccggttcgcttgatccttcgtcggcctcgccgcctttaccggagacttcattgactcccgacccaaccgccacttctcggcagtcgcagctgtccatgatcgccgcatctgctagtgaaatggtacctcacggcctcccgttggatcatgatcctagctctggactttctgacggtttgtctaagatgagttctgcatggaaccaacagctttcgactcaggaacaattgctgttcgacagcctccaggagcatgatccgaccctgacagcagcgacccaacgcgctgcctccttttctcgccccatcgcaatgaacccgaacactcaggctaagggctttgtcaacgagttcggcaattcaaccaagccagc

SEQ ID NO: 7076 - DNA, 748 bp, Emericella nidulans
caagagatccatccagcctgcattgttgccccatcctcagcataagatgtatccaccgcagttcagcatcgggccaatctccccaattcaaacttcgctatccggtctggcggccattcctacaaccctggcgccgacaatgcccctgacggggttacattcgacctagcccaactaaataccatcaccgttcatccagacacagcaaccgtcgccgttgggagcggcctctcctggcaagaggtgtacgatgtccttgatccctacggccttgttgtgctcggcggccggaccggcatcgtaggagtgggtggtctcttgactggtggtaagtctttaagtctactatctaaaactcggtactagctgacggctaacaggcggcctttccacattctcgccggaactcggctttgcctgcgacagtatcgtaaacatgcaagtggttctcgcctccggcgaaatcgttgacgccaacgagacgcacaacgcgcctctcttttccgcgctcaagggcggacagaataatttcggcgtcgtcacgcgatttgatctggcgacttttccacaggatgaattctggggcggcgcaatccagtacccggcgtccgcgaacgaagcacagctggacgcgttctggaagttcaagaactcgacagtcgatccgtacgcggaagtcgagcagagctttttggataacgcgtctgcgccggctggccgtccggaagaaaagattatagctggacaa

SEQ ID NO: 7077 - DNA, 722 bp, Emericella nidulans
  unsure (1)..(722): unsure at all n locations
gtccgctattttgaccgggaaacgctgtatgggcgatcaagaatataccctttcgcgtttgtggatgcttcctatgcacggtgatgtattcaccatcatgatgaatgaaagtttcatcgtaccccatttgacccatcatagtatgaagttcgttgagcagccgcttcaagccactgatccccttaagattgaccagttcgtcaagagttggggattccggaagatcaaagaaggagtacagtcgggtttcatgcacaagatccacgattttgggatagacttcatcatatcccataacgcttccaatggcagagtcacacattgctacaagagcagcgtttggtagtgtatctgtcgccgttctcttttgcgctggcatttcattgtcatgtgtacagtccatgaacaacgctggaacgggaatggggcgtatactgcgtattatttccctctcgctaccactcacttgggattttgaaagatctaggcctggggagggcagatccaactcaaaactgcctatgggacggccaccatgacggtgcaccaaacggcttagctctcccgcgctccaggcttgcatggcctcgcggatgagtgcgttaataccgagccgcttgacaaaaatataatcggcttcttcagacccccgaaaaagttcggcanacattgcagggtcgggcggatttttcgtgcctcgtcatcaagtactctgcaactac

SEQ ID NO: 7078 - DNA, 540 bp, Emericella nidulans
  unsure (1)..(540): unsure at all n locations
agacaacatcctactctattgtatatgatgaaactgtcattgtgaatgtgtggtgtactgaccagaccaatgggcccggtgggctcgaacagcagccttggagctacatcaccacctgtatacacagccggtcataagcctagatgctatacctgtaagtgataaccctctgtctggacccgatgcataccttgcccgggcgctcctgttcgcgcacatgtggacacccctcactcacaagggatctgatgggatacagcgatcctgaatatatacacatattgcaaatacccgttgcttagctgtgactgtgaattcccctaccgtcccggtctgacaagactcaacgaatcacgccatgtgaagcctgatgccgcttccacaccctcggagcagggtgtgctcactggtgctggtccacgaggagagctatacctccagaccacatatgtcattgtccatcaaccgccatagagatcatgcaaccgcaatcacctgcttactctgcattcaagancagccatcatacactcttgtgct

SEQ ID NO: 7079 - DNA, 686 bp, Emericella nidulans
  unsure (1)..(686): unsure at all n locations
actcctatagtgagacccagcttaggatctggctgtgctgcgcctcaggatcgatggagtcgctcctctttttctctgcttggcggaaaactggtcttcgagctcgcatatactgaggctgaagtgtggcttccgnnntnttaacccccaggccactccttattctcctccttcactactttttttttggtcttctgtcccctttccttcacttcctcatacctattcttctctctcttttttgttttacattttcattttacggcatcttatctgtgacatttttccctgccttttatactcctctcttccttctcgttatttacccctcctttcttatacttcgccttcctttttttttgttcttctttttccatctgttaccaacaattttgtcttggattttctctatattttttctcctcccttctcctcttctagtcttctcctttcgtccccttcaccctctccttttctcctttctcctcgttcactctactaacttctcatacatatatattattccttttccttgctacccacattttcttgtcccttctgcatttactttaaaccgttctctacaccttttactaccttacttctcctctttcattacgttttctctgatatccaatcctcttcccgctcttaattcttccatttttccacttcctactttatct

SEQ ID NO: 7080 - DNA, 658 bp, Emericella nidulans
gacgctttcagcagtgaatcgatcttcagcgccatcacggaagtgttcaagcgacacggcggtacgcaactagacacacccgtattcgaattaaaggagatcctggctggcaaatatggcgaggactctcgtcttatctatgaccttgccgaccaaggtggagaggacagcgcccttcgctacgacttgacggtgccgcttgcacgatggctcgccatgaacacctcagtgcaacacattaagcggtttcaaatagctaaggtgtaccgacgagatcagccggtgagtcaattgtggtgtggggcacaaacgttgttgtccaggctaatgccttcgacaataggcagttgcgaaagggcggatgcgcgagttctaccaatgcgactttgatatcgctggttcctacgaccctatgatcccagatgctgaggtcctccgaattgtagtagaggtttttgaggcgctcaacatgcgcgactatatcacgattaagcttaaccaccgaaagattcttgatgggcatgttggagcgcgtggtgctcctggggataagattcgctcaataagttctgcggttgaccagcttgattaggaatgccagggtctacctgcacactgaaacccgctgacaggcttagcttccatgggggcaacttaa

SEQ ID NO: 7081 - DNA, 837 bp, Emericella nidulans
agcaagggtcgtgaagtcgttcgctctgcaccgatgatttacaccactgtcaggccctcccatccttcttgcacagggagtcgggaccaacggcgagccacctgtcaaacctgtcagacatcaggcttacagctgggaagagacggggggttacttctgtcaccattgccaatcctgccattccttttccggagctcagtctcagcatccagacactcttgcgggtcgcgcccagaaaatgaggaaacaagcccatagtacttttgattgagatccttttgcaaaatgggggactgctgcgtctgttcgaatctgcgattgagccggagttcaactccggcgattagccaagcgctcaatgtcaagttatacccaccgtggaatccaagcgcgcgcgggaagatccaaatctcgaatgcttgattctgaggaagctgcctatcggaacacgttacagagaatttgctgggcgagagattcgcttggggactagtcgatgatagcacggccggaaaatgacacccgcctcccgcaagcggtttcgtccagtcaggggctcgagggcgacgcgctgaggcatcggcggatcgcaacatactcgccgactagtctcttagccgggcctcaaatgcggtatagcctcgtttctggttcgagacagtgtagccgaccaaatagttgacagacctgtattcactggagtgatggtgaggagtggcctggcttatctcactgtcatttctctcctcttttctctaatcccctgtactttgtgctttcttcttttctactctcttcttctttctctctctcctcttttcttcgctcctatctgcc

SEQ ID NO: 7082 - DNA, 643 bp, Emericella nidulans
ataaatgtggaatgaatgcacttctggtaaatcggcggcatcggactcttttacatgtgcagtcggcaagaaaccatcacgtggattcaacaataagcccagcctaagtaccccctttttgtcacgacaagctggatgagtagactggggaatttaaacactcccctcacgcccgattttacattctttcaaatttagagttggccacttgagcggccgcagttaccgcatagtgcagcagtgggtaggtcggttatgtcatccatggcgggcccatgccgtcataacgttgggagaactacttcaaaccctcgtttcacaattcctacaatctccttcatagcacatttaacctccgcctgtcattactgacttttaactaactgcttttggccccaagacatactctacgtcctagtcaaatcgagccatatcagctgtgatcttgaccgccgttatcatctcaccgactacgcggggcacgcgagatactcgcacttcagcccaagagcattcgttaggcaattgtttggatatcctttactctcttcacccagaattgcgtcgaaacgagcgagaaccagacacaatggacgactcggcactaccttcaaacacctcgaacgggattaaacgtcgcacc

SEQ ID NO: 7083 - DNA, 781 bp, Emericella nidulans
ctccatgtctgaattttgagtgctcgtttacgatgctgggcttttacaacaatttgctggatgtcggcgaattctcgtccatgattagcaccgttggtcgcgttcgcttatcgatatcatctggggccatcgattgacgtcccatcgtcccggttctctgttctatcgagactagaccacttgctcaggcaagtatgttgggagtctgactcgcagcgcgacgccgctgatattgcttgcccaaccaggctgcagctgtcataccagctaacaactttaacttcctgtcaaccaacgcgaggcttgaaggagaaaatctcccgcgtggtcgggaaggctcagatgtcaatatgaaatactggtaacgtgatgacgtgatgagtcagaacctcggcgagcagacgcggtttgaccaaaagcagcactttgtcttcatccttcttccgacaatggctggtgctagttactttccaaggtgaattggttttcggcagtgtgagcggtcaacagcacctgagttggataggaaccagcatctcgacagtactccgaaatgagccggactcctattcgcaaccagacccgtcagaaccgttccccgcatgactaagcccgcgatggcgttaagataacagactcctcccttcattcatcaaccttttgagtttgatatcttatgtttattgaagtaccacggtgaactaagattttcgctgtttcaaggccgattagagacgataccatgtctttcagaccgcagaccaaagctctctttttgatg

SEQ ID NO: 7084 - DNA, 693 bp, Emericella nidulans
  unsure (1)..(693): unsure at all n locations
tctggaggtatgaaatagagaacccacttctagacccttcttcggtcgaccgtcactccaacagaaaattgaatcaagccagaccggtcaactctttcaagagtgcccccgagcccaagcccatcgaacttgaattcaaggccgacttgaaagggattgcagaagaagcgcttctgaaagaggccaaaacacagcaaccgccatctagagagcctcttgaagagaaggaaaatggaaacgtggtgctccctccgttgtcagccctagtcaatggttcggctgggcccaaggcccagcccatactgggcccgtctccctcgccgctcagcaagttccatatcagcgctccagaaagccgagactcgctcgcggcgtttcgtaatccgccagcagctcaaacggccgacacttctggcttgaggttacctccaatacaaacaaagctcagtcagctcaatgaacttgggcctgtcctgccgccgccgaacgggccttctccacgtcctgtgggcacgccatactcccttcctcccgtaccgncgtgtcccctcctttgaccgggttgataccaatccttgggaacaatatcactcagcagcttcattggcgcaataaaaataccgcccccccttactcgatctatcacctgcgagcacgcagcatattcaccgctatcgccgtttgagcacctta

SEQ ID NO: 7085 - DNA, 915 bp, Emericella nidulans
tacgaagaggaagatggggcgccttctgcttcatcgtaggcccagtttgagtgctactgaatagctttcacatggctctggtggctaagagactgtcgagggccggacttgattaattcgtggtgttggtgggcgatctgtgagactgagaaggctgggctgggcgttctcaatcgggtgatattctacgctcatcaaaacggatttgcacaaaggtttccagacgtgggtggtcatgacttgctgttaactacaaatacgagcatgccatccctttcgagtaagagcggcatcgatcttctctgccttttcgtatttcttcagccgcctccaaacagagaccgcgaactggcagcgggaggctcacattgacctcacaggttcagacttggctttgttggctttgctggcttttacgaggttaatccaatcatggaatgcgatccctgaaggcttagtgacgatcatcatcagcctctgcagcggctgaaagtttagttggttgctgtctgatttaagtgcaggcggcaccctctgtctgagtttcgagtttggcccctgattcttcctaccttcactgtgtttaaagaggattgatagaaaacacagacttcaggatatatatctaccaccatgtctaacgagtggaccaactccgtctggggctgcttcagccccatcgagacctgtacgatactccttccctattccatggccaggtcgattctcaaaactaaccgaccgtcttaactaggcttcatgagctggtgctgcccctgcatggtctacggcaaacaatccgagcgccttcaggatcccgctttgaaaaatgggagcaatgttaacggcgatgtagtgtcacatctacttcttaacatgtcaagattttctaatcacggtcgtccgcatctaata

SEQ ID NO: 7086 - DNA, 687 bp, Emericella nidulans
aggacggttagatgaggagatgtttttgcttctgtcttttgttgagcgcccggcgtctgcatctgcagtacctagcgcccacaaacgcaccggtctcgggattgttgcagtccggcgcagcgaagcgtcgacactagaccttggtccattgtctaagtaagagagtagtgatcggattgcttgcagtgagaactccgcgggcgacaatccttgttgacgaccagtcattggcggaacggaggcatgtgaaggctcacgctggtgcggtgggatccagcggtgtgcgatcggcagccgcgtgccgacttgagtggtgactgggcgagcgttgaccacagcatatttgaggtatgataaatgatcatcgctttacagagaagaggaaattgagaatctacgggagtctaatatccggatgtatgtggactgtgggttgtggttattcgattgtattgtgactgtaatgttattgtcttgtaccaagatggtagatgctatatactaaatgttgtagatcaatgcaaacatgagatgagtgtatatccaataacgccaaacaatgcatgcagatgtatgctcccaaaacccgtcccttttgcgtcgctgtgtaacgctgaaatgctcgaacattaatcgtcagggtatcacgtaatatgcattcgcgcaagagatgtagaaagaacatga

SEQ ID NO: 7087 - DNA, 614 bp, Emericella nidulans
cgacggcaggatgaggcggtttcgaccagtgtagggaggggtacggtgaatatgggtttgtactttgacgcggaaatcggcggttgaatgcgtttatgaggtgaagaggttttaagagctgattttggggactctgggtcttccttttgctttgttgggggtctagatttcctttctgatggcgatatcatcccctttgttatgggcgctgggatatctagagtgtcggtggccttgtgggcgagctggcgcgaaaaagtcgctggcgtgccaccattcgaggaatttgagagcgaagatggaccccggcagaaagttgctgaagagaggttagaagttgcggatagagattatgtgggctgaaaaggcctaggagaccggagcctggacgggatcgtgcgctgcgggagttgggggtttgagggatgtctacatgattttggccatcgtctggctgttttcggagctgatactatcgatgctggttccgaccccccaaggattgggatgggctttagtgttttcaacaggttgttaatttcctgacatgtacagattctttgactgtttgcaaggctattccctttacttaatcatcctttgatgtaaatctc

SEQ ID NO: 7088 - DNA, 587 bp, Emericella nidulans
cgaagagcgcatcaaactcgaccagctgaaagaagcgcttttttaaatcttctccgagtacggaacgatttttttttttgtcgcaaagcggaaccttaaggcgaagggacaggcatttattgtcttcgacaatgtggacagcgcaacacgcgccattgacgaagtcaatggcttcgatctttttgataaacccatggtcttagactacgcaaagacgaggagcgatgcgacggtgcgtcgtgaggggggcgatgaggagctagaggctcataagcggagaaggctggcggagaagggtatgaattttctccttatttcttctcattcctatgtatgcgtctggtgaggtatgggattctgatgatggtacttgtgcagaacgacgacaagcccatgaagctctcgaagcacagaagaaactcaagcgtcctcctgttggcgcccccgaagcacccggacgccccgtcaaggctgccaagggcgctggtctcaagcctacttctggcgctgcggcagccgtcatcccggacgaatatctaccttccaataagattctattcctgcgggagctccccgatacagcggac

SEQ ID NO: 7089 - DNA, 599 bp, Emericella nidulans
ccctgtcttggtttggggctaggatcgggtagcacgtcgaggtgcgatttctctgctttaccagatatatcactcacagcattatcgagacctctgggagtgtcaaggattgcataatatttcgcgtacatctctaggccgtccaatgaggccgaccgcgacacctgttctgcaaccttaaccgcgcccgaaagatccgttgcgtcaacatcatcagggatggtttccgaagtgaggctttctgagtgctccaactgtgaccggtcgctcggacaaggggatgcggatccattaaccacatgaagagatcccagtttgagggatcctaagtgagtgtatcccaaatcgctgggcgtagctggacgtaactgagagaaagccttcacgtcactaaacaagacatccacatgagtgtgccaaggcggcaacccaggctcagatagtgcgttacttggatcaggtgaaacaatggcatcatgacaaaattccgaggacacgggggtagccttttttgttgcttttcttgtagcaactccaggccgcacgagcagagaacgtcgccgtatctgaggtaccttctggcattttacccttgtatg

SEQ ID NO: 7090 - DNA, 555 bp, Emericella nidulans
ggaatctcttcgcccttctgagggcggcaagttcactgggtttggtggaggattgcccgtggaggagtcgccaaagccacgggctggggccgggattccggcacttgacgattttcagaaggatcctgtagccgcgttgacgaagggcttcggctggttcacgacgactgtgggtaagagcgcgaaaacagtcaatgattcgtttatccagcctactgcgaaaacggtacgtacaccctgccggtcacatagtcgacttacaaataatactgatgaagcaacagctcgctgaatccgacttcgccgctcaggcgcgccaacacgctgcccaactcgggcagaatattcaagtaggtgcccgcggcgccgccgactcattcaaccgcttcgtcgagggttcagacgtcccctccaccagacgtgcacgcgccgagcccgagcgcaaggacttctgggacgactttgcgtccttaggtgcgcaagataaccaccgcaggaatacatcaaggtccggtgccctgggacgacggcaataaaccaggcccagggtctcat

SEQ ID NO: 7091 - DNA, 520 bp, Emericella nidulans
  unsure (1)..(520): unsure at all n locations
gcagtcataagattcatcngtaccggtaggcggaactggggtcgcaacatgggccgagggccacttgcattcgactgaatgtgactgtctctttgcttgtggaaacgaaatatggctgcacacctacttgattcagactgtaggcttactacatgcgcaatagcgatatgcgtccgggctctccgccctggggatgctcgaggcagcattgaagcacggcatatgtgcacggcggctggatatgtgcaaaaataactggaatcatgtgggggagcttatcaagcggcattggggagctgagttacagatggatgaacacattgtgacggacactcaagatcggcggctaggggaaacggcacaggggctgctgggatggtcggcaccggtgcatatgccatggcgactacatccctgggtggacgcgtgatgactacattgatgactttcgccttcctgacctgcgagatagccgtcagctttgtagtcggattacccatggcgcggatacagttacact

SEQ ID NO: 7092 - DNA, 240 bp, Emericella nidulans
tgccaacgcttgtccttcccgttaaggagtagtagctgcatatccaaccgccggcaggcacggaacgggtttggttgtaaggattcgcccaggagtttccaagtcctcctcggatgacagcgcggaggtacggggtggaaagagggtcaccatctggggggttgttttcgagggcagcgcggagtttgatgtatctatatccccacaagacaacatatgagccctaccctggcaagtata

SEQ ID NO: 7093 - DNA, 805 bp, Emericella nidulans
acgttgtggtaatggaacctccggctagttcactactgggacaactgcggaaaaaggcacctctcttttgaacagagcttgtctttcaaggaatgctatagtaccagctggaaagaggccatgagaaaccacggcctttttaccgcatgatcagggtttgtattcagacattgttgagaacagctagttaactacaaaccgttttattgggtagtcaacaacacatactaagacagaagcagaccagaaggtaaagggaccgtcgagagccagcaggaggccaaaagaacaaagaatatataaccaatgaactctaaatcgtccaaggatatatgaaactccgggtcagatcagagaagaaatttcatccctgccaagtgtgaaccttgcacttagcgggctcctgcacgataacagaccatttatccgggtgtgtaagcagtccaccagcgacttcctctcccttatagatatctttgcactcatttagaagaacggaggcaccttcggcaatatgcttgacctccatactacgagacttggtagtatcctagcaacgcaaatccattagacatcaatttcacaccattcctgatatcatccgggctcaggggaccacgtacatcgttgcaccacctaacctctgcattttgaatacatgcaatctgctcacaagagttcgggcgaagggtgtgagacctttggaggctcgcgaatgtcaccagagtgccagagcttcccgtcaaccaaggcccagaggtaggtgatcgcgtccttcaagtcttttgtgggggcggccagggaa

SEQ ID NO: 7094 - DNA, 1083 bp, Emericella nidulans
tcgtgaaaagacccaagatgttgtttgagtgaggtacccctccatctcggggaggcccccgaagagggtgccaaagatgactcactttttttctttacccccatatataagaaaacactacgattttcccgggagaacatggttattaggcccaaggcggaggtagttcaacttcttttgggtccaagccaccgaatttgcattttgataacttggccccagctctccttgaccgagcgaaccccacccaggtttgaaaaatgggttagacatcctctcatcactcaagtggccagagttccttttggtgggcactccccttcatccccgacgtaagaaaggtgcaaccctcctgtgcgtggcaatagtggtagggaatataggttgatgccagttgcgctcattctgggcacctatgttgggttcagcattcgcctgggtgtttctggtttctttcgcttattgttggccagtccttggcgacaatacttacgcgaacaagacctggtcggatgtgttgaggatgtcagttcaggaaatccatgtcatggaggtggaattcttaagcaacctccggtacaatctctttgcgtccgagaaggactgggcgcaatggcatgtcaagttggggaggttttccgatttcgtcaaccatgcacctgttgcttcggaaaatgatacacttccaacacctccagttcgtctcctctcgccaaattctggtccgacgcgaacccaggtgtcaccgacttcatccaccaggcttccgtcacccactaccgagcccctccacccgcagacctgggctcccgtcaatgggtcatatggcacggctcaccaagccgcgagccaattaccgccagtcagttctcgaaagcggcgctacgaagaaccagttgaagagcagcatccatccaagagaattgtcttgccacatgcggtgccgctcccttcttcaacactaccacctgcgagtcagatcagcgcgccggctctgcctccgatgatggcacctacttcagcaccgcctcaacaaagcatccctggacctgtttcacgactgtcatctagccacgcgtttgt

SEQ ID NO: 7095 - DNA, 420 bp, Emericella nidulans
  unsure (1)..(420): unsure at all n locations
tgaccacttcatctgcctccgtgattattggcttacctgactagacatgtatgttgaccacggccagtcatcagctccaaggagacgcaggccagcgctctcttgctcaatctgcagacgccggaaactgaaatgcgaccgatcgcttccctgtgggcagtgcataaagtcaaagacgcccgatttatgtgtcttctctgcaccgacaccggctcagagcgccacttctagctctatggctgcgagtacatcctcagagaaaaggcatgcattgagcgacgaagctagtgcggtaggcaacgggctttatgtgtttgattccaagcatcgcgtcgccaagcctcgtggccggcccgatgaactncatgagctacgcagtcgcgtgcacacactggagctagcactggcttagagcaatac

SEQ ID NO: 7096 - DNA, 831 bp, Emericella nidulans
ctgctcaaagggatggctctaaatgggcagactcaaaacacagccgcggctcgcctacctgtccgactgaagagtgtctaattgccgggccgtggtcgtctgaatgtgcggcacctgaacagaacgaggtgtattccacttctgctattctgtgttccgatgcagagtacatgcagtccacagatgagcaggactttaagcgacattggcgaaatctccaagagcttagcagcgccattggggattactgggcccatacgcggctcaactgtgctggatggagcgtcaagcctaagtggaagttgccaggtagattaccagcaccctatcaacgatcccgactaacaaccgtagttcccgtcaccgcaaacacctcctttccaattctgcttgtaaataatatcctcgacccggtgactcctctagcgaggtactgtccaaccattgtctgattataatgtatgctaacccccaacagcgcaaagaagatgtcacacgcattccccggctcagtactgctgcagcaagactcagagggggtaagtgacctccctgctattaagtgccaagcactaacagtcgcagcactgtaccctcgcagccccttcaacttgcgtgagccaggccattcgcaagtactttcagacaggcgaattgccaatgccggggactgtttgcgacgctgatcttaaaccaatgctaggtgctccgaagaagccccaagagggaaaaacgcgcgacgatatcgcgctgcaggaagcggtgcttgacgaggcacaaaggtttaggataccattgccactgtaaataacaacaaattatgatatcttt

SEQ ID NO: 7097 - DNA, 739 bp, Emericella nidulans
  unsure (1)..(739): unsure at all n locations
tcctccggttcgtgcgcactcctacatattgtccttagtctggtggctgcctctgcgcacggtgatgttagcttacagacaacagtgtcgattcctagtaacttgaaaacccggatagggaacgtcacttggtctatggaatggccttcatagtagctaagcagttgacatatcttagttaaccaattcatttttactattataagggcattctcactgagcgcggccaaccattaagactaccggaactttcttgtcgatgaggccgaaaacaagtttgccagcatgtcccgcgactttataggttataagcgaacggaccgccttcgaaaatggggttgtaaggcaaattcggactgaccggtcaaatgtgggaaatgaggaatatcagaataatcgatttctactcttaggtcattgtcaattgtgtttgcaagcccacctaatccagagccgcagacgatagctacacgaggagctttgagtggttccggtaggagtttttttatgaaatcgaaagcttcatttgttttttcgagtgcagaagggcgcgcagataaatccatggtgattcgaggggtcaggtttgtacagtgacacaggctcaggtagaaagatgcaagacctctatactcaaaaggaggtcccttgtttaatgaaggaaccaaagtatggtaacatctattcgaaagtgccgaaaagtgggntgaatgtattgagggcctgattagtaatataa

SEQ ID NO: 7098 - DNA, 541 bp, Emericella nidulans
tagtacttgccggcaagggtttgcttccccttggctgttcgtggtaattatattgggctggcggtccctcccggaacttgaaggccacctcagctcctcaacaacttccccagcatcacaaccatggatacggcgatgccaattgatgcagaatggagaggggctaggccgtggaatttggttgactgactcggccatagggtctgttctttttttaaacctgagtaatcagccctgaaaccctgcttcgtaacctgatcctcccccatgcggtaatgatgcgcctgaccggattgatattgtcacatgatcctgatactgggtcatgtgactccacgtgatgatgaagagcttgcggctgtgagctcctccggagcttttggggatagtggcagaataattatcattgtccgcaactactcctccacatttccgtctttgtcttgattgctcctcatataataccacaatggacggggtagtgattaccttatatttcttgatttattctacaatagcagacatataaacgccctgcact

SEQ ID NO: 7099 - DNA, 915 bp, Emericella nidulans
cctcggagcgatgaggtcgtgtgacacattttagtgtctgaatgaagcttagttcttgtctgctagagacaatagcgagtccagttaacgaatatcatagaaggtaaaaagggccttgagtagtaagggtagctaaagggggctgatttcgctgagtgaaccagacggagactttgttatagcacgttaaggatcattcccatggtctaggcccgactttgggatcttagaaccgttcgatccccctacctttagctccatcactctccactttccgcatttcggctccacccagatgttggagtttgaggggttgagtgctccaggggacgtgggactggccttgtgaagactggtagaggtcatagcctgacctttaaaaccaagcgtctttcaacctgtgaactcgatctatgcaggcccatttgacttctttcctctatacaaaggtatacacttcaacttataccattgatcattccggaatgcaaatcgtctggcccggtttggtccatcccgtcgtcatcaaaaataacgctaggcccggtcttttacaacccgccctctatccgtactcatcatggcttaacgtctgtttaccactttatttcggcagtgtatctttccaggaaagaatcgctcctttccctcctttccggcttctcgggttgggaaacctccaaatatctatctttaatatgtactacatctcttcatcttctgattgatctatttctatcttatctatgtactaacaaattgtttaaatgttctcgttattcctccctttcaaataatggtttctttcctcattattaacacttcatttactttttttatattctacttattttcatctctattactactttgcattttcccactttcttatcctcacttttctatgtctcgttc

SEQ ID NO: 7100 - DNA, 198 bp, Emericella nidulans
gaagccaacgcccgctcattccgggagcgcgggtgggctattcccaagagctctgtctaactctgggctgatatctacactgaacgcggtttattgttgaatgcgcagtcgcgccctcatgacgcaatggagcatttcgaggaagcgttgctatacaatgctgatcatccaaaggcaacccagcttagcgaacctgct

SEQ ID NO: 7101 - DNA, 765 bp, Emericella nidulans
  unsure (1)..(765): unsure at all n locations
ataccttacccaagtgcgacaggagattgcgagccgactgcttgcgagactataccccggtggtgttggtccttcgaaggtttgtcagattcgcaaacatttcggcacaatcattgctaacagctgagacagttctggcttagcttcacgaagagaaagtttatgggaaagagcttttaaggtagactgtttttcattgtgtcgtacctagcgtgactttgtggttacacatccggatataactgttcaaaagagcacatacccccgatttcgctttcagaccgcagggtattattacgcatgattgtcctacaggctttccaggcagggcgacattaatcttgcgggaccaagctaagcaccaacgtagtggagacgagaatatgtcgccttagataagtaaatgggttgcttttatttatttctttgtgctatcatgacttcatctcgacatcagcacttgtgcttccaggcgtagcagttgactgagcagtcgattcagttgcaagctttctccttttccggctcggattttcagcagcctggatgaaccctgttgacggaatacacgaatgcatgaaagacgtaacccttcgttcttccacgncagacatatgggatgcgtacacccggaggacctgccatgcccacctaaccgttccagggagtgccataaaaggtaggttcaaataattcacagtggtctggaccgccttgcagacggctgtttcttactccgtcaatggataccgttcggcgaaaaaa

SEQ ID NO: 7102 - DNA, 972 bp, Emericella nidulans
attacagatattttacaaataaatacagcgtatgcatcaatagtcatgccatatttgtacatacattctacgtagacatctgcactacgcccggcatgcagagtactagcttccccctgagagccctggctgaaccagtgcctaccaatcacaatgattatagtggacctcgtttgatccccttttcaagcataaaaaaaaaatctaaggagtgataagaatagttatccagtggcgaggaggctagttaaggagaaggcatgaaacggcgattgcgttgatcaaccagctcatttctccgctgtgcgcgacggcatcgtgattgcgtgatgccaccagaattatggccatccaccacctccgcctcctcatcatccacgcccttcaacaccacaaactctcttcgtggaagatccttgtctctgcagcaggaattgtgctcacctgtctgatcatactcacatactccagtaccgcgagaattcgaaacccacaattccggactatctttctccggtgccggtgaccagaagactacagaggctggcgaaggcgacagcagcacagacgcaggcacagatcctgcgacagcaagaacgcctgcttcatcgacttgaactttcttcgtctctatgtggacaatgcctcaacgatcgaatatgcccggctgaacatcggtgtctcgcgaaccgagaatttcacctccttcgacgactcccttgataccaagatcccgccctacagcaccgtccacctcgataccgccaatactcgagaacttcgtccagaggaaaactgtagagaatcaataattatccaggcgccacccgccgaaccccggcccgatgcctcacacatgatcttcggtgttgcgccctcgctggagaagctggaagattcgcttaatacattcgcgcattgggccggtggtacaaacgcgcatatactcgccggtgcgaacaaggagggtcc

SEQ ID NO: 7103 - DNA, 650 bp, Emericella nidulans
acatagctacactgagttgcttagccttataagggttggcaatgaaatcaaagtcaggtgcccctgcttggatcaacagccatgtctgtttcatccatcatgctcttgatccataggagcaacttcctctcgtgctcggacagcctttgttcagcttgcgttacaggtatggacagtagccatcggcttaaaaggaaggcacattccaagctgcagagagagtgctggatactccagaaaaacgagtgggttcgcgccacaaaatctatgcctaggcgcaccgggattgaaagagcatgtgcagagtgcagaagggccattatgaggcgtggactccgtgcgataggtggcgagtcattgagtgctcttgcaatctgaaccggatcttgggttacgaggcggcggcacggccctaaatcaacatgcagtcggatatacgccagccctagcagagcggtagatgtgaacgcaatcgggccagccgggttctgcggatcaatgctcgactcaagggtgcgtttccagagcgctttccaagagcccaaagaaactatccagatattcaagtcatctggcccgagactcgtttcatgcaagctttgagcagaaaggcaaagttgacgagcgaagagatttgttgatagcgcatg

SEQ ID NO: 7104 - DNA, 1279 bp, Emericella nidulans
  unsure (1)..(1279): unsure at all n locations
gagcacaccggatttctaagctatacatggccttgtgctcgagcatgttttatttgtctcccgtgggatgcacagaatgacggaggaatgtagcacctgtcttcagccagagttcgacatccgtattcaacgacatcatattcccgagtccctggaattacgttgacaagatcaaatacgagccttccggtgagcacccggattccaggtacaccgagaaagagaacaccctcttctggatcggtagcacaacggaaggtgtaagtctcgaaggaagatggaagggaatgcctcggcagcgcctcgcacacttggttaacaccatccacatataatcacgtctcaatattattgcccacccgacgaaccaaaatcgtactcctaccaaatattcgacggcctcgcgcccacacaagttctaggcctgaacgcctctgtcagcattaccgatcccattgtccgctgccgtaacgaagactgcactgatcagaaggatgagctcggcccaggcggccgggtcgacttccaagatcattggcgatatcgctacctctttgattctgacggtgccggtttcagcggccgcttcttacctttcttacagagcaggagtctcccctttaaaacgggtcttttcaggcaatggttcgactcgcgcgtcactccctggctgcactacgcacctgcagatgttcgtttacacgggctatggagcacacttgcatacttcgtggnggtgggatgccaacgtcgacggacgtaaataggaggtgaagcgcattgatgttcaaggccgatggatcgtcgaggaaggccgcaagtgggcagaaacggctttacgaaaggagactggggatatactattaccgctttattggaatggggcccgatgactcatgatcgacgagaacactggcttctattaattaggattttctggtataaaagactaatgggccttcctatgtggggaaggtacttcccaaggctcccaaatgactacaccttggatacttttactgatatgtatactaaagccctaagacttatgctaaatnttaggtttggtagaccttgtggttctaaaatgagaaaatttctaggtaataacacccctgactatttctagtgaatcccggaatcactaatattacccggtttgaacccaccacagtgttggagcccccaagtttaaaatggccccctgggggcccccatctccttaaagatttggtttgttcttatttccccccctctaccgctttttttattctttttt

SEQ ID NO: 7105 - DNA, 220 bp, Emericella nidulans
gcgatgcagcgatgtagccttatgcacagtagcagtcagtattatattatcgggagcacaggtgcagcatactatgtcctgctttaggtgctgccgaattcaatgcctataggtataggtagacctgcttgatacaaataggcgatctcccagctagttcctcagaatcctcctagctagacttattatagcagaggtctggcataatggacgaggcggt

SEQ ID NO: 7106 - DNA, 657 bp, Emericella nidulans
tcactatagtgagacccaagcttcggatctgatcctcctccccgcgggtctttatcaccgattaacgacttgacattacaaatgtcaagttggccggcggggggcctttttctttccgctgcctacctttccctcaaacctttgagttttgctgccccgttgcgctgctaattgcttcttttccaattacataccacctcccatgttgattttcccctgccgcgatacctttctcttccacttcctacccccctcccttctctgttccttttgtttcctctccccccctcccttcctctctcttgccttgtcttattcctcttctactctctccctcccctttttacttattcatctcttccttccctttccccctcttcattcccctgtctcccgcctcctcttttcttttcgtgcctcccccctcctcctgctcttctcctccttctcgttcccttatcccctccgcgtctactcctctcctcacacttcccgctcgtgtcaccttatcctctcccctatctcctgccttacccctcctagctgatgtatctctccttcccttgtgtgtgctctttcccagtcgcttacttttcctcttctcctcttccttctcctctctcccgttctttcctctcctccgcccctaacgtcccc

SEQ ID NO: 7107 - DNA, 1239 bp, Emericella nidulans
ttctgccatgaacaaccgccgatcaacgtccctccgccacgatcggaaagagtcaaagccttgaaggaagggtgacacgacatcaaggcgcataaagctcctggcgccgggtgggcctcgttgtcgggcgaatcgggcctgctggtgctgcagaacgtcctgaatctccgactgcagcacgcgcagcttaaaataatgaaaggcagaatgtttataactgggagcgccttccggggctttgattatcccagatttagtgatatatttgtcttccaggatggatgggaattctgtacttatggcctgatcactgatgccgaacggacgaccgacacagcagctgaccagacgatcaaaactgtagcagcaccaccacaatcgccgacgaaagtcacgcacccattctcggcgacctcgctcgtggtcgtcgatgcgtagcttcgccttttcgccgtccttgttattcgtacgattcatattgtcattttcaggtccatcaatgcctgctccatcttcataatgaaggccaaggtcaactgcaagacgcattgcaaccccgacaatgtaccagaggccaggcgccacgggacggagcagagcaaaacttgcaaggaggaggactgcctgaagctcctccaaagcaccaaaaccatcagtggttggagaagtcgacaagaaagactctaagtggacaatggcagaggcatgatattcttctggctgatactgacgacttgacaggcgctgtctcttggttgcagagggggaaatgatcacgaccttctttctgatcttctgctggtttgtctttcaatatgattccagatccaatggcaaatacgatattgagaaaatacagactgcgaggggagcggcttttctcgtcaacggaatacgtacggtcgagcaattcataaagccacaccatgtcaatggggatctgcgggttccatgttcgaatagagatcggcagccgtcgccggttcctgtcgggatgctgacactttatatcggccggctgagcccgaaaccagtcccggggtgctctttcgtcccggggcttgcgagacttcttcgcgcatgaccactcgtggttcggcctgactttcgacaacacccgccagaatccatgaaccatcgggtcggctgcgacctcatattacgtgtccccctttggggtttctcgggttttagcttcccacgcatttttttttcgggttttctccggttgttgggggt

SEQ ID NO: 7108 - DNA, 1417 bp, Emericella nidulans
ggtacacctcgtccctttcttcaggctcgtctcactgccttagtctttaccgattgacaaagacaccgctggctgagtattgtccgggtcagtaagtcgcttcctagcgcattaaaaaaagggccataaagactgtcaaactggcctcgctatgcgcaccatatcaggcactcttttgtagtaacgagcttagagtcgtaagaacgggctatatcagccgctcagctgatagtgaccaatatgcaaataataaagccgagtgtctgatgtgtcgtagagaattgaataagcttacatcatcttaagtacacggcgtgagccagcaatcagctttcagctaccagctactacctagcccacttgaaatttgcacgacatcctctgcaagctcaatgaggactcaactattttgcgttcagctagatataaaacaaaagcaagcacaagctcattgatatggacctatggtcgagtcaaatgctctttcgaaaggaggatatccagggtcttactttgcggtacaaccattttgtgccgttgcttctcgcgtggcccaatgtgactggtaagggtcagtccgggcgttcctagctgaatgtagcgagttcatgcctcctaatacctttgggaacttaggccctcaggctgggtttttggctcgggaggccttgattgtagatactctaacatgtggtcctcgtttgtggttattttcttattgcctattattcccttttacgggatttattgacctcaatgcttcatgtcttaatcctttttattatttttccaccttctatctttgtgttcttgttcctatcatatacccattgtcctttcttattctcctatttcttttttctcttttctccattctcttttctttcttctctctcccctctgtcacgttcaatttctatacctccctctttttactttcttttcttaactattctatttatttattcctctcctgtcaccttttctatctatcttcatccctctcttaatcttttttctttttatcttactagtcctctactctatacttctctcccatcattttcttcattcctgtttatttctcttcttcttattttcttctcccctctctattactttcgtttcttttcttcctatattttatactgcttttatttctctctcttcctctcctttcttccttcttatcctcccccttcttctatttttaattccttcactcttcattctccttacctctcttcttctgtatcatttaatataatttctctcctctctttttcttatctctcaactgttttctcagttttcttattcccttttactactctcctatctctctttcttaatttacctacctctttctattccttctcttttctctttctcttctttccctctcttttctcttctc

SEQ ID NO: 7109 - DNA, 844 bp, Emericella nidulans
tgtcatagtccctgagaaagggcgcaaggcgcatagtcattcaaactctatgggtcggtggacggtatctttgaatcggcaagcattgtccgagcggcaaaaaaaaaaaaacaaacaaaaaaaaagggcctccttggtgcctgatttctctcccagggaggagtcaggaggagtcaggtcagaatgtacatagcttgtccaaaggcacaagcatccatcgcttcccacacgtttgcggcgtcacatccactcatccaagtctcactcctgcggtaaaagccggtcattcatgtagactcagcctgatctaggatcggctgaccggtctctttgcctaactctgtattgggagggcttggctataggactaatcaaaggcgatcttccccggggatcccctgtgtccccaatcctcatcttactggatgcagcaaggatagcttattacacagatgacctaggactgctgtttgctgagcgtgcgcttgaagagacctatcagcaactagttggagccctgtctagcgatcactgcagcctggggctgcgtcaggtcctgctctattgagagaacatggatacagcacattttcaggcagagacagagggccattcgtacagtgcctgtaccgggcatatgctagattaagccaggttcatacacccgctgactaggggtgctgcttgacatgaagctcgcctatgggcctcttggcactggatctatagccgctgagaacagcttgccgacatctatggagtctactgatacacgtgagttagctagtacctctggcgcgcagagcgatctggtgctagacgttgcaagtatataacacccgtg

SEQ ID NO: 7110 - DNA, 1031 bp, Emericella nidulans
aaaagcatctcggcgcgagcatcgacgcttgcttcgttgagtgcctttcagtttttttgatcgagcactgcatcctgtatccactgcatcactgcattccctgcattccctgcattcgccgcactataccctgtacggaacccgacgaccgtctctgtacctgtacctgcacttgttgattagtggcctagcacagcttagctagcttcatgatgttatgacgacatggcctgagtgttcgaaggcgtattcaagatcgagcgtagaccgaccgctatttctgcgagggggatctttcaaataagtacaaacttacgagcccctggcgcgtcctgtggattttgggatcgggacgggatagccgttatatgtcaggtgcggaatgtgacccatcactttcagcgagtacgaggactcacagagtatacggacagtgctaggtgcgtgctagctggtactagaccgctgcgatcagcagccaagttaccagaagtattcgaaggacgggagcgttgtacttttgcggagggaccaggtgctgatcgagctgtccaccgagatgtacccctattcacctccaaagatgtactatttgctcgctataccagcagagaaggtagtgggagcaccttccgaccgagaagtcgccggacggatcgacaactgtctcgatctctgggatgtcgcgtcgggcggggcttccgccaacctgcattgattcacttcactattatggttgtacggtgcaggatacagcttgatgcctgacgatcgcagcaaccctatattctgttcatcttgttggacgccattactgcctcataggacctctattcttaagatcttccctaccatggtttcgagtcaccaggcaggttcctgcggtatgggaaaataatatcctcttggggccctgatatcggcggaatctggatacccgcacccttccccttccgagtgatataaggggcaaaaaataaaggtccaatcttaaaataaaaacctttatggtttctatatacacacatctc

SEQ ID NO: 7111 - DNA, 208 bp, Emericella nidulans
tttaaatttataaacaaagcccccggagcgctcatctgttagctgtctaaacctgatctcatttgctctaccatagaaaaacacaatgggcttggggaccctcacctgcgcgttaccactcatggctttgaacaacacactggtgcgctggagtgcaaagacatagcgccattgtaaccagacaccacacaagcagcacacctgtata

SEQ ID NO: 7112 - DNA, 790 bp, Emericella nidulans
gtgcggaaacaggaacgttcaacatgaaccctaccactgcgttgaggatgtggggcctaaggcctgtggacaggataatgcccagcattccagcgggtgctgcctctgaggcagacgacgagttggggtcaatttggtccagcaggagtgggaggatttccgtcctccacgccaagatgccgttcatcacggcgcaaatgggggctgtgtagtaaaggctcaggaggggatccatattggtgagtctcaggctctggctctgtccccgggctgtgttttcgcttgtcgatgcctcttcctcgtctttggagctcgtttcatgcagtgtatcggtgccgagtggaccgggctcttcgcccgtttctgcattatgcgtctccaatgtaggcgaggacaaagaggaagaggtggaagtgagaacctgcataagcaccagcctgagagcatcacaaaccaaactaacaagctgcaccgctacaccaacccaggagaactggatctcgctgacgacagtcagcccgacgctggctgtaatgacggccacattgacgagcttggccgcggtcagttctgtgacgccgtagagggcgctaatgaggagcgttatcacaggtccagaggcctgattcatgccgtccattagagttcagtcttcattatttcgtcctatatcctgtgagacgaaggggcaggctggacatgcgtaccttaagcatctggataaaaaagacattgagatatatgtatgccatattactgcaaacgagacgccgtagctaaaaagaacgat

SEQ ID NO: 7113 - DNA, 1017 bp, Emericella nidulans
  unsure (1)..(1017): unsure at all n locations
atccattcggagagccatgaagttttaaaaataagaacggcgcgggggtttttggttaagaaagtaataggcattactgctcgctcgacgcgtttttcatatggaacgaaaattattgccaggatgaccgagataaccaaggatgaaatcacgagaggatgagtccagctatagacattaccacccagattgagacccatgatcaatgcggtgacggtaagcaccaagagcgcggagcccacaaggtccacgctcctgagaagctgcaagaaggtcattctttcctctgtctggttcttcaatcccagaccagaaggcgttgtccatgcggcagcaaggaaataaacgaagatgaagggcagctgtacgaagaacgcacctctccagcccacttgatcgcacaggtatccgccaaacgcaagaccaagacaaccacctaatccgaggcagagattgatataagattggtagatgccacggtactcgatgcggactagatcactggacagaatcatacccattgaaaagacacccccggccccgagtccgcaaaaggcacgggctacgataaaactccctatgctctgcgccattgcacaccacgctgtggtaaggaaaaagacggcaatagcgaataaatacacaggttttcgcccgaacgtgtctgagacgcgcccgaaaagtggaagaaaggccgtcgatgtcaataagaatgcagttgaaagccaggaagccgagttcgacgcatggaagtgtgaggtgatgacagggtgactggacgccatcaaggtggaatcgaaaaaaccgatcacatatcccagctgtacaccaccgaatataagccagaaccgcgtaggagagacgttgatgaaccgggcggcatatncagtagcctcgctttgagcgcctgctgcttccgaatcttgtatggtcttgcttgcgcgttgcggagagaacccgttcagggcagtgtctatttaagcgcttgaggatcgagctgctttanacaggccacga

SEQ ID NO: 7114 - DNA, 204 bp, Emericella nidulans
agagattaaagcctagaaccataaagggcccatggattcccgcttcagtcgtttccgttgccttctcagttcctataaaaatagatcgcgggtcagaatgggctctttaagtcgaagattcgcgtttaccatacctcttcctctacctcggcgctctcggtcatcctacggaattcttcatcctctcgttcaatagcaagtaag

SEQ ID NO: 7115 - DNA, 918 bp, Emericella nidulans
tccccatcaacccagacgagaacatgggaatcatggcctattttgtccaacatattcaagttcgcaagcaggttctccgttatataaagcatctcgatacagctatttcaccatggcttccaaactcagaatttgccatcctagacaaggcatgttggaaatggtacgataatctgccggagagtttacagtttacgacgtccacaatttacgcgcggaaagcttcttcccaactaggagcactcgtcctcttacactgctctcactatcagaccctgtgtgacctatatcgcctaggagccccagctctgtttaagctgcgttccgctatcgattttccaccggagcagagcgagtttctccaaaaactgcggggggatttgtacaacgcagctagaacccttgctacaatcattggcgaggctgagcgacatggaccctatatcctctcagacacttggcttccgaccatcacgtatgacagctctcgcattatgttgtattaccttacccagcttatagaccccgcggaccagatagcaggggacttggggtcagaccaatcctaattgggaagaatatttctgcctcgaagccacgcaacgttaatgcctgtctgagcacttgacgttaccaagactacgaagcatcgttatgggacttggccacctgccaaacttgttaggctttagctcgaacccgaagttgcccggcaaaatattctgtgaccttttccaagccacaaacgggaaaagccccgtttcgtcaagccccgcattggaacctccttctcaggcggacaaccgggtcccaaatttaatttagggggcgtttctcctcggagagaaatttttttttttttgtgggggaagaaaatgtttcttcctcttttttatgggggggaaaaaacctaaaaca

SEQ ID NO: 7116 - DNA, 801 bp, Emericella nidulans
atacgatgttctgtaaacgctctagactttgaaccatcggtctccagctatctcttaaccgcaatcttcagattgacagtaagaaaggttttgtatatttgctcgcgagagatcatgtgacaagaggagattcgagcagcccaggatgggaggtagcaactcaatcttccaagaggtaactggatggacgagttagctaagttatggccgcttcttacgaccgtctgtttgtgcagaagacttgggaaagctctttgttactcgcaacatttgccttggagtccatgacacgcacggatgatacctttctagtcttgggaaggcagggtctgcacaaccacctcatcggtcaattctgcgcaaatcactatgggacacatgatttttttcagatgaggaaagacaagcctgtctcgtagtccgcaactctctcggaaagtcaaaggcatccgcagatcttgttttcagcataaattcagccacaatgataccccgcatactaccagcgatgcttgtgcttgataaagaaatcccggaccggcacaaccaagtctcgtttgtcagttgaaggaccgttattttcctggtactgatagaagacaagaatgcttcgtggtaagagtgggaatggcagttgtgtctgcagtagggatcagtgaccatcatacagccggagagtcagaaagtacccgcttcttctcaatccaaactttgtctagtgacgtaatatccatggtcactgtactagatgcaataaggacctgatggttgaaatcgatggactgggcttgatgctaaatt

SEQ ID NO: 7117 - DNA, 402 bp, Emericella nidulans
gcgtaccccagcgaggtaaaagggaatccccgaaaaattatctggaaaggaaaaagggttacgctacatgcttactacgatgagcctatggtcttcaggaatgattacaagatgacgtggttgcgcttgcgggaaggctagcttgacagatatacatggaatgatcactggtcactcagcctgatgtcccttaggctgtgcccctgagccctacacctaatcgcactcttgaggcgtgctcctggattgggcaggcgaggacacaccgatgcctttggtcgcccttagctaccggtgcgcggagccaatagaccgcttttggccagatcgatactgcgtcgacgtggtgtcgtgagaattgtactgccatatgagctacactgctaggcacgtgctgttgca

SEQ ID NO: 7118 - DNA, 1473 bp, Emericella nidulans
  unsure (1)..(1473): unsure at all n locations
gtctaaacttcccgcggcgaatttgtgagagtaagtgttgaaggctcccaactcggaagttgtttacgacactaagtacagttagcaacaggcgttgacagtatgagatggcgatatgaatcttatacggcaagagcattattgacaaggcctaaaccctaaactgatgaagacccagcattgtatacctacaactcactacaactctacaggtttctcgagcggcttctcttgatcctcaggcgtaacatgcacctcccagtacctcgccagttccttcggaaactccttttttcgctcctcatccacccagacgccgtattgatgatgcgtcgttttctccttcagaatgcctctacgttcgccgctccttacgaaaagtgaaaagtcctgcgcaacacgcacatactcgcgtagagcctcctttacatcaagtgttgcgccagtcgtccagctgagaatcagaggttcaaggagcggcgcatcagtgacgctgggatgagcagtgccgatgctagtgaggaaccaagacggcgccgggatggcgcggacgaggtcgcgcaccgtatcaaagtgtgggcggttgtagaataagctgacggtgcgggaccaggtgttggagtgcacaaccaggataggcacggtcgcgttggggttgagcgggccgctggacttgccagggtcgagaatcaagccggcagcgggggcgtcggagtttgtgagggcctggagagcgcccgtggcgccaaaggagtggccggcaatagtgagctgggtgaggttgagacggcccgtcaggacgtgagagagaggcccatctcagaccagtagagaactagggctaccttgccaatggtatgatgcaattcaatggcagcctgaatgttggcattccggaatgcgaacttgtcgcgtctgatagagtcaacgtccagatcgggagcccggtcagagaaacctaagggttgaacttgtagctggtgagccttgggaggtcttactccgagcgggcccgcttccacgcgttttcatggtaccaggcattccccgcttgcagctttcataataaggctatttattggactggttccttttaaagtgtacaggaagttcagacctttcttaatttgccctttttatgggtatttaggcagatcttgtccctccattataatgggtctaactcctaatatttttcttatactgagttatactcacacctccttatctttatagtttttatatattctatcatttgctatttcattctactttttacttttgctctttattatcttcttattctttcccattatattttattccacataacacgttggtntntgtttgctttctttcattcactctcacatttttgtttcttcctatacttttgtttttttttacttgttacctctctgttttactatatgttcttctgtcttaattatctttatattcttcatctatttg

SEQ ID NO: 7119 - DNA, 917 bp, Emericella nidulans
ggccccccaaagtacaagggaactttttggtcagggtgaagacagtttagtggcaaaaacaaccttgttgccaaaaactgtctgcccaggacggtgaaaaagggacgcggcaaagtacaggcagtttccattacaaagcaatagaacgggtcctgggcgttttagtctggaattagtgagaatgctttgtgtttagttatcccaaccgggctggcgaagctgtttctaaaaagggctggaagtctatccaggcggcggttagatatataattttttattcttttccagtgagccgtggaccaaagaatagaccaaaaacgccaaagtcgccaaagaagggttggcggctgcagtatctgagcccaaagaatccattatagcaccgcataagaacagcccagcgcataaataagtcaagctttagcatagcagattgtggatgcgcgaaataatgacaaattccaatctcaagcaatctaaaagcaatttcaaatcaaacaccaagcggctttttcaccccgcaaccacagagcccacccagatggaaacatagcggtgtgtgaacagtccgtgacaaccccaccaccagataagatcgatcgtaccagagtcagccattaagcctctagaaagcaacgcagaccccgacgcctggcacgagcgcagaaacggtcctgatggccaattagactatgtggaccccctgacaaatctccctcgggcaggcttggtcccctgtcgatccgctagccaccaacgagccggatcgccgatgagaaatcaatagtccttgtctagcgagcccttttaggcaagtgcgtaattgtggccctgcaattggctaaaggtttggggagtgcttgtgatactgtggtgaaatgctcttatatctgccttttttgccaaggacagatgtt

SEQ ID NO: 7120 - DNA, 1183 bp, Emericella nidulans
  unsure (1)..(1183): unsure at all n locations
tttagcatttagatcatcctaaacagctattgataggcgctatgttccccggaagcgatatagcctattttatagacgtcacgtctctacattagcagcatactaaatgtggaaacaaaataactctataggatgacttaattcgcattttcgaaacaattgctgccaactaaccacagtagtaactcagctgcttctcagccgaacggaacctggacagccctaaaccaacttgaaatacaaatgaaatcgaattaacgggaaaacgtagacgataagagggtgcagttgcgagaaaatacaaatcagggtcaaaatatgggtagttttgcaagtacatcgaatgcagacacggaagcaaacacggaggtacaggacaaaccaggtaggaaatgtaagaagattacctaagaaactgggcgagagggacctgcaggggagacaatacagagcaggccatgggcttcagagaggaagttgagaagatcccaaaggcgcttgctattttccaagtttcttggtggggttgcaccggtaccttgatagcttcagggcaaaccagcgacgatacgtttttactaaccgatatagggctacctaccgcatcgatgatcgaatcacgagtagacgtagatgtgctaacgcgctggctgcccaaaagggaacctgggagatgagcgaacgccacatcatggcgaaagtcagcaattccgcaacgtgcaagagatccgctaaaagatgagttcaaaggctattttattagaactgacacctatcgaatgcaattgtggaagaagtggttgtaaagagttaggggatccccaaaagattttaactctccaacaaggaaaatggttaaaaggaccgagaagtaatttgccgacatctttattgcagattacagtgcnccgtttagctacttaataagattgtttgaaagttttacaacccatctgtgcatgtgcatgcatgttcttcttcgtgaggacagtaattgtgtggagcttagttttttaggtaaaacgcgttgtgactacttttcagcctttattttattgcagaagtctgtaaacctagctaaaacggtgaagcaatatttttagcgtattctgttggccccccaaaaaggaaacttttaatttttttttttttttgggggcccataataaaatatatcccccct

SEQ ID NO: 7121 - DNA, 622 bp, Emericella nidulans
cgccaccagcaccacggcagaccgttccggctgagaggaactggcaatcccggcaacatcctccatcaccagaggaagaatcgcaaacggcatcccctctaaattgacaagttgagccatcacagcattcattcccatcacactcatctccgcaatcacattcctcgccagcttccacgattccgttcccgcactcgcctgctgagatggttggcgtgttggtgttcgtcgttaaacaccgcatgctcaccctcctcgacccgatcgatgaacatacattcccgattgtacatggcgaaaactcagactgcgacgccgccgagatcgggttcatgagatagtcgccgcctgcattgcaggatgattctgagaggggacagcactgtcgactgctaccggaaagtgagcatgtactggagtcgcagtcgtggtatgcgccgaatgtgtgcgccgattcgtgtctgaatagatgagaaaagaaaaaaattagcatggaacacagttcgcatttggtcataaataagagaataagggtgcgcacgcaaaaacctgtcactgattcgccgcgctcgctacgacctttggacccatgtgcgaatcacatagttctcctaccaagaaa

SEQ ID NO: 7122 - DNA, 637 bp, Emericella nidulans
  unsure (1)..(637): unsure at all n locations
gaaaaaaaatganccgaccaatttacatntgaaaacttttttgtcatcctcccttttttgagtattcccgccttcttcatccgtagggctttttgggtaatgtacgtcacgatatctagcaagatcggatggcccggcttggactggatggtccactggcagaactgaatcctacgagagtaccagtcatgccagtctggccggtccggatcagcctcaattccgacaacgaagccaatagttgacaggtcgaggctgtccggtaaccaatccaccactggtttaagcgcagtggtatcaatatcgctataaactccaccgcgcgccaggaggatcagatacctgaaaaagtcggctttcattacaggtatcggcattgaattgaacgcctcaagcacctcagggatcgagccatataagtatttgacgaggtgatgaagggtatcgtctggaatgacttggtgaacgaagctggggttcatctcggtccagctcgcctacggtcgtcgtaggtcctgactaaaccacacagaagccggagtatacttccatgtctgccagatatatgcggngaactnggctttcaggttgtaaggaaaatggtagcgcangcgttcgcgcaagggagcagtatctg

SEQ ID NO: 7123 - DNA, 595 bp, Emericella nidulans
gcagagctgtcattctagaggcccattcactgtcagctcagagaagacagtgtaccgcaattaccagaaattaactctgcaagagtcccccggttcggtccccgccggtcgacttcccagacagcgagaagtgatcctccttgcagacctcatcgactcagccaagcctggagacgagatcgagatcaccggtatttaccgcaacagctacgacgcgcagcttaataacaagaacgggttcccagtcttcgcaacgatcatcgaggccaaccacgttatcaagtcccacgaccagcaggctggtttccaactaacagaagaagatgagcgtgaaatccgcgccttgtctcgggacccggacattgttgagaagatcatccgttcaatcgcccctagtatctacggccaccaagacgtcaagacagccgttgctctctctctcttcggtggcgtccgcaaagaaacacaaggaaaaatgtcaatccgtggagacatcaacgtcctcctcctcggagacccaggcaccgccaaatcccagatccttaagagagtagaaaagactgaccatcgtgctgtcttcgcaacaggtcaaggg

SEQ ID NO: 7124 - DNA, 613 bp, Emericella nidulans
ggtatacatctgtctatactcatgcagttcgtaggtcaagcataacaaatcatcactcgtcgccaaacgaaccctcctccaactcgacttttccaatactccacacctccttttcgtcctcgacctcgtcgttagacagtcccagaccgccctgtccgccttcagcctcccttctctcacgcgcctgggtagctaggcgcatcgcaactcgtttgaagtagtcagacatgctccgcttaggtcctggcggaagttcagcgccaggccctgccatgtacttgtcgaatacggcggagtccgagtccaccactgagaatatggagaggaaggcagcttctgctgcgagcttgacaggaatgaccatgtcgcggacgccggcaaatattggcggtgcgagaagcccgagatggggccgcgtcagctctgagtgcaggcggccgactgttcggatcacgaccagcgccagtcgccgggtgtcggacggcgtgccgggctgaaggcacggtgacaaggcctcgaaaatagccttgttgctttcaaagctatgctgctcctcaagcagcaagtactttcagcgcgagtacactgtatcgagataagggctgtcgcgtag

SEQ ID NO: 7125 - DNA, 405 bp, Emericella nidulans
ccggtacgcggcagaccgactatggccaaaaaatctcctgtaaacatttatatcaacattttactggggttgagagtacattggagactcgcggcttgtaactcgatgctgccgaaggcaagagatgggaatccattttgacagcacgtggaacatgataccttagttctatgaccggatcgtcatggatgaaatgaaaaccgtcccgtacggattgagtgtccgctttttgctccgacttctaagcgcctcagcttagcagctcaaggagaccatgctggtaggtcccttcccacgtcaccggataaggtacacattgtatgcgcatgaaagaatgaacagccccgtgaccgatattatgatgagtactaaagagacacgtccagacagctggtctgtgagctg

SEQ ID NO: 7126 - DNA, 584 bp, Emericella nidulans
atgtccgatgtgcgcgatatgttgtcgcaagaggcgcacgttgaagacgcagaagtgaaagagcgggcatcgtgggtctggattgaaggcgattggactggtcgggaacggcagcgggaagaggaatttctggccagcctgacaggtccagactcacgcttgccagtatggacagagcctgaagatggttcactcccatctgcgatgcttgagagactacgtgacggccgcgatctgatccggatccacaacatagccgtccggaagtccaagcgaccttttggtgagatcaaaaccttccatgaagacgttgccaagccatatcgacaagcagataatcttcggtattggataaaggcggccgaactgcgctgggagacgaagctcgaactggacgtcatgggcgtcgtctatggcaccagcgacgaggcgtggcaccagtttgatcgagccattgcagcctggtgcaagtccgtccgagaagagctctcgcaagaccttcgagtattgagaagacgagcgactgcagccagtgttgacgggctgcttgtcaagatctcatgacggcttccgtcgataatcca

SEQ ID NO: 7127 - DNA, 1023 bp, Emericella nidulans
  unsure (1)..(1023): unsure at all n locations
gtttggcgggaacgggcgaatttctagaactccaccctttggaccgagccgcgtccgcgctagaggcttggcttcctaactggggagctagccctaatcagccgaccagcagcatctagcgccgacctcaccatgtcgaaatatatagcaaaacagggggcgtttcccataccggtccgtcaacatctcctgcagcaatggagagctatactgttaacttgacgatcccaaatactcacctccttgtcgacggcgagagcaccgcgcccattccaggctcggtctctgtctctccagccacatcagcatttgcatcgcccgtctcagccgtctgtcggccagaaataacggtgaagctggtccgtcttgtgagttctagaaggccgagaccaccattcccaggaaatgaaaccagcagcaagactctgccctggagacggatgactgcccaagtccagtccttcccttcccagatacccaatgcacaatcgcaaacactggcgaaatgtatcatctggcacagtctagacgtgaccagcctggatttccaggagcggaagttcagcttttcttttctattcccgcaacatcccgtcacagncgacacagttttgggactgtttctacactataaccggacggtagcttagggtattcgtagggtcaggattgaagccattcgatcgagagcgcgccgcagaaccgttggatatcggcgtccccggaggccgtgtaacgaatggaatgggcttgcctcaaaaaaaagtccggcggaacacattgacttaagtgagggaataatttttgtgggagcgggtaaaaaaacctcttcgaaggtgtgtgttctaacgaatttattttttgggaaaaaacaacggagactcacaatacctctattggttgggcctgttttctatctatctcaccacctcttctgatttattattaactttatattcttttctttcactacattctacatttttactattcttattcattatttttactacccctatattt

SEQ ID NO: 7128 - DNA, 930 bp, Emericella nidulans
  unsure (1)..(930): unsure at all n locations
agatcctggaacggaccgcggcttgtatatgagccggcctatcatcgtccctacatatgctagtgggataacgtctggacaataccagacgcatattacattgtccctagagtacacgtcataatacgtcccttactcttacccttcgccttcaattcgcaaaccaacttccagaccccttccgccgacggccacgccatagaccctaactccctcggtgaggcactactcgtctgactccgggcataccttgccgtattaccctgcatgataacggcgccacggaagcccgcgaacgctcgtccccaggctaagtcgttccgcacatcatagccagactgccgcttgagtttgagggaatcctctagactgggcaagcctctcgctttcaggtgagattccgctatgggaggactaagactcgaaagtgcaaggtcgaccccccaggactttcgctagaacaggagcggccggactgccaaccattccgaggggaatggccttgcgttttcatcttccatgcttaggcaccattatccccgggttccttctgttgtcccctcggttgccagtcccgtactccccgggtctcggtgtcacctcgtataggcctgttctttcctcttcaaaacggcggcctttttctcttaactcagaggtcnnncgtggcccctttatctcaacccttctcttccctgatttattctttctttccccctattgttttttaatacttaatgtgattatagattttttatgatattatttattgataaaaataatataatggtttaaaatttattaaggatacccnnnannnnccacccccctctccctattttccttttgtgttggattttttattttttgtgtattatttatttcatattttttctttactagttatatgctttggggtattctattctc

SEQ ID NO: 7129 - DNA, 679 bp, Emericella nidulans
aacaacgcggggatgatactttatataagctgtttgaaaatttgtgttatatgagacgataatacaatactcgctttacgattgctagcagatcattccagctagtttgaaggtactgtgcgagagccggaatatgtatagggtgaaggttggtcaagaagccgggtagcattatatgggtattcaagccatctttcgaagatatggacgtaacgagtatggtattcatgaggcgtgactctgatcaaataggatccagaatatgcgatgtggaagagcttgggatattatatgaaaatgggatagcaatcgccagctgagcgaactcgaggcctgatcgttgcgatttccatctcccttcttttgttttgctcgttgaacaatattcttcataattcgtggaacttaaaccttcatctcctcaagaccgtgcttccagagagtggcgtagggggtaacaccatcctcacggaagtcaatcaggatgtgcctggaattcaagttagtgagaagtccgagcacttcagcctgctgcgaatacatacatagcatcaccgtccatggactcgcccatgagaacatcgtagttgtcgtagttcttgagaatcatgtaaacggcagcaggagcacccttcttgaactcgttatggtctcgcgggggcacccatatccaaagggc

SEQ ID NO: 7130 - DNA, 1105 bp, Emericella nidulans
aatcacagctctccgtagcgttctagctgcgcacaaacaatgatacgaggcagtcatggcaacatatgggatcttccgaaatcgttagatgcagctgattcagacgcggtggcagataaatccgcttctccctcaataagcgcacctccgcccatcggcaacaacctaaactatacttccacccgagcattcgatcttttagcccatcccgtcgtgagaatcaggccgagccagcgccgaaaggttgctctcctcgcaatatccttaacttcccataccaagcgccctgagttcgccgccgatggattcgtttcctgacttcttattgagcgaactggcaatgaaggtgatgctccggacgatgggagcattaggacttgggggacgaactataagctcccaggggctacgcgactgatatgcttgagctgttcttggtggaatctcacgtgcgggtcctgggccgcatctcccagcttgaagtcgagattgagcgacagaaacgaaggaaagctgagttattttcgaggccgaaccgggatttcctgatctctggcttcgctagggaggagcgcacgccgtgggttttgataagagactgtcgttatctgtaattatgaaaagtctcttgatatatcccaaaataaaactttaaaaacctgaggccgcatgatcatcatagtgtttatacttagatattgcagagtcacggtatacatcggcatgagcttgggcggcgtcgatcttccttacctgcgagtgacttctttcaccaaaccaaacatgggaattggttgcactttcctcctttctgtttcataagaaccagaatattcagcggtgccacctgtttgggaagtggaatactggttacctgatgcgtgagtctatcccctgtgcacattttgtgtttgtccccttgttgctccatctgaccacaattcctttctatttaggggtgtgccacaaaagggggacaaaatttttctttgtccaaacaagattttttaaggaatattcgcccccccccacctctttgtgagtgtttttctaccacatccttagtcataactcctatatgtcgtactaaatacttcttctttaa

SEQ ID NO: 7131 - DNA, 825 bp, Emericella nidulans
  unsure (1)..(825): unsure at all n locations
ggtggacatcaataacgcatagcccaaaaaagtctgtccaggcagactaaccaaggggaaactgagttctgttggccacgccagacgctgacccgcagggagagttgttgtcgtatgctgcactccacgtccggtccggcggccacaggaacgccgcagggcccatctctttagcggcttcttcgccatgagtctgcgacctagctacagtagacaggccgacaaaaagagcaatgtgacgtctcattttttgcgagactgaagagctggatgtctgacagggaataaacctgatgaaggaaggagactgtgatacgggggcagcatccggcggacaccgatgcttttaaggccataacatcctctgataagcaccaccgttaatgtagcattcgggctatattagatgaaatagtctagagtgtacagtgaccgcttttaccggtcaaagaaccgactggattgagtcatgagggtgtgacaaggcagacttttctcggctcgagagtgcaacatgctcagaccaccgtacaagtaggggctgcggtccaattggggacgaataaaccaaagcgaggtttgatactagacctgcgccaagcgaaatagatgaatcaacgggcaagaactagtggatcgcagggttcaagctgatggccggattcggatatcaatcagataagatggagaggtggagacaacactgngagtttgccgtccaattaaacagctgaggcatttgtctcctcacttgtcggctgtggctccacgagatgttgtacctcaccccggctcatgtagacagcttatatcgcagagcagaaa

SEQ ID NO: 7132 - DNA, 711 bp, Emericella nidulans
  unsure (1)..(711): unsure at all n locations
cggtcttgcatagcggacaccgagcctgccgtttcgtgaaccatgggtcaaggcaggtggcatggtagatgtgatcacaagtcagcgcgcgaatggaatcgtcatcatcaaagtcctccatgcagatagcgcactcccggtgcgcatcgccatggctggaagcaacctcatgctccacagacgcactgacttgaacttccttctctgaagcgttaagcggcaaagccagattggacgctggtgctggtattgaccctggcgcttggctcgtagagtcccggtctgggtcgacctcgcttctctcagaatgttttgcttggtggcccgacgccgctgtccaggccctaaatttgatcaagggaaaccgcttttccagctctgccgaggtcaggatggcgtgagaaaagcccatcggccagctctccgggtcaagttgccggttaggtcctctgaaccgctgtcgcgtgccgaaaacaatcctgtatcgaaaactgttcagaatgagacgaggagacaggcaagacaatatgagacatgggaggtaccagacgaagatgaagaagaccgcgacgcagattggggccaaatagcccagggtggccccggagggttcgtccgagtcctgcgccataatacgacccaaagcttggnttaggtgcgantagacattagattgagataagacagatctcattcgacgatggaatagac

SEQ ID NO: 7133 - DNA, 1457 bp, Emericella nidulans
agatagcatgttctagggagacacgcatattctttcttcctaccgacggggaaaaatgggcacttaggcctatttgttagtcgctcaacagtactaaccttgtcaaacagaagtcaaagaaattaatttcggcttgttctactaggattgatgcgaatatatatttgcaaagacgagaaaaaaaacagtcctgcacgtgtgaatagtggcatcattcatagaaaaataatccaccatgctatgaaacaactggcacccggccagtttctttctatactatgaactcgaatgctgcttctgccagtgtagcttttgccttatggaaacgccggtagtcactctgtttgccaatacatccactagtaacaacgcggtatgtgtattataatgcgtacctgcccggacgaccaaggacgagcagcgtctcgccgcttctcagaaggccatcgttcgcttcaagaattggatagtgttgcggtttccctggacgagacgggagacgattttcaacggctcaagagtacactgtcagaagttttctcgtaagcgacagcgtctccatatccagacaccccgaggttctgaaatgacacgcccgctctgcgcttcaggaatctactgcggtccttgagaccccagccttgcggactgcgtatcagccccacaatgtccgatctgcgcttgctcccaactgctccccccgccccctactcttatgcctccacctattgctactgtcgtcttctccttttccccttcctctactttatctattccatcatctctccccctatacttcatactatcctactctctcatctcgtttctcactcccatctccctcctttcataccttccaccccccctctcttctcctctttccaccttatccccatacatccccactctctcttcctatttctctactcaccctctcctctcactacctatctcactcttctcttaccccttcctcctcccctcttctatacacctctccatacctttgcttccctcccctctccattctcccccttccttcttatatatctatcaacacccatctctgcgacctcttttacctcatactcacatctgctcctcatttcatcttcctccacaatacttcatctcccgcttacaatcaacctcccccttactacctctttcctactacttcaccactcctcctcactcgtcaacttctccctcacaatcttctcactctctaccctactctcacttcaccctcaccctcttcttactaccctctcactcttcacttcatcctctcacctacaattgccgtctctcacatacacactcacctcctctctcacttcacttttccaactcactactcacattttacacttcacctacttcatcttccctctatctctactcatatcctctactgaccctctctctcttttctcctcatttcgatcccgttt

SEQ ID NO: 7134 - DNA, 507 bp, Emericella nidulans
cttagctatgcggacacaacaagaaaaaggggaaaatggcatatagcaggctgttttaaaaattgaaattggatgcactggcagagccagaatcagacgtaacaggtcaacagttgcgcgaaaaaagaggaggaagttggaagaagagcggctggagtgacgatggatcatggccgcgaagcggttcttagtacaactgtccgccaaaagcccccgtcctagtgtaaattacggtatgaactcccaccaggcccagcactttgtaaatagagattcatcttcatgtcttgttctccatacgcaagccgctcaattacataatgtttgattcaacccttgatgcatatgtagaaggcgccttggttgtgtcgcatgctaacgatcaggtcccggatgactgactttctctaccagtctcagcttcagcttcatgagacactcaggtcatgataaggcgtggacctgaacacgtagcttatgagtacaacattcctttatatggcagac

SEQ ID NO: 7135 - DNA, 1149 bp, Emericella nidulans
acatctgtttgcgactgatccccatcctccgacatatccgtaactcgttactaaatgccgccgacagacggagggcgcggaagccctaaaacatgcggcgccggattgttggtggtctcattgctctccggattattgctgaattggaacgccattgctgccagatgatattaggaacgatgtgtggctagatgttatcacaaaatatcatgttgcggtggcttcgatttcaggcacgattcgtcgaagctcatggagtttaaggagcgacaagaaaagcaatccactagcaatggacaaaatagagtgtaagtgacctatagcccatcaaaatatagatagcatttgcatagtaaattctaccagccgcgcattcctagatatggagacaggcgcatctgtttctgtccctgtctcacccctttgggtgatcagtcacataccttgcatttggatgttgtatactactcgcagacgctgagcatcacgtttagtataacgccactctcatcctttccttgccgcttgatagtgcatataatgttatctatgtgaccagcccaattagttttagttcctaatagcgatgcatttactctgtatacagtctcccctaggctctattgactttggactgacatttttactaggttatagatgcctaatattacttttttcataggatttactaccgacattcactatattaattactgcttaatttaagtaacttctacttattatcttcgtcattattcttcgttgtttaattgtcttgtgatcttttttcctcgtatattgttttccactatgccttattagttcttgtatatttactttcttgtcttctggttattttttttttctatatttcttcctcttatacttggtccttttaaattaatttgttaataagatgtattttttaattcctctggtttattgttttatttataaaacatttttgttatttttttgtcatttccttttatattctttttattaatattatagttgtttaattcttatcttaattcctattacttttatcttctctttctcatgtatattttcatttctttcattattttacttattttttttttttaaattaattcttatctttcatttttatattactttgattca

SEQ ID NO: 7136 - DNA, 940 bp, Emericella nidulans
agagatctggttgtttatggttctgtctcttgccttagggtttgaaaagctcgcggcgcattattgttttagacttagggtttcaataattcatgttcttcctgataatctaacaatgttcctttaactcttgattcggtttggcgaaccgagaaactgggtatgaaaatcggctttctctgtacaatcgtcgaagcatagatgaaataagctaaagctatgacaaaagtgtcgattctgaggaatactgcttagagttcacggtcggcagccttgacaggcttttcactgtcttcctccttgtggtctgtaacttttctgcccttccagcctagagccttgagtctctcaggaaggatgggatgagagtagtggtagctggcgtacatccagtccgcatccatagtgctcaggttctggatctggagcttgagaagggactgggagagctcctccgagtatccgaggttgactgcaaatgcatctttgaatccgttagttgagattgcaacgcttctaagacctagcacatacccgcttcaaattcaaatttgcgactaaggatattcatcagaagtttaacgacagcatccataggcgcgagggcgtcagagaagaggaggaatccaatcataataggctgttcagtgtggaagccgaacgactggtagagtgatctgttattcacgaacgccgagaagagagcaaagatatagaacatgtggaactgtgaaagtcagtaagagatcctccaaactttttcaatggtagcggtagcaaaacatacttgagcgatgccgaaaagcttcgtagagtggctgaagctccagtggcccaactcgtggctcaatacagcgacaaccctctaagctcactttcttaatcaaggaatcataaatgacatgtgcttcttccaaggagcccgaaaaataagcattgt

SEQ ID NO: 7137 - DNA, 652 bp, Emericella nidulans
aaggcctacggcttccgccaccaggggtagctgagctgttggggggaatagtacgtccgaaatcgtcgaggtcggcgaaagaggtcgctgggacggatccggctctcatatatccagagcttccgggtgaccggacatcttgatatctagtcttgaggggttagagacatagtgtgaatgccggatacataccattcatatatacttaagggcttttcctttgtcctttagtaatatatatatataaacttaaccccgatttcaagctttacaagtgtcagcttaggttcgtgaaactccaatgactaagagacccaaataagctagacccagataagaataatctcattagaactaatgagtctactaaagtaaggtctataaacgagccagctcatactaactccaaagtcattttagagcgcatatctcagagaactaggtaaatcgatgtctacgttatttagcataacctatgaacgacaatgcttagacaagataccattgattaactatagcgaacctctgcggaagagtaaatacctggaggttgtagtgtagagaaggtcatgtgtgacaaaaccctaatttgacggactggaagcatcctagagtgatctatacagacacacgaacgtggcacggcttctcc

SEQ ID NO: 7138 - DNA, 855 bp, Emericella nidulans
aaaggccaggcgggcataaccaatcagttgccgacctggtgatcgctgatgtttttggcatccaacctatgtcagccctaaggccgtcaggcatcaaattagaactgcaggcgattcctgagtctggacgtataacgggtggagactatgctatagacactccaagacctagtggtcaacgagctcaacacttggcattacattcaatctgaatatacctaacacaccatcctgactgtgatgcacgagaaaccctcgatggacccaacgatacaatcttgtgtagttatgcattgacatggacactataagtacaccgaaaataaaagaacgagcaaaaccatctactaaaatggaacaaagagattgtacaccgttagaagagaagatgagagtcgcctttaaaaaaaaaaaaaaaagccaccgcgccgtctgttcgtaaagctgaaaagtctattaagaaccagcattaacgacagaccctactctttcttgacccattgcacatgatttctagcctcttatgacacattagaaaaaaggaaaagaaaacgcacaacagattgggtacatgttgaaatgagaagtagacatcttgagaaacttggtaacgccgtaccgttaaaatgaaaaaacgggatgccacgaaaacagggcgaagtcgcctcttaagacccagcttcaagagttgagcgacaggccttgaaaacggttcatccattcaccaggcgcgggttgcatacgagacggtccagtgtttcctcctgaagtagctgtatagtcggcgtactccagggagccatacccacccggttggtaggaagtgaaagggtcggctgaggcgagccttccaaa

SEQ ID NO: 7139 - DNA, 544 bp, Emericella nidulans
ctaggatcagtactgactacgctctttctgaacaagtccggggattacaactatgactctaaaccgcccctggggggggcctttacaccagcacgcttgagctgagacggcggggaggataatgcatcataataccgaaataccttgaagaagtctctgtccgtggaatgaacaatggaacccccccccccccccccctgctagaatggcaacaacgttgcccggatcgatccggtcgtgcgaattgatccgggaccaaagcggccattgtgccttcccactcctgcagttcgggggcatggatgcgcggatagccgctgctggtttcctggatgccgacggatttgcactgccggaagaactccgcgaggtcgttcaacctcatgcagcagttgaaccaactcgcgaggggatcgagcccggggtgggcgaaaaactccaacatgagaaccccgcgctggaggatcatccagccggcgtcccggaaaacgattccaagcccaacctttatagaaggcggggggggaatcgaaatctcgtgatg

SEQ ID NO: 7140 - DNA, 443 bp, Emericella nidulans
tcctgatgaattcccatgaaatgcactctaccatctatggggcggtttcttggccgttgagggatcggtacctgacctacagacaacactgctgcagcaacactatcttctacatatagcatctagcgggcgctatcactctcatttacacaaggaggcggagggcacttacatacctcatatgagggactgaaatcctccgggacctcacatgctcccaggcccatggtgtgctgagagcaccctggcacattcatccccgagatggctgggtctccctgtagccggatccacgccttgctgggagagttatcctctattctggaccaggaagcatgagcaccctcaacgtgacagctgtgtgggcgagaatgacctgactggctccagaagcaagatgtatgatactgcacggcaatgcgagtaacagcaggacagtgctt

SEQ ID NO: 7141 - DNA, 547 bp, Emericella nidulans
caggaccgatcggcacggccacaaaaaaacaagccgcaccgattaagcgaacaaaaggaaaaccaccccccggggggagagaaaagcagacaccggccggacccccgcccaaaggaagaaaagcaacggcaccggcaaacgggcaagaagaagaaccgcgaagaaaaaccggggtcgggagacacaccccagacacagaacggaacgggaccaccccccaacaaaggcaccgagagggacggcaccgaaacgaccgccacccaccaaaccggcaaagcagacttaaacaccgacacacacatcctgagacgaggcaacggacaccagaagaagccaaacacgccgaaaggaaaacacccggcccaggagcgagaggagccccagaacaaaccggaccaggtcccgcaaacgggggccaggaacaaaacttcgacagggggaccaaacacaagggagtgggaaaagggccagaacacaaggggcacaccaaagggccccagacgggaagccgggccgacaagggaaaacggagccaggcccgcgcccc

SEQ ID NO: 7142 - DNA, 888 bp, Emericella nidulans
atcttttcttcaggagcgcgacaaggatgagactacgcacaaccaagagatccagtatcgcaagcaggttgagagactggtcaaagacagtgaaattttccgcatcacctacgtgagtttacccccttcattaatacgaaccaatctaacctgtatagtacccggacaaccagaagacaactgtccagctcctgactccagaggatgccacattagaaaacgaagaattgagccaggaggcccgctggtcatactacgtttcggcatacacaatgcgcgacccaacggaaggggtgccgttctcccagatgcggatgcctttcctcaagcgaaaccttccaggtaaactggagcaggaagaagagtacaaccgcttctatcgcccacttgttcaccaggatgggcttatcatccgcatctgcgccaacagttaccacatcctctacgaacctggcagctacgattggtggtaccggccggctcttcccccagacgagacgtcggaagacaccgccaaagaggccgctgttaaagagaggcggcgcgatcgctttaccgagaagtttatcaacaaccctagctgggctcatgggcttagcaaagaccaggtcgacgagtcgaatcagcgcttccgttcttggatcaagggctcggaggccgagaatgctgagaccagtgcccctgctggctcggcaacagacaagcccgagaacaaagacgatgtcgagatgccagacgccgagaaggcttctgggcctgagtcctgattgctccctttcgatgcctgctaaacgttcttaacgggcttgtgcttatcggatggatggtgcatttggactacttgaaagcgttgctatagtaaaatattcacgcgggtgcttggtgaaa

SEQ ID NO: 7143 - DNA, 648 bp, Emericella nidulans
agatccgccacggagctgtgccatccgtacacaacctacatggattcatggcactcgaccgctctgacactatgacgctgcataaataacaagagcggacgggcgtaaaccgagtccttgaagctacgtacacccgacgactggcaacgtcgcccaggatggatagaaaaaagcctgtctatgaaggaccatgcgcgtatacccctatcccaagcgttcctcttagcttgcgagagacacggtcggtacacggtgcttcctttggtatccaaacccaacccgcgacggttatagccagacaaggcgcctatgtgactatgaaagcccgccggtcctatacctaggactccttcaaagacaatgtctgtgccagcaacttgaggggcgctacttggcagaccaagagaactgtctggaagccattctacggtaatgggatagccggaacctacgagctgcgcgcaatggatataactgcgggttgttctttgatgccgggcctgaccatgctatacaatactggagaggacaactacaatccatcagacgatacgaactagttggcgtttgtacaatctactgcattttctgcatccgggacgctaacccccggcgacgtcctcatcgatggacagtctctcgacacac

SEQ ID NO: 7144 - DNA, 545 bp, Emericella nidulans
atcgtccgtgaaagtctcagtgttttcgacttgatcttcgttggaaatagtgctggctgcttctggatcaatcccgctatgatcatcttgccgtgcaatgacatcagatagtgtcacgaatatctgcgtagttagctggcggaagtatgcaatgagagcgatctccggcggttgcgtcggtgtttgttcttgttgcatgtttggttgccgaatcgagcctgagggaggactaggaatattgtctacacttgctaaaagcctcgcgtcttgttcaacttcgtgctcctcctcttcctcctcggaaaatccgtcgcgtttctcaccagccgatgcccaccaaatgaaggatgtataggccagtcgggtccatgatagaggctcaactatggggctggaagagaaagttgacgcggcgtctgagctgtcatcttcatcactattagaccggatacactcgtccttgaatacacgacgtaatcccttccggagagcaatgtaacgccttacatcgcgttgggtggcctttaattccgttcgtgcggtgg

SEQ ID NO: 7145 - DNA, 585 bp, Emericella nidulans
tcgtcgcaaccgctggccactccgtctacaactgggagtatgagctcggcgagctgaccgaagctaaggtgtatcttgggtacaccggaaagcaaaacattgacaaccccgaggtcgagttccgctttggcaagcgagttgccacaacccccgagtggatggagaagggcggtcgtcgcgaggctaacctcgccttcatcaagctgaacaagccgtttagggaggttacaccgtatgactaccgggatacaccggaaagcgacatgatgaacatcggcgttgtgggctttgccggtgacctcaagaagaacggcgagcctggtgcaaccctgtacgagtgcttccaagacacgaagtggagtctagacaagtccaggtggcagatgctcgagtatcaaattgatccatatggaggtaggctattaagagcgccttgacaaagcctacgcatctaacaagtccaggcatgtccggtgctccagttctcgacgaagacatgaactgcattggcgtccacacctacggcggggaaaggaaatgcgccaccgtcgtgggccaccacgggcattccttcgggcctgcttt

SEQ ID NO: 7146 - DNA, 817 bp, Emericella nidulans
gtatctctatcgtcagaccgaaccgcagccaagatctccataacacagcagttgccagttagactgggagcgaccaatgcctgctccttggccctgagcaagaacaggaaacgttcctccgttcgactgtgcagctacggcagattacaaggccacgagttatacaggatacagatagatgcaaggctatttttgttttcttttcccctctcccctccgtcaactatttgtcacgtccccactacatccagagaattgtaggaaacccacatggtttttaatcggaaatcggactcctcctgccagcgagaagagcttggggctcctcaggctcggctgatggtctagacgtcatgaaattgcttcttggtagcgtgagctcttgtcccttaatgatgtgttctttctctactccagttctttgtattctcgggggcgactgcagcgggtttccttctgcagaatggcagttaactgcccattctgacagctgctgaattttcgtgaagacgagacaccaagcagtcccaaacttgcttcttggcgagctgcagacgagctgcagcctcgagcgctagcagtgggagcctgactcgtaaatggtatataacggtatggtaagtttcttgttgtatctgcgccacgtggtaatacagagactctccccaccagctgcaggaaactgcaaatgtgattggttaatatagactcgttccatggattcgatctagaagctgcaggtcgcacttacggttcgcctactaccccgaagaagacccggtactacagaaccttactgcaaccggtataaatacta

SEQ ID NO: 7147 - DNA, 744 bp, Emericella nidulans
aacgctgcagtgtccagaacgcccccgtgtccacagggtctcaccactcggtccaaccgcagccttcgcattcgtgtcttctgccccactcaggtcctgagagaccgtctaaggcgcctctccctgtgcttggttttggccctcaataacccttgcccctcctataatcataaccccaaactctacctccttaccaccggccagtaactcctcttctccggcatcactcacaacatccgcaacagtcttcccagtacccgttacgggcttcttcttgaagaggatcttgatcttctccagaggcactttgttgtcagcttctgtggtgttttcgagaacacgttcgcggacggcgtccttcaagtccgacacggttgttgtggccagtgggacgttagacagagttatttcgagcaagggattgcgcgctgatctaagtgtgacggtgatagattttgaggagccggggtttgtcgtcttcgatgccgtcgtcttcttcggcatggagggacgcgggggttgcaaggcgggcagggtgtactaagacttttagcgacgtggcccggttcaggtagctctgagtgagagcctgtataccaagcaacaggtgagggcacgtacaggaaccctaggagtgtttcgttggtggtggacatagtcagcccacagtaccctcccccgggagtcctgcgccgagctaaaggactaaaagtttgctagttcagacatggtccctgtcctcgt

SEQ ID NO: 7148 - DNA, 642 bp, Emericella nidulans
  unsure (1)..(642): unsure at all n locations
ttttcgctatgatgttggtcaacgcgctgccccttcgttatatgggtcatttcagtcttacccttctcgcaacacgttcaatttaggtggtgccgcgaggggcccaggctagcttagatgtcaggcctgaagggccgctctgtgcttgcaggttggcgcggattatccattacaactggtatttgcgagattcagggcaaatgtaagtggtcaataatgctcactgtgttaagtccatgcagctgacacttgcccaaaatcatcatacctttccatttccctgccgccgttcaattcctaacagatagcgtggataccatctccttttctagaggggttctattgagctctagttactatatactttgtatactcaaaaggatgtagcgatgcagggcagaaatactaccaagaagcacttgcaagtactacaagactgcatcttctgattcggccactgaaacaacactntgatcgaaccaacgatctagtatacatattcgagatagaaatcacggcggtttcgtacagtctcgatagatgtagaccggagccataatcactcagcgcaatccccagcctatccctcatcctacaccaatactgggacttcattngatcaaggtcagcacccccttttct

SEQ ID NO: 7149 - DNA, 1222 bp, Emericella nidulans
cgactggagtcgtcctcgtcatatacagttttcagcctgtgtacgccgagttcatgatattcgtatcttgtacattagtcccaattgcttaagattctcaaatgtacggtccaatgtttgatattgtactcctggcgaggttggtaagataccacttcaaacacaaacgcagaaattgatcagtagaggctgcttctaagccacttgtataaccattcaatgttctgctccaggtacaatattggtatatgagatacaccccgttgctcgaaactacgacgttgtctgatgccctaagcgcgtcatagcggttactgaaccttgacatacccctccccgagccgggctatccggacacacagttatcaaacgaagctgtccgaagatatttgacaagttactcgcataacaggaattatgtgtagatctgctccgggtggtccggatgtatctggtggtccagctgtatctggattggtgaagtcatctaatcgctccagccgcccacactacaccgcaagtataaagaaatacataccttgtctacttaccaggtagccaaaacccaatactcaaatagacagcagagctttcgagcgtaatcttcacagcacatcggaccacccatctgaaccttaaataaccacatacattaaccccatcacaactggaagaccctctcgcatcttatccgcatctccgtacgcatacccacctttgcactccaacccgctgtacccttccaaagaaagcacggaatgtctctcgagcccaacgaccccgagaaagtgtcccggattctcgagcgcgaccccgccgtgacaatcttcctgcggcccattgcggcgcccgctgccctcgggctcgccggattcgctggctcgacctggataacagcaacatgggttgccaattggtggggaagtcccgaatccccacgatcttctttacctggtcgccttctggggagggctgggacagttcattgcggggctgtatgggtaccgcgctagggatacgctgatcacagtagttcatgtcctctgggggagtttctggatgagtattgggctgctgtatttgctcgtggtacgcataccttgatattaacattcagagcctttatactagagggtgagtggatggtgccgatatggatgctgatagactgtctatatgcaggcaaccggtgccctcccaccacatccgatagacgagcact

SEQ ID NO: 7150 - DNA, 500 bp, Emericella nidulans
gaggcgcaacactatcgttatgctcgacgctcaccactttcatggttttcacgcccttcatatgacgggagccgcggggcgctggatatcattgaccacctgaccaccatcttcgcggagggcacgctgaccattaagctcgccatgtccattgtgacagcccattggtgcatattgtatgccctcaatgacgatccaggtgactagactgaattgatgaaagtattagggggactgatcatggcccgtaccttgctggcatacattttgttgcgcatcaaagattctgtatcatgcctcattacatagccacaaacagctaagaaacctcatgatggggttgccaggcatgaatgctccaagctgacaccggttgtcgacgccgacgttcctcgtgcagagatcactgactccatcagtcgctcacgaaaggtttagctctctcactgtctatctggattactcaataaccgtgtgttgcctattttgctcattacctt

SEQ ID NO: 7151 - DNA, 584 bp, Emericella nidulans
catacacacgttccgatacgtcgaccggttacaaggcaaggattgcttcaaagaacattcgagatatattagaataaaattataggacctcaagtatgtatgtgtattagatcgatttatagtggttcctttcttgtattcgtgcgcctgatattccctgctcgtgtctaggttgctgctctaaacaccctgtaaactagatatttgtgacttgcccgaaataaatcatgatgtcgacgacaacgcgatagactggtaaatgaaatgctaataggtataataagacgtttctatcgtaaaactccgaactccctccccatgggctgggaagatcgatgtggaggcgaagaggaagacacgactgtccaacaagtcagctagtcagctagccagccagccgaacccaaccccgcagtgtaaggacatggacagtgttgctgcaggtgcactctgtacgactccgcagagattcgttatatcgaccccctcattcatgaaagagaaagctgctcgttaactggaccattgtaggtctttcgataaggcgagtgcttataatgaaactccctgaggtctttgggcac

SEQ ID NO: 7152 - DNA, 559 bp, Emericella nidulans
tttagattaagaatgagatatgcgccgtcaatgtcatagcctgttttaaaaggatattcccgcgtttaagttagggatacgctctgcttttccctacactcagaattagtgttgcaaggaactcgaatgcgacgcagtggagctcattgaaaccacaccatccttaaggcccgatttatttctctccaatctcaaaccaactcctcgctcggcgacgggtttgagatacagaataccattaaaatgccgccgcccttcccaacctcccatcgcgggatgaccgcaaatccccagagacctgcgcgataccgacctggaaagccaatcgcggaggaaccatcctctgaagaggaagaggaagaggaggtaaatgaggagatccagggggaacaagaaaggaagaggctagagcaacaaagacagaaacaggcggccccaaaggctacctcttttccggtgacgaggactgtaacaaaggacattaaggatgtcaaggttcagcaggaagacgatgatgatgaggaggggttcgctactgaggaagaggacaaaggggtgc

SEQ ID NO: 7153 - DNA, 663 bp, Emericella nidulans
gtggttgcttttgttagatgtggcggcggacggtgcgacttggcagcgggcacgattcttagttcagacttcatagcctcattgacactgaatttcaactctgaggaagggtaagatagaaaaatgcttactccttgacctagtaaagccaaaacttcgcaatcgctgtcggttccctgatggcaatgcgaactcgctctcgctgcctctagctgggtttggtagtttaccggaatgcgtctctggaaggctggtcagcaacacgaaatgaggactggaagtccagatcgagtccgctctagggccttacattgtgataattgtgctcttgttgggctggtacaatgatctaacatataagagaaacacgtgggaacacgtgcttcaggtcatccctttgtcctccttccaccctcgaacactctgtccgtgactatctagtgtttcgacgataacgcatgcctgacgcgaaaaccgtatgcgttgacgaatgattgaatgtatgctcattggaggtcatgtacgctggtcgcagcgatcaacgaagtgaatacgagtcaagcttgtgagtagaagcatcgtgccagacatcacacgcaatacagcttccctcagcattttttcgatacccaaaactcagttaacaacttgcagcctagagtt

SEQ ID NO: 7154 - DNA, 658 bp, Emericella nidulans
gcagaaggcagttctggaaaggaaaagaaaggcgtacgtcacgccagttttacttcccaggaacgtaaccttatacagcgccttcttgtattcacaaattggctcatagccaatgacctccttgttgccattgcggctactgtacaaaggaattgctatgatcctcagagtatatgccgtctgccgtattagcgaaagatgttagtcggaaccttacattgcttcatggttcggggtatctcgtactctgaaagaatcagtttggaagctcgctttgctcagggcttcctcaaacgtcttacgcaagcagtttgatggcgacacaagcggccgcattgatacccaatcctcccagagcctcgaggaacaggagtccctttgagtgcccgttctgttttcacatcatcacgatcaagcacaagaaggaccgggccaggcatatttttcgggatttgatgccttatgtctgcctctcaagcaattgcgctactccagtgaggctctacgagagcagatgccagtaattcatccacctgtgaagcaaatgcacaaagccaaaattgctttcatgtccattatgccacggtgaaattcaatcgtcatccttcgagaagcatgttggccggcatctggaagagctggcactgttcgtcttgcc

SEQ ID NO: 7155 - DNA, 730 bp, Emericella nidulans
  unsure (1)..(730): unsure at all n locations
agtgggacaccacatggcatgggatgagcctatagatcgtcagcgcgagagagcttttgttaccggtcttgggctggcggaagggttcttgtcctcgtcgacgcacttgatgctgatcgcgacggtgccctgctcaggtgtgaacttgagactgttgcccactaggttgatcaggatctgtaagatccggtgctgatctccccataggaccatgtccttcaatttggcggttcccggcggcccatataccggaccaggtgcgcgagatataacttctggagtgtcattgatcggaggagtgtctggatgacagaacttgatactgaatgatatctgcttttcctggacctggttctgaaagataatctgtaactgcgaccggatatccgagagcttgaactctttttcttcaagcctaatggcctgatcaatttggttccggctaaaggtgagcaggtcattcaatagatgcaacagcaaatcgcccgacttgtatacagtctgaagcgaccttttgatccgtggaagatcgtgctcacccatgcagaccgcacacataccaagaatcccattcagctgcgttttgagctcatgagatatattggcgataaaaagagttttactctcatcncctgtcttcgccgttatttgggccctttcaagttaaagggtttcgttctgcaccccgttctaagaccattggcctggtttacaagtataggccatttct

SEQ ID NO: 7156 - DNA, 899 bp, Emericella nidulans
tgtaggcccttggacatactttagttaggactggacatgcgctttattgttactcctaaaggaaagcatatgcaaggggagtgaattctgctttctcattagcttgattcccgtgtctcatgggtagcagttcagcgctctacattatggagattgcgcagtcttattattatggtggttgggattcataagtcaccgtcacattcaaacactgcccatcaacttcatcatactcatttcacaggagtcaatatagcattagccctacgattttcatattaatcacattattcgatatgcagcatttagggcactaagttcatgcacaaaccgcgaaacattgaggtcagagtgagagaacatatatgccaagcacagccggtgtctagggatgatttttatgtgctgacgcgcgagtataaccgaagcagaacacccaaaagtgctggatgttacggcaatccatagcccagacaagatcctgaggctctcgatatcctggagctaaaacgaccaaaatcctcatcaaactctcaccgttcaggaggcccaaggtaactctttcgatcagcccccgccgtatccaagacaactttttcaagataaacctccgacgaattaacccgccaggcaagtgtatgtttaccagcagaaacagggcccaattgcacctgcacagtccaaacttcatcttccacttgatccgtccaaatatccggcaagtcaccgggagtctcgggttcctggagcaagcgggtaaaactcgcttcacttgagtctatggccagggagcactgcattggcaggcaaggactctgtatcagaattttgagtgagaaaaagcgagacagttaggttcttgctgctcccgagaagaaagacgtcctcccaactcttta

SEQ ID NO: 7157 - DNA, 762 bp, Emericella nidulans
gtgcctcaggcataaatcccgcacctttgtaactgctgaagaaacatgtcgactagttatgcgaatatatccccaccttcacgaccaccggctgctctttggagtctctgggccgttgacttgaagacccgagggaggccggtatcctcataagtgcgtcccttcaaaatcatgtctgcaagccctttggtggcaaggaaaataaccggcataccatgcccatcgtaccccgcgcatatatatcgaccaggctggtcaggaacttcgccaacgtgaggggatgagtcataggcgtatcccataactgccacaatcgtaccatcagcatatttattcccttccgagatgcctgatatagcaacgtgggatactcactgccagtccagatctctttgacgtacgcgccgctttcttcccagcccctgaaagtgcgttgcatgaaatcgtcatagtagttctttgctggttcgataagcgtgctatcatcaattaccttataccactgtttcctgtcttcttcaaatgtgtactgagcgccaccaacaatgatacttccatctgggcgggtgattaggtagctttgcccattgccctcggcagacctaataagatacgaatatggtagaaatggggcatccttgccatccggaactgtaatgtgacagcagatccctcggcaagggacgatattcgaaaaatactggggaagtagtccggaagtgtatgcattagttgcgtatccgacctttacgcggaaatggc

SEQ ID NO: 7158 - DNA, 1099 bp, Emericella nidulans
  unsure (1)..(1099): unsure at all n locations
ccccctaaaaatgggaaaagcccccccggttgatgcggtactaagccgaattgaggctggggccacccaaaacctaatcccataatgggcggccgccatcctcgtaaaaactttaaggaaaaatccgcattgagtacctgcaagtttatggaaaggtacaaatccgagttccagaacaactcttccatggttctcgcgacgggttgtgcagaatacgcaaagccgacgacgaagcgcgacccgtagaccaccctcccccattcatttgcgttaagtaagcctttccctgaaccgccaacaggggttttgttcctcagttgaaccatccaccatcgtcaatggggattccaaagagaacccaaagggcacccgcaaggtcgggtaccttggattataccctttcctgtccattgcaactaactgtctcccaactgaatcttgactagagggatccctgtcagcgcagacgttctagcttaagacctctacaaaagagagggctatattgtcgttgatccagatacgcaagggagaagccacacgtccagcgagctatcagcctgtagagtcgaggcaagtccgcccatatcagtgtagtctttgaagtgcttctggccagacgtcgtggccaaaatgttcccaattggatgcattacagtgctgctgagtgagtctatttcgttacttcagtatgccgtcattctggagttgaattcttacttaccatcatggagcttccattcccaagtaggatcttgtgcaccagcagagtgcgtcggatctctccagaatctcactacaccatccgttccaccaccccaaatcccatgcccatcgccctcccctgttggaaccagatcgatcttcatcctttgattcgtagaagtattgcgtccttgaagccatcccacatgttgtccggtgactctaatatcataaatcatgacacccaagctattgcgctcagcaatataaagatatcatgcggacgctcggagtgtactcatcacattgaagcgcaatttgaaattaaacaagacgcgccgtgataaaggcattgcaactcactttgtcgctatgnnatcggcntcttcttatc

SEQ ID NO: 7159 - DNA, 1001 bp, Emericella nidulans
gtgatctttgccagatgagtactgctaaggcgcctaggatcggaaggccgacacccaaccctacaccgagtgcaactttggcagttgttgtcagtccgggctccctctcgtcggcggcctgaggtagggaggagattgaagggtccgtgatcactgggcttgtattcgacgaggttgttgaggtggcgttagaggatgccgtcgagagagtggcgttgtcggtgcctgtcgagggaggatccggctcggtgatgttaaaatacgcgaaggtgaatccttccggagtatcagagttaatccagaaaaagaaaacgttggagtagtccaagtcaaagccatagagctggacaacccagctgaagtttgtgaccttgtcgctggcgtggatttttgctatacagtccggctttggttagtgattgacatgctccgagagaagggttaggcatggaataacttggtacagcgtacaataaacgtttccttgacttgctgccgtctgttgaaagagactctgctgccagaaggagatgttaaacacttctagggtcgtctcccaggcaatgacctgctcttcccctaacttccattccggattgatacctgtccaagaggaaggattcgtaaagtgattatcatcatcagctgctctcgtagtcacagtgaggatggttataaatagcaacagatatagcatgtctgagtgactaggtaagtaggtaggcgggtggggggaagaaaggggaccagaataaagggccactcaacagggccaacaaaacaggtgttgagagggccaggaaccatttctcactagcagagaaagctggggaggctaatttaacaatttacgtctcactcgaacttacccttccaagacggtggaacgagccctgtacattctttaccggtgtcgtgaggttaggcccacgcaccccaagggtcgttagactggattccaaaacccggaatttcctttttctttttggtcactcactctt

SEQ ID NO: 7160 - DNA, 792 bp, Emericella nidulans
aactaagttcctgtacacgcgatcggatctcgggccgctctttgcggacatccaccaatgcactccgaagttcatccacactgtttttggccagtccggccaacacagtcactttgccgtcttctttcccttcacaaccttgctctcttcttttttcttcacatcctcaagatcagcctcaagggccttcaaccttacctccttaccctcgatatcagtctttagcgcagcaatccggtcctcaagctccttctgctgcctacccgcatcaacaagtagttcccgcttcttcttcagagcagccgtcatagacttctgcctcttctcctccttcttgcgccactccttcccaatttccttgcacttgtcatcgcatttcttgcccccaacacgggcccactcgtcgctcccatcgcagcaaagctcgtagtcgcagatgccgtcattcacccgctggaagggaatatacgatggtttatgtcccttattcttacagtaaaagcccggaagagccgccttgagtccgtcaccactgtggcccctgcagatgggcgacatccaacggggtgtttccggacaagtgagcgcacgccgcggtgccaggttcatcactaccatccggacagtcgcaaaaatcatcgtttactgcggagaacgggattttgatagcggggtgggagatgcaagagaaggtcgtggtgtctttgtagaactgggcagctgagcgatgttagtctatatgctgacaatcaccattgcagcttccgtcggaccaccatcgcgggtgtagag

SEQ ID NO: 7161 - DNA, 543 bp, Emericella nidulans
  unsure (1)..(543): unsure at all n locations
gtggggtaccccttactgcagggccgccaccttttttttgggccgtgcaaaaataaccatccgggggctatttcccatctaccaccccggttccaaccgcacaaccgcgctagagcctgtccagggctagacggggtcagagcctgtgtgtcttccggccccgaggcatttgcatgttcactggactggacggcagtctgattgaagtctaggagtgtgacatgccctagtctaggaagacatacgtagcgcaccccgagaatacgcattaaactggctcncctgaagagtctggctgacttatggagactcgtgacggtgcgaaagtgtaacagcaggcttgttcctgtacctagcccgacgggtgttactgtcgctgtgtttctttaatcgaggagcgacgcttcatgtgaagaccggggtggcgacggcttagttaacacttgtgtgtagtactgacggcggtacttgccctggagagtcatattcgccggtccctgctcatgctctgacgctatttttgggatactccctgctttgccc

SEQ ID NO: 7162 - DNA, 953 bp, Emericella nidulans
tactgcgcggtaataagagacatcgttccccccaaactacctaccaacctgtccgttcgattagagtatatgttcccgttctttacccgttcttggtccttggctgtatcccaaaacacatacttttctacacttctttacagcatcagttcaactcaacgtgccgttcgtacccacagagagtccaattcaatcgttgctctacacgtcttacacaaaaaaaacccaattgagaatctcggtcccatactcatccaactgccgtttccgctcaccccacatcgcaatagctagtcgacggcccacaggtgcggaagccaaatgcccaggtccaccaaaaccacggctggaacggggagactctctgtaagccattttttgcaaatcgcccctatgttttcgcctatgcaccgtgcagttcatatttggttatgggaactgcttgttgaactaagttcctacgtgtcttgagttttgtcatccgtacagttctacccttttcaatttattgctgatacagtatgtcgcaggaaccgagtcgagaatagtgagttcccaacctatcagtttaggacttcgctcctgttcctagaggagataggcactcttctcttgtcgcgttgcatgctgatgttgactgagggaacccagcacttactggagtgtaccgatatcatcgggacggagacatacacagtccatggaggctgggatatccattgcctggtgtgatcgggagctactgagcggagatagtttccacatggcggaatgacgctgaagcacatcccggagagtacggggagctttttgtcctctaaccccttttctttggcagcttggtggccccccctggtgttattgtttcccccccacaccaatatttattctttcttaaataacacccaaaaaaacctttcctctcccttcaacccaaaactcttttctctctc

SEQ ID NO: 7163 - DNA, 660 bp, Emericella nidulans
gtctacgtgttgtcattcctttctgtttcacctcccttcctcatcttccaaccactcaacagactaccgcgacagtatggctctcatccagttctccaagtcacctctaacatactcaacagcacgattaagtgcagaccttaatatgccgtctcacaaggcggagaatcgcaaggttcactcgatgtatccagatcaccattcctctgtcgtcgagcttctcaagccctttggcatcgaaatggagtttcaccccgtcgacaccaatgaaactccctgcggaaaccgcatgctcatgaaacataccaacatcatgggcgttttttcctgttataacaaatcctgctcttcccacggctgggccagcaagatggttgcagccactatccgcatgtattgcagggccgggaagggcgtaatcaagcataggaaaggtgacagggggagctgacaagccgggcctctacaatgtccgcgtttaccaccagcgctgcaagaaatgcaactttctcagcagcccgaagctggacgagacctatgcgagacgcgttgcgtattatctaaaaatgtggcatgggttacggttgagcggccgtttacgtaggaagagcatggcgcacatgctaggcattttgtgaaggtgcagggagcttttgccgt

SEQ ID NO: 7164 - DNA, 1291 bp, Emericella nidulans
cttagcgttttctgtgtgatacgaagtcatgaccatgaatatgcacggcaaattatctccaactagagataccctatggtttacccggctgatgcggtgaccgatggatgacagccattgtagtgcatcaagaaaaaagggtacaggggccagacttcgcaacgattagcttgcagctctggacaaccaagcctggccctacttcctagtccggcggcagaaacggtgagtgcacctagttcgacattcttgaccttgggatggacgaatggccagcgtatgggcatgtcgccggttttcttcttcgaagttacagaatgtactggttgtttgacggctgttcaatgagcatctgcgacgggaatgcgccatctcaggcaccaagaggcaagtctcaactcacctttgggagccccatacatgctttgcactccttgggatacttcacgggcaaacaggattgctccgtgtgagccgacgtatcgccaatgtaggaaggcagggttggtgtggctcagaaccaggtacccgggacaatagtccacaaactggacacagggcttgtactccgggagactgaccggcagcagtctttttgtacaaaatttcctcgtacttccccggtgctaggcgcatcttaaagagtaaccttttctgaatgggttagaaatagaatcatggactgctctccaggctcgattagggaagttcttgcaatgtctattgcatgcacttcaagcgacctagtcacctgttaccaatgggaatttctcgtacaatacgccgtcatgaatatactaccttaagtaacggtaagcacactgaactgaggattgctaccctaccttcggacggtacatacaaacaaaagtgataaaacagtgacccattgagcgtgaatcggcaacacttaatgcgccaagcaagtgtttagccatagcgtaataccttgcagacccagtttaaagaaatcttggaccagctcgcccggaaaagaattaatggtggaaactggcaagaatcggaagattcggggtgcccatagtcggagcctaaattcagccaattaccttataagctgtcgtggagcacggtataattacactagaacgcgctgctttgcttttgcagattacccgcttacgcaccaccctgtctgacttaaattttttaaggtcctttccgtcaatgttacaataactctttttgtattttattttttaatttttttcttcctattaagcctcccttggaatttattcaacctaaaatttaggagtatcacttattt

SEQ ID NO: 7165 - DNA, 794 bp, Emericella nidulans
  unsure (1)..(794): unsure at all n locations
ctcgatcccgagctctcgctctcgctcgcgctctgcggtgccaaatgcagcttgaagaactcctttatctctgatgtattgtcttccgtatcgcaaccgaatccccattctgcaggcgtctttccgtctggccggtaaacaagactcgtcgggactttgttggcaagttcgctgagcagcttgccaggccatcgctggatcgttttgggtggaccccattccggaccgatcgtgtaggcgacacctgagaaaaccagctgcataagaatggcctcaaaaagtcaacgagggcatacaacctgtgcatgtcatgccaaaatcaatccccaccacaatgtctggaaaccgctcttctacccatgtcgacatggtgttgctaacaacaacttctttgccatccataaacggcttgcagaaaggggatgtgacggcgaaatatgaggccggtagtggaactgcatgagctagccgactctgtattttgattgctctgaaaccccatctatgcacaaagaatggcggtgccttccaatgagccaattgcatgacggaaaaccagagacttgtgttgggccatgatatttggccaacttgtgcatgtttaaattgcaggggccatgcccatagacctattcagagagggctagcccaacagtcccgttttgtcccgacctactaggattttcaactgtacgtcttacaccaactgatgctttgtaaaactagcttccttcgattcttttgcaatcgngtggaggacactcgtgtaacattaatttggattgcagactaac

SEQ ID NO: 7166 - DNA, 877 bp, Emericella nidulans
  unsure (1)..(877): unsure at all n locations
ggcgggctcaggtcgactccgtggttgggatccgaagtgttgtttcatttttccgtctggacagattgatgtctcctctagtgattgttgtctagttgctgaacttttgtttcattgaccctattaccatttctgtcggctttcagttattatcggtcgcagagcgtaattagtgaacggtttcaactacagtctctaaggccaaaatggcggactacaactatggaggttccgaagaggagaacgcggagatcaagaagctggaagccgagttggtatgatgcgacaatcacttatagtttctggatctgtataatgctgactttctagctcgacgacccggataattttgagacctgggagcggctcgttcgcgctgccgaggccctcgaaggaggcgtcaaccgcaactccaacccgcaagcgataaccacagtgcgcaacgtctacgaccggttcctggccaagttcccgctgctgttcggatactggaagaaatatgccgatctggaattctccatcaccggaaccgaagctgcggatatggtaagtgctcatttttacctaggtacctctgggttatggttcacgctggttgctgatttgaacacaggtctacgaacgaggcgttgctagtatctcgtcttccgtcgacttatggaccaattactgcaccttcaaggccgagacttcccacgacacagacattatccgagagtaagtagactngagctagtttcctttccttccctgtgaccactaccgatgcagcaccgacgttacaataacggngcggaatgcgtgtacgcaaagcgcaatgacagcagctccttcaagttggggagacgtcgcttttcccgactcgactggagtactt

SEQ ID NO: 7167 - DNA, 971 bp, Emericella nidulans
  unsure (1)..(971): unsure at all n locations
agatcatcgttttatatttttttctagtcttggtaagaagattttaatattaatctatttactagatcttagagaaaataaagaataggaagttaataaaattattaataataaaaatcttatcttattaaatagacaaactagctatttaaaatataaaaaaataaatcttattaaagaactgtatatattctaatccttatggagactttttaaaaaaaaataaaaaattttaaattctataataactataaactattttacatgccataaagtattaaaggatttataaataaaatctaaagtaatagtttataatttagataataaaaacataagacttttcttactataatctatattattaatatactagttacagatagtttctaagcaggtattagagaactactatttaaataataattaaatagaaatatctttcttcctggtagaaatataatatatatatttattatttttttatatagctttattaattaattattttaaatatctctacttaatagaggtccaattaaagaaatatatttataatataatattacttttataataattatctttttaactggtactataattttataagctntatatatttttctagatatgaacctacctataaaataaattataatatttatttttttatatctacnaactaggtaataaaattaaatttttataccatatatatcctataattctaagaggctaggnatatttaaaattattaaacctagtagacctttttcgggtaggcccacccccattaaggtctgggaaaaaaattttttttaatttccccgggagttattcttaatctgaaaggggggcggcccaatttacaaatgggtttaaaagagtttgcccccacgggtgctcttgtggggggagctctttttttttttttgtgggggggaaacccccccccccccctctttttt

SEQ ID NO: 7168 - DNA, 407 bp, Emericella nidulans
actggcgccaacagaggcctgggacttggcctcaccaagtcccttctcatccggccctccactacaatcatcgcctccgtccgcaacaatgaggcaaaggacgccctcatatcagagctagccaccataattcccggccaaaacagccttttacgcatcattcacctctctttcccttcggacaactggagctcagccccaacctccccttctgaaatcctgacagccctcaccaacactgtcccagaaatacgccacatcgacgtcctccttgcaaatgccggctttgcaacccctatgaccccagctctaagcacatccgtttatgacctccgtgcctccttcgaagtcaacactatcgcacccctcctcgttatccaggctttctggccccttctcagaaacgc

SEQ ID NO: 7169 - DNA, 1038 bp, Emericella nidulans
ttcgcgaataaccctactaaagggatcgtctccctgtagtcaagcatgacgggagcccagggctactggccacatatgagctgggtccagctgtcgagcaggagctccctgacttgactgatgaggttgataaactggttactgccgatggcaaacttgacctctacaccattatggctgtcttccgggactactcgttccttgcctcctcttacctcctcgagccatgctggaaaaactggcgtacgaatcctgagaacggctacggccttggccgcgatgtcttgcccaaggctgtggccaggccgctgtatcgctgcggacaaatgtaagttctcgctcattcgacttcgtgttacaaagcatgatgatatatactgactgcttagcttggatattcctccgtttatgtcctatgcggcatcttatgccctgttcaactacacccttgatgatccgtccaagggcttagtctattccaaccttcgtctagtccgcgcattcgaacgtggccttgaccctcgcagctcagaggctggcttcatacttactcacatcgacatggtgaaagacacacctggtctcatcagtggtgctcttcatattatcgacacccttgaacaaggaggctctcggtctgatgttaatgatgggttccgggagatcttatcctcgatggaaaagattgaggctggcatggaaggtatgtggtagctttcctcttcgttatggatgaatatggggctcacagatggcgttcagacatgtgggccaattccaagccctcggattacctttcttttcgcgtctttattttcggcataacctcgcagtccatgttccctaacggcgttatatacgacggagttgaggacaacaagcccctttactttcgtggcgagagtggtgccaatgatagcatagtgcgttttcaatatcatggcaaaatacaaaatagagtgctaacagatacagattccgctcctggaccacctcctgcaaattcccatgcctcagactccgctcacggagagcctt

SEQ ID NO: 7170 - DNA, 470 bp, Emericella nidulans
cactatagaatactaggatcacacacccaggatgacacacccaccgaacgagggcacttccgggagtaaaaaaagcagtcagcagagggcattgctcaggccgtggtcccagaaatcatatccaacggccgaagagcagaggaaggcgcaatacaggcacatggaacaggccagactggccaggaggcaaacagagaagctctaggtagactaacaacaatagacccctgacccagacgatggtaatcaggtctgaaccgacacagacatcgcaattctattgcgcggatggcgacaataccacaaagcagagcttctgccccagacttagtgctctcgcaagcgacaagagctaggcgtggatcaggaaaacttctgatggatagcccaataacagtcctcagcttattcataatcgatctcaagaccaccgtggaaaacactagatcacctgcgcgcagaggaggaca

SEQ ID NO: 7171 - DNA, 551 bp, Emericella nidulans
gggtgtaccaggccggtactccttggccaccaagccctcgactccagcaccagatgacacaggcgcagatacgtcgggagacgaaagcgacgcctcgaatgatgaagaatcgccagaggagctcgacgaagagcaactcgagcagcaacgacaggtccagcaatcgcgtgaggagattgcagaattggaagctctcattcgctcggagacagccaaatgggaaacgatgaacaaccaaatcctcaagggcaagcttgccaagcgtattcacgatctgaaaatggaagtgtctctcaagaaggtctcaattggcgagggtgatgacgccgatagctagactactggaccgcatgtacttttgttatgcaatacttttgatacccaatacgatttgcgtggaaacttcgctcatgcaggaatagccataatcacaactgtacagtatactgaatctcgaaacaaaccatcaattgccgttacctcccaacaaccggcttccccgtcgcctcactgactgcatcgctggtatgcaacttccgatcctgcctcaa

SEQ ID NO: 7172 - DNA, 316 bp, Emericella nidulans
gccatatcgctttgattcggctgcatcgagatattttaattttctgcatatactggatgtcttggtcaggaacagtctgactgcccctagctggagacccagttggtctctctctgttactgaccaactgtgcctcgggattatccccaacgtgttcacaggtcacaccttccttttgtcgagacctggttgttcattttgcatttgcacgaataggtgggggcaagggaggtagccatgctacgcgttatttttgtctggtttctccttgtgtccatgcatcatctcgcgaagctgccgtggtggattgcaacga

SEQ ID NO: 7173 - DNA, 573 bp, Emericella nidulans
  unsure (1)..(573): unsure at all n locations
tttagttgacactatagaactactaggatcctaggcccaaataactcatctaccactgcttccctttgcttctatcggagattaataatgggtctcattacaaggctcattacgctctttgggctcgtcttactcgctcatgcgtacgttacctaccccatcatttcagaccaccccaatctgggactgttatttgagatacctgaattaatgcttatgtgcttttcgaatatttagtggttattccgcacacgagcacacagttctctacagcaatgtccacctatcctcaccctctacggcgctcccacaagacatcgtgattgaggcccttgtctcgctcctcattgtctcaacaggcttaattttcggcgcagaaaaactgaagcctgtaagctggagtgagtgggcgaaggaggtcgagaagaagggcgacacggagaatccgcatgcgaggctggaggagagatacagctcttgngatgtgagggcgagtgctttcaaatagtccacagtgtcatttggcacccggtcctgttccgattcatgttgactggatctatcaagcaaaac

SEQ ID NO: 7174 - DNA, 730 bp, Emericella nidulans
atgcagttttctcaatttttgggggtttgatacgaaaggaatgaggacgaaagggggctgatgaaacttgacaggtgctggaaacaaataaatgtactgactagatgaaaaaaaaaaatctccgctaaggacccgagtataccgggccttaggtatttagcagaaacagagttattcctcattattatcaacaattactccggatgctgtggctttgggggtcttttcctctccggcaacggttgatttccagatttggcggggacccgtaaaaaactccattccgcctttctgtccctcattttttcagactccgatgagactttctgcaacacaccttgttctgttttgcatataccaatcttgcaggccttgcggtccctcggttctgagaacgattctccaagccttgtattataaacctcgcagccgccaattgttccagccaattctcctgcgctccgacgcatctgttccacctccgattcctttcaacttcggcccatttttctcttgcctactagcatattcgattgtcgcctccatcgctgattaggatattcttcaaaagtcccgaggctttaattgcggatcagctcatgctgcaggacaaagaaagcgtgccagtagggcccattgtcaatagaatcggccttcttgtcttttctccatcgaattttcccctatctctggcggcttttaacctctgttccgaccggttttttccttt

SEQ ID NO: 7175 - DNA, 763 bp, Emericella nidulans
gccccagctgacccatggactacgctggggctgtttacgaatcaacgattcctacggagtttcatagatctaccttcctgcctgcctcgcagcaccgtagtacatccctctacccctcaaaaatacacctgagcgcggccctcttctctaatctaagcactgcggcgctgctgtcgagggcaaacgtaccccatctctcctcccaccagctacttataccatgagctcatgggcatccccactccaaaatgggcggaagaattgatcttggtccagactattaagtgtcctgggtgtaaatgaatttcaggtagacgatttcctattgactaccatcatatttgagtatctgaataagaggcgaaaggaccggtctcatactttccgaggggacacagatcgtcttttgcgcctagcctgaacccattctattccatccttcttctatgggcctttttgtatctcgtcacggtactcgtaagttgtacggctggaatctcaggggatgagcccccacggcagtttgactggcctcttttataatacacacactatctataatgggtaaaccaggtcctgaggaagcgactcttacatgagagctcaacttggagttgcagacaatcaatcaaataccaaacaactgtggaggcagcttctgattcgaccaaaaataccgcctgatggaatgctgaattgggttagcattgcctacctgaggggaaccgcaaagaaatttttcttcccagctttaagtaatggg

SEQ ID NO: 7176 - DNA, 537 bp, Emericella nidulans
ggtgttacaggcacgcctctgctgggggaactggtaggccaccgactgggggctatttggattacagccttccagaggcggattttgggggctatgctcgggctctccatggaccatgaacatattttggaagatgttaggcgttgcagttatcattggtgccagaagaatgaggaacgagtcatgctcgatacatgtgtccaatcaacgccaattcactgtcctttgaagggaaccagctgatagaacgcgccatccgccattggcggcactgactattgccctgccatttttgctggactgaaaaacgttgggtgatgtcgcatatactggcgaccttgcagtgccttaccagctctggcatgaacggcgagccgagccggtgcctatctctttgcaaggttaacatagacgcgaccactgaacgcctgcactgccgtattccagggctagttcacaaacaaagactactcctttcgacgtggaaacataagggcacgacaagtgacacagtgcgctgcaccacgcacacgtatt

SEQ ID NO: 7177 - DNA, 609 bp, Emericella nidulans
acgggccgaaaaccgcaaacgccacagtgtaacctgagattatgttttggaagcagaccaccacccagcagggcggcgggcccaataaaaggcgtgtccgcatgccacgacacatcgagagactacggagacaacgagaggaagcaacccccaatcaacgccccataggacagatcacatctgcgacgctcgctcggataggaaacgccagatggacgattctgacggagacatcgcacgagagcccttctattggagcgagcagacactgtgtgccctaggcggtacacccaaggctaccatgctagcggacgaagagaatggcacgcaacagatgactgaaaggaaggtaactgcagtacaggccggtggcgtatcggactacagtacgaacaggactaacagtccgagacacgacattcttatgccaagtgagagaacttactacctgatgggtcatccgccggccagggcgattgctctacaagagacacgcaaatcgaaccatacaccgaattgagtggccatcgaacagccaccggatggcaagatcagtcacgagcgactgatggactgcgaggggctcgaccctggcgcgctaccatacga

SEQ ID NO: 7178 - DNA, 477 bp, Emericella nidulans
cacgtaagagcaagagcgacggaaccggagcggtccggttcctgagaaatctcctttcgatttctccgaacgagactgtcggatgcgcgcgctcgccgtattatcgctgcagaggtggctgacgataggcttcacaatgtccatgtggtccatgctatcctccaccaccgatccgtgattgaaacttataaccttcttaatacgtccgaggagcatggtctgtaccgctctcacctcgccgaccaacaccgcttaaccgaccgattacccacacgcccctccaactggcgacttgctcgagttccatattagggagtagactcggtagtccgacctactgcgggggcgcacgaaatcgtggctgccaccagttggtcataacattctgacagcaccgtctaaggacaaggtctcgctcgacgagggctctgaggatagaatatctgctaggccggagtgcttgttgaacctatccgt

SEQ ID NO: 7179 - DNA, 1266 bp, Emericella nidulans
cgtaatattttctctaagatatcgtagcgaggggccttttcctgctccatcttttcgatcatctgcacaaattgctcttcagccatgtctagctttcctcgttccaagtagatatcagctactatcgtttttctgatccacgtctctggatgctgtgggcctaagacagcttcggataccgtcaagcactgaagggccagttcttcggcttcttccaatttgccttgcgctttgtagaccttagcaagagtgctggagcagactaaggtgtccttatgctcaggaccttggcttttcgttctccaagctagggcacgctgtatcaagccagctgcctcctccactttccccagatcgatgtagagtgtccctaagttggtcatcgcgataattgtgtcctcatcctcttcgccaaactctgatttcgaggtctcatagacctcccgtctaagggactcagcctcctgcattcggtcctgagacacatatgtcgttgcaagattagccatcgtggtcagcgtgaggcgatcactggagcccagcattttccttctcgcttcaagtacaaacgaatccagctgctcagcttccgcccatctggcttgatcatggtacgttgccgccagaccagtcatactttccagggcttcgggatgctcttggtccaaactcccgctttttctccttgacgatcagggcatccagctttttcggcttcttggtcgtatcccttgacaccaatggttctaggggatcccctcctgaagatggactcccttttttcccaactctcttatgagctttagcaaaccagggattgcaccctttcggcctgcggctggtaccccgtataagtacctcccattctaatgtctatcacgatacactctttcgcacctcctgccatcaccaatcttccttcatgagtcctcccaccacccttcctcttacccatcgttcccgccaggtagcgatcctttcttcctattctgccaacttatctacctttcggcctcaagctctctagcccatgcgcttattcttcttgattattctgcctcttcttctttttcgctgaatctcatcttccctctttctctcctatcatcaaacccccatctttatctactcacctcatcatttactatcttctctctcccctctcattcttccccacttttccctctccttcccatattctctcctctcctaccctctcctttctatcttcttctatccttccctccctctccctacctatcctac

SEQ ID NO: 7180 - DNA, 1002 bp, Emericella nidulans
aaccactattattgacagttaactcaatgaaaatcttgagtcttcggtcgtagactcctctaaagcctcttcttgaggcggtatcgctcagtaattccaggtagctggacctgcctttgcctgttacagtaaatgttcgttcaaggctttttcaaacgcgatataatggcaaatctagccatgttgatgatcttaaactgcccaatattcatcgattagggatcactgcaactgtcagtcgcaagtgaccctttgacccacaacatatcaatatgaaccctgtatgaaccccgacagttgcagcttcacccaccgatggcgcgactgcgtggtttcctttacgctgctacgtgggggttagtaccctgtaacacccgtaaaatggttacaatgtttccaatcagataagatcgccgacctcgcttgcacactcttttctgcagccaagagcccagccaagaggaccaagcgactagggtcttggtagcaagcagtagcagagagtatttagccttggccgtctgcaccttctggcctgctctccagcgggtccgattaaatccttctccttctttttagcttggccgtccgttccttcttgtctctgttgagttcgcaatgggggagaaaacagcagaggccgaggccgagaagcccagtgtatgtctcctgatcctttctcaaccccaagctcctgtccgtgtccgcatcggtagcgggatggatacatagaagagaagcgctaattgcaaggattggatggggacagctcctcacacgttgcaccacattcacccgtcttctattctatggcagtccctcccttaaggaagccctcgtgttgctcacgggcctaatctccgccatcgcctcggggatccccttccctataatggcgattgtgttcggtcagctcgtcgatcagatgaactcgtcgacgtgcaatgcaacgcccgaaaacgcagactcataccaaaccagcatcaacgccaaggtcctgca

SEQ ID NO: 7181 - DNA, 611 bp, Emericella nidulans
aaggtaacccccacaacagaagggaactgggttagtcccaaccaacataacctttatcctttgtcactagctaacgtaccataacgggtctgggcacgacttattccccgccaaaaatacaaaccgtatgtggttcatattcggccggtatcgtattgatatggttagtggtctaataaacactgcagccgtgatctctttacactcttccatatccagacggctcgcccgatatcattaagagactcgtgaccgcttgctaaccctactactgtgatccatacctggacaatagcggtctacacatactcaacaggcatgagctgatcactatcgtcgcctgcacgaggcttaacacaggaatatcatttgctgcgaaggtcaacaaatacaaccaagcctttaatcaagcgctgtacataaagctgtatcttgagcttactctcgagcatttattggctaaatattatgaaaggagataatagctctttcatccactcccagtgctactgaagagtcttacgcttattacgagaactgaagaatggataagcatatgttttttaatgcacgaatgggtactaatacaggcccaaccaggtcttcgcttt

SEQ ID NO: 7182 - DNA, 1018 bp, Emericella nidulans
cctgaatcagatccaggaccccccactccacagaactggattgctaagggtatggtagcatacgtctcgcaagacccgtggatcgagaatgccactatccgcgattccatactcttcggccttccgttcaacccggctcgctacgaggacgtgctctattcttgcgccctgctgcaggacctcaaagtactacctgatggtgataagaccgatgttggggcgaatggtatcaacctcagcggtggccaaaagtggcggttggctctggcacgggccctctatagtcgggcaagtattcttgtattggacgacatcttcagcgctgtcgatgcacatgtcggtcggcacctatatgagcatgcgttgactgggcctctgggtgaagggaggacccggatcctggcaactcaccatgtcaagacctgtatcgacggtgcagcgtatctggtgaggctggataatggacatgtccatgcccgacgactagatatctctaaagaacccacacccgggaccacggacagttctgggccctcgacaaggccaagttcgccaaatccacacattgtggaagctcgccgaccatctaattcggtagtggagtcaaagagattctacgaggaagagaagcgcgagactggcgtaatcaaagccagggtgtacaaggcctacatccatgcatctggcgggtacaccccatggctcatcacggctgtctttctcatcgtcctgcttttgctcaatctcgcaatcccgtactgtgtctcaatctggacgagatcctatgagacagaggaaaatggttgggacgcactgttcgctcagataggccgacagggcctggataggtgacgggaccttagcagctgggccacatctggataaccggctttgtccttttacggctaaatttgccttgggccctctttttagggcccttggccactgagccatgtcgggtagggttatggactttactggcgatggtccatttttttacccaatgtccgagctttta

SEQ ID NO: 7183 - DNA, 561 bp, Emericella nidulans
  unsure (1)..(561): unsure at all n locations
aatttctcctctatggctagtctcagtgaagattcgtgcggccttaccatttggacgcatggagagatcacctcatgggaagcgaatctgatgccaaagtcgatctttttttttcgtaccccgctcggcgataacgatagtctcttcgggcgagctgatccgatagataatgcacactagaatgcatactctgtataatacatctctaaggaatagtatacataaccccacctggaggtcaattaagcccgcgacaacggattgatgcccttgtgaatagcagcaataccgccagtgaggatctaaaatcctcgtgcagggatcatgaacccagctttctggatcatccctctgaattcctcctggctggggaatttctcgatactctacacaagatactggtagctctcacggtcttctgccactaactgaccgatcaagggaatggcactaaaactacactgcttgtagaccgcattgaacaaaggattgtacaccttgctatactccatgcangcagacacaccactccgctttcatacgcggtatgctacacaagtg

SEQ ID NO: 7184 - DNA, 717 bp, Emericella nidulans
aacgtcgtaccattgattaggaagctgctgaccaacaaactgcatcggggtattgaggtgaaatagaattaagccgcagagaatagcgtgctgcgagaaaagtgcatgcttttcaggcgggggcccaattctgtcgagtttagtctggactcgaatatcaagaaaccgatcttgtatgatccatgattgcacggttgaactgatattccgaatctcctcgtcaccctcttttggccagaatctcggctgaggatgcgttttcgacagttgcaggtagtcatcgatagtcttctggatgcgaagtcccgacattcggaggtcttcaaaagcacccagtgtactgtgccgcatagtatgatgaacgtccagaaagatctgggaggcgaagcaaagccacaaagtaacctttttagtcttgataaactcaacaacgcctcgagtgaccgcgtcctgaacaggcatctggattccgcacctattgaccatgcagaattatggcagaatcgaaaaaaggatcgtttgatctttgctgaatttctggcccaaggacatccgctctctgtccattttaggaacataagtgccgatggagccctttttgaagacaggctgtagattgacctgtagaacttttgcgagggactaagcacaaccatggatggcacatacaaacactcggctatgtccgccatgtttttgctgccagcagaacgattt

SEQ ID NO: 7185 - DNA, 517 bp, Emericella nidulans
caacgataaacgccacaatgactctggcgtcacggagacccagaacaacgcccagacaataccagtaccgcccccaagaccaaacacctacgggggacagggagactaaacaagcccaaaacccaaacacgcaaacagcgacggaaccaaaaaccaacagccacccaaaccgcaggacgccagccacaggcaggccacaccaaccacaaccaccacaaaagactgatcacaaagcaacaccgccacaaaaaacacacccgaaaacccgaacagcaagcaaaaacccaaacgcaccgcaccggccacaagaagcatcccaacaagccccagaaatcctagccgcaaccaaccaccagcaaccactaagcccgaaagccaccccaaacccctaataggagggaaagaagaacccccatgcccaaaaaacccttaccaccctcagccaagccaacaaacccccagaccccaccccgaggaaagcacaaaggcccaaaaccaacgaaaactaccaaccaac

SEQ ID NO: 7186 - DNA, 1118 bp, Emericella nidulans
aagctaccctctctgtgttgagagcgtctgtgacaaattcgctcggctggtgtccatccggaatccgctcacactcgtctcgcggctggtcatctgaaaagtctgtgtcatcaggcacgaatcggaggtcaaagaagtttgcactcgacagatactccgcgccatcaacgttatcgtagacatgctacgcgacctccttcgacgagaatgtcaggatagcataatagtagcgtagtcgctccaactgatatttccggagttgcgtggtgttgaactcctcgccctgatcctccttcaagatcgaattcttgatcgtctcctcctcctcttcagaatcaagctcttcgtcctcatcttcctcctcgtcatcgttaacctcgtcttgcgtagcaaaaatctccctcggaggcccctccgtctcctccctctccatccgctcctttccaaactcactcggataaacagcaaccttcgtgactttcccgccggttgggcgtgaaactcgagaatacagccatcaagtcttctgcccgaatgttatcccagtccagattgaccacggcaatgcgattcgtcacctccccaacaggcacatcctcccgctgcttgtcggggaaatctaactcctcgccccccagagcgtcttcgtctgtttcttcttcctcatcttcatcctcgctcgactcatcctccgaagacgacgactctgagaagcccccatcgcgcgctggatcataccccgccgccttggtatcagctttcttcaattctttcaagacctcctcgtcgtcatcgacgctgacgttatcgtcttctccatcatcttcttcctctccctcatcgtcgcccagccgataaaatcgttccagatgcttttttgtatcatcgcgcgctaattttcggccgtatcgatcaacagcagcatttctcgagaattctttgtcgtgcaggatatgcgcgaatcgtttatcaagtttcacgtgggtgtgtcgtttgctggggaggcggtagcgagggtctgtttgaatatttgcgaatcgaggatcggctatgatgagaattgtcagttagtatgcatcctacttcggggctttccttttcttcaattaatgcagttg

SEQ ID NO: 7187 - DNA, 725 bp, Emericella nidulans
agtgggttaactacttgcaattctactttaatcactgattcgagtttagatggcgttactaatagtacatattatttgttcaacctttgcgtcatagtttctaacattatgtgcatatgttttcacggcagtacactgagttctgtcagacagatgacaacgtaggccataaacatatggacaaccaaagcgatagctacatatgtaactcgggaatgcatgtatcttaaggaatgtcattctagcaccgaattaatcggaaagaaagtattctagtttacaagagggcgatgcgggaagatgggccaggagaccgcataccaaggctttttttacgagaaactttgcggatttctgggagatgagcacatcatggaactgataactcgtatttgttctaagcgattgtcgctggaagaaagtgtagatcgtgtggagttctgctgctggagctgaggaggatgtttggaatgagtacgagagtacttcggaggctgccaactttctggatgaaccttggaccaaggttgagggatgcatccagggttgcagcataaatgcagcgggtgggtagtgctgtttcaatttaatgcacagtatgtcaaagactttgtatccattgcggccgtgggtatcatccttcttcgctaacatacatgtttaggtatccggatcaaccttttgcctcggagaatgcaaccaactccttctcaaagcctctacac

SEQ ID NO: 7188 - DNA, 808 bp, Emericella nidulans
  unsure (1)..(808): unsure at all n locations
tgggtagaccgcaagttggcacgatccgacttgctgatcacgaaagaatgagtgggataagtttcacgatttcaccgcttgacgtagaatcgaacaaaatggttgatcgatcatataccccgtccccgttaaaaaagatctcattagaccgagacagccacaagccacggaggcagcgggttgaatgagcgaaccaagtgataaaggaaaatcccggtcgcgaccaataaataaggggtttcagaaacagcagttaattcgatgaagatctcctgtagattggaggacaaaagaggtgagagaatcagttagcccagacttcgctgcaaatctgaaggttcaatcgttcagcagaagttgcgcgcccgctcaggatcggcagagcgcaaacccaatgtgcacacaccaagctcgtaggttacgcctagcggctaagcaaatccaaagctggttgtttattcgcggagatgagtggctttacaagggaggaagaatagcaggataaaaaataactgtcgaatcgcaggccagagaactagaaaccaaaatcttactagcgacggacctggacaaatcgcgcggtcaaccccagaccgtaatacaaaggcaagtttctcagcagaaccaatagccgttccaaatcagaaaaggagagcacggaatgcgcggatgtgtttgcgttcaacctgaacctgaagctttgatctgaaacgctaaaaaattctagataacgaaacaagtctgcggatgtgggtgaaactcgcggggaaaatacatttctcgtggngttcgtcaatatcgctatgtg

SEQ ID NO: 7189 - DNA, 701 bp, Emericella nidulans
caaggtcagtcgagcgagcaggctctcttgtcgaatatatatgctgacgaagctgtggcagggaacggtcgcgtcactggcttaaatatggcctcctatttctccgaagataatatcaaggagctcaaatatcgccttgaagccgcagctgtccaatgctctgagcgctgtctttatcagtccgcaaaatggtagactttccaccagtcctttcgctcttcgctgcttgctcagtaaatatgctcacagggcggccgaaatccttgactccatcatcccaatagacaactatgacaccgatccagactcgccgatggacattaccgaaccgcgaccgcagaatccctacctacgaacccaggatccggtagaagctgcgcttgaagctcaagaataccataaatacctcctagcaaaatcatatttcgatactcgcgaatacgaccgatgcgcctcagtgttcctccccccgacaatatcgcccgtctcattatcaacatcgtcgccgcaatcaaaactcaaatcatcactaaggaaccgtaaatcacagggctctccacacgctggattgaaggacaacgatttgaagaggagtccatatccaaagctcagtcagaaatcgttgttcctcgcattatatgccaaatatctcgctggggaaaagcgaaagaatgaggaaacggagatggttctaggtcggc

SEQ ID NO: 7190 - DNA, 1186 bp, Emericella nidulans
ggagaaaaataggggaaaatgttttttatgggcgcgagaaaatacaaaaggggggccaaataggttaacttccagggatatgaaaccacccattgcaaaggggccggaaaatttttaggctttaaatcaaatgccaggtacgattttttacctggggttatggtccaaacagatcttaaaattccgggcccgaaggggttaccccagccaaagtccgctccaaaccataagggttatccttagattttcgaaacccctatggaaaacatgaccgggaaattccttggcaatttttacgatattaattctctcccagaaaacatccctttatccaaagtttggtcagccttaggtcttgttatttttgaaacacagaggaatctagctggccaaatgcattcaatggttgataaagccagaatatggccctccaaacaccagaggttacggtgacaaattcaaccctagttgtctaaaagagataaccaaatctgtcacggagcccctttttaaatcccaacacaaattgggcatggccattgcctggtctttatccgagacacaaaatatatttttctttccctatattttaaagaaatcggtttctccccaatccaaaaatatggctacttaagcttagaatgcattcactcttagtagttgaaaaaaaaaaaaaaagaaagtaagaaaaaagacaaaagtttagtttgccaaatcttatattcttctgttccctagtggctgaactgtcacaggtctaacaagttctccccgcttcctgattagttgcttgtgcatgttcccatcgctgctggtgcgagccccaattgtctgccctattacacccctatcccctgacccagcccggcacagtctgtgcgaggtttgttaacttaggttccactttatggttgcgaatcaatgctaggggtagcagcattattgcgccatattatcagtcaagaattacctctacggccaaaatatgggatatgtaaggatgctgggctattcctctggcctgttccggccatgaccgagatatacaataagccaggaagttggtgacattcagttgggtcattctagcccatgagcttaccggcagacgttccctactaggatccatgccactgaaccgaacccgatggcaattgtgtgaaggataaaaacagcaacactaatg

SEQ ID NO: 7191 - DNA, 499 bp, Emericella nidulans
gcttgatgccgcaagacgggtctggatatctatgacgatattgaagacttttggacgtggctgcggtcgcccgattttcaagaactgctcgcgaaacataagatacccactcagctcgatcttgaccggatcctggtgactggagaatctgccggcggcttgctgagtattaatgcgtcacttacccatgcgtctgaggttcgagcggccattgccacgtacccgtcgctcgacccgagttcgccagatttcacccagccccggacagacctcctcccgtttggccagagtttgccggaatcgctgattgaggatgtcctaggtcctgttcgtgatggaaatccggtttcctcgctcgtcgggcaggagtacctccccgtcatgtgtgcagcgattcagtatggtcggctcggtggctggtacgcgcgagagtcgcaggagtcggcgaggcagaaactgctgtaccctgtgcgccggctggaggagcctgatgtgcagg

SEQ ID NO: 7192 - DNA, 683 bp, Emericella nidulans
ggtaggacgagtttctgtttgagaatcttctcttgcagcttcgcgtggttatttgccttaaagggtggcgagccggtgagaaggtcgtatcccagagcgccgagggaccaccagtcgcatgctttgccatagggtttgccttgaatgacttcgggggccatgtattcgattgtgccgagggaagagttgcagcggtcgtcgtcgcccacggcgattttgctgaggccgaagtcagtcagaaggaggtgcccctcgcggtcaaggaggcagttttctggcttaagatcgcggtagatcacgccgacgttctgatgtaggtgctccaacgcgaggaccatctcggccatgtagaaggccgcagcgtcttcgtcaaacatgcgttccatcgcgaggtgggtgaagagttctcctccttgggcgtactcgaggacaaggtaaagtctttcgtggtcctggaaggcgtagaagagctttacaacgaaggggtgtcgattcacgctttccagaatcgcgcgctcggtcttcgtttgttccacgagtttcttgtgaaccgtaatcgaggctttcttgaactgtttctgcgcgtaaagctttcctgtgagagcatggcgcaccagcaaaacggtcccaaaggatcccttgcctaagcagagcagaggctcaaaatcatcggtagtcatttt

SEQ ID NO: 7193 - DNA, 573 bp, Emericella nidulans
actccagcatgattaatagcttttacttgaggtaacttcatagtcactaggccaaatatacctggaaccctaacatggttgtaagtgcatccggaatcacattcaacagtaagacggggaaataaaataacattatttgcacggacatggaactgagtgtagtaattaatgagcctagcctgcactgggccagccaaaaagggatccaggggttgtcgcgatcatgctcttggccaccttagggctttacttggtgtctctgggagaggaagtaccagatccccgtaagtccaccttttgcatcctataagaccctgagcggctgagcctgcttgttatgtaagacatgtccgcgacaatgaggttaaatgcctacacctctgctatacgagttcgggcgcgtcagtccagtactaactccgtataattatttagttaaatagtcgggttttaggtcaaccctagagcttacataagtgggttattattttaacgttatagtcgaggatcgtttcgtgtttcgcgtccttacatttctccacgtccaaatgtctgaatcaagcgaggccaccg

SEQ ID NO: 7194 - DNA, 864 bp, Emericella nidulans
ccaaccgagcccacaggcccattgtaaatcaactgccctcgtgtggtctggcggcgtccactcagagttgtcctgatatgcggagaaatccttactgtataagtagcagaacggtagatacctaggtgatcctggggctatcatcaaatagtgcaggccatttggaagaacccaccgggctcagcctgataataactcggacggagtggtgggacgaaggggccctgcagtactagattatattaatccctgtcaatcgtcattaacaagcctgtctcaggtccactgtttcaactagtgatctagttgattatgcacaatggtaggcataaaaaaccacccggccttggtaggccatgtgtaagtggaatagatgatcccgggagtacggcgagagatctccgagtcatacagcaactctagctcacaagcagtctaccgcgtgcagttgtattttaggttgtttcagaatgggcacggcttctacgagtgtagtctattggttatagtcccaccgtatctggcccaaagatagacgcatcgtacatgtggatagtcctcaaaactgttgcggctgtaggctatttgattcccacttgatgcgagatgcttgatagtaccttagagctccttagcaactagttttttggttttagattagggcccactggatctctcgaaaggtgtaccgcacgtacaggagtatatatattgccaacgactacgtacaaaaacctatccttaaagacggtttcgcatgcgaagaatccaacgggaatacagcatgtacacgtacgtagtttgcccgcattcgcgcagaatggcagtgatctgtgatcctgcagagaaatattgttgagcaga

SEQ ID NO: 7195 - DNA, 574 bp, Emericella nidulans
ctttttggccttgtacgttgttccgatccccggcatttgttttcatgtttcatgcctaaccttcacgtccagtttcgcaacaagttccttcccaagggtatcaagatcgtcggatatgcccggacacagatggaccacaatgaataccttaagcgagtgcgctcatacattaagaccccgacaaaggagatcgaagagcaattgaacagcttttgcgagctttgcacatacatcagcggccaatacgaccaggatgactcattcaagaacctcgccaagcaccttgaggagattgagaaaaaccaaaaggaacagaacagagtcttttacatggcgttgccccccagcgttttcatcacagtctcagagcaactaaaacgcaactgctaccccaaaaatggtgtcgctcgtattattgtgagttggattgccgtccaggtgaacggaagggaagaaaaggctaatcgggtttttgtcgggttgtaggtcgagaaacctttcggcaaggacctccagagctctcgtgatctccagaaggcccttgagcccaactggaaagaagaagagatcttcc

SEQ ID NO: 7196 - DNA, 476 bp, Emericella nidulans
  unsure (1)..(476): unsure at all n locations
accgatatacatgcgaacgcccggagaaatattctaccaggtttaccggaactccatttttggngtttatggacggatcacctacaacaccgggggccggggaaaaattatatcccttccccccacacccttccatcttcttacacttctcaactctattattccttactcccatcaccctacttttctctcttcttctctacctccttatctccttcctctccccttactttaacccgccctaaaagtacttacacacaattctcgggggggcctttcaacctattcttcccttccccctcaacccccccatttctacatttactatcccttattgccatcacctcaccgatttcttgactcctgtctgtctctccttcggacacgtccctatctaccctcctatactattactatctactacttcactttcaccctctactttctctcaagtcctaatccatcttctcttatta

SEQ ID NO: 7197 - DNA, 574 bp, Emericella nidulans
  unsure (1)..(574): unsure at all n locations
gtatgataacttctccaatgataatggatcaagccgcatgcacgagtaacccatcaagaggtccatattacgttcggcattcacgacgacatgatctgcaatctccctgcaccgtgatgtgcactacatgacaaggaagaaatattagagctaccacttcttagttctagcccattcatccatccctttgccaagttctaagctcattttatccccctacaggtggtaagggcgagagagtgatagacaactctgctgactcctactccgactccgattccgattagacctgtatccgtcttttctcatctccctcttccttgttctcctagaatcaaagattatatacaaacaataatccccaagagatacgcacgcacacgctgtgtcgccacaaagacaaaagcgttcctattgcgggtgcctcaggaggctgccagcgctgcacgcgcctcagcgacccatcttgcgtgtttccggcagagatgcgcggagggnttatcactcaagctaactggaaaagctcaagtgaaacacaggactgcgccgaaaagatggagaggaatacagggtg

SEQ ID NO: 7198 - DNA, 555 bp, Emericella nidulans
ggagtgtagagtgcgcgtatttgaggagcggaaagcgggacggcgagaagtggtagagggtgtcgagggctaggagccagttctcttctatttgctgggccggagcaggcgggagggaggctttcagctcggggctccaggacgaggggtttgcggcgtcggcgcaaaagacctgagctcggttgcttggagtcaagcctttgtcttcacccttctcggacggggaaggtgaggaagacaaggagaaggcgcggcggttttccttttcgagtctttcaacccgctgctttgcgaactgcgcctggacagggatagaggtgataccgacgtaagagtcgaatagcggcttcttcgggctcgtgctgtctttcgcatccccggccccgtcctgttctgctgtttctgcttcgcatctatgcatcccggggcccgttccccgtttgtaccctagtatccgcatcgactggtccccgcacccaattcctacgtccagcaaccgtatcttcttctccggcggctggggattcgcgtcgccattctcgtctagtagcgacg

SEQ ID NO: 7199 - DNA, 747 bp, Emericella nidulans
aaatgttcttgaaaaggtgatgaagtccccattggcgagataatgtgacgaccatgctaacagcagttaactggcaaaaggaggctacatattcccataattatcggacgcccaccttctcaccaaagagctctttacggtggccaatcctccaatcggacagataacgtctgactgtaacgacagcaggtattcttaactggctggaattgggaaagaccgggaaaatagagcagataaagcatatagcaaggcaggattgcgaacaaaccagaagggccaagctggatagactgtccgcgacattctcggatggatctccagcaaaggatctgagcatgactaagagagacaatcaatacgttttatggggttcacagcgtctgctattaatggtgctggactgcgtggactacaaccgacattactcgccctacgcgcggctgctactgtgcagaaactttctttccggcaaggtatcggaaatatcactgcataattgcctagtagtatcgactgctcattcgctagagcatgaccacggatgcttgagggagaagcatgcttgatacttccccctggatagttcccttatctgagcccttaagcaagaacacccatcgggtcccaccgtggcaaaatttttggttcctgcccgagaacgtttctatttcatgcggaaccagataaaagttaacaactgcttgaacgttgtctctgtcaatcaccttatggtcataaaaaaca

SEQ ID NO: 7200 - DNA, 611 bp, Emericella nidulans
tggcacaggcgtagtgggtggtcttttccagtccctgtccggcactgatttcgccaaagccagcattggcatactggtcatgcacgcagagcagaactacacgaccttctatccgtgcagcgagctccccgtgcgcggctacacgaccctctgtctgaacaatgcacagatcaagacgggtctcatgaacgatctggacctcgagacaatgatgagtgatgtcggagcaggagtgcagttcctgcgggctatgggcgacattgacaaggtgattgtctggggccattcgggcggcggtgcgataatggctgcgtaccaggatgtggccgagaatggtgcttcggcctgtaacgggactgagaagatctacccctgctcgagcgccagggacgggccggagcccgcggatggggtgctgctcattgatgcaaatcacggactctcgacgatgactctcctgtcgctgaaccctgctgtcaccaactcgtctgaggcagtgaacctctacagcccggcaaacgggtggaccgaagccggcgcaaactatacctcctccttcgtgaaggagttctatgcagccgtggcgtcgccctgaaatggtctcgtcgact

SEQ ID NO: 7201 - DNA, 541 bp, Emericella nidulans
agattatcttgtatcgcgaagagaacgtaacacgaaggtacgccacttccgagccgctactacaacatagccgctgacgtgtcgaaagaaacattttaaacaaaaaaatttgatcatactaagaacttgcaatgaattgcttcggagactgtcacgagcggaggataccgtcttttgcggccgggtatttatctttctctttcaaagctttcccttaggggacaagagcgcagtgaatcttcggggcgaatatcataccgagaacgtgacaacttttgataccatcgcgaatgacgcgatcagtgaagcacatgatatggatgtggatatgccggacgtgaaggcaacaaactcggtagctgagacgcagaagcagcccgtcgctgagggtgatgccaagtcggccgaacaggacgtcactaagataccaaaagtgaccgtttcgcagtctagcgatcagactggggagcggtcactcaacctagataccctgtatccaatcttctgggggttgcaagcttacttttcttcttcgacaaag

SEQ ID NO: 7202 - DNA, 827 bp, Emericella nidulans
ataaaattgcgccagtatacgacggatgctgcatatatgcatataacccagatctgaccaatcttgtgggcttggcaatcgcaaacgtgaagttctgttgcagctggtggaatgcgaggaagcgcagtatcccgccgcaaagcaaacttgctacgaacacagcggactctgccgaccaggagagaagaccagaactgtagcctgaaggacagacgaactcttgcgtacgtagaggaaggagagggaggattgcgtggcatagaccaaagatggtgacgagtttgctgtgcaacgagaggagtaagatcatctataggagactgggtcagcaataaaatgggtgtctgcttgcagcaggcccgggttagggagcaccttattatgcctgaacgggtcgcctttcactgtcttgtctgggttgggattcggtgggtgcaggacgtgttgaaaaaggtatgagccggagatcacggcgatggagaagaaagcctgtagcatcttggaccgaaacagttctgtctgcgtcacccacttattatctaaggagaaaaattagatgtggaaggttgggtatttgtcagggcgtggtttggtcacagctttatacccttatcttagagccttccgtcgagggacttcagcctcggtagacactccaaaattggcatctatcagcaccgcacggcatataggtacgcctaatgtaacatcacttatttccagcgcatgcgattatcgctcaccgtttttgtattggcctgatatgcggtcgagcaggcgtgcatacagacaagtttctacgcgactgtagctcaactaggggaaac

SEQ ID NO: 7203 - DNA, 746 bp, Emericella nidulans
cactcgagtgcagcaggcttaggtttgctggctgcgctggcaggtaagtcggttggtggcatggaggcgccggaggttttttgtatcattaccgctgacagccggagtgctactttctgtcgcagagaatccccccttctttaatgaggcaaacaagtccttgttgctcgcctcttcgccagcctcacgcttcttctgtttggcctcctcgagagcctcggcctcacgctcggcctgcttcatgttagcctcgtaggcttcccgctcctccctctctttgcgctccttctcttccttctcagcctgcttcctcgcgtaataagcggcttcggcagcggcttccttggcctcaagctcagccatctcgcgttcgatagcatcatagtcaatctcatcgtcatcagcaggcgcgggagcgggttcggaaggcttcgctgtttcctcagtaggagcgtcatctttcttctctttgatgctcaggtcctcgacacccttgcgagcagcctcttcatcagcagcctgcttcttagcagccttttcctgctcctccttcttctggcgcgcttcctcttcatcttgcttcttcttggcagcctcttcttcttcttcctccttcttacgcttagctgcctcttcctcttccgctttacggcgtgcctcagcctcttgatcttgcgccatcttctggagaacagcgtccttcagttcctgtttcttttcagcggcagtcttagctgagacggacg

SEQ ID NO: 7204 - DNA, 493 bp, Emericella nidulans
tccggatcagtcttatgtttcaacagatacccctggatctccgcacgggtgaactcgcctgcaggaaccctttctgcaaattccgccgcccatagccggatttgctcttcagagaactttctagtttccttgtggataacgacgttagcattggtgctgtttgtggaatgtgaggttgagcttcgcttcgccatcctcgcacgcagtttagggctcaaccgctcagcaggcgaaacccgcaggtcgccctccaatgtagagtatatagctgagaagagctccttaatgtcagaggttgtggagtgcccaaatgcaatagacaagtctatccggcctgggcggacgagcgcagggtcgagcttctcagggtggttggttgtcataacaagtatgcggccttcgcatgctgcgacaccgtcgatgacattcaacaagccggatagagagacgccttgtttttcaaagacccctgtccgccagtggttgtccggaa

SEQ ID NO: 7205 - DNA, 460 bp, Emericella nidulans
ttgcacatccggccagattcggagacggtccagtagtcactgccgacgcccttgaaggagtaaaagaaggtgttggggtcccacttcttcttgatcttggctagtttatcgtagttttcaccaaagaagacctgcttccagttcggctggaggaagttggactcgttctcgtaggtcccggacccaggagtgagagcctcaagctggggcgcaagttcattagtgaccgtctgctgatcagccaagatctgggaccagggcttctcgttgccgagggtgataccgaactgcatagtgacgagggctttgcgccaaggagcaaagatggcgttgtcgacatcgttggtgttggagacattgagacctacaccgacggcgacgacattctgcgaggtgaaattgtacagaacctgagccatagaagcagcatcagactcgacgaacgagcggggaaggagac

SEQ ID NO: 7206 - DNA, 643 bp, Emericella nidulans
ttacccagcatcagctctatttatgcaggccctcttccgacgctcgcatgagacgtggatgagccgtgagcctgagccatagcccctgtcgccgtcttcaacttcgagcctaatagcttcaccaccatggctgggacacaggacacgtactttcccggcgctgtccctgtcccggagggtgagacatatgatcccgacttctctcatccgtggctatataccgagagcagggcgatcgtgattgcgggtctgattttcagtacgctctctctgatgctgcgagtgtacaccaaagctgcactgctgcgcaagttcggatgggacgatagtgagctgcccggcgcccgtgtttctttcctcttctctacttgctaactggcgaccagtatcgatgatcggagcctgggtagtttgccttttcgtattgatatctaagccaagagggcacgctaacataccgcagctcttcgccattgtaacgcaggtcctctgtctctgtaagttgacgttcccttcacgcctactccacgccagttctatggtcatatagatctcattgctcactggtacaagatggctacgcacacggcggaatcgagctgcacatctggaacatacgccgcagatgctctcgatttcaaaa

SEQ ID NO: 7207 - DNA, 521 bp, Emericella nidulans
aagtagcagaccctgagtccttacctatatctgaagggaaaagggcatacagtcctcccagctgcgccctgatataatagactaagaagcactattagatcttctcttcctccaaatctcagcttactcagggcaacctaccctgattattaatatttacaatacccctactgcaccttcaatcaggcctggaaaagctatacaggaactaattaaactctctgactcctacttctcccagccagttatactagctggtaatttcaacctactacatagcagatggcagccctcccttcagcaaagcacctctaccttggccgaagcagcatcagaatggcttgacagacttgggttagtattcatctctgagatagactcccctacacatgatagaggcaatacccttgatctagcctttgcatccagctctactgccctggctggagcttataccacagttgcagagtacctggatgccacatcagactaccagaccctcctgactatcctcccctggg

SEQ ID NO: 7208 - DNA, 708 bp, Emericella nidulans
cgactcactagtgggagacccaagcttaggatctcagtgcgggggaatcaggtgattaaataatatattgattttatcttactggccaaaaaattccacattagggggggccttttagaccagtaagccaccgttcctctccatatcgcatacctctgattgatttacctctatcttttacatcttttttatctaatttccttaattttcttcatcctattattatttcagatattttacttcacattttccacatattattttatcccttcttcgtgtttataatatattttttttttttcatctcactttcatttttttttaaatatatctttaaccattctatattatcatttttcgctatcatctctttctctcccttttctttactatctcctacattctttattactattttttactatctttttctacatctctctttacataaccgttatctctcttctatctcttcataatatctttattttttttaatctatatcttattcctttcctctctacttttcaatatgatacttttatcatcgaactctatatattctctaatcttctatatcttattatctcctaactcaatactcttcacctctactctatttatatttttattatcataccttatcgttcatctaccaatttccattattctaaattcattttatacacacttttctaacttattctc

SEQ ID NO: 7209 - DNA, 654 bp, Emericella nidulans
tctgtggatgattttgaagatgaagaagcatacgaagcttggaagaaaagtgaaggcccagacctttcgcagatgatgctcgccataatgcagtcaaatcctggactcgccaaaaatacttctggggcctccctccctcagtttaatgcaggagcagttgatcagcatggtgaaccagcgagcactggtcggcccatatcgtacgtgatcgaccagcctgtggatataagctcactatcactgaacgatgacacggaagaatccgacacgtacacgtacataccgccggatccgagatcagtatatggcactattgtagctcaggccttgagctatgatttgaaagaccacgagctcgaggctacacaagccacgtcggacgtgccatctatgaaactactctctaagcaatctacggaaatgttgaatgagatctgcctccgatggagaattcccgcgtgctcgaggattgtcctatttctggacgttgtacggtcaaagtttgtggataatgagattgacctagacacactggactcagcgttcacctttgtcaaggaaatgccatcttctgaaggcaaaaacgcgcaacagctttgttgcgtcagtgctctatgataggcacaagtggactgtaaatgacagactgatgat

SEQ ID NO: 7210 - DNA, 538 bp, Emericella nidulans
  unsure (1)..(538): unsure at all n locations
ctgccgtgatactggaacggactctacacggcaatctgcgcaccaaagcagtgatccacattattnncgactttcaatacaatncncctctcaagcacactcggggtgccaccgtgggcgaggtctcatgacctgccaaagctcccccgaagcaccggccatcctcctagtcccccaagcccccccgaccgccacttcatcccccacccatccccctacccccccctcatccattctcccgcgccccaccccctccacccccccctccctaccttactctccccacccaccccacccccactcctcctccccaccccccctgcggggcccttccccaccccaccctccccccatccccccattctcccaccctcccatccttcccctccccccccacaccacccacccacaaacccccttgcccactccccactacacaacactcagccccactccttcactagcacctacacaatcccttacctccgctctactccatcgcctcacctatacatcttcacaccacaccgtaccaccc

SEQ ID NO: 7211 - DNA, 1087 bp, Emericella nidulans
tcgtactgtcatctagtgcaatacgggttatggcgtgagcgtatctggtaggagtccgctcatagtgtacagtcactcctgccacctacgcgatcctgaatgttccgggaactgggaactgtccagaatatgatcaatggctattactcacagtcgatgtaatatttaagtgatttcaccggcgctttgtggcaattccgatgactctcgatcgtgtctcatagatagagatagggcttgattatcgttgattcactgtccaatcagagcctcggaatctcttatctctggtgggaagaaggcggtagatcatggcaccattatgcccaatcagaacgctgccctgagccgtggccagacttcccaaatatcatcattcgatctccagcccaactccgcggaaattcaggcagtgcatcgaagccatccacgatgatccacatccaccaaacaatgacagcgccaacatcatgcttatcgccggctcattatcgtcaagcggatttagccacactccagatcctaaacccccgtttctcgtggcgatcaatatcaatgaccgtcgtccattgcgagatcgctgattctcgtgttaccacatagtcatggcccatttaattatctcatgctccgatgccacagagatacaaatcaccaatgggtttggcgactccctgtgccacactatggattcccgctttatgaaactggagcgtttcccgcgggcggttctgtggtacctgtgtatattaaaccccccgtttaattaccctgcccccctattttcgtggtggacggccctcgatcgggagactgcacttccgagctctaaagggccctctttttggaggggggacccctccacatttaggggcctctcccaacccccacggggttaaaaatttttgggggttggtaatgtccctccctctcttctgggacccgattgctttgttcacttaagacacaccttttggctgttatactaacggttcctcgaaaactataattgttacctaaattccgtaggaacctgtgctttaacttcccaccctacctctcctttttatgtgtctaccggggtgtt

SEQ ID NO: 7212 - DNA, 608 bp, Emericella nidulans
atcgtcatggcgttggtcatggacaagaatgtactggagacgatgacattgctcgcccacgacgaacaagtcatccacatggtccccattgctcgaacttctagagggaagaagtcggcagacatccatgccgtgttccccaccgatacgccgtaaaagaccacaaaccagataatgaatattaacaccacgatggcgggcgtagtcacggactgaggagtgacttccgttgcgttcacatcaacatggatgaaactgaaagccaccgaaacagctatcaggccggcgctcattccccagacggtggacagaagcagacgtcggcggccaaggcgatctaccaagatcatattggcaaaagtcatgatcaggttcgtcccagccacaacgaggccgacgcgtgttggactggtgaatcccaccaacgagaatatcgtggaggagtaatacatcagtgtattgaatccagaaatctgggagaggaccattagcccgcagcacagagcagagctcggaagttgctgggaactgtgtgcagccgcacaatcttcgcccagccgccctcgtttccgctgatagcgcgtgcctcctcgcacccagccagaatc

SEQ ID NO: 7213 - DNA, 492 bp, Emericella nidulans
atggaggcgtattccaagcacaggagtatacaaacgagctcatatattcttcagtcaaggcaaggcagggcttccagacagggtcgaagccaacgacggcaagccacggcataaaagcaggaaagaaaaataaaagaggcacccaaggggccggatttgctatttcttgatgagggctgtttttctctttattccgtatttatgctgttttattttgttatttatttttttcgttctttctttcttatttctattttttatcttctattttttcgttatttttttctcttatttttttatatcttcttgtcttttaatctttttctttctactttttcgggggtgggttgtttttttctttcctaatacttcctcttcttgttattattgttatttattatttttttttcctctttattttatctatgtcctattctattttattctcattttatacttcttctgtattgtactcatctttacacatctcta

SEQ ID NO: 7214 - DNA, 497 bp, Emericella nidulans
taatgatagctaatttgtcgtgattcgcaaccaaaagcgtggttcttctgaccgtttgtcttgactgttatcttcttacattccctttcctggacgttcgtacagtacatgggtactcgcagatcctcggtaccctggactcaacaccatgcctctctactctctactcgaggaacctcaagtacagagtagtatgatcctcaaatatgtaatgctgagatcggatcctcgatctcatgggtccggagattccgtccgcttggaactctagtagtagtgtggtagctgtaacttgccaacgttcgtcttgggcgtcatcgagggtcgcatcgagtcgacgtcatccacctggtttcctgttcttaactgctgaacccctcctctgtgtctatatccgttatcattccatcatccaaggaggcactctgcatttccgcccatagttcgttccatgtctcctttctctggtctggtggacccatacatacataaccgca

SEQ ID NO: 7215 - DNA, 113 bp, Emericella nidulans
cataatccagcgtctgcgaagcacgtgtgcaaaaccgatgacatcaaacgactctgggaactcacgtctggttaacagcgcactatcttaaatgacagatacagattgctaag

SEQ ID NO: 7216 - DNA, 486 bp, Emericella nidulans
ccagatactcaaaatttgccatgctgggatcgagcagattctcgtccaagccgaacccgtacgtccctaccatatcgtagatcaggtctggcggcgggaatccttgcgccattgcgtttgcaccgccaggaacgccgctgcctgcccgttcgcctacggtcccggcgggcacgcacttcgacatatcccacgagtcaaatcgctccagcatcttgctcagtccacgagcaatatgtcttgtcaaatgtctctcgcccgcagagacgcagttcaacagctcaatcacccgctcgactagacttcgcacaagcccactatccagactcaggtacgccgagttccagttaactgcgaccttgagaaggaacagtgcagaaaacgtgaccatggtgtgcgtgaagatgggtaccccgacaatggcgtcacggatatcttgttcttctagcaccatgttcaagcatgccatggcggatgatatagcgatgt

SEQ ID NO: 7217 - DNA, 101 bp, Emericella nidulans
acttattttattatatttggaacgtttaaattgacggtagaatccatgatacttaatataaaataagaatcaagcagaatcgttgcaatcatgaataaata

SEQ ID NO: 7218 - DNA, 993 bp, Emericella nidulans
ccttggcttagatttaagggtagaatgctttggatagaattacaggacttgagtgatgagacctggcgcgaggggctagcaaaaaaaaataaaacaaaaaaaaaatcagcaaaaaaagagggaaaatgcccaaagactggtgttccctagattgcacgaaccagcaacccctttttgctgggacctgggtcgtgccgttatgtccactttagcgattgactacaattcagatcaggtgggggcgatgaagctcttgtatcgatgatccttaaggaatttgatttaggttgcccgtgccgggtattaggtgttttctcggccagtcaggtcgggctcgaataaggtctctacaggatgtacagatcatcaccagcggcgatggaatattagagcatgcatagaggcattattattgtgtatagattgccaggcacaattgccagtgcaccggtgtaccagcctacttcagcaaagcagcctctagcgggcggtagtctgcgattcgattggctacaatacagtgtaggatccgaaaatagtgtcatagtcttggaaatagctactttgagtacattcgaacacttcctataattcgagttttccggtctcgtctggacctagtgcaagtgttcgtaactgtaattttaagaatattcagggcagggatacttgaaaaaccaggttctcgacagttcatcccagaacccctgcaagtcaaggagcaagaaggcagcctgcgagtgaaaatcaagccgggatggatcaggtgacttctacgagctaagctatttcaagaaaggatgattaaatagaccaataaggggctataagattaactgacgggtggagcactatttttagcgccagccatgcgccagaccccatgcggttgggtgatcagactagtctggaaaccccgattgcccctagcgacagcacggtgcctgaggaattgaccctgtttatttctcagatcgcgatgaatcactcttc

SEQ ID NO: 7219 - DNA, 813 bp, Emericella nidulans
actactgtcaaggatgattacttaaaatgacatggcgaactctactaaatttgtcaagctaggataaaattctgctcatttgttcaggtgttgatccttgaatagacttggtccactactgatcactctttgtgctggtgggtgcaaggctgagaggaggctgtgcttggctgttagggcctctaatttctatgaataggctgacaacatgccgtctaccgtaaggtctctgagtattttctatcggatgaagctaagatgagaacaccaactgttgaatcaagaatcaaggggtctatttatggggtggcagtagttgatgcgctcggagggccagtggagttccagccccgggggtcgttcgagccagtaactgattaccagcacaacttcaactttgacgttccccctgggtgagcaccccatggccatctcaatatttgaggaagaagagaaaccaactaaccctgcaggacatggtcggacgacacatccatgactttgtgtctagccaagtccctgattgattctggtggtgttttcgactcccaagcagcgatccgaaattatataaactggcacgatcatggctacctttctgctacggatgagtgttttgatatcggcaacgctacatcgaaggcgcttaaaatatggcagcggtacttcgaccgattctcgattaccacaatcgacgacctcgcggggcgcgaaggtggccaacctgaaattgacaaggccctgaagcatgaggtactattctaccatgatgttgtactatttccgggactgatctggacagaattattgtgg

SEQ ID NO: 7220 - DNA, 889 bp, Emericella nidulans
ttcttcatcttaaaaattcattcagctcgagttgtaggcaaggtaagccccggaagacgtcaatcattcttaacttattcctccattctcaccagccgtccggacggaattcccaccgcggtcaacccttatctttctgtcgactacgtcagcatatatttgcttcatggtatacatgggtcgtagtctaaccagacaatatgtaactctgacactcttccatcaaataaagcatgcacacaattatatgcggcgaaagtgctgtctacttgcctaatgttcatctccaaggctcctccgggcttcgttttgctgcatgggttcttgcacgcttgctactccctgcagacacgcaggattgattgtggagagacgcggaatatgaccggcgcggtgcagggctaggtctccataagtacttgacaggggaatgaggaggaagctgatagtttcagacatttcctggcccagaaggttctggcatgggagaaaattccatatctgaggcccctaaggacttcagaaataacaagtacgcagtaaacgtaagaaataaggagccacacgtgggggcatcgaagtgatgcttccatagacttctgcttcttctgcgtctcgtgaattaaagagcgtcatcacctttacgctgttgattcgcgattggttcggtatacctcgatggagcgatcaggaactgtcatttattgatggatgttacgccccgttgcgggtcgataggcttgaagaggctgaggagttcggcgatggaagatccggagcaaccataatctgttcgcatcaagagagaactcatcaacgcatatcttctgattgacatgacacaaggacaggtgtccgtcgccaactggcaagccccgctttacaaaac

SEQ ID NO: 7221 - DNA, 510 bp, Emericella nidulans
tttttgtaacccatacctggccgacaaaccaccaaagcgagttctagacctggcctgcggctccggtctttggtcgagcatgtgccatgattatttcgctcgccgcgggcatcgcgatgtggctctctatggtattgatatagtgaacgtcgcaccggatcttcgcaagaatggcgtcaattggcacttcaagcgacacgaccttcgcaaaccccgcttacccttccccgacgattatttcgatttcgtattcataaaggatgccgccatgtgtcccctgagcccggcgcagaggcacaaggtttggccgaacccctcagagtgctgaagtccggcgggattctggaactctgggattccgattcggtttttcgctcgctgcttcccaatcctgcaccagctcgcaagttagcctcaagagaacaagatacggcagaggcgactgcgacgtacacattttcatccgcgactcctttcacaaatgctcaaaacaaatttctgcaagactac

SEQ ID NO: 7222 - DNA, 606 bp, Emericella nidulans
gactggtacttaggttagaacccgctgtacgagtctgtcaaccacgttattaacagcttccttctggtgctcatccaaagggggcgactggggatgtccacgttcagtattctgtgacgcggggacagactcgacctcagcattgacgttcacttgcttcgtaacctcaacagccgggctctcgcctcgagaattgagctgtggagttctgctccgtgaaactgccgccaattgttcaaacgggttcacatgggcaaatagagtctctgttggggtgggcttgtccggtttcccagaagcttgccccttggattccgcagcaccatgtgttgacggcgttaagcctccagactcggattcaaaagcgttcttctgagaagagatggaaccaggagtctggacaacgtcggccgaatcttgacctgatttgggccggttgagcagacgaagcaacatgtcttgaggtttctcagtgcttgtcgcaggagagggctctctgtaacgggctgggaaactggctggtcctgcggagcagtagtagcagcagctttggcccggcctgttgaagagagtggaaccaagtccacgccgagatgtcctggagtg

SEQ ID NO: 7223 - DNA, 145 bp, Emericella nidulans
atataacatagatagcagagcagtcacacatatcaacaagacaaaagaatagcaacacacacagacagcacaaggacaataaacaacaaagagacagaaacaaacattaacacaagcataccatcaaacataccagaacacaaca

SEQ ID NO: 7224 - DNA, 602 bp, Emericella nidulans
gcagtaatgtatatactcattacagatccccgctgcaatactctatgagacttgaactgcagcccttttgtccaaatacacacagtagtgctatcaattggatatacctagccttcatggtgtagaaaagcagaacacacagatttcagggtttccaatcaacagcatgttgagtgcatggtgtgcggtccaataacacgagttctcagaggtctcttagttaaaataccactaggtgagtaagaagtcttgaatatcggagtccctacttattgacccaagacatcgacctggtcccgttgcgcaaatatatataggcgatcagttctgcaacaaggttattatgtacactagccggatctctagatagaagcaagaaaaaaaaaaaaaggcgtgtcgcttccaacccttgctattcttttgctctactagagctactagtacagacactgttgaatcgtcatgtgtattgtagtggaaagagatccgggaaacttcaagtgtggcttggccaccttctgattggatatcgcacttagtagcttctttcatagtagcacacaagaacattgaaactagcgaaagcttaccagaattaagtt

SEQ ID NO: 7225 - DNA, 949 bp, Emericella nidulans
tacgcagaaagggtatcactttttcctcccaggagctgtctcagacacctcaataactccagactatgacatcgcaccaatcctcccgccccattcatgtgaacctgtggccgttcacttatgccatataagaacttttccgtcgtcaaaaggttcatcatgcctcagctcaaagtttttttttctctttttcagaatgcgttttttgtctttcctcgaacccgatacagagaagccagctcccggatgcctcaccaatggattaggtctacagatgtaaataaacctctgctagttcaaaaaccaccagatgcatggaaatgaaggtgcacggcatggcatcaaatcttcgcgaatatgtgcatgagctgatgcactatgaagggcgtgtaattcatcagcactatgacgttgactcagtcaaggtgtgccatcatttcttctttcttcagaggcttaaagtcgtcgatatatagtccgcgagcttcgagcgcaggccgtgaatgcggtgggacaagccgactgttcattgaaggtgcgattgagagttctgtagcctgctgtcagcatccagtctaaatagttcgtttatgtcctagagagaaaaccggagctcaaacgcaccatgtcgagagaagtcgaaaaggtttggtagatccctagctgcaccgttggggtgtcgcgagtcgggtagtttggtgttcggatcccggagttcatcgaaaaagggatggcacattgcttcgattgcggaaagacgctgcgttggcgtatattctagcagcgcggaaatcaaatcgatagcctcatgtggcgcttttcggaagacctaggctcccaagtcaaaccggaatcactggagaggaagtgcggggtagtgtgatcataccttgttgaagggatgtggcttgatttgaggaaatttatgctccatgtagttgggattcat

SEQ ID NO: 7226 - DNA, 552 bp, Emericella nidulans
atgacctcttcccctccaagccattccggaagtggctttcgcttatcacaggctcagatcgtattaccagctacaacctccttgcgcgccgcttccgccgaggcaaggactacaccctagccaacagctacgttggcgaagagccccgcctggagttcaccctttgtctaactccaactccgggctgggaaaaggaagacccagaagaggaagaagaagcgtctggggatgcaaatggtacctccgaagcaagctcttccaagaaggccagcaacaagaagtccgaatccaagtctgaccaggacgaccacgaaatctccgtcggcggctacgagatctacatggccggcgacgacgaagaggagaagtccggtgccgccgacccggccatttaccaatccgccgcggacgacgaagatgatggaatcctattcagcacagcagcaggctggaaccggcttagcattgtgctgcgggacagcgggaccctgaggtttgtcaagtatgttagtgctgcggcgaaaggggatcggtgggatatcacacgtgaga

SEQ ID NO: 7227 - DNA, 1039 bp, Emericella nidulans
accggtatgccatctacgctacttacatactaccacccgttttaacttttccgcaaaacagctcaagggaccgggcatgggtgacttttattaaccatcccgataccccgaacattccctcttcctccgccatcctcggcatccagagctccactctcattgatgcccccatccaagtcgtctggagcgctcttacagacacatctacctacccgagatggaaccgatttgtaccgcgggtgacctttcgccagcagcctgactcacgcaacgaggatgcaatcctgagaaacggaacaagattcacgttccacgtcaacatgtaccccgaagcagatgacgaaccgcagccgcaaaataaaaatctccgcgacacgttcctgaaaattatagaggtcgagccgccggcgtcaacagaacccgctgatagtggcttgaggaaaggcaaaattgtatgggcgtcggaccccgctgcagacggatatgtcatatcttcattgttgaccgccgagcgcgtccatgagctggaagaggtgatagacggcaatgggaagagaatgacaatggtgacaaattgggaatcgcaggtgggtggtctggcttatgtggtgaaatggatgtttgggggcaggttaaaagggaatttcacaatttgggagaatggcctgaaggaatacgccgaacggaactgggagaattagtcgcgacggccggcggggcgtgaaatgaacctgatccgaggtccatacgaaagatacatacgaaggatactccaaaggcacaaggcagccctatttcggaccctgcgcagtacccggagtggttcatggctggaatgagatgatatcaccatgcagcaggtggcttgggaacttggaagtgaagaagtacggagagtcggaggcgggccgaggctcgaggatcagcgacaaactgagtaagagttccgtctgtcctttccttttagctggtgggccaaatggggtaaagactggctggcagtatactcttacacaagacttggatcaggcctatccgt

SEQ ID NO: 7228 - DNA, 474 bp, Emericella nidulans
gcgcttggtgttttgcttatccaacagcttattgaaggactcgttatcctcactggtatatttcgcttggaactcaagaaggcccattttcgagacatccggccccatttcctcttgcgtatccgtggctgctgtagtcgccgaaacggtggtcataggtgtctccccaccccagcccgctggggtatcgccaggtactcccacacccctgaggcccggtgtcatgcatcctgagctaaaaagaggtggccgggaacgtccgggagtcaccctcaaatctctaagcttctttcgtgaatttgtgatccattctttatctttcgagtctagcgcatcgagatattcttgtttcacttgggactctaataaaccaggaaagtagtctctggcgataatatgtgatagggcgtcggtgtaaacgtcttcgtcgagaacggtggccggacgtttaatgcgcttcggcggagggggggg

SEQ ID NO: 7229 - DNA, 626 bp, Emericella nidulans
ccgacttgcctattagtgacggcctcaggagtattgtgggctgctgctagactcgaagacttatgtgaatgagcaaaactgtggtggaaagactgctcttgagattgcttaagataaaagtcatattgtcgacttgttcgctagccatgcattgtgcggaatgtttatgaccaattggatccaagaagatttgccaattaatcaacgcccgttgatacccatctttaggaataacaagctattgatttgttcagccgcccacaggtgtgcgggcaacggtgtctttggattagcccaaggtttcaaaggcagcgcaaaaagcacaattgctatctattgccatagcggctgaaccgtttttccacctctttccttgggctggtttatcctatatattacagctagacttgactgccaatagggggttgattggaacaaaacgaggaatctgtcagagagcgaatattaaggaaaccacatgcttctctagtctagctagccactatagtagataatagtaattttacacatgacagacacgcaggcgaaagaaagacgaacagacacaccctggcaactatagcatgactagatataacttaacccccacacaattgtggacgtta

SEQ ID NO: 7230 - DNA, 673 bp, Emericella nidulans
ccccattaccgaggtagcccgtgagagcatctcgatgggcaaacacactccgtccgacgccgcgtctgagtcaacaatcccactctattcaccaaagcaacaacggaatccttctcttcagcttaccaaaagagcaggcgggttgacaagatctttacccgctagtgctacaacaacccgcatcaacattgcttctgatggttccacatcgggcccggcagaggagcaaccggaccccacgtcgtcaggaaagaccgccgatacagatgataaagagatatcgaaggatacaagcgcgataaaagcagctaactcagaagatcatcagtcggacccaacaggcgagcctgcggtctcgagcaacctggatgcggcggtaactcaacctgctgggtggctctcctgggtatacgctccattcgtatataataagaccacagcaagctattcgaccgcggaaacaacaacggaacaaacggcagaacctgaaatccctgcagcggaccattcgtcgaatcaagacaacgagtctgcgccttcagagccaagcccggaacaagacaaaccttctgaagttacagaaatcacgtcaacatcgcagaaacgctcctggcttcagatgtggtacggctcatccccgactaaagggccgacgattcaaggatgaagcctc

SEQ ID NO: 7231 - DNA, 734 bp, Emericella nidulans
accccatagtctacattacttacctcgaaatgtatatatgatatgaatcatcgctattttaccatagtaatccaagctctaaaaaccaaggcgttgaagctgcaaacgtacgttctatgagcgaagcaagtagcgagtccgcacggtcatgtgatgtagacaattacctattttttccacacaaatctcttcccactaaaatctgtcaagtttgataccgtcaaaccaccagtcttcctcctttcatcccacggaaatgtttaattgtcaactatagctcgcagagcacacagcacatcatactctgctgttgaatgttgactaagaaccataacatctctctaacgtgcaactgtctggaagtcatcagctcaaccctcaacagctggccggtaagggtggagctggcctcggagatgagacaacaatgcagtcctagctggaaacacgttttcgctagcaagaatgcggttacaatgtcttttcaggagcgctggcatattataatgcttctgcagtagaagccacgacagcttaggactcgcagtaccggcttctttcaagtctccggacgtccactcgtttgcctcaatgtgccggcagggccagaaatttaatgtgcggcagatgacagggacatgccattaaaccatgtcattcgaggttgaacgtttctagtatatgctactagtgcctgtggcccatccggcagtttacgccagccatgtcgcagg

SEQ ID NO: 7232 - DNA, 534 bp, Emericella nidulans
aatgtggacttccgaagaaacggccgaatctccgaatgattcgccgttggatacgttttttgcagaggttcgctgggagtacagaggaatagccgtactgggagtccaatataaaccaagtgacaacccccagtacctgataccaactcatagcgataatcaattacgttattgaaggcctacacctcttttgaactagcttatttacgtaaacacctctcgggcatttaaccgatactccaaatcatctggggcagtccggaaaagcaccttggctacctatcacgtatccgtttccgcctgcgcgtttccgccctcacggcccgctgctagccctaagtaacctactcaactctcttcagcaacaccgtctctatcccgtaacactgagcggggaaaagtgccaattctcatgataacatggcttagcacgacggaaacaccgcgggacagtatttcgcatcgaatgccgacgaacccccactatctgttccctgacccaactgcatctccaggcaacagcaatccagttcc

SEQ ID NO: 7233 - DNA, 1294 bp, Emericella nidulans
agatagaaaggtaagttgttgttaggggttgatggaggaatatggattaaatatgagaagtaaaagaagtgcataagtagtgagatatttgtaatgtaggatgaaatttagaaaataggtgcggggaaaattttgagatgtaataagataataggataggatagatagaactgtaaaagtaataataagaggataagtttaatgtaggattatggaaggggggtaaggaaatgaaagtggttgaataaattataataaaaggggcataacaagttaggtaaagtcatgacattagggaaactatttgcaataaagaatcgacagatcatccttctcaatgacacgagaaagcaaggtattttctccgacatcactcgcaaaaaaccacccttggcaaccttgatggctctacgtaggttcttcgacactgtctctgacacaactccagtcccgcatcactcaaattccatcaagccgtcaattccagcctaccgtttttcaggccgacagttaacattcgatgaagcatagatcgaggtaacagccagtgcgttctgacatcgttgatcgagaaatttccgcgaagttgttccggcgaaagttatatatgtgtaggctgtaacgatggagtcgacacgccgctcattgacggggacgatgctggagccggcttgtgctgcggggatccagaaaacgaggaatgtaagcacagaaaaaggtggccgcatggttagtctggatgtataataggaaagacataagtagcggggttggttcctcaacaaagggtcccaggcacgcctggggagacggatctcctgatcgcgatccgttccgcagcgaacaacctgcaactcggccagtatccaaaacaacctgtcgtacgtacaagacgagaggaagaatatatacaaggaaaatgaccaagtgggctacttctaggccagagctgccgagctcgttgcagacagagaacggtgaggggaagtggtggagacagtccattatcagatcgctcgctaaacgtccagtggcccctgatcaggtgactcttaatctaatctaatctaataatctgataaagttgcagcaatatgattggcatctggaatgactcagcaggatcacaggacccagtaatgccacgcccatttccccaagcaggaaaggtgcctttcaggcccccaggacgagcgacctgcaagtggccgttgaattgacagccctcgtatagaaccacctgatatctgctctgtttcgaagcttcttatagtctcagtcagagatgagttgt

SEQ ID NO: 7234 - DNA, 631 bp, Emericella nidulans
aagatacgaaaaacgatacatcgtacctggcatgtcgatcaaggacatcagctctactcaagagtgctccagtgctccatactgcgtactcggtaggtgaagcccgtgcctggtatcttgccttccgatcgctcggaagcactgccgggcggccggggcctgaatgagtaccttacccttcggtaagtctggctgagcctgcaccacgacgagggactgtgcggcgtcgacttcgtcgacgcagtggttgctggtatgttgtccatggaacggaaaagtatcgttctcaagacctgaggtacgcattctcgatgctggacctgctggacctgctggaccctcgatgctgacgagtattatataccggcggttgtgtgacagtcagctttgaaaccttcgaagatgagaccgaatacagatttctattttcagtgagtgctactctctatctcatggatctactgtacttctatatctcgtgcactgcgactagtatatatctcgtagacgcgacactgacggtgaagcttcaagcacaccgccaagggccgattctatttgagggtccaagaattggaatcccatccacctgcgtctccacactggatcgatggtcgatgattcgtgtccg

SEQ ID NO: 7235 - DNA, 704 bp, Emericella nidulans
ctatctgtctatttcctgcctggttactctatccttgtcctttcgcacagggccctggggtgtggtcacgctctgcacaaccgcccattgccgcttatagtccactcatccgagccaaccgccttagaggcataaaaaacatcattcgggtcgtacttggccttgactttccgcagggtatcgtaatttgatccatagaatgcttccttccagttcggctggcggaaatcgccctcattcatgtacgcccctgaatccggtgccagcgccatcaatgtcggaatatagtcctcggtcatcttgcgctgctgagcgagcatctcctcatcggcgttccactcccacggtgttgtaagggtcgtgtcaatcaaggcgtctcgccaggcggggaggaccgcgttgtgaacgtctccggagactgccttggagacgttgaggccgacgccaatgaaagtggctccggactcggtgatgtggcgatagccgtcagtgagggctgcgttgttctcaatgaccacggaccgtgggatcagccaacctccgtactgggcgatgccgacctcgatggcagcctgcattccgttgaactgggccagatagctgggaaactgctctgcatagaggttgtaggtaatgccgagatcagtaaggccgtcggtgaaaggctgcagcagctgtttcagtttggcgacggggatattggg

SEQ ID NO: 7236 - DNA, 811 bp, Emericella nidulans
gtcatccaacacgatgcctgtaagcaactccgccgggtcttcaatgttagccctctttagggttaatgttcgtagttgttccgagagtcggtcccagccgtagaaggaacggaagtctatatcaatgatttctagcgcgctcaagttcttgaaggaatgaagaggaacggcagtgtcaaaggggaattcttcgtagccacggatcaggcgtgcgcgacggtcgggggctagacgcaggcaggggatctttgtaaaagccgagtacaggtacttaatatccgcttctaaggcggccttggctttttcagatttggaggaagactcttttgaaaccaaaccgaacgacgaccagagagaactcataccagacatgacgctacggacgctagacacggagtgaatcgagtctctgtcaccctttgacctttgaggtttattcaggaaggacacgtaggattgtgacacgtcggtatggatgttctccaatctaacattcatggggcccacggcaatggagatctcttcaaagcgggagaggaggtaaaagagatgatgtggggtaagagtaagtttcgcgggcttgacgctctgcgaagtgaatttcagcgcgccaaaggacaaggccgcagcgagtgtagaggatgtcgagcccgaggacgagcccgactgagtagtatggccatttcgggtcggttggcgcttcagctgcagtgcattcgcgagcgccttctcgtgagttcgtacaaaactagcgaggttctagcaacatatccatggttagcatatcgagcagtatagactggacagggag

SEQ ID NO: 7237 - DNA, 184 bp, Emericella nidulans
tgtcgtcacaatgttcgtcttgtagatgtacgcgaccagacagaaaactactaatataggtacaagctggcactatcgcatgtatcaattgtgaccacgtcgacagtcgccaatcaggtcataggcccctgtgtctaatcactgccaggctcacttgtatgatacacggacatcaagacatcgt

SEQ ID NO: 7238 - DNA, 602 bp, Emericella nidulans
aatctagctagcaaatgcagcgacattgcaaacctgggtaagtggagccgtatctacctttccttctagtaaggccttcgtgaagacggaggtcccgagaatgagggggaaaagaaggcccagtgaaatgaatggggacgcgtggccttcattttagattgtaggtaacgggctagcaagagttctttttaatataatttttatttgtttgctggcgagggcgttgcgtccaatattgagtttcatactcttgaaacctagaccggatccttcacgcgtctaagcttccatgatcagaaaataccgtggctaaaatcactccctggactgctggacatatctagattgtcaatatatgggtgttagcagggtacactttatattttagctttgaatcagggtttgtgggtcatgactagtgcctgtgaaacactattcaagggattattaggccattactttctgggctttatggtatgaagtatctgcgcaagtgctgaggacagtgttaacaggcttgcaaaatctcgcttaaatctgactttcgttgctactgaggaccctggataaacaacggatgaagttcctgcgagccaagtagt

SEQ ID NO: 7239 - DNA, 744 bp, Emericella nidulans
ggagatgacgatggtcttatcaggcagagagagctgctcagtctggacatagattgaagcacgtgagggtgtcaaagtgtgagaacctgttaagacccatattccgactctataggccgaaaaaaaaccgaagaaaaagagcaagaatacgaaaagaagaaaaataaatggcaaaaaattggttctggtaggatggcggaatgttgagcctggacatgacaatatcagattgtcttaagtgatccacagagggtcagagtcagagaccatcagagaccagttcagttggtctgctttcctactgttttcgaacgccacaaaaagataagggaatttaaaaacagtggtgacgccattgaggggcctggaccacctccagattagtggaaatctaggcagaaaatactcactgcgcggcttcgtccgactgggaaacctggaagtgttccagagtagggccaggtatctggaacagataaacatgcgacaaggcctccacacgtggttggcgcatggcaatcgaccctgaaacaccgatcggatttcgaatccgccgctctccgatgcaatgaagtttatttttgtgcttgcacagagcaagcctattatttcaaaccaagcgctgttggcaggatcaaaatggcctgagctgttggcgaggtcagctgggaacgggtacactaggcgcagacttccgcatctggagctcctccgttcgcacatagagggaagatatgggctgat

SEQ ID NO: 7240 - DNA, 150 bp, Emericella nidulans
caggaaagacaccatggggatcaggtccgtcgagagaattcacccgattgtgtcttgctagaatcgaaaaaaggtcacgagtagaaaggagtgtggagtgtggagtattcttttgtacagggtctggggaagcgagattgatatattagg

SEQ ID NO: 7241 - DNA, 822 bp, Emericella nidulans
caaatagtgtgatctgaatgtctataagaaatcggagcttttgactgaaagatgacaagggttggtatcgctcagtgatagtctccaaaagatcgttcacacgaatagcggctctagttggcttggtcgcggttggctcaactccgtcgtagtcgagatggccactatctggtgtatccacgatttcctcgtaccgggctagtgcaaagtctttctcgacttggagccatcggtcaaaccatccttccttcgacaatacctcccacgtaagtcccctccaatcttcttgcgaataaggatagggtaagtagttccaggtctcacgaatgccgttatcataatccatcaattcatgcacgaaatgactgagtaactgtggatgcgcggaaatctgcggaaggtaggtcgtgattttgtgtcttaccatcggcaaaatagcggtaatatatgcatcagaggcactgagaaagtgccatgcgagttgatcacccacggttttggatttctggttgaagatgggctggaggtatgaagtgaaaaacgcgccgaagttgtttatcagatccgttgtatgggcaaggaagtactcaggctacgtcgttagaggcttgcgctattagtcgaattggggtacgttccttgtccagtcgatttgttggcttgtcgccgctgaaatggtacttaaaacggagctccagcggatgtaccatggcctccaatgcgccccccaccggcggttgaccaattttctgtcacgcagagtcgtgggtttcaagctccctgttgattcaatcagcagcgggcgtatcagaataacgagcc

SEQ ID NO: 7242 - DNA, 1530 bp, Emericella nidulans
taggggagaaagaattataaaggaaacaatttgtggatatgagaggggggaatagtgttcaagaatccaaaagggggcaaccagaaggaaaatttgagaatcccaggtagcaaagatcttgataaaatcagcgtattaatgccgtgccctacccgctgcaggccggagggatgtccccaccatatgttaaaggaaccgggcatattaacattctgtcgtcactgaactgaaacgctcccaaatgtgctccaaatgccccctgattctgatgctaacaaattggccggttccctgcacgcccaagacttgtgggaaaacaatgaggttgattctccaccccattcctgcaaagtcgctaaggaggtctggcaacgtacctaagtatttaatgctatgacgctttagagaagatccctgtcgagaaggactaaagcgaaaactggtctcgcaggtattaacgcgcctagggctcgttactggtcaatcatccactgaactggatcctagagagcaagttttggtttcttttagacattggtagccatgactaaatggaattgatgttgctatagactgtcattcgcctgaaaaaacaacacgtgagatgtcgggcctttcggccggaggtgggtgggcactatccgaacattcccgatgtcatcgtaagccgaaaaccaacgttcccagctccagccctaacggataccctagacctccacgaacatagtcacgcaggagtgccagtcgataattcgtgcaatttcgtcggaaaccactctttaggctgaacgctaaagaccttatttctcgttgagctctcggtgtaatcaaaatctggcctccaacagctcttaactgttgggaatgcgatcgctccctattattgggaccgttgttgctcgttgcaacggcacgcgccggaaaccttcatgggtgacggaatgaggcgactatcacgtgctcatcgttgcaggattggttgtttcgaacctggactccgtgtacgaatggttggcatgtaagctctgctttagaaattcgatactatcttactcatatactccgtagttcctcactgaaagacattgatggcgcagtcgtcttgaatagtgacaagcacctggatccgcactggcggcgccaagaaccccggatggcatgattgaagagaatggaatgagccggatgactacaatcacaccaatgtgcggtcagcgagaaaaaacgtagatagtaaaacgccttagaattgagttcaaaatctgaagtatagagagagagtaattagacagcctggtcaatactacgctgcccctcactgccgtgcttggtcggttatactccgtactccgcacttcgcctgagagataccgctatggttttctatatgcaagctgtattgcatttgcgagaagctgcagggtaaggaccgagttgatcagagtagcaattccatgactaggctagaactgatactagtaacttagcatgtcccgtatgcggtaggttatctagggacctttgtaggta

SEQ ID NO: 7243 - DNA, 207 bp, Emericella nidulans
aaattgctgttgaggatcagcgcaacatggtccaaactgtaattcagcagtcccggcctgacccggccattctgctatccatgctaccatgctctgatctgaaaccatctggcatgatagtccctggacacacactcgacaatgtgaggaactcaaagcgcaggtacagacagtagtccagactgacacttggtggcaggatgttca

SEQ ID NO: 7244 - DNA, 581 bp, Emericella nidulans
actcactatagtgagacccacgctcaggatctagtcacagccacaacgcaacttgcttccacccggaatacccgcaatcgtcgctttttccagccaatcctcatcgaccggcacggtgaccggggtgagtatttcggtcacccctacaacaaccgcggcaccgacctttaacggaagccccaatgacccgaaccgaaacggactcgctgacccctaccttttactataacggcacgaaaatcgacgaccaggcaaaccctcatgaccatcttccgcatgctatggcattaatgccctttcccgtgtccattaatccacaccacaggacgattctcacatacacccgtgatgaattgctcgaccttttctatccccaatctcacatttcttagcagcaactttttatacttcccagaacattcaacctttgctctacaaccctcttccacaactagttctatactttttccatcacaatactgcatatttttatccgtgtttacatatcataccaaacactactcttctttaatgccacgcttcctattccttcagatcactgctttctccctactctcatt

SEQ ID NO: 7245 - DNA, 566 bp, Emericella nidulans
atcgaccttgaatccgatgatggcgatgcgaacgtggaatatgcctatctaacctcgaggaaaagagaccccgagcttcgagcggccagcacgggcaagcatgataataccaagcaacagcaaccaacatacgtttccgagccccccagcgggcataagaggagaaaactaagttcatgctcaatgaagaaggagccttgtcaaatgaaagagaagctagaggagaaagtcgaaaatctcccttcaacaccacgaaagcttttaaggacagaaataccatcttcacaatcacctgaaagtcctggtgtcgcgtttatcacatcctctcagttccgcagcgcagtccgttcgcctgaaagacgtccactcatcttctcaaaagagacccctgtaaaggaggaaccgcattcctcgctcgagaaaggcgatgcgcctgagatcgcgcagatgccgctaaacgacaagaaccagtcagttcattatgacagccctcaaccctgtccattagcgcggccggtcgggatgtaagaacgcctaaaacaattggacgcgaaaagtctgttgct

SEQ ID NO: 7246 - DNA, 1072 bp, Emericella nidulans
ttttgatacagcaccaccgagctaggcataagactgtatttcttcttattgccaggaaggtgggacgtacgtaaagccccgcgaatgcagaggatacaacgtctcttgtatatttactggcgtcgtggcgtctcgtggcgtctcgtagtgtcgatgctgctattggcttcataatgctgtaaagtagccatcctaggcgatcgattgctgcttaatatgacctcctccctgctggatctatacagaggagatccccttggaagcttttcaatgccggaatgtgatgaccaaggatctggtatgactgttcgtgagttgtgctgtccaaatcaagagattcccccccccttctcaatcctgcaacaatgcagaaacggtcactcttgctcagtgagcagtcaatcttagtgggggcctttgcaggctagtcctgacatggcttcttagggatcttcctctaaaagagcagtgagaaacagtactctatgccgtcgatgggatggcttgagccaaagaaaagactggcgcaatctcaaacggtaagaagttttcatatcctcatctacaagtgggttctctttgtacggagtatccaaagaagagtccattgtaatccatccctagattatttcattcgttggaagtcatgatcaccatccataccttgttgcagcaggacaccgaaatagaactggacatcaagtctatgctaggcgtcccaggttggcacaccgctactctagaatgagcagatgagccgagccaagaagagcggccttctgggctgagctttgaataaataagagcacaatgctgaagggccatcgctttgctttttgcaacgatagtcctgttatgctgcggatttcgcatatatcacacttagcgctctccggcagcccatctcattttattcacccttatttttctttttcttttcctcacccctttttattctctttattttttattttcattttatataattattatataatcattacttacatattttcctctgtcaagctgcgcttattgtggaggttattgacaccttgggaacaccacagaa

SEQ ID NO: 7247 - DNA, 174 bp, Emericella nidulans
ggtaattggtgcaaagatcacacgcttcaacgcaggtgatggcatcgtgggatagcgttatcgcagtacgcgtgcggtctggtcaagatcgcgtgtcggcggtctcttgatgagcgcttctgctcgcggctctccagcaagtagttattactcgccagcgtcgaggttggccta

SEQ ID NO: 7248 - DNA, 887 bp, Emericella nidulans
cacttatttttatccctgttacctgttactgcaggcattaccacctcctatttccggctctgaagtatctaaatggatggctccagcgaatgaggagactggccgggtaccgaggtcgcagccgctccctgcttcccctcatccttcaagcggtattcccagcgcccccgatcgtgacggggacgcggtagaaccagccgactcgaatccaggcgagatcagtgccaaccctagttcagcctcttcatcccgctcccagttggagtctcccaacctcgcgcccaaagaacgtccagtttcaggcatagtacccccgtactggagccatcatcggaatgcgtctcgtgcatcgcagatttccgccgacggaggacccgcgataaccctcgaagaccatactgaggatccgaattccgagactagccgtggcttgtgggctaagagtgtaacgattgatgatcatgttgttgttcaaggaaagtccggggtaggcgcgtacgtggtatggaattgcaagatccgaacgttggaggtgcgtttcaggtgctcgtcgctctgcgatattctgctgggtttgttcggtttgctgggtttgctcaggaactgacttgactgcagggtgggacgatcacagttcgcatgaggtattcttacggctccgccatcatatcgtatgtaagctgatcgcatatcttcaggtactctgagttcgacgatctccgactcaagctagtgaaatctttcccacacgcaaagaacgccctcccaacgctacccccgaagagtgttctatgtatgttatgtcccagcacaccgtaactgaccgtgaagctaacccatctgactgtttcgcagtcaagtttcggccatctttccttgaatctcgc

SEQ ID NO: 7249 - DNA, 243 bp, Emericella nidulans
aggcgtttgacccagttgatcagcaataccactatccgaaaattacatctacatgcgagaaatgacacgaatatgcccctgcacctgaactgcctccagaacgtattaaatacctgcgcactcttgtgtactgaccccaactggctcgctatgtcacaagacctgacttggatgccaatgcccatcatcctgatcgcaaatcaaaaagcgtttgcttgaccgcgtatgtccaaggctggtcca

SEQ ID NO: 7250 - DNA, 951 bp, Emericella nidulans
gatggagcagggtcgataggaattgagccattcagacggttgatcgtgaagttgaaagcgtcaggataaacggatatggccgaatccggtatctagtcatgtgattttcccgcgggaaagtcacgagatacgaagctactcggccgactgcacagctcttaatgctgcgagtcccagcattctacacggcgaacggagtcggcctagcgaccgagacgaccgagctctcgaccgactgaaggctacagtttatcaattacgagttttaatagaacgaatctacaacatgttggtctacaattgcagatgcagagtggctacatatgtttctccgtgacgctgcccagccgaggaggcaaacaaggtggaaaactccccgcacgcccgagcgagcagctcctatgagctcccagtgccgcggttgatcgcccgggcagtttcacctttcgtccgtcatactgaagctctgtcaccgacatcttccgaggtttgtccagctgctactataattattacattgactcgatatcgcggtgagtcactgctagcaggaaaggaaccaaacttgaccaacatcgacaattgtgtatctatacctcaatcgctgaaaaacagcaccgctggcacgtgaaaacccatgaacagaccaacatgagctatcctaacatgtgatatcataatatggatacatcccagctccggatcgaccccggaatctacgcgctgaccgagttcgggatcgaacgggtcatctgtcaaccttcagccttgtcttccaagctcctaaactttgatcggtgaggcccggtcactagactgtctcaatataccgtcgcaccttcctatatcaagtcagcatatgccattgaacattccattaggtagagcataccaattcgttacggtctctttccacaagcgcagttcatgtttcccaggtccacccaagtg

SEQ ID NO: 7251 - DNA, 882 bp, Emericella nidulans
tgatatctggaaagagagtcctcagaagttcgaaagagatgcgggccctgaggacccttgataggactgtcatcgaggtggaaatggaatgcggtaaggccggttgagtcgggggttttgatatcgtccagggttgacagggtggtaacactctctgccacgagctgcaggaatctcaaattagggcaagatcacattgagcgttcagcggggagtagtacgaaccgagtcagcacttctgtagggcgagctatcggacgttgcgtttcttgaatctgtatcgtagtctgagtcgatgatctcggtggtttccgacatggccgatctggaacgagcatgggataacgatctggtttcaaggaagagttgttcctgggccttgatgtaatcgaaggatggctggaaatcctgagtagaagcctgtttatgtcagctacatcaatctcgcagcatgcaggaagatcgtaccataatgcgggcggagggagccgaaagctcctataagcggattgtaggcaatgctatatgaatgtgtttgcacgaactgctataaaacgaggttgcggtgtcttcttgaataggaggatggcaggcaggatagggagtctggatgccaaaaggcggacaagtttctgttgggtaggaaagtgagggggcacaagcagatcgtgggatcacacagcgttaagtatatcccagtcggtcaaggacggttgccctagcagggaataggaatatgccacggctcaaagcgccggcctcatttccccatcatgccgaaacgcagagaattagccagcgaggagtgtcctcgatggatgtgatgaagtgaacatgtagatgcatatgagagggggaacggcgaatagttcttcggcgtca

SEQ ID NO: 7252 - DNA, 477 bp, Emericella nidulans
ttacagaattgctccaagatgcccaaaaccaattccaggtcttcgatcgctctcattctctcatgggccaagcgcgctgcatctggctgaaagtgagcagtgttcagatgagcaagagagctgctttgaaagtagtcatcaagttcagccagttgaacgcaaaacgctgctggcggtaccgattgttggcttcccggatcgtcatccccgatgactctgctaggatatccatctctacagtatctatgtcgtctgtgacgcgcacaacggacggtcggcatagcatagtgagatgtgtgtagtagttcaggtcaaaccagcttttacagagatggggggaccttggacttggcctcgagtaaggggaagggcatactacggcgcccttcaatgaggcgtttgtaaaggatctcctgggtatttgtacttgggcgtcggcagcactggagagagctcattttagatcctatcatgctg

SEQ ID NO: 7253 - DNA, 646 bp, Emericella nidulans
acagttgaccgttgctgcgcaggctccgacgattttccagcgcatattgaagagcgaacggggattccatctgacattcaagagcttctgatcaacgaaaggtcgacacgaggccgcacgcccaaataatcagctagccgtgctgttgtatcagccctccataaagccaaatgaccgtccagccactcaaaagatggtcgcatagaccccaccatattttgcttttgttaacgagacgtgagcaactccatagagtccatccgagtttggcctggcccgatatccaaggagtacgaggtggataatccgtcttgagctggaatgggtacgaagagtaggcatggtcgagaattctcacacaaccggcccaggtgaggtctaaagatggttattgttctaagacattataaacagtgcggttgagttgggctttgaagggtaaaaatgatggtatgattctaggacaaagcgtagcctcggcgtaagtatagacgacaccaaatatagcgcaataccatttatgcagtgggcgctctagaagcattcagaatgcagcaaccgttgtcggctcgcttaacaagatatcttacctactcaataaccatctatacatacggagaaaattgcgccttacacaaaatttaac

SEQ ID NO: 7254 - DNA, 110 bp, Emericella nidulans
caccgctgaccattcagcagaaatcgtctgacatgtgcctagagcaatatatcagggccttgggatgatccaagacggtaagtcctgcctatcttggatctgatcgcagc

SEQ ID NO: 7255 - DNA, 1082 bp, Emericella nidulans
cccgaacaaagactcaactactttacctgctcgatactctcggatcctggatagacgaggattttcttatcctcctcccctccccagttccgccaccatcattcgaagatcattcttcagaatcagacccagaattgaaatcccaataccacctcgaagcctatacaacttactatccggctggctttgacacacgcaagaagctctctttatcgctatccgcaattcacgccccactgcccggatacaagcagaaactctccaagagcatggatcggttcttcgaacggcttgaagtgggcaaagcagttgtgcgcgtgaactggagtattatgcccaagggcatggggctgtttgctgcgtttggagggttgcataatcattcccctaatgctgaaagagggaatgaaaaggtggaaaagttacatccggaaagctttgacggagaagacacgttcctccgatgcgagaggcagacgctacatcggcttccgaacagtaaggcgcttctgtttgcgttccatacgtatacgtatccacttaaggatgtcaaagaggaggggctgggtgaggagctggcgattgcgatagatggactaaaggaaggcagtgtgccggagatccacgagtacaagaacgggccatattggggagaagctgtgaaggcttttttgcgctcttaaagtgaacttttaggctaaggtgattattacctttttattctatatgaatttatcttgctaggaagttatttgcggctagtaaggtttacagacgctcaataaccttcagcagatcagccgtaacgcccatagctgtaacatcacctccggcaccagcaccctgcacaatgagtgggttgctgccgtacctacgagtgtagaaggagataatgttgtcgctgcccttgagtccggcaatggcgctgtccttgtcaaactgatgcagtccaacacggacctgcttcatagcaacatcaacgctaccaacgtattgcacgaccttgccggtcttctcagcaccctcttggatagcagccattttggctatcgaaactgggaagacgcgccttgaactgatct

SEQ ID NO: 7256 - DNA, 100 bp, Emericella nidulans
gaggcccgtggttgatcgcaatctgaagcagtgcagagcagtcgtgcaagctacgctagggtgcacaccgaaggcgaaatcagcgagggtggtgcatgca

SEQ ID NO: 7257 - DNA, 112 bp, Emericella nidulans
ttcagtggtggtttcaaacgaggttccacaagagggtctcgtaatgaacgtgggtttgggcctcgaggcgggattgggcatcaatgtatccgcatcggattcggtgcacagg

SEQ ID NO: 7258 - DNA, 548 bp, Emericella nidulans
tatttccagcttgtggtgaggaaagttgaggcggtccacttaccgcccagatgattatcttgccatcagcggcgcccgaggcgagaataacgcgatcggggccgccataatggctagactggtcgccaaatatagagcctgctgttccgggaaggacgcatagaccccagactgcatcggaatggccatccagagttgccttgggatctaccctgcccctttcccagactcgtacactagcatcctgcccaccggagaaaacccagccatcgccaaccgtgcggccaccgttcgaaaagttctgcgatggagagcatgccgccaaagcagtaacagctccaacgtgaccccggtgggtaaagtagctcgtaatatccaaatcgctaccggaactcgacgtgtgaccggacgctccgaagctcgcaggaataaaccaccgcttgatcgttccgtcatcgctgcaggtgcatatttcaggttcagatgggctgccaccgccagtaaaaattacggctcggacaacatctaagtgtcctcgcagggcaaat

SEQ ID NO: 7259 - DNA, 732 bp, Emericella nidulans
gaaactcttggatcgcgatgaacatagacgcaagacggatattacccaacttgaggataagcatcagcatccgttccaggccaataccagcacctgcatgcggcggcgctccccagcggaaaccttccatgtactcctccatcgtgtccggattaatgcccacccgacgcatgttctcttcgagcatatgtggatcatggatacgctggcctccagagacaatctcttggccacgaatgaacatgtcaaaggagttggtgaaacggggatcatctggatccggcatcgcatagaaaggacgtgcatcaacagggaacttgtcgaggacatagtaatcggtcttgtacttctccttgaccagctcacctaggcggatttcgtctcgagtaccaaggtccttgtcttcagctaatgggttgccttcgtcatcgcgccagccagattcattaagcatcttaataccatcgctgaaacgaatgattggagtttcatccaaccaaacaaggtcctccgaaggaaattggtgcttgatgatctcgatctctcggcggtaacgggtatagatacccttcagaatattcttgatcacagcatccaacacttccagcatttcgtgatagtgctcttcgatcgacatctcgatatccagaccagtgtactccgtcaaatggcggtgcgtgttggaattctccgcacggaaaacagcaccgatctcatatcacgaccgaagtc

SEQ ID NO: 7260 - DNA, 865 bp, Emericella nidulans
aagagagggtaataaggaaaagacggagctgggaggggcagaagaaaaaataatagctggtggggtcttgctcacatacgataccactcttcaagttgtttccgggacgcccaaaaggaccttttcttggacgggagccttctttggaggcatcttggatttctttttcttgctggaggcgaacgggcggaagtcaagagagaggagaggtgaggagaacgaaacaagtggaggggcagacgaaggggagctcaaggaataacagaaacgcgataccgacgcaggaccagctgccgaccgggagcgaatgagcaaaacggggaacgacgtggtgacgacggcccaccgacagcgggctgaacgctgattgagaatgaaaagtgactataataatacagggggtaaggaagaggctgcaagaagacctaatacttcaattgagtagtttcgcgccaaaagcgttcgagttctcgacgccatcaaaaaagattttgttgtttcttacatgtattgctcgtacttcaccgcccacatgaccgctatcagtcacatgacgtctggtatattcggacaccgtaccctagtagttctcttaacggatcttataccagtatggtgtagatgggctattaagcctcgcccaagagaacagtcaaagtaacttatgagtctggcttcctagccatgtgaggcgcatcgggaccaccatcattttctcaaaacaggtgcactctggattaagaggctcctgtttgcaggcttgattaccactccttgttatccttgagaaattcctctccgtgatttgaccgagcaacaagacagtcacggaggtggtgtgctcccaatcgtatccatagaaggg

SEQ ID NO: 7261 - DNA, 969 bp, Emericella nidulans
actccgatgttgaggtgggacgttgcgggagctcggtcgaaaaggagtgacgggaatccagataagcaacaggacgacactaaaccaagcaaacaggaacctaaccctgagctgctggcatgtagggagagacgtgagttcgctccgtgcggggtcgcaagaagcaagagtgtcaccacaactctttgagttcgagttcgccgcgacgttgcaggttgtcccgattgggattagcgcatcggagtggaaaattacggcattccagctcttctggagttcaccctgacgacatcgcgaaaatattacctacgagactcatatagccaatatttactggttacagcggtaacaaaacaaagaatattttcataaagacctagatacattgaaggtctccttttgaacatcaggcattatcattctatatctttggagaacggcaaggctccccttttgtctggtcctatggagtatgttggtccagaaagctcacgtccagcgcagtgcatcaatgtaccaatttaagcagtgtaggtcgaggcggaaacttgaccaccacggccggtccagttgacgtggatgtccttgtcagcggggtacttctcgctggcgtgctcgggcttgatgcggaaggtgtgggcaccgaagtagtcacgctgagcctgcaacaggttggcggggagagcctttgtgcggtagccgtcgtagaaggacagagcggtgctgaaggcgggagtggggataccccagagagcacccttgctgacaacgtttctccagcccttctgggcgttgtggatggccttgttgaagaagtcgttgaagagcaggttctccaggtcggggtccttgcggtaagcctcggtgatgtccttcaggaagacggagcggatgatgcaaccaccgcgccacatgagggcaatggcgggcttgttgagttccagccgtactccttggcagcctgtaatc

SEQ ID NO: 7262 - DNA, 603 bp, Emericella nidulans
cttttgcacggcagagaggaaattcgtcctgaatgcgccgggctcgacgatgaggacggagatgttgaacggtgcgacctcgcgggctaatgcctctgatagaccttccaatgcgaacttggaggccgcgtacaggccgcatgtaggcagggcatcttggccagctacgctgctgacgttgacaatggtcgcgcctccgttcttgcgggaccgcaatgtcggcaggaatgagcggatgaggcgaaaagggccgaagaagttcgtttccatttggagtttggcctcgtcatctctgtgattgttagccctcagatcccagagacatgaactttccctcttcaggagaaagggctgtcattgggcaaaactcacgtcatgtcctccacagcgcccaagagcgagtacccgcattattgacgagaatgtcgatgccgccatataacgcgttcgccttttctacagtatctgaaacagtatcggcttttgtgacgtcgaactcgaggacctcgccgcctttcgctttgattgcagctacagaggaggaggatttggatgcgttacggacagtggcgatgaccttgtggccggagagagcgcgaggag

SEQ ID NO: 7263 - DNA, 1139 bp, Emericella nidulans
tctccaggttcccgtccgccacgggagtgaacgggaatacctagttttcctcaagttgttccagtcttcaaaaaatttcattgcttctcggccgccttactatccctctccaggagaagagaagccttgaaccggccgtcagccagcttctatccaccctagctggcccctatcacgccagaaaccccgtggtcttgaagttttccatctttctggaacctcgctatatttatatagtgtcgtcatcttctggccgtcactttctcaccatctttacttcggaaatcctccattcattatattttacctcagtgtgaagtgcagcattgactctatctcttcaatcattctgcattttatcatataactttctttgcgaggttccgcaaacggatttttcatataattttctcgctggtccaacatggtggaccaggttcgttcaatggagtcccgcgtagggcgaaaaaaccaacgtgagtccccagattaattctcgaattctcgcattagcccttcccagagcttcacctttgtatccggccttctttcgcagagctatgctgacatgctctttccttagggtatggatcgaagggcgaacggctcgtggccggcgtcgtcccattatcaaaagataaaagcttagtgatgatgattcagtcagctggtcgaggtggttgggtgcttccgaaaggcggatgggagacagacgaagcaagtgcccaacaggcggcttgcagagaagcctgggaagaagccggagtaatttgcactgttctccgggatttggggacgatatcagacatgcgtccttcgacaatgctgacgtccaattcaccaagagcctcataccagttctttgaggttaccgtggatcgcgaggaggaccgatggcctgaaatgcacaagcggaggcggcagtgggtaacttatacccaggctgcagccgcacttgcgagtcgcccagagcttttagaggcgttaaaccgaagttccatgaagagatagtgcaccttgcacttcttcaagctagggctggacctcgcatgggcctccggcccctcttatacgacttgatatgatgctccacctcaaaaggaaaatatttgcattacctatccccacatcaatatatt

SEQ ID NO: 7264 - DNA, 1527 bp, Emericella nidulans
gtggccttgctgacgattggaaagtatggttgcacaaggtgaaaatagctttcgactagacggtcagcaaccgcaggaagcgggcgctggaacaagtcaacgtcctccatgataactacttcggtatcgtccagaaagtagttcaatttggtgacatagttgcgatctaggtccttgcccaacggaccttgctggaaatgatgtagggtcttcttcagcctgtacatccacgccatctccgaatgctcccccacgaagcccatagcttgtatcttctcatcgcggttgaaatcttcatcggtgaagtcgattgtgccaatcggagatcccggatcagtggtgaaaagagggtagggcagttctgacggtaaatggttcaaaggctgatcgctgtcgtactgctgttatgagataatcgttgagtaaagttggaaggtggacgcttgtgcggggagtgcgtttcaaatcgactgcgaaggaatagcgcttacatcgctcaaaatctgttcaacgtactgggcggacagagagtccaagtttggatagatgatttgcagcagcgtttcgaacgattcaacccgcgtcgtgaggtcacttagtcgcctatttcagtccgtcagattccagactcttgtcgacccgataggactctagctaagcttcgcacctagccaacttctcccgcttccggtcgccgtaagagcattggatccctgattcctgacatcgttggcatgatggacgttgcccgctgcatttcacttcttgttcgcgacagttttcgcacgctcgactgacccgcccgcgcgtcggcgccgctgttgagctcactgatcgtgggattgcaaccttgctgttcaatgaatgctctgggggaacaatagcggaggcattggaagcctccgcctggttagatgtcgcttcaaacggtccttgagatggaaaggaagtctgcgagaacccagatgctacccaaccataaaccggttcattttctggaaactgtgacgagggtgttgatgaaaaaggaaaaggatcacccattatcattgaggatgcggagcagctaagacgtagtcactgggctcgttcgtccaggatccaactgcaagcaacaacggacagaggtgcgttcgaaggcgaaggtttgttgtgcctcgggaagttatcaggcaaggacagggttgtcgagcagcccctcaacagctgaaggtagtttgtgtaggtgagcaatcattgctgcgctgtggtaggtcggaagtacaagccggttgcgcgattgccgtgagcgggcggaactcgctcccctcgccaatcataccaggtttttaaactttatagcaggcacgggaggctccatgggtcaactaaaataggctctccataccaatatatagctttctcgtctcccttttatcgagagagtccctgcgctgccggattgaagtaacccagaccgaatggttggcaagcaatttggcaaaatgctggcatcacccgacatgaacaggcgaattgcaggccacc

SEQ ID NO: 7265 - DNA, 569 bp, Emericella nidulans
tccagtcttttcagtgatgtttgtcgactttatgtgcctgacttgatgtgccagtgactatcgactactaacccagcgctgggaccatccgacataccacccatacaatcggaatcggtaggtactcaagccaaagtcgaaagtacagattgaagttatagctgtgttgtttgggggtcaggcggctgcaacaactagacttgaatgtaagcgaacccaagtgcctggagtcaacgaagcttagtgttcaatctgacgatggcaaagctgtcagggagccgtaacgatagcccatatgcgctgtggcattacagcacttttgtcgcgctaggatttccctggcaatggaggaaacgtccccttttccagattccaagacgatgcggtcaccgttgacggacgccagtaacagaatcaacaactgccacaccccgactaccgaacgaagactgatgagggaggaacacgccttgacttcaccagtgcccatgtctatcgtcgatagccctctgtcacccaggaacaacgcggagaataatggtcccccgccagtaggtgattcagggctt

SEQ ID NO: 7266 - DNA, 294 bp, Emericella nidulans
ttggaggaatcagcatccgccgacgaggacagcccacgatattggacttggatagcacagggtgttcgtgatttctaaaagtgttgatagaaaggaccaagcgcgtgcgcaggaaggatcgattcaaatgtaatgaaatcggaatgaaaagccagtgatgccgagctgaatcggcatacgcgactcgagattgagtcacgggcctggcgtattgcgaggggcgagacgatcgggatcgcggctattcaagggtagaatgcaatggccggttcagagagggaagaaaatgtgttg

SEQ ID NO: 7267 - DNA, 784 bp, Emericella nidulans
gctgggatgtgctttctatgtcagccgatgcccattatcatgcactgggacctacataccttttggaccattattggctcctcatcgtccgccttgttctcccaatctagttcgaatcgccatcgccttttttcgggtggtaattgagttaccccgacgtcggattgcgccaagggggagccattggatagagatgaagcatcttcactaattctggacagggtcgattcggggttgttgggctgccgtcgcgaccactcttctcgggtgctagcctcgaagaatccggagcattgcgccagaatgagccggtgcaaaaggtaacggttctcttggcgaccagcgcgtatcaccaactcaacatcgccagtgtgggtaaagatcgggaaatcattcagaggctgatgaaccagtccaccatgatgagagcgactcgagcgatgccggcgattgtgatacgattgacgcgacacagacgaaggtgcactttgcggtggcacagggcgatcgagcacttgggcctgagaaaccatttccgaggacgtgattgactttgttggcatggtaggatattgtacggtggccatacacctgaaatcgtgctgtgtgcgtcatccaaaagacgtagctcacagtagtgtgaaggaacgaggggatagacaccggatcaccgcgaggggcgagcgagcggatagtgaactcaatatagagtagcgacaaacctatagttgaaattagtaactgatagatgtagagtttcgcgtcgagcaggggcgagcaagac

SEQ ID NO: 7268 - DNA, 534 bp, Emericella nidulans
ggcggattgctgcgtgttgacggttgtgaggttgccagctttgtcaagggtttgccgcactgttgggttttggcggtagaagtagtggaagggaatatcgccgtggctgaaggagggtgggggaagaatgtcgacatttgagatggcgcctttactcatgtcgaggtcgaattccttcatctgtttgaagttgaaagggaggatcttctcgcggaatcgggaaacaaaggggctgttggttgttgagaagacgaagtcaggcatccctgagaggcgttagacatttccatatcgtggtgaataggctggaaaggatggtacctcgaaacacatgcgttcgttcaactaagccaacaggctcaacctgatacttacccacattatcgcgcagactccgtaggaaatctcgggcagtaggccgtgggggcccgtcttcctgcctcaccaagtctggatcgtctttgaatggctcattcgatcccctcttgcgcttgcacccgtccgcttaggaactgtcactcggagaagaatgtt

SEQ ID NO: 7269 - DNA, 1622 bp, Emericella nidulans
ggaaaatccaggaacaaagtttttttattaaaatatacgcagggaataataagccaaatgttttcagaaaaaaaaggtgttccccacggccatttccaaagtaggttttggatgaaccccaaatatgggccggagccaaattaattttaaaattgcccaaaaaaccattggccaattaaaaaaaaaaccctaattttcggccttttgcaatttccgggaaccggggggggggttcaaaaatccccaaagccccttttttttaatccccaataatttaacttttccaaaaatccggtccccatgaatgatccaaatttggtccctaaaaaattaccaaaccgtgatcatcaactgaagtttcttctcggcaaggccaattagtaagagtcaacctgaatcgttaagtttgccaacgggaagatctagtcggcgtagggggacggcaaaatccgcctttaagccaggcccagagacaaaagtcggaagctggaccgcgtgttgccttgaaatccaggtgtcaacaaaatgttgccattcttgtaaggcaataagaagattcaggactctgcactggggccatactttgcgtaaccggtttccgcatccgacagtcaacaggaattgacgttttgacaggccggaagagtgcgttgccaaagccaccctccgaccgtcgtcggcgtaattctctcacggaagaagatgccatgctcagatcatttgtggcctgatctggatgccgacatcagggcgagtgctccgaccacttcccgatcggatgccccagcaaggctttcaggttaaagagaggtaaagtgacgatccagccgaaccacgcagggcaggcccatgcattcagcataactgttaggtaatcggtacgggactggtagttttcattcgtcagaattccccaaaaaagggaccagacttgcgttgacagctgttgtctagaccagtctccatctgatctgatatcttcgtttacttctgtatacctacacttctatactgacgcccatgaacgttatgatgtttgctttttctcagctgagggtcctggagccaacggccagcgcaagcgaggcatggccagcacgccaacacccccgcaactcgcactggctattgcgggggagatggcgtcgacatgcatgagcgctatcgattgaaggaggtctcttgacagccccgaggcttagccgaacaaggaagtttgaaggagatggggcacgccccttcgagtgtccgagcatcagcaacgggaatccgcccgagttccttggaaaagagccgaattcgagacgatgttgtggaattttcttcttgacaagtgcgacacccgcctgtttgtgggtctgctgagttttagacgcccatagcatgatgttgctgcaccggaaaatgtaaagctcttgcccctcctggctctggctctcgtaaaggatcttcgactagtgcaatttcggcagtgtattgtatggtatatgaccgtaatactggtaatgaggtcgagggctgaccagggacctgaatgcggccacgataataactaaatgatcaacggcagctgatcacaggaacaccaggataatggacgccatggtcatacagaaacagcc

SEQ ID NO: 7270 - DNA, 681 bp, Emericella nidulans
gggttgttctatagtcgactgaattcgttccatttcttggatgagctttttcaatgacacttccaggacatgcagatagcggcggaactcgagggtcgaaggcgtcactgtccagtggagacgggtggatttcacccggaagaggtttttggactgttggacgaaactctccagcgtggtgtgcgacattgcctccaaggaatataaactcggtctcggaggtgcgggcaagagcacacatgtgttcacgagctgtacaccgttagctggtgcatcgtaaacaggtatgtctgtgttcgatttactgtgccctcctgagtacatcaggaagaaacttcgtcgccgaagtagtcgatggctgggaatccgccgattctcatcgaggcaccagagaaatcaaattcgattacctcacgcccgtggaatgcgtcgtcaagtgtttcggcacccaggttcgacggaaaccctggaaatgtggtcttatcactcttaaacccaggcccgactattaaggccctcgacgaagggaagacgaatgaatctccaacatgatcgaaatgatgatgagaccagatgatagcatcaatagactcgagcaaaacaccctacaagacggagctggtcggcaacctcctttgagacatcgatgaccacatcggactcctcaagcaagcaagagac

SEQ ID NO: 7271 - DNA, 931 bp, Emericella nidulans
agaccacggtcggtcattgaccagccaggatttggcgattacacagcactaatcccacttctcccacttctcccagcgtgaggcaccccggcccatgagtaaggccagagtcgtatcgggcccgaggctggccgagaccattcaggctgagagtcctgacactctagagcctggccgttacacgaatcgagggatccacgatcggtccgccgctccactcctgtcaataggccggctggtcccaaacgggcagggcttcctatttttccctatttttcccattgttcgaactacgtccccattcggacccggccgatgcccacttcgaatctgctagcactagcaggcgccatctggatgtccagcatccggctggggtgacttcggctgccctgcaccgagcaagtcaccgcgcagagattgtcatctgctgccaatggccatcacggctccttcctggtcgctcgggtgcagtgtcgggaacgaatctgctatataaacaaagagtgtttccatccgccgtctctatacatcgccacagcatcgcatcgcatctcatcttatcaactcatcgactcacattccaacatctcatcattccatcatctcaaggttgtcttagcttgtcttgccattgagaccactaggttagacgacttgattacttgacgacctgacccagcctaactctctggctctcgcccacagttgctgccgcctgccttccgctaccgaaccagctatcagctcatggcgtacatgtctcctgatcccctgtcggccaattcgtcctacgacagcgccatcgacctccttctcctcaacactatgatccccgagccattccctctggatatccccaacgacatgctctgggatgccaaggagctgccggccgatttcctcggtgccccgacagacatcaacgggt

SEQ ID NO: 7272 - DNA, 727 bp, Emericella nidulans
tatctgtcactgcgcggcgtttttgctttcttgaacacggacttgcgctcactgatctggttcagggatgtctgcgcttcacgtaattcaccctgtgcctctcttttagctcggtccaagacctgggtctgatcttttagaatcttccgtattcttgccatgaattcctccacatctgactggtccacaattgtatcaaacccgctgatgttgtagcttcgtgcaagacctttggacatgcgctgacgcctttcgacctggcgctcaaagttggccttgtcattctcatgttttccatactcggcttgcttgaggccgagcttgtgccgtgcctcttcgattcgttccttgatctccatgtacttctccttttcagtctcctcttgctgttggtactgaagttgcctcgcctcgaactgctccaaattcgattcgagccattcatccggctcgtcgagttctactaggtgtcgtttaagattgtcgatcgtggcttggatactcttcgcttcaatccgtttaccttccagtgcaccaaggatttgagagtagctttcggactccctccatgctttgtccgcaagttcagcgactcgacgcatttcttgggtaagctgctgagtctccacacgcagagtctcaatttcttcctggagcattatggacctcttctcagctctgtcggccttctctttgtcttccttggcatgttgtcaatgatcttgta

SEQ ID NO: 7273 - DNA, 1104 bp, Emericella nidulans
gtgcagctttagtttctgcggagaagcttttgctatactttcagaaaggcggttcgggtaggaactagtgtcgtcattttgctagcagctcaaatgccgcctaagtacataacaatatatcaaccgtctccaggtccctaataagataccagatatgcacaacattcaaaatctcaaggtcagttcaaagcgaatggcgcgagaacatgtgtgttcccaccaagtccattatcccatgcctgcaagacgcggttacaatgtcctgtagatatagccataacacgtacgtagctatggcctccaaatttttaatcgctccgggctcaaagacaagttcatggtctatgtgtagaagacatcagttagcggagagcatggactgtctagcggatgaagccagaaataatgccctcctgctattcggagggtactccgtgtgcctctcccatcactgttcgcagccattccagctgccagtttagacatgaggatttccatttctgacaatatttgtgaaactagaacccttcttgagtttctctggaactgctcgagcgactctcatattgcagcactcctgtcttcatgatggccattggctactcgagaaaatcatcatttcacttgcagctctggtgatagagatattcaccatgaaaatttcttcctcatccttggctgacatttgatggctctgcatcacaatatataagacttcaaattttgctggaaaatttccttccttctctagcatccctgtcctcaatacacatcaaatttcagtactaagtctactaagcctcccaaagcaaaggtcctcgcataattaccacccagagctactttgatttgtagctgtccaagttcagagaccaatatgtacttcaacaacagcactcgagctctactcgtagtcgtggccgtattcgctgtcatggtttccggtgtaagttgcctattctctacctcccttctatcaatcactctcatttagatacagtccatattaaacctttgcattctctagcaccacgtccgctgcgctggcaaagccctcgcagccccacaaaagacttgaaagagcgatcactaccctcgcgcatg

SEQ ID NO: 7274 - DNA, 730 bp, Emericella nidulans
aaggtttttctcgtcgagtgacgagcatcaacccagcatctaacgtgtctgaagtcacttgcttcagaccttctttatgtcaagcccatccatgagatgtatctcatgtttatttgttacagaatgtgaatttctgcgaagattatttgagtctgccaaatcgacacactttttcagttctataatacgacgtctatgacacgcttttcttactgtacgagtaaactcggactaagaatgtcaactggctatattagcggaataataatttctagcaacattgatctaaggtgctttaaattgagccagtacgaggaactaggcgcagtaaatccgttttagcgtatggcaaactacgtagccctgcgcgccgtttcgggcggcgttcacgaactgaaaccgcatagagttctccgcctagtgtgtttcagacggagactacacgtagcctgtttgcctcagccccaggcagaatgggtgtgcgggaggtggggaggtgaatcgaccattggattgccaaaaaggtgtcgcacgcccattgccacggcctattcccaccgtggcgagcccaaaatgcgccgcagatggttgtgtacgcctggtgatgctatcggcagagagatcttcaaaagaatggggaagctttcttctagcatcgtcttcctatccagacaccagagaagatcacaaaaaccgaaaaacgtcgattgaatggtacagcgatattcga

SEQ ID NO: 7275 - DNA, 1460 bp, Emericella nidulans
ccaaaaaaaaaaaaattttttttcccgtatattaatccgggaggccttaaaccttttccttggggtaagtttgggggcggggaaagccccaaattaaacgttaagttttaaaaagccggatattcaggccggacaaggaaagggttgcctccggtcggttcgtccacctaagctagcccattttggcctcctaaaaacgttccttactcaagctcaagcaaaaaaagcaggtaagtaaacttgcgaagtaatggcctttcgaaatttggaattggggtaccttagtcattttcccctttgttgaaattagtggaaggttaaaattccggttaataaaggtcccaaaccgcccaatacaatcgggcgttctggatagccgttttgtttttaaaggcagtgaaaaaaaatagattgctgtagagttggatatctcaagagaacatagctttatactccgttcttcctctgaactaattgaagaagcaagcacaataccctcactttttttaaccctactcatgaagagcacgatactaggtactatccataagggaatattaagccccctcagtaggagaactgatgccgaggtatgtcagttgtgcatttattcatcatgcgcttcaaccgcatgtatgtgcgataggcatcttggcctgccccaactggataccaggcgctactgtaggcagatatactattcgctattgcataaattgtgcagatgttgacactataagcgcatcaggaagaagctcggctggcataggaattgaattaacagtgctggtcggaccagtcggcggatgtatcgcgggacgggagagatacatttgttttttacctttggttcgaaattcgtctatatgatatacggaattgatgtattgaaattccagctctctgtatggggaaaatgcatagttactgtcttctaggtcactggcagggtttggagcttagatagggctcggggcaagggcaccggccatggtacgattgaacccaccacatacacgctgtatgaaaagccagcatacgtggatggatgtaaattagttctagacatttaatgctgcaagtcagccagtttctggccgcggtataacttcgcctaacattcttttcgtaaagaataccagatcatgggcaccggagagctttgtgctgtcctctggattctgtaacgcactgtaaggttcaatgctggaattctgggttcagccttgacgacaatatttgaaagatatataaagggttaatatcatgacgacagtagtctgcccaggcgtgataagattacagcaaggcggagaatgcagatagacgatttttcgtatcccatataaagtggctctgctttcacaatacactaaaaatctgtaattcaagattttgcatgttacttgctgaatacagtccatgtttgccactaattagtgagcagtctatagatagcg

SEQ ID NO: 7276 - DNA, 895 bp, Emericella nidulans
attcctcgctagtcccaaagcggaccggggattttttttaaacccccgatgtgcaatatcatgcacgatacaccatcaatatgacagagttggaggtaaaagagaccgttgcattgggcctgtccagcagcccatttgcctgctcctcactcactcagcttagtggaggaacagccaatttcgtttatcgcggcgttctctctcgacctcttccaaatggcacgacaaccgttattgtcaagcatgcggaagaatatctcgcttcaaactcagattttaagctgactgcaaagcgatgtgtatggcttgtcctttctgtctgggactcagcgtgactaacaacttatagttagtagaggaagccgccttgcgggccctggacggcatgcaaagcgagaccacgacaaaggaagactcggactttgatcagaaacatcaagtaattgtcaaatcgcccaagctattgcacttcagccgatcgacatatacccaggtcatggaagatctgcccgactctgtagacctaaagactttcctgctctcatctgatatctcggaaagggtctcaaaggagtgggtactgtctatcggccgcactataggttcctggctacgtttattccacgtctggagtatacacccagcgcagtcgaagtttgcagagcagcttgctgagaacacggttatgcgggatctgaagttttctattaattacgacagtcttgtgagcatgattgatgcataccctgatatcctcggggatagtcataccaggtctgtctttcaaagagttagggatgctgccgctgctgagctggaggatgcggacacccaggacgggaatattggaccaatacatggcgacttttggtctggaaagtatgcgaatctccta

SEQ ID NO: 7277 - DNA, 525 bp, Emericella nidulans
atcctagagtgaaatgtgacgatttactgttccattatcgaatccatgcccttggcggttctgctccatgtacgtaggattgcacacatttaatgcctcaggcattaggcttattgccttgttgcctgaacctctatcaaatgtggggaaattttcgatagcgaaatcggcgggattttcagcgtgcccctcggcaagacttgactcactactgagtcatttgctctctgcctatctttaataccaaccccagtgtaggtcgaagcccccagataccaagggcatcggcgcaatcatgggtgccgaaacagttccattgcaggaacgcctcgagcgttgggctcagaggctgcaaaacctcaccgtctccccgctgacccgcgactatcccgacaaccagaaccaggagctacccaagcgggccatcgaagctttcgaatcgctcaaacttcccaatgagacggcgtcacagtgaagaatactctggggcttggtcggaatcacagtttcctcacgcgtttgtag

SEQ ID NO: 7278 - DNA, 845 bp, Emericella nidulans
ggccgacatcagccaacttgcggtggaagcgaacgttgttgtttgcggactggccatcaagaccagatgttggctcgtccaggaagatcaggatactaggcttagagactagctcaacaccaatggtgactcgcttgcgctgttccacactgagtccagcacctacgcgcccgataagcgtgtcggcgatgtcgtgaagttcaagaaggtcaataataacgtcgacatatttcagcttttcttcccgcggtgttgtacgtggctgacgcaacaaagcagaaaattccagagcttcacggacggtagcgtacggctcgtgaacatcaagctgctcacaataaccggctgaacgttggaacgatacaggaagaggacgaccatcaactagaaccgatccctgaattgtaccggcagtcttccgttgggcaaggacgtcgaggagtgtcgtctttccggcaccggatgatccctagacttgttagcagtggcttcaagtcaaataaagactacataccataagagcgcccagcatgcccggtttcacccagccatagacatggtcgagcaactgacgatcaccactcggagtcttgacggtatagcagaggtccttccaagtaaagacagacgtgttccggacgagttggttgtctatatcgctagagtcctgtacaccctcgctcttgcctttcgtagaagtcttctcgttggactgagattcctcatcacgatggccatgctggcgatgcttttccacactttcacgcggtatcagaagggcaggggccattttctgaggcacccttccagcgcgaagttgcgataatagtgaccacaaccaatag

SEQ ID NO: 7279 - DNA, 640 bp, Emericella nidulans
gttttcaaaccacacccatcaaagaccaagaaaatgcacaacaagaagtacagccagaagtgcttcgattgctgcgtgatcagtacattgtttcatccaacaacaacaaccgcgatctagtgatgtacgtaacaagaagcttcctcgactctcagccctggatcaagacgtacgcttgcgaaaataatgtcgacaagagcttgagatccccaacgaccacttaccaccacaggtcgctgcatcggtactaaatcgctgagatgacatgaacagtgccggacgaggcttcccgcattattttcatactgaaaaatgctggcgatgattgtgtttttgatctggctatgcatttgtgccggtttttaacacaggcacattttcaacctttaaataatacctgtacctagatgcagtgataatgttatcgataagaattgatttccttgaaaaaataggcggtgaaccctgcgcctcctgaaatggcctaggagcagcgtgaaagaacagtactccgtaacggagtaaactcagcctaattcaatcaatttgatgtgatcatactgatggttgttgtgctcgccgtgatcactcagcaaccagttcaaaatggtgcccatttgctggtgcttgtggctaatgt

SEQ ID NO: 7280 - DNA, 1308 bp, Emericella nidulans
aagggatagtgctgatgctgatgtacttgagtatatttcgaaggccagcgtaatatccgagcgtgttgagatcgatgaaggtgaaactccagccaccttagaccgcaaactcgagagagtcacacgagatatggtaacttatagtcgagagtgcgtcaaaaagtgtctttacaagtcaacgtctactgacaagatcttaggctaggtggcagtcgagaagaaatccgcgcggaaggaccacggccatcaaggctcatcagcaggctctgaaacaggtggaagaatttgggatgcttcttgaagttctgccacgccttactttcatatctagcgatcatcactaacggatattgcataggttctcaaagctagtctcaatcatcgtaaggagcgctggcgtgcttttagatcacatatctcctctcgtgccaaagcacaattcacttatcttttgagtgaaagaagcttccgcgggcgactcttggccgatcatgagaacaaaactttagacttgcaggtatatccatacgacaagctctgaatcaacatgtgcttacttcgcaggttgaaccggacattactaaggatagcagcgaaggacgtggcgcgagaaccctttccggaggggagaaatcattctcgcaagtctgccttttactggcgctctgggaagccatgggatcaccaattcgctgtttagatgaattgtaagcagctatcgctaaaagcctgtcagcaattcctttactaagacttgctgcagtgatgtttacatggaccatataaacagaaagatggcgatcgatatgctcgtatgtgatcctccgtacaggcaaggaaaggagattgctaagtaaacctatacagatgtatgccgccagacggtctgtcggtcgccaattcatactcatcacgcctggctcaagagctgagattagtctagcgcctgatgtcatggtgaaagagtacgggttaacagattttattcaggataaagctgactggcgtataggttagcagaaccagaacggggacaagcaatactgtcttttaggcattagaagttgctagaagtacgcctctaactccaaagaactgcttactttagagagacttcttttgatatcccttctttctgcttttcatagtataacttgaacaataggacactgcacgttgaaggtttgctgtcttgttctcccggaggaaattgattgacgaaccatcttcattctctcttttcatcgtaacgaactttgtaaacggtgtttgatcctcttcgataaactcctgccacgaaaaattaca

SEQ ID NO: 7281 - DNA, 1106 bp, Emericella nidulans
gtaccggggcgtattgaggtccagacagaggtattttcacggcgtcaccagggaatgggcctgtggcgccttcagtcgagtctgcggcctcttggatattgtacgtgacatggttcgtgctcagggtggattcgaactgggcaatgcgctcagcatgctcaattcgtttcgcctcttccttcttgcgagcttcccggcgacgtcttctcgcggtacgactcaagtaaccccttttaccatcggcaaacccatccttgatttcctgttcttggatagccaaaacggccgaaatatcggcgacgctggtagccttttggtccatgacagcacgcgcccggtccttcttctccatcagccagccaattttgtcgttgtatttatcgtcgaactctttggcctcttccgggcttcgcggccgtttcctgctcagaaattcctctgtgatggtgatcatttctcgtggcgggtctagctggcgctgcatggaaaattcacggaggagatggtatgcgcgaagaccgaccttagagtcgttaaagtggacggaaaagtagggaacccacatgtcctttcggagggtcgctgggacggtctttttaccgtggtatagcagttgacggaggacgttgtttttctacagaaaggaacgacggcgtcagtaagaaaagcaatatcggtctgaaaagatagcacttacctccaggtatcgcgtcaacgaatacacaacttgatttggcgggatgttatggtaaacaaagatgtttttcccgtgtgttaaagcgttgatggccttccgtaaccgcacaccctccttctgttgatgtgtctcgaatgcattggaattctgctcacgagccttgccctgaataatactgtgattctcgataggaggacggcagacaatgttccaggtaccgatcttggtgggatctacgatctcctcaaatgcccccttgagagtccttttctggactggctgtgaggccattgcagccaaacgctgttctgcgcctcaggtctagggtggtaaaatcgggcccctaaggagggaagcatgatccactttatatcattgcactgtagccgttgatttggctgttcgtgag

SEQ ID NO: 7282 - DNA, 997 bp, Emericella nidulans
aacagtcactcgctttaagaactcctttggggtggggatgtcttcactacacgccctaagtctcaaataattcctttctgatatagttgcggacaaccaccgtagggggggttcatataagggaagagctttgtccaatagaacaccaacgtcgcaatattgacatccttaagtcaacggctgggcgtgggagacgctatctggacaaaagtggcccataggaattgtatggtgcaagaccggaaagtactacgcggtgcggttcaagctcttttggggcatagatacggattgaaagatacaagcagaaacagacttcctccaaggaccaagtcaccccttatcaagggcaaagggtcgtaaaagaaaattaacgaggaaaacaaccgatttagaaacctatagacaattacgcctgtgtatgaggaatgctagggtgacctgataaataaagggatacatgacggtgaatcttgtttatcgtgaaatatcaaaccataagagaaaaggggtgaatatagaaattcgacgaaatagaaacagatgagccgtcgagaagccagttaagggaaatagaaaaccgaaacatcctggcgtggtatctaatatactgattccgcagaccccagatcacatctggggaatcaagatgataccgcttcaagaagtcgacatcgttgagcctgctgcgggataagtggctgactgcacgtaacggatttaatgtggattgaagccacaatccacccgccaggagggaaggggctgtgggattggacatggaatatgcccaaagtcatcttccttcatttaagcttgcgattctggctttcccaatttacatatccatggaaacgccgccattggcaccgccgaaagagaacccaccaggctgttgttgagtggcgcccaaagtaaatccagtctgtgtttgttgaggagcaagttcatcaatgtcacccgcggcctcgacttcatctgagaagtacttctcgat

SEQ ID NO: 7283 - DNA, 557 bp, Emericella nidulans
aatcaaggtacagaaaatcactggtgggggtggtggagagagagagagagtttgtgctgtacatgcaacatcggcgtattagtctgttctcacactgctataaagaaatgcccaagactgggtaatttataaaggaaagaggtttaattgactcacagttccacatggctggggaggcctcaggaaacttacgatcatgccagaaagggaagcaggtgcatcttacatggtggcaggtgagagagagcgtgggaaggaggaactgtcaaacacataaaaccatcagatctcgtgagaactctcactatcacgagaacagcatgggagaaacctccccatgatccaatcacctcccaccaggtccctgtcccgacatgtggggattatgaggattacaattcaagatgagatttgggtggagacacagaatgaaccatatcaattggtgtaatttagtgcttattagtcatattaggggctagaatttttctgcccatctaaggaaagatctatctccaaggaaatatacatatatacaaatttttcagattttagga

SEQ ID NO: 7284 - DNA, 975 bp, Emericella nidulans
catttggtccgcgcagagacatgctccaaacgcgactcaagtctaggatgcaccagccgatctcaatgtggatggacaggacgggccgaagttcatgatgctaatgatcaagaccgagaggagagtcgaggcggtgcggactgcggagacgtaggtgtgggtgctgaaaacggtacggggaaagtggaggtagaccgggagaatgtaaggggagaaggaacaggtagtgtcggagaagtggcacgaggacaatgtgagcagtcccggcaacaaacggattatctcctcaaaaaatggacaagtaatccactgcggacattaatttggcatcctcggaatcagggaagggaggaagacgaaggatggagggatgggttgatgcggaagcgaatggattggatcgtcagctgtaagaaaagagtaaaacatacagaaagatggctcgaagagcccgcggcgactctccagtcaaccgccgaatagttacactgacggggactaagggattcagtcacgatcaggcccctttgacgcggacgggcgagggtgggatataaatggcacaattaagtgaggcggttcagggatgggaagaaagaccgcaagcaggggctgttcaggatgcggagggaaaaggaggaggacagaaaaagaaaagagatgagcagaaaagagtagagtgtcagtttagataggtggtcaatttctagtagatagatagatggtgtgagaagggaaaaggtatctaccgttgaagctgtacttgcacatacagttgcaaatgagccttacagtctagccagcctaccagatttttaagtcttaatcactgacttgtttcaatagaaatgcactgtcctatcaactattgcatgcaggaatattttaaaattactgaataatttccagagtccttgtttgatgtatcgttcggccaccgtcttcaactttggttttttcgcagccagctcccgg

SEQ ID NO: 7285 - DNA, 1112 bp, Emericella nidulans
ctcacgcaccatcgatcgtcgcgatcttgggagttttttctttttctgtcttggccggacacacgggggcttctgaagggccgttgttgttgggcgcggagagatggacggagcttgggtccgcgggtataaggaggaccttcttcctcgctttgcatagtgccgatacaagttcaagtctcaattccagttctgacctttctttcatcgtcctactccattgcaccggtacctggggtttttccaaccctcccgactcacttctatgccctacggcaatgacactgaacggactggacgctggaaagcaggcctcagtgtgcttgagtatgctcgatccctctttcgtcgccatcgtgccttcccagtccgcaagtaagctgccctttgcccactcttcccttctgctctaaagatccccacagaatcaattaaggaagctgaacacgctttcgccagactcgagccgctccctccgtctacaatggaattaccttccgcagcccatacccatggctctgggccaggcggccagttgcccaacggccagctttctgcgccagtttctgcgccaaacggactagatccaggactgggtctaggcttcaatatctaccaggtgccccatctacctgactggcattctgcgtacacggcatgcgtgcagcatttcgtcaaccacgcacagcactccgctgctgtgcaatcgctcgcagcatacatcaacatccgtctgccttgccagcaaatatcaaaaccgatcgcgcgctttgacgtccattcctcagagaccgcgcaggcttcatctcaagtctctgttcgccattacatccggcgcctcgtcgcaacggggaatgacactcccgctattctcgagatacttttcggcgccgaatgggttaacggtgtcggcaacattgccaaacaggagagactgaactacctcttcacggcgaagagcgccgggttcgcggctacgaaggccgcctacgatgtccttccggatgagcatacgccgttcctcagacccacccgcgccgcgacggaggaggagatcagcacgacgaaaagtattggagtgaatgcaggccatgaggattgatggtggtcgc

SEQ ID NO: 7286 - DNA, 112 bp, Emericella nidulans
atgacccattttatgagtcggttctgccccctcaccgaagacgatggctcgaccaatacagactgctcggacagatcgatgaccacgcagacttctcagcctcccagccaca

SEQ ID NO: 7287 - DNA, 992 bp, Emericella nidulans
ttggggtcagccttaggacgcgcatcggcttcagattgcgcagtggatggtcgacagaggccttatggcccgtggagtcgcttcgaagtggggtttgagagagatcttaaaattcagggactttcctgatctatgggatgcccttagggctgaggagataaaggcgcggggatagagtggggatgaagatatacgacagtattagcgagatggtaaggcaaggctgcataggaattctaatctactgaaaataactgaagttgacactgaacccggactagcaaagacaaacaagagtctattgcaacggcacttgctcaaaatctccccttactgtcgacctttttccgtctcgaataacgaacgaaggatgccagaaattcagaatcgccatcaccagaaccatgagaaccgcatcaaagatatagataaacacctcgtggctcatgatatacccgccatagccatcgatgaactcgaccattcgaaaaacggaccgcaccaggattagtatagacaccacgtacatggccaaaagcaatgtgacccaattgcgcgctgttatgttcccgcaccagtggcctttcgtctcggtagacatgacggttggagatttatttatacggatgtgaaagacgatcgctgtgatgatgaagaacccgaaaaagacaacttgcaccgccagaccgatgattgttattgtctcgccaactctaacggtggaatgatcatcgctggacattagaccgccgtctgcatacatcagtgccggcgttcagccactatatcctattcattcaaagttccaagggagaatggggagggacatacctacgcactgcattaggatcgagataacatcttccggcacgaagatctttgcattcgttacttgtccagggtttgctgtagcagcaaatggcgatcaccggtccggacatgttattgcttgcgaatcaggttgggcgaggggtataaacctttgtacttgt

SEQ ID NO: 7288 - DNA, 977 bp, Emericella nidulans
gcacttgtgtctaagatctacagttggaaacacgagactcatacgtatgagtacgtatcccgatttttaatttattatttttatattattactatcgcccgggtgacgttcccctggttccaaacgggagcgagcggcgctgctctgtgttcagtttagcgtcgggtgtccctgaagagaactgagccatacaggagagagagaatttggtcgagatggttcccacagggtcaacccaccacaacgtcaacaatctttaatttcaaagtcagattcaatgatcaaagccaagggccatcaaagcatactgtctcagtgagatttagagttcattcaaagagtcgggcaccagcgcagcacaacccgtcaccgaggggccgacggtatgcctgatgggtgtcggcccaacgtcccctccctctgtttctgagatggttaacgggcaacatagagggacccgccagccggtctgtcattggcgagcgagaggttccgcgttgctgggatttcaatttgaaaaaggcgggcgactcagaacggattttgcgccaggctgattaatccagtggtctttcgactgagcaattggacagaaagcaggctgagtcgctcggggaacacggattgcacccgctcggcggagggccgtccccatttaggccccatttagtgcttccgcgaatccgtccaaacagccacggttctctccatgatcgttgcccaattaggaaaccgcatagggcgaagttgttgacgacacttgagtcacttgggtgggctgagggactgcgtgatctcccaagagcgacggactcctactagagcctttagtgcttgaagccgtcgcattctcaggaccttccagaaggaattaggccccagagtgctgggaatccttcgattatcgaatataccgaacgcccatcacaaaaggggtatccgcgtatgtgcgcgaattacgctgggaaaagaaagga

SEQ ID NO: 7289 - DNA, 430 bp, Emericella nidulans
tatcgttcctcgcaatacccagacatccatacccatatctaccctctttttttttttccgcgatcgactctatattctatatctactggcataaaactcttgcacttacaccttacctcaatcaacaaacgagggtacacgtcatatcaaagtccatgccttcatcggaacaaatgacacggacaaacgcgtctgaagttgatttaggccatttcccttcttcctttttcttgcaatgtataattagctaggcaacctacttactacctatactaaattaaataagcacccagggaagaacggagaggtcacttaccagttatctattttactatcatgtatttagcctactgcctacggtatacggcagccaatttggactcttcttgctccggagacggtccttcgggtttcactacgtttcatcgta

SEQ ID NO: 7290 - DNA, 402 bp, Emericella nidulans
atgccgttattttctccgaatcacttgtttttagcagaaaagggataactacttgtgatgtatttctccattattttctttgtgcaggaggtttttaaattaatttagtctctttctgcatcaggttgtcttggaattgaagatgtgaagtgtttgtcttccaaaggctttctggtgatgtcttttttgctgttaacagcgtctatgtctatacctgtgatccctgccaaattgcccacggaacagcaactcaagtgcataaattatgagaccacataagcaccgggcacatctatttgagtctaaatgtcttaggagagaagttttctttttgcaacacaaacacaatcaaaccttgatcaactagaacatttggtggatgagcagtctagataatttgat

SEQ ID NO: 7291 - DNA, 591 bp, Emericella nidulans
atatctgacgcactgtgctaaggcactcgcgctcggcagtgccgttggtgtgttctggaagatttaagcggagttaaaagttgcctgtcaaaagtacccacctcccactaatccaccatccaccccctcgaaaatttgtgctttccgaagatcctggtgaactttcgaattggaggatctgctgctcgcagcaaagagaggggtcaaaatgggacaaacattaaagaacgagtcaacgctggggcacatcaagaatgcctctagactcgaagattgctagacagtctgcgattgttactgtacccggtactttcaacctgaccagccaacggcgtgcatatattgtctgtgacctttgctgctgcagtgtcacttacaggcatacctacctacttgacaatgattggcgatgcagagagagagggccataataggaaatcagctcaactatatgagccaatttgcctaaaacatctaaaatagaaaacaagacctcatgcaccacagaataactcacggtttgatggacccgctgaacggctctttgaactctgtgctctgattccgcatggctggctcggttgttcaagc

SEQ ID NO: 7292 - DNA, 357 bp, Emericella nidulans
cgagggtccgaggtctctaccgcgttgcccgagggaagggttggcagataatatatggaggactggttccatatgagttgcacatgaacaacaaatcatttctagcacaaatatgtcttaggcaatgttcaggacatactcatggtaaacagaaagtacgtattctgggagttctatatttatatttcgcaaaatctggccatccaactttagggacggtggcaggaggaagcagggcagtggctggtcgagcttagacgaatcagtctgaagacgtcagtcctggcagtcagcaccgcctcccagctccaggcactacagcagtacaagctgtacatcccaggatggctgcgggct

SEQ ID NO: 7293 - DNA, 640 bp, Emericella nidulans
gcgtcgttccaaacactggggcacacaaattctccgacactatacgaaaatgcaacctctgttcaattcgtcaatggtctgagccttctcttttcgataggagttcccttctttggaacacatgagactttgaatcgtgatgggtttgtgatatgtcggtggatgtatctttcactcgggattgctacccaccgcaaggaaaattggaccgttgcttgtctcttaagatcagaagcttcctgtcaagctagcaactgcagacatatcctaaacctcgatcgtgggcggcgcctgagggactgggaagtagtggcgcgcctctatggataccaagactcaaaagctactcttggctgtaaagttgccacatccccgaagggaactagaatcgccgttacgaattggaatctcctctacatttgggcgttggagcctggtgcccttattaaattggattccgaaagttactatcatccgtcgtggaggtcgtcaagcactggacatattgaattgcgacctattatcctgcgtcttcatgcggtttgcttcgatctccgcttcacagaggaggatgaactggtcgctattactgatctagggattaaattgtggaatctgacctctgcggatggtattagaa

SEQ ID NO: 7294 - DNA, 755 bp, Emericella nidulans
ttgactccagccggacattcctaacccagacactcctgccctctatccagacccccaaacggtcaagccaagtccaagacgctgatgcagcccctaaaacacccgccccgaccaaaaagccgtacgaaaacagcctcgtccgcacagactcccgtgtccgcaaaataacctccatgctctcccctgcaaccagtcaacccccatccgcaacgctcaacctcgagggccaactggaaaatactcaaaccgttcttgacgacggactcatctatacaacaaccgaccgcgaaccgctcaaaatagccctaacttccgtaaaaaacctccgtgcggccgtgcggtcctcaatgcaccagtctctcaccgaaaccattgcttcacacacatatgttggcctcgtcgacgtaaaccgccgcatcgcagccgtgcaagccggcgtcaaactctatcttatcgactacggcatgttctgcgccgagttcttctaccagcttggtctcactgatttcggcaacttcgggacgatccagctagaaccgccgcctaaattaatagatctgctacatatagcagcggagtccgagctgcagcaagctagcgaggattatgaagagaaaagggagatattttcggccgccccagagctcgtagcgaaaacgctcattgataggagggaaatgctctccgagtatttctctatccaaatctcagacgacggatacctgcttactatccccttattgctgaagggctat

SEQ ID NO: 7295 - DNA, 835 bp, Emericella nidulans
cggccggtcccttcaggacgaaccaacggtctcaatgggtcgcttagtactcacaaagttaaaagaatttatgtgccttgcattgtcttaaggtacatgaatgtaacttactagttcctccggcttcttgttttaagtcgccttctcttacatacatagtccgtataccacgtccgtagataggctgaacagatgcccatattccaaagtcctcatttcataatcttatctaaaagttagacatgtagtacgtatatttttggtttagctaggtatcaggtctcagaatcaaattctcggttggccacatttaagtctctaccgggtgttttactgttgttcctgacaagtcaacaacatatatatttctacataggtgattctctaacaactgaaggtttcaacaaccagacgcccactgaatgttaaatgcagcttcgcttctagaatactctcggcgtatcatataaacaagtcatcaccagtgataatcgcagctcgtttgctcaatcccatgtcgccgggaaaaatgccaacattcttcaatcctagacccagaaattccaccttcaaactaccagattcacagaatccgccaaatattctgagtgatatgcctagaagattggaattgtcatacggaaacatcagacctagaacccattaacctcgaccccaatgtttctctcccttcccagctccaacagtttcctcccagtgactaggtccattatccccattccaacacacttcatcaccacattctgcccctccgccatcttgaagggttgcggtccctcatctttgttctcaccaagctcctgaccctgataca

SEQ ID NO: 7296 - DNA, 941 bp, Emericella nidulans
ccaagcgagcctttgaatacatgagatagcaactcttgacgagatctttattatcacccttacattccaaatgcagagaaaatggaaggtctagatgaccaccatattgttcgtgtccaagaaatgccttctccttgttgcttttctcgagatgaaatctacgatgtccttcacacacgcagcaaggctttagacacgcagactacaggcaagcagactacaggcaagcagactttagacagtcagcactttaggcaagccgcgccttgggcgggcaatgctagggctgctgcaacctatctatcactgataaaggtggctagatattgacagttcagattgctcaccagatcggcgctatacatgaatactcggtctgttctctatgtactcccataggcactctcaatccgccctacccgtcgcttatctccgcactataccttgcaaacggactcttttccctcagccttagcccatacttgacaaacacccatggcgtaatgcagtacactgtcccaagcgccgcaattatacttgtggcgacattcgacccgaggcccgaatacatcgggtacgcgaacagcggtagacaccccgacgcaatggctttgagcaccgaactcgcagccatcgcagagccagcataaactgtatatgcgtctgcaaggtacccactcagtgtgtaggagaactccgtcgccgcgaacccgatcagggccacgccgaacatagagccgatccaatgcacatgcacgatgggcggcaccgtccatccaaagatccagaggccgatagccagcgccggggcggcaacaacgaagccgtcaatcttgtcctcaggtaccggtccctgtccttgcttttctcgcttgttcagacggtggtggtcccagaagcggcagaggccgctggtgatgatgccggggatcagggcgagg

SEQ ID NO: 7297 - DNA, 760 bp, Emericella nidulans
cagggcttgctgctcaatatcaagaatttcccgcgtctttgactgccaacttgtgaataccttcgacgcaagattgaccttgacttttcgccgaattattgcataagcttcttggcggtgacgcttggtcgagtttacctttgcaacatgccagcacttgagagtgcgagttgagacaaagtagaatctggcatcctgcgcccactcctctaatttcgccacatgctctagcttcgaacgccaggctacgagtgattcctgcacaaggcgtggtgcataaaatacataagcgatatcatcgcgctggcgtgttagagccaattggttccgccaagtggcaagcttcgccctgagtaggtcgtcgttccgccggtcttcgtagatatcagcgtgttgtagcagctgcgtatattttttgcgaatatttgtaacaaacgtggagaatacccctcgtgagatcctctgctcgtagattcgctgcaaaagacggtatcgctccgcaatgatccatttgtacatggtttcaatctttaggcgctcctcgatgcgtgcggttaaagcctgacaacgaaggcggtcattccatgcgacccatgaatttcgcataattctccgtcggtccaattctctggcttggttaagcatgtctattcgttttacccattgattgtacgctgaccgcacgatgcgggtatcccgtgtgtctgcgacgtgggttgcagccggtgctaggcgagcctgaagcttccattcatacagt

SEQ ID NO: 7298 - DNA, 779 bp, Emericella nidulans
gccgagccggcgacaaactcacatacctccgctgccttattcagcacgtatgcgtagaagagactgttgtagctcgccacacccgtccgtcgataagcaggcggaacagcaaggtgcttgaagtcccctccaggtccgagaacagaccactcggctgtccagtcgacaaaggcccagatctcgtcgttgggcgagtctgcatctccaaaccgcccgatcatcccgctgtaagcatttgagatcctcgagtcaaaatagttcagcaccgaatcgatcccaccaaggtatctcttcacgaaccgtttactggcctcggtgtcaactgtgtacatgatatgatcccacagcatgagcacccaactcagcgagaagatcggaatggtcacccccggaaacggagtagggaagtgcgtttcgacgagcccatcactttcgcgccgcgaggcatggaactcattgattgttttcctggccagccgatcgtcatatgatagttggcaggtctactgcatttgttcttcttctctctttctcttttttgttctctttcttcttttttgtactttttcttcccttttcattctatcttcttttttctcttcttatattttatttatctcttttttcatttcttctctttttacttttaatttttccccccatattttattccttttctctaccctctatcttatttcttattctctcctctcttttttttattctttttattccccttcatttactcttcttttttattttctcgtctcctcccctcc

SEQ ID NO: 7299 - DNA, 550 bp, Emericella nidulans
gaggtttaatggcaacatttcgacctggcggaacgtactcactcagactacgattgcgcgtgtgttttggagcggcaggcgtatccagagtcttatcactgctcggtttatccgcgatcacaggtgttttgccgcgcgagtgcctccggaactccggccaaggacgactgcgacgggtcactgggacgcaggctcaggcttgagccggtccttgaaaccaccgaggaggtccgagacagggactgcgagttacggcgcgcaggcagtcgccaaggcgatgcgccaccgataggcgagggtaaaggtgtaatatctcccatggctattagttgaggagacgacaaaagagaagctggagataaggaacccccactatgacttggagccatcaacgcccttaggctcggtgtccgatgcggaaggctgctggcagaggtactgtgatggacgtagaagtcggcctcacgatggggactcagtcgatgaacactcgacgagacactggagacgtcgtccgtatttgcagggcaggcaggccggaagcatggtg

SEQ ID NO: 7300 - DNA, 388 bp, Emericella nidulans
tacattagtttacactatagaacactaggatctgtccgacggttgtgcttacagatccacgggcgcgtcacctctgcgcttgcatggaccagactgacgggcgcctctgagcgtgattgcatgcggcaacctccgagaccaggatgtgctaacatgcttcttacggacactcatggaaggcggcccacgagagaaatgacctagcacgcacgccctccatgtatcagagagggaccagccactgtggtctgatagctgacagatcggctgcagacatgatcataccctgtgaggtacgggcgaagtgaggccaaaaccggcgctataaccgatctacgcgtcaatttcggccctaattgtgatgggctggtcacgagtgacaactacc

SEQ ID NO: 7301 - DNA, 587 bp, Emericella nidulans
aaatcatcagtagtaggctcaaatatgtagttggaggtggttcaatcgggaaacaatagtcgttgtgaatagaaatcacgtgatgatagcttctggtggaactccgcggcgctaaaatttgtatcaagaaaaaaaagtagtacaccgtcaaagttcaacaacagactgaaaaggctccttcaaaatccacatcttcagtttctgttaattccggaatgtctgtatagcggtaggctctttatctcgagccagattacccgctttcctcgatccagattacgcttcttacgcgtggaaactccgcaaaccgagagcgatcgaacgaacatttattaagtacctcaacagtcaatactaccgacaatggatattcaccgctgccgcttcgttccgtataacccacaggctatcaatgcgctcgcgttttcccaccccccttccattgggctaggcggaaaaggtgtccctacactacggctcgcagttggccgtgccaacggcgatatcgaaatatggaatcctgcgcgtggtgcatggttccaggagacggtcctgcgtggcggaaaagaccgaagtattgagggtct

SEQ ID NO: 7302 - DNA, 100 bp, Emericella nidulans
ttttctttttttttcttcttgttttctcttttgcttgatttattttttgattctttgttttctatttttcattctctgtgttttctgcttgatatgtcgt

SEQ ID NO: 7303 - DNA, 1376 bp, Emericella nidulans
cggtagacatgttccctattggagaaaatgtggatcttagagtataccaaggagcataaattgcacgtgtatagcatatttcttgaaatttgatgtgctcgaggcaaaatacgatgcataataagaaccgccagggatatcttttgaacaagtgtctgaaggaattttaatagataccaaaggccactctgccaggtactagaaggacacttccttctgataaatatcgtacatatacttactcctaacatgaccgcccttctcatagtctccaatcgaccattagtagcttcaagaggattgtggatttatcgttgaggactcacttgtacaaaacacaaacgtgttcatcagcctgcgcataccggcggtcatggtccggaggctgtccaacccagctgccctaaacgcgcccttcttccatccagtaacgatattccagcgaccgcccttggtcatatgggcaagagttgacggttatttttgtaagaaggggaggttcgaaggagatggaggctgtgagagcaaagccgggtgctcggtcaccgttgccatggctgggataggctatagtatgtccacttagcatgtaatactgggttagacatgtatgctctagctagggctacccacaatcgaaggttccgtcaccggctattacgctgcgcattggatacagttgttgatcgagccttcgtacgtgtcatggccaccgtaagtgtttgctaacaaaagagcagtgatgtcccccgcttgggaatcttggctagattagtccagtattcgatcgtgcgcttcgtggccgaacgattctcagggcctggaaagcagaaggaactagcagagctcggaaatcaaccggcaaatatttgtctgtccacttgactgaatgtacacctttcactgcccaggcgacatgtgcccaaccgtcgacatctcaaatgcattcagcataatctgctttccccccgcaatgatgggaaacgctccgtgcgccttctgttaagcatagttggttccggttctgggctctagaacaagggagtaagagtggaaatggggtgggatagccaagtttaacggatacatctctgacggttttccaccattaactttaacttcatttgcctgacagatggtccagaaatccgcgggatttaaccgtttaagccggattataaccttaacagctagcccaataaaagaatttgaaagattgggactgaaacattttgaactcaattgcccacccctttctctggagttggcacttcttaaacattgatttatggcttaacccccggaaaaagaggattcgtttcctacagtgcggggccatttagggggtttaacttcattatcatttggtggggacg

SEQ ID NO: 7304 - DNA, 1004 bp, Emericella nidulans
agataatccccgcgatggtgtccaaacatcttcaggtagccacgccgccctccaaagacgccatcctcgaatccctcgtcgaaaatgtccgcgcctgcaatgcgcgcctatcgcccggacgcgacaagatcgtctttggcgcgtggaactcgaggtggaattgccgctgcttctcaatcggcctggcgcgcctctcccatgtagggagccgcgcgatgatttcgagaccgtcaacgcccacttttcagcccaaatacacgctttcttgaatgcattgcatgacctcgaggacatggcagacaagccgtcctcggacgacctggacctctgccgctcagatgagtgccttcggcccgtcatatgcgtttccaaccagtccttcgaaccctacctagactgcttgcaccgcgccttccacactcgccgcctcaccgtccagaacccggacagcctgcccctcctcaaccgcgtcactcaactgcgcatcctccccgaccgggattccacctttaacgcaatcaacatgcggccagtctccttaagcacgcccctcgaactcgccacccgccttcctcaactccgcgagctggactgcccctggctgtgggagcgccttcccgttgccttcacatccaaggcactgcgcataatttcccgcgtctgggcaggtccttggcgcgatgaccgcgccgagttcgcgcgggcagtgcgtcacgccatgcccttgttgccgtcctccctcaccaaggtccgtctctggttctggaggcccagctcccattgcgacgagatggaccaagcggcgcagatgcctgaccttgttggcgcgtcgtcgtcgtccttgaccaccgagtttgaaggcatggaccctgtgtctcttggcctgcgagacctgggaagtcgcctggaggaactagacgtccgcgcgctcatcacccccgatcttttcccttccaggtggcgacggtttgtcatggccacacttgcggcacctcaaagtggaa

SEQ ID NO: 7305 - DNA, 1215 bp, Emericella nidulans
cagagtagggaacggcacgagtctatttcaggtagcgatttacacgaggatgcggagagtgtggcatcagtggtctcagagtaagaaagtggctctgagtcggatgatggagagactgccgcggatcgaagactgaaattggcggagcgatacctggaaaatgttcgacaggaagtggatgattacgggtttgatgctgcagaaatcgatcgagacttgattgctgagcgacttaaagaggacgtggtacgtgcgaaagcacctagccactttgatcccccattgactatttattaggacgaattcaaaggacgagtataccggcaaatcgcttccgacttggctttttcgaccgcttcgcatgcgttctttcgggcagacactcaaaccacaacttcgattgccatacacgcaccatatatctatacggtttcgaaggatagaactctgattaagtgggagcttgcaacacccggagcggcaggcacagctacaacaaatggagcggagaacacatctaaacggcctcccaagccgcaacggaagaagccgaaacaggtgcgattcacaagaggcctgcagaaggttgcggaaagcgcagatgagcaaggtcataccaagaacatactgtcagtggcagtatccccatctggaaggttcgttgctactggaggagaggacaataagcttatcatctgggatgctgcaacattgacgcctttgcaaaccttctcccaacatcgcgattctgtcagcgggctggcctttgctcgccacatctccgccatgagttcaggagagcaattattctccggatcctttgatcgaacgatcaagacttggtctatcagcaccgccggccatgcctacgtagagacattatttggccaccaagacaatgtcgcctcagttgccgccatgacaattgaccagtgtatcagtgtcggagcccgagaccgcaccgccaggttcgtggaaggttgttgaagaatctcagctgatcttccgcggtggctcctcgaaaaacacatacaaagagaacaacattgactgtatcgccccattaccgcctactcacttcgtcaccggttctgacaacggctccatctctctatggtccatccacaaaaagaaacctctttacaccattcctcacgctcatggctttgacccaattccccagtagagctaatatctccgaagttgacaacaaac

SEQ ID NO: 7306 - DNA, 540 bp, Emericella nidulans
gaagaaaccctgacggtccgacggatgctcccagagaaactaaagccggcattcacaccaagcgccggcctcgaactctccgagagcacaccgcattcgcatgttcttccagctaatacttatccggcgcaacgctcttacctccatcgtctcctggctgcaagtataatatacttttgcatgctcctgcaatacatcatgccatacatcaaagatgtactgatccatttgtaccggtatgaccgggcccacgggtaacggagcgtgttacggcggcgacattgtacgttgttgagaaggtcggaaggggaagtgtgaatcttggtgcgtcattcttgaatatgtatgatgggaaaccgggtagtgcggtttcaggcgcggcagaatggtggattgagggggttgcggggggaatttatgaaggggttggggagggaatggcaattctaggaattggtcttggtcctgtgggaggtggtaaggggttaggaatggtgttgggatttagagatagagaattattggatttatatagatgat

SEQ ID NO: 7307 - DNA, 1052 bp, Emericella nidulans
ccttttgctcaaagaagtccccaatggctgtaatctcatctttggtgatagacggtgagtcggggtaataggttgtcatatgcccagactctggatagccaaggtgcataagagactgctcctatgtctcgtaaatgcctccaccagttgtattggccttttgaaacgcagctttggtctcaggctgtggccgaagctagagcctcaaaagcatctaggggtaatcgtggaatgaatttcgagtcaccaaagcccttatagttaccagagttaccaaggaactgagcagcgtactccaagaagaatcggagattttcgtcgctgacgttagtcttttgagctagctcgggccattttccatcgcaggcacggtataaggcgaggattaaatcatagatcggcaaagactccgggctcacttggcgcaaggttatcctggtaccctcgaacgccgctctattttgaaaatgattcaacggttagaagttattgattacagcagcttgtagtattggggaacaaaccggctgatgtaatgagcgtatttccgtaggttcttgtctttgaggttgtcaaagtggtgcttcacctctagacggaccacagtcggaggcgagtcagcgaggtagtgttgtttaacattggcatccatgacggctgttgtcgaggagagatgttgggtagtagtcagagagaaaggttgtcggcgggtgaggggctggaggagcgtggaggggcggtggaggactggcaagcgcctgcatacccctcttcgtagaaggaacatgaatgccaatggaccaacctcttcagtacctggaacctatgcctgacaccaagccacgactacgtcagaattctcgacctggaatcgcaacactagagcttgcttggcataagtggagattccccatatttacttcatggtttatagagaagccgcggctaataagcgcgcagaagccgagcctgctcaaagatccagaaaatttgtttagatagcatcgaggtaaaagcttggccattgtaaactgggagttattttatatgtg

SEQ ID NO: 7308 - DNA, 568 bp, Emericella nidulans
ggattgcgaggaacgataatatgatgcgaactactcttctagaagctttctgcaaaagcggcgtgacggatgttgcttagtcatctcatgacgcggttagcatgggagttaccccaggtacagctccttcgccgatgtcatgagctccccgtctgtgacccagcttcagtcgcaggtacagaaacccctccgccatggacgcgcctggcgaacgtgaggcatcactatctcgggtcgaaccggggcagggatcacctacgagaccatcgacccatcacagacgcccgcaccggcaacttcacactgaaaccggggatgacgatgaggaggaacaggaggatccgaaccgggagagagaagagagtatgacagaaacgatgtcgtattatggagaagaggaagaagatgacgaggaagaagaagagccgcatttgaagtgttctcatttgaccaaacagttgggaagtgcctatcggaatggagatgcaacgagcacttttttggccgctggggacaagatggtacgcttcctagtctttaactctacagaaagctgatagaattatag

SEQ ID NO: 7309 - DNA, 577 bp, Emericella nidulans
tccctaatatattctccgtcctacataataagaaaaataatttgcgctaatagtcttcgtagcgacactggggaagtatctatgcaggccagttggcgagcggcctgatcccgtccgccgactctatctgaaacaattctctgtttcaatcgtatttcctcgtcgactctcgcgcttcagcttctcaatcaagataataacttgtccgccttcgctccagtaatctccttcctctttcttgctggggttatttcgagatcgttcccaagtcccaagtccccatctgcgacaccacccctgtcccgatcgacagctgtttaacggtatggttccagcccaggcgttcggccccctcactcctctgctggcccccctgttcttccaattgttctcgcaggaccccccatacccatacctcctactttctcgttgtcttcatcccgccattatcgccctcctcgccatgcggatactcgatcgaccgccactaatctcagtctctctttagcttcggggctctcccaaacgtccttcttctgctcccgtgcgaattgcgtctcttattgcgtcgctttcc

SEQ ID NO: 7310 - DNA, 925 bp, Emericella nidulans
cgcccgcgccgagctctcatgctgtctctgtggcgttgtctcttggtcccgcttcgtgagatgtaacctcgcttcatgaagatgcgatttcagatcccggtggcaatcgagccataaccttgggtctaaaattggatctccattaagaaaaccaggtcctgtagctgcggcatggagacgggcggaggatgcagtgatgttctcgttgctattattgttactgcctaggctaggcaggttcaagaaagcacgccaaactggtgagttccgccatcggggatctggtgcttcgttgatggcgcggaggtaggactcaaggccttggcggcgggattcgcgaagattggcattggtgactgtatttgagagccaggatttggggggaaggggaagaggtggcgcgctgtttgtttgggatattaaggttgtatggaaggtcgtgaaatcggaatagcgcttcgagacggcgaaggaacggagaggaaggcgaagggtgatgttgtagattgtgaagggtggggaagttgtagaagttgtggttgttgggatggagatctcgaggggaggagccatgttgagaaatgatactctggaagctcagcagagctccctgaacagataaatgacgatgttggagctgcagctggagctgaggctggtgttggatgctgggagattacgccgataaggcttcactgcgctaacccggtctgggcgcaagtagtgacgcacctgcagcttggccccatgactagtgctaggtagctggtttatacccatgtatggactgaacaaaggtatcatattggtaaaacttctataaaacatagctcaccaaaaactctgctccgctccagtccataactcccgtgcctccaacagatcccgctgcccatagtgttctccaatgatggtaatgatcata

SEQ ID NO: 7311 - DNA, 482 bp, Emericella nidulans
tccaatacctctctaggaactcctcaatcgttgtaggcctcacctctgggcaaagcttatttaagcttccctcaacgacagaccctccctttccacaaaccatcgtatactgaacatcgattctgcctagaatatcttctttgtcaagcccatccagcctcttctgcaagtcccgcctgccaaccgtcctgacttgaactttcctccctataatcctctcaatcgacgcaataacctcatgaaacgatctcgtatctccagccatgcccaactctcttccaccccaaggctcctcaatccccaatgcggcgacaatgaaccggccaacgtcccggatatcagtcatcgtaagcttgggatattctccctcgtccgatagagggacttcaatccatccaccgtctccatcgccattatcgcgacgttgatgatcatgatgctgaccacgaagatggaaaatcagctccccttccctgaaccct

SEQ ID NO: 7312 - DNA, 572 bp, Emericella nidulans
gagcgttactccaggatcgagctcagataggtcgtctgcagatacaagggttttcatccttcttgcttgagtttgaaaataataaaggcagttccctcctggcacttgttgaacatacctaccgggtacctgtttccatattcagaccttttcagattcttactatatataatgcggtatataagtcataacatggatctctgggtgatgtcctcgctcttggctatagccaccgcgaccacattcgagaagcatgactcacccaccgtgctcttagcaccggcattcatcgaggcacgtatcctcctgatccccgcgtcctgacgaactaacaaaaaccagcaaggtggctactggatcaacatctctgtggggacgccgccacaacctctgagcatgctgtttgacgtgaacgcagtgtcctcgaccctcatgtacccagtcctagcacagccgccgtgcacggaggagtgccaacagaacctgcaatttggatcgtttgacccctcgcggtcatcgagctacaagtcgctcgaagacggacccgatgcttgggggagtgagatgtattg

SEQ ID NO: 7313 - DNA, 664 bp, Emericella nidulans
ggggcagtgggatagaatcggccggccttcagatgccccttttgatgatccgattgcgttccgacggcaggggacggctgacgaggcggcgaatgtagttgttttcctgttgagtccggagagctcgtttgtgaccggggcttgctattcggtggatggggggtggatttgatggtttcttgtgattatttctccagttatcggtccatgatgatctagttaagagctacttcttggtggtcagcgttgagtaggttagcgaagaatcaaggcttgcagttcgcgtcctcccttagagagaagataatggttcgtttatttccctatgtatgaccctggaggctcattgaaagtgggactccccttatttcttgggattggcaatttaggtctagcttccgctcttcataggatggaagtattattacatagtataattgcggactgtatgcgttcccatggtctaccatggtgtctagaaagacttgtacactaccgattgtcagaaaaggaaaaatctactgaagtcgtggttggatggcgtaaaagttgcgataaccctgataaaaaggctttctaagaaccacactactaggaaggtatagagctgagcagatctggtagtctagcgctaagtggtgatatcaagtaaccattcagtctg

SEQ ID NO: 7314 - DNA, 439 bp, Emericella nidulans
aggccagcgtggccactgaggccgccgtggccggcaagctggcaaggagaccgaagtgcgcttgttgacggcggccaggtcatcgcgcttaattggggtcggtgcgctgagggcagcggcgacgagggcgagggtgacggcggggagcttcattttgattaagatgagttgatcaagaaagtgatagcgagagagttgagagtaagcaccgctttggtgattagagcgaattaagaggttggattaaacgatcggacgcgcagcgaacgaaagaagtagaacgaattgagaggaagttgaacgagctggaagatgagatgatgggcaggagaacgaagaggtcgacctggtttatatagacatcgttagcggattagtcggcccaaatcagaagcactgccatatgcttactgatctcttcccgtctaggtcaaatggc

SEQ ID NO: 7315 - DNA, 482 bp, Emericella nidulans
tagacacgagtcgatcatatgctggaaactcacacaccgggcccaggacagcccgtgctgaacgcaaagaactctgaatccggagtagactatcacccatatccactgctgaaggtttccaagccgcaacggtagtattaagcacacgctaaggcgtcgtaagactagccaccagagccaagatgaacgacgccaaggatcgcagattcgcggtggtcaatcgcaaacgcagaacatccctcgcaaacgatccgaagtcttcttaggtaacatcgctgaaggtttcccgaccgagatgcgcgatcgtcgcccgtctccagatattttccacgttgaatgcgaccatcgattccccgacattccaggatccactgcatgcacacttctgaagaggaagaaagagaccagaaaatatatggtcacgtgtagaacccagccttactaagtcctttcggctgtttccgggctctgggcgcccgcta

SEQ ID NO: 7316 - DNA, 560 bp, Emericella nidulans
gctctccatgaggttgacaatgcggagagcttgctaaaaaccaaaaatctcattgcgctctttatgcaaacaatgaatgtaggtacctttgccacaatcggcaggctattaataactccaaaccacagacttgggactttgcgatgggagcttttgaagacttactccttaccttgttcaaaaaatatgctgaattgcttaaaaaacggttcagcgacgattttcaagaggtaggggatccaggaattcctggttcaatcctgctgctgacattccaaagatcgtttctaccgatgattatatgccaatgccgattcagacgcccgaggaattcgataaggtactcaacgtaagctggtatacacccagcgaaccgcaggaacaagcgtatgtgccctccacattatttacatctaatggtatactgactcatcagctttccctgcgttttgccattctctcaaatgtacccgttatgctgcattgatatccgcaatttcctcaatcaattttatttttttgcgaacgacgacttcacaaaccctgatataatcgacgcg

SEQ ID NO: 7317 - DNA, 747 bp, Emericella nidulans
aagagtggtatactgccaccactcatgcttctaatatcagagttttctggatatctaatttggttcgtgactgcttccgcgtagaatcccgcatcaaatcaagccctgcaccctggaaccacttatcgacaaaacaaatactgccacacgttcagtccatacccagacccaaactcctcatttctcattaatattgcatacctcattccgaatcgctttctaccacgaatccagcccgcaaccgtctacgattaggcggcgccaaagggatgtcttcttcagcgctctcgctgccatcattgtgctttctagggctggacgcatctgcaccgtctctgtcgacacttgtctcatccttgtctcggtcccggccaaatgctaggtcatcgtcgaagtaaagctcgtcttcagctgcagccatagatttgtcgatggcatcggcatcattagacgagtactcaccggaagaggctcgcgatggcatctccatatcatccataagtatgtcatcttcctccagttccacattggttccaccactgtgtctccgtcgctttccgctagtctcctcttcgccagcaatgttaggctcatttgagcgctttcctcgctttctctgccttgctttgtttcctgcgtcttcggttctcccaagcagcaatgcctttttgatccgctccgattgctcgttgcgcctttcttcttcaagacggaagagctcttccctatagtgatagacgtatttgc

SEQ ID NO: 7318 - DNA, 115 bp, Emericella nidulans
agtccatcactccgtcaatcttaaccgacgtcttaccgagcaagttcatccggggaagtcgttagatggagatcgctggccctgaagcattctcgccacgtacttttcatcagcg

SEQ ID NO: 7319 - DNA, 707 bp, Emericella nidulans
cttacccaggcaataacgataacggaccattgtcagaggactcgaagcctaacctgagacggcctttgcggtcaagcagtcttttcgccggcttcgaacagacaagcgatgacgaagctgacgcccctagggacgtgttcacggacgatgaattgctaaataggcccttcgcgtcttataaagtacgtaagggcaagcttgtctctgctaatgagcgccgccgcagtctagaggatgccatgttgcccgacctgacggaggatttgaactccgagtcttatttcgaggcaggagtgggtaacgacttaacaagccccccaggatcgtcttggtcgcgttccgggacttcaggattccggcagcaagatatgcgtaaagcagcgattatatccagcggagcggccacacatgtgaggcgagcgcgtagcccaagcgagccaagcatcgacagcggcagtggtagcaacgcatcaagcgtagcgcctccatttcctgtcccaatccggctcagctcgaggaaattccctcaaaccgggagcgatggacgccagagcccaacgcccacgtctcgcaacttctctgatcgcccgcgcccgagcattgttcgccgtcctacactgcgacgtgtacgaacggcggctgccatgtctcaaacggagcaggcaagccgaccgaccccccggtcatcaccagctatgtgaatgtcc

SEQ ID NO: 7320 - DNA, 679 bp, Emericella nidulans
attaataaagttctttatatccttcctgggagacataatattggagtttagtccgatgttttggcagtagtgttccgaacgatcaaaattggacctattggattgttggggattgttcgattgttcacgcctagaaaaatcggcgacgggacagtaactgtatgttttaattgcgatagaagttgccaacgtcatgccatctataaaaatggagtgggatgttcgtgtacgcagaggcactgcgcatgtgtagcaaggcatatttttaaatgtttcatgtcattgccattaatactaacattatatcgatgtaggtaacatacgactgtacgtggcttcaagtgccttagaaccaattagatggcactaggaatgttgtagtatgtataagacagctgtagctatctaggttctgtgtgggtccatactggtctaaccctaattcatcaggatatgtatcacgcattacattgcaattcctgtttctgcaactgtgtctcatctgttgtataaaattttaataagcattaggaagtgtaattcaacattcccttcctccaactaatgcttccctctcactcgtccttctgtccgctttggcaggtaccaagccaccaacgagacggcaaatcccttgggacgcctcactttcagggcttatccagtgtactttggtttt

SEQ ID NO: 7321 - DNA, 499 bp, Emericella nidulans
taaagtccaagctctctcgatccttgttctggcagtccatgtcgattcgaatcgcagaagcatttcgcatcgatccttgcgactcacctgggtcggagtcaaccttgaatcgcctgatgcagatttacaaagaaaacttttccccgttgtggccattgctgagtggaaaggagtttgactccagcgaacttcaccccttgctctttctgactgttgtttcgattggatgcatgtatgggacctcccaagaatgcaatttcggaaacaagcttcacgaacgagtccgtcgttgtctagcggcatctctgattgggcttgaggatgctgaaggcgacatactttggctcgggcgggcccggctgttgactcaggtcgcggctctatattttgggcaacggcgggctttctcttacgcccaacacgttggtgcgataactctcgcacaggcacggcgaatggatttgttctctaccgtgggccgtcctggcatgactgggga

SEQ ID NO: 7322 - DNA, 702 bp, Emericella nidulans
cacgttcttacgatccgagaatatgactacaggcagagaagggagcgaagagaacttcgagccctggcgggactcgaaagcggataatcatgaggagaccgagcaggaggttttggatcgcttagagagggaggagaacgaagagcaggagcagcttgagcgagataaaatggcagagttggaggagaagatgctggattcgaaaagggagatggcaattgcggatgcattggacgagatcaggacgagaaatgcgagaattgagcggagtgaggcactgggtgacgaagcggcgcttgcgcatgtacaggaacaggtggacgaggcggcgttgaaggctcagagggaggatgaagaagctgcgcggaaggcgtttatgacgacgacgggagagaaggtgaagagattggtggaggacgagtcgacgccggagcaggcaacaatatcagcgccacctccatccttcacacgggtcaagaaggcgaagaagcctctggctaataccctaggtatcaagaagaagcccaagccttcgttggtatgacatgtatgatttctttacgttttgtactggcgttccactgggcatcgatatgtacttctacgattagagcagcatatccaaatcaatcgatattatgattattcagctaaaccatacatatcaaaagcagacgagctcagaaatagcgcgcaaggaaa

SEQ ID NO: 7323 - DNA, 664 bp, Emericella nidulans
aggaagacggcactatgcggaacggacccgacaatgagtgaagagaggctgaaaaggggcgcaggacagcgggtagggcatgcggcgtcgaacaggtccaatgagggaaggatgattaggcccccaaattcttggccaaacttatacctgggcatgtcaaggtattgatgtaggtaacagtggggaactcataaaccgcttacactaggctgaaagcacaggatcgtcctattgagcccatgatcgtgcaacgccagttcagctgcaaacgcctgtgagcggatcacctttgcggtgcaatctttcaccgagcggtattacagaacacacctgctttgctccgactgtgctggatcaagtcaatgagggagagagaatgcgcagaaatataggatcctactcacgtatagaattcgagaaaacaagggacgtatcatacgtcctcctcgaactcgactagtcgcgccaatggttttgctgttctgtcatcaaatgtagtcgctctctggctcgatccagagaccatgcagatacagttgctcatctgtgatggcattgctgggatgccgatgtgactggggcgaaattatcctccatacagttaagcacaggaaagcacagcagaaacggttatattgatgcagtttctgacacggagtcttcg

SEQ ID NO: 7324 - DNA, 465 bp, Emericella nidulans
aagggtacacttctcactaccttgaaaccgagatcgatggggagcgtgttggtctgaccctctgggactcccagggacttgagaagaacgtcgtcgacatccagctgcgtggtgttactgggttcctggagagtaaatttgaagaaacgttgaatgaggaaatgaaagtcgtccgttctcctggagcccgcgacactcacatccactgtactttcttgattctcgatccgtcgcgactggatgaaaatattgcggctgcggacgcgccgctcaaggaacgcctcgggcgtctgattctaaagttttgggagtcctcgacgaaaatttcgatctccaggttcttcgtaccgttatcggcaagaccacggtcgttcctgtgattagcaaggccgatactatcaccacggcgcacatggcataccttaggaaagcagtgtgggacagcttgaagaaggcgaacatcga

SEQ ID NO: 7325 - DNA, 627 bp, Emericella nidulans
catcagaataatacctgtacgaataattagaaaatatacggccgggaatcaacctggcgggtttgaaggcgaaacaaagctcagcttggacttgcgttagattatgataaaagggcccaaaaaaaagaaaagaaaaacccctaataagaggggggggggaaagggtctcttcactactatacccgtacactccagccagagtctggtgcatccagaccgacatccagaccaggattacaggcgcaagggtcttttcacagaagtattgtaagcaagacataatccgagtcatcgggcaaagctaccgaactacggggtgcgtgcaggagaaatgccatgcggccgttggcctcaaaactccgccagacgtcatgatcgagttggattccctgggtcgtgacacactcaacaagggatcttaaattctagaatcctgtcgatccggagcgactcgatgaaccgtggttgagagaaatcaggatcggtatttggaatatgtatcagatccgcatccggggctgtgcgtcagccctatctagccagtcagtacacgagtagccccagcagtgtgattggccacgacagaataaagtatttcaaatccaaggcttggctgaagaagggaga

SEQ ID NO: 7326 - DNA, 1041 bp, Emericella nidulans
ggagtcatatcaaacctgctctcccatcccttgtgagccgcgctgcctttgcgcgttggcgacccccaataccgtttcagctcggccggttatcagccgccgcagcgaacacctgattgctgcgtcaccagcaaagcttcctctcagtcaacgctctcccgactgccaacggattctgaatcgaacccccgcggagccgctccggatacaaccacgaatatgaatggagacggcgtcgcgaaacgcaagcgcaactccatctccgcggcggcggagcggccggtgaagcacctgaagcccgaaaactctacactcacccccggcgacaccaccccagccaatgggaccgtttacgatgtcgaggacaatgaagagctagggccgttgatggcgattgggccgacgcaggcggattcaccagaatggcaggctacgattgaagaggtagtgaagagtgtcgtctcaattcatttctgtcagacttgttcgtttgacacagagctgtcaatgagtagtcaggccaccgggtttgtcgtcgatgcggagcgcggttatattcttacaaaccgacacgtcgtctgtccgggtccgttttggggatatgtcatctttgataaccatgaggaagtaagtcttctgctagtgaccttggattcaaattacaacctaaactaataaatcagtgtgatgtctatcccgtgtatcgagaccccgttcacgattttgggttcctcaagttcgaccctaaagctatccgtcacatgaaactcagagaactgaagctgcagccggatggagcccgtgtgggatcggagattcgagttgtgggtaacgatgctggagagaaactgagtattctctctggtgttatcagccgactcgatcgcaacgcgcccgaatacggcgatggctacagggacttcaacaccaattacattcaggctgccgatgcagccagcggcggtagcttccgcaggccgggagtaaacattgatggaaatgcgatcgccctgaaagctgggggcttgcaaccgccttttc

SEQ ID NO: 7327 - DNA, 116 bp, Emericella nidulans
gccacgtagaaacacacacaaagtgtgagacccagctaaggatcctgaacccacgcagtccaaacagaaagaacacgaggcatccctgtattattacaaacggacgtagaaaagta

SEQ ID NO: 7328 - DNA, 860 bp, Emericella nidulans
gtaccaacaccaacgctttcgcagtattccactacttcaagcggaaacctatccgccgccaacgcccaatcatcctgcccctcatttccaaccaacgcaatcctggcaggcttcttccctggtgccgtattcggtgccgtggccgctctccttataacagtctgcatccgtcggcaccggcatagcaaccctccacccggcgaaaaggtggcacaaaacaccttccgcaaatctacgggaacgctcattggcatatccgagcctatcccgtcgcacgagagctccttccgtacagattttctcctaagcacgaattccaagcgcaactctgagagctcccgctccgttctctctcgcagcaggtcccgcgtgaagagcctatttagcactccccaaaagccgcaacacgtagcttcagagggcaatataccagctgtgccacctgttccagctatcctctctttaccagttactccaccccagcagcggcaacctagtcgccagcccagtacagaaagtatccgggtatacacacctcctggcgtattcacgaacgcaccgtcccttaatccgtctccgtatccagctgatcagcggcccaatacgacactgactgagattctggatcgggtgcaaacgtcagtgcaagctgagcccgcgtctgcgagcggtgcgaacagcaagaccgatagcacggccacaaacaatgcatcacagcgctttctcctcccgcccccccagcaactggggcggaggaaacagttaccttactgaggggtgttttgtgggctgaaataatccatctagcaccagcgttttataacctcccaaggccatgtcagcattgtatgttttaatac

SEQ ID NO: 7329 - DNA, 587 bp, Emericella nidulans
gaaatgctttgtgcaccagtggtccgaatacccgtttgatttccactgtgtgtagacatgtaagagcgttaaatgatctgattcggggacgaagaatttctcgcgtgcggcgtcagattcttcctgtcgctctttggggcggtagaagacgttgggcacagaaagcatcgagacgatcgtgagcatttcctcgctgcaaccatattgctccgcggccgtaataatgagctttgcgagaggaggatccattggaaagggtgtcatttgccgccccaaatgcgtaagatcacccaggttgtcgagagctcctagagaccagagttcgaaaagagaggtagaaattgtttcttgaggtggagggtccataaaatcgaagtcaagtagatctttcacgccgagggatttgagaagaaggaccgtattagagaggctggttcgctgaatctctggaatagtttgcaggtacatctcatttttgtatgcacctccgtgtagagtcgatatgctttaccagggcctgttcgaccggctcttccagaacgctggttcgcattcgcttgtgaaatcggcgtaatttgaagggtatc

SEQ ID NO: 7330 - DNA, 734 bp, Emericella nidulans
tgataacccagatatccaagacaggggcctctgaaggctgggcgatagggaacttagcaccccgcccgtcaatgcaagcattctaaccatccccaagtaggcaggttcaggcggaggcttgaggactggctggggaaagctttgacgggttatcagacaaggcgcatggagaagataagctggagataagagtatttgtccgtcatggattgtggatgggagtgcacaggattatcgagttcaagactcgatgacatcctggttggatatgctgtgtttcagagggtttttggtttcagaatgaagcgagggagaagaaattccttgcaggcagtgttgcacgaagccaagcccagctttctactctctgctgtctactccgcaccactccccctcatcaccgccagcctatatagcgaagactgtgctctttgggtgttcacacagcacgtactggcattcacagagctgaagacaaccttggaccaggcgatggtctttaatgaacagctaacctaacctccgtcagacaccgttatccggatcctcgcacttcgttctaggtaaaaatgtgttggtattcccagctacagaaagctgccatgaaggcgccctcaccaacttactgtgctcgtactgaaagtccaagcgaaagatagcgagcatagacctagacaacagatcgacaagtgtcgcagtgtatcggattcccatgttcgactgcgttcttacga

SEQ ID NO: 7331 - DNA, 806 bp, Emericella nidulans
ggactccctgcaccctattgggtgcgcctccgtattgaacacccagtcgtccaagctgaccaaatcggtctccccaaatattagatacagatacttcaacgtctctgccatccagaaactctccatgctatcttctctctttacatttccttcctcaaccataacatcccgcaccgccgcattcccaaactccgtctttgtaaccgcttcgatagccgtgaacattctccatgcagcctcgcggtacttttcgtcccctgtaatgcgccacatatagaagatactctccattgcctcaggacgcagaaagtagtgcccatcacgcacgtaggtgtagataccaccccttgtttcgtcccaaggacattcagccactgacggacaagccggcacggtgaacatctccggcatgatacctagcggtgaattatcgtagtaccagatacaaccgtctgtcagcttccggccggtgtcgaggtacgtctggtttgagaaaagcttcccggcgagcgcgtacatcccacccacaaaacaggcgagatgctctgtccggggctcgagtcccacggaagagctggttgcgtgcgcgaccccgggtaggaggatatctgcatgatcaggcgtcatcggtcggaagaggagatgtcgaatcccggcatctagtgcgtttcgcgccagacgctcgtactgtggccctttccccacaccaccgaggagccgatacgtcttgccgagatactcgtaggcgctatcggcacatgacgctacgaccgacttcctatatgggcaaccttcacatgcacaat

SEQ ID NO: 7332 - DNA, 519 bp, Emericella nidulans
aaagaggaagctaagaggagctgatagagcgataagccgcaaattcaaaccgtgagcctgggcaataagtcggatggggtagtgctccaagttctcaggaagagattaagggccaagtggaccgccaaggaagagtatgggcttcttatcagacacgatctagataacgagtcagattcggagataaacggcgccgggcattgtattatttttattcagtagtcacagcaacagtggtgatagaaagaagtagtcacagaattgaataaagccctcccgggaatcgcaatctcatacatagtggtatcaaccgtcatccggtcatatcggaacattattacaacaagccacaacggacaaagaagggaaaacggatatcatgaaagccacccatcagataacacccgcgcatgttgagtcagtgtttggcagcactgtatctagctattacgcgagcgttgccgtaaggttgaggtcgatggtgacacattggcgctaatgctttggtgaaatcgggat

SEQ ID NO: 7333 - DNA, 572 bp, Emericella nidulans
ccctttgaaactaccaagagaatagatttcgtcaccgctaaacaaacctcatatacaccatatttcgcctagcccaccctaccagctctcacttgccgccacaatgccccgcacgcccctccgcatcgctgtcctcgaatgtgacaccccgcccgaatccagcaacgccaaatacggcggctacgtcggggtcttcaagacctcctctacagcagcgttagagaactttataaacaagaagaagtcgacccgtcttctatcctcgagatctcgcgctttgatgtcgtcacggcacaaaactatccggatttggcgaatgttgatgcggttctgttgacgggttctagtatgcctacctcctcctatctcttgcacacgtggttttggatccgtattgcaagcgcaaaatgctaactttgttatgtttgggtccatacagaacacaactccttcgaagaccacccctggatactaaaacttgttgagttcactaaaaaggcgatcgagcacccacgtgtcaagctattgggtatatgttttggacatcagatcattggaagagccctcggtgt

SEQ ID NO: 7334 - DNA, 150 bp, Emericella nidulans
taatactcaaagacgtctagagtacacaaaacaatggatgttatagcaatattccagagtcgattaatcatgtgaactttgtagtcaatcctgtcgcaaattcataactggatcatcacgtagaaaagcttagttaaaatcacatttgcc

SEQ ID NO: 7335 - DNA, 363 bp, Emericella nidulans
agaaataaacatttggacaatttgctataaaataggaacgggttggaatacgaggggttatcaatgatagatggaatgcctgagtagggcagggcaagtgcagagaacctatgacggatagctgcttgggcccaagatcggtgccagatattaatatcagctgggaatgtagtgggattaacgaagtaaggataatacaggttaataaagtaaatgagacttggtagtagggtgtatagtttcaaataaataataagagagtatggataaaagggatctcgggtagaaagggccagattataggaactgggaaatagaaaaaacgaatttttaggttttggaacatggagtgtgaagaggttg

SEQ ID NO: 7336 - DNA, 1050 bp, Emericella nidulans
catagtactgcatatccttgcttgcttagtcagtatactgcaataaaggcagcatcataactatttttagactttaggaaggaatagaaattaatattaatagattaccagggctgctcagggattagaagtagatttaataagcctagtagtaggtcctgcagctccttagtatacttgcagactatatagttgtcaagatattgtgctatattacaactctatattggctagtagtaacaggccttgactaaggcctttatctttgtatagcctaggtaagctgtagatagttgctaatatattttatctagcagataggctagaagattatctttgtctgggacaactaggtaatcttagaagagtaattacccttctttatctaatatctaatcctgttattccttatatgccttctcctagtatagctctagtagtaggctgctatagtttcttgctaaaatataatctataatatacagttctctgtctaatagtactatcttggtattttttcttatctctgggggtaattttgcagggctctgtagaagaactcctttttttaactactctagacacagcagtactgctgtataatcttctgtattatctagtatcttctctggataagaaagtatattagcaagagtattttctttgcccaggcagtacagattaggaaataaaattaagaaagaaatttagactagttagcttgccagcagttaagtctctgctttattataaagtattctaatgcccagtagtctgtatagatatcaaagtaattttatactacagaccctcaagctcagccctctatttagttagggagtatataattactagtattttcttattatggatattatagttcagttctgcggtacctatagtctttataaagtatataactaggtgccagagatccctatacttctattagagaactctggctactactccctacaaggtatttgtttcaacataggtagggagctgtagatcataatagtgcaatactagtataaaggttagtatata

SEQ ID NO: 7337 - DNA, 752 bp, Emericella nidulans
gcacgctctgccactccccccgcgtcacgtcgagaaggtcaactcaatgggacaacaaacatttcgagtgttgtgacttctcttcagcgtcgtagcggtgaagagctaggacaaacacatcctcccggcttctgactgcaactcatgcttcaatcctcgagtggatccgttctgagcgtatgagcttgttgccacctgagggaagtgattacgataaggtgctggcctgggctcagcttttcattgatcgactacattcctttgacatggcgattgaacaatttgccggagacagctatcttgcagcgcaattatcatatggttattgcgcaatgcttctcgaggtacgtatcttccctacttataacagtaaactctgacggaatctcgttatagcttggccgagagaacgctgctgcattgatgctctcctttggcttcttctacagcatctccatgactctagtaaacctcctagagcggacggagctctttggtgtctcccaagacatccaggagcagctcatcctcgctctagcggacctcgtcactctcgtcgcaagcgtttcgacccacttccacaaggcgattcgtgggatgacaacggcttcggtctctgtcaacatttaccggactttccctggccagattcaaaccttccagcaacgctgcgagaggattgccgagtccatgtggagacatcagcttctcagagagaatctggatggagataaaggcaagttgaaccgagc

SEQ ID NO: 7338 - DNA, 736 bp, Emericella nidulans
tcttcttcttctttccctctgtccctttctggatgatcttttgtctcttggactctatctcctgttcgtatatctctcgcgcagtctcacccttcttgcgtttattttgcttcgatgacttgacgctgacggttgcggcgccgccagaacggatctgtttctctgcttcttcccaccctgcatcgccattacttatctcgtatctggaggctgcaaatcagttattgttcgctcgcggaggactcgctttccggtatatttagtaagtaaaagagaaatgactcacttgtcgagaggtaatgcatcaatcagggcgcgctgtttctcgcgcatctccgcgttgatttcctcaccgccttcacgcagctcgtcgtcaagactagtctcgaggggcttgaagcgctcgtcgacgacttcgtcatgtgcatcggcggcggctgaggtggcgggtacattctccgcagggagggtatctgcgacagcgctctcttcaagagagcggaagtgagtggagaccttacggacgatcttaaggaacatggcgagcaattgagatgaggggagactgagttccttctccacgtcatcaagtgatttgcgttgcaaaccgatggcgaggaggatggactgctgcacaccggagaggttgactttaccagcaaggcggccggagaagtaccatgttgcaatgatgggcaccatatctaggatgacgtgctattcgagaaggtttaaa

SEQ ID NO: 7339 - DNA, 502 bp, Emericella nidulans
acactactaagtagaccaagctaggatccgacggacggcggatcggagttaacaacctacgcggaacgagtacaggcctatttggagcagtgcctacccgacatccggacagaactggccacagggatactgcgatgagtgcagacctgatacagatggggaccgagctatggacggagggcacagatggagggactattagcactattagcagatctacaacaaacaacgcaacatatcacactgtacttcataccagaccagacacctaggactggacgtacggtgctgatactcctgactggctggcgggcataaggcgcagaacctgggtctaggggcgaaatgacccatgaagacggggcgaggaccctggaacgaaccacgatgcgacgtcacagcctaccgattacattgccttttgatctgggaagtgaagctggaagctgaggctaggagcagagctgccacgtgttaaggagtcagcaattggtatacactg

SEQ ID NO: 7340 - DNA, 285 bp, Emericella nidulans
ggacctgcatccttccccgctcccctccacgctcctagtccttgccctctcctacggacgcccgcctctgcgagtacttagaggtgtgtcagcagtctgcatcttctccctcggcctcttcagctgtctagagccggtcagctgctcctggccgttcgcgccgtcgcgcggcccgtccctctccttactgcctcggcgccccgcccagtccccctgtctctgacgcgaagggtctccgtactcgaatctcctcggtgtacccgtttccagcatgcgggattgccc

SEQ ID NO: 7341 - DNA, 425 bp, Emericella nidulans
cttctctaataaggacttttatactaactagtatatttagttataagtttttaactaggtaggcttaaatattaattttagtaaaattataataatcaccttccagggttcctgggaaatataataaaaatataataattttattaaataaatcttttaatttaatactcttaattatgagtgagctagatattttcttaatctatatattcttaatcttttaagcaaagtctatattaataattatctagaaatattctatatctaagcagatattttaatataacttaataatatttaatctaataaatatagtacagctctagtatatctataaatattctatttttaatagtagctagacttgataattttaacgataattacgcgttttattagaactaatttttactaggttaactagt

SEQ ID NO: 7342 - DNA, 1042 bp, Emericella nidulans
tacacgaccagcaggatagccatgtttttatgtggaacgaattttttctgattacgcttgacttacgacgatttggatgtgttctggcagaagaaaaagagaggaaatggctactagaccagactgaaggaaggagccgcatgcgactacgcattgtccccgacgacacaaaggagagacaagactatcaaccgaaacgcaaagcatcggaacctcctgttgttaaggtggacgcatcagggccctctaacggcaagactcttgctcccccgttggatgatgagcgatcaactgacagttctcacggcattgggcctgacaatgcgagtgtcatggaagaaagcttcgagatgatcagtgatccagcggcggatctcgaagactatgacgacaagaaccggaaagttatgagaagcttacatcgcggcgatgaagtcgagaatctttgcaatgtttcccggattgttgggttagaagcctttgaagggctactaattcaaggcaaagaccatatatacatccttgacaatttcttccagagagtcgatggcgaaatagtcaacgtttcgcaagctcccagtgacgagcgtgacccttacgtccgcatgattgccggcagagaagccagtgagcgtaaaccccaggaatacgaaactagaagctggaaatggacggacctcgttagtatatccaagagacgattcctgtttcgggatgttgcgcttgagatcttttttaccgatggaagcagctatctgttgacgctcatttcatccaaagctcgagatattttgtgcagccagcttgctgcgaaggctccgcaagttacaggaaacgttggacactcgcggccggaggatatatggcggtttgagactctcagaagttctgaagacgcgccacaatctcttggctcaaagtttgccagcgtcttcgggcactcgccggtttatccagcaactcgtaaatgggtaaagggggagatctccaacttccattaccttatgttgatcaacacactcgccggtcggacatttaacga

SEQ ID NO: 7343 - DNA, 606 bp, Emericella nidulans
caaccacaaggacagccacagccacaacccgcgttggccaaatcgccctccaacggtctctttacggcaaccatgcccgcctcctgccacccgtcccccttaacggtcggagcccccaaagtccccaagatctcatatacgctcttctgcctccgcgacagcatcacaatcttcgcctccttcaacatccctgccctcatcgcgccctcaataccagactccatcgctgcaacccccgcaatgaaagccgccatcgcgcagtttagttgtcccgccctcatgcagttcgtcagcacgcccatgcatcttttgggtttggatctgtataatcggcagccgcccggcgggcttggatggagggaaagagtcgggaggatcaggagagattatgtggccagttgttttgcgcgcatggggaagattgtgccggcgtacgggataggtggtgttgtcaatgtcaggatgcgcgcggagttaatggggtggttggagggacttgagcccgcatctgaccgcgcattacacccattttagtccgtgtcctcctgagatcgtctgctgtctgaaacgttgttgcgtggcctgacacaatcatctatctaccat

SEQ ID NO: 7344 - DNA, 550 bp, Emericella nidulans
gttctcgatgattcgtgacaggagaagggcttgctgttgctcatgtgggttttcctggcaggagtcaaatcaggttcataaagaacgaataagtgcagcctcttttcaagcttaccattgttgcgtatcagactctgttgctgttgttgctggaagaaaccccatgttttgtcgattatgcagcaaagtatcacgtgatttcgactgcttgggtctggcagctgatagcgtctctttgctaaacgtttcacaggtagagcgaggacctgtgaattacctgttttggtttagtttgcctgcttcgggatagccgcccgatatgtggtatatcatcatcgcccgccgggacattttgactctcatatacacatttcttttctccagtttgcggttgccttggtttagaagaaaaattgttgaatcaccaacagtcatgcactctgggatgaacgaacatcttggctcttacacggacaaggatgacaaacggctaaaccttaaccgtttgtgatgacggcgagtctggcccagccgagtcaatcattgcctg

SEQ ID NO: 7345 - DNA, 1360 bp, Emericella nidulans
gcaagccgccgaaaaatatcatccaaaaggggaaaaaccgggcgcacaaattaaggccctattttcaaatgggtccagaaattttgttatttgtcccacccacaattttttttaaaaccaaaaccccgggttcctttgatcagggcgagggatggtatcagggccggttttagcgttgtaataccaaaaaaaagatctgctcccccgggtcatttgacagtcaccgaaatgaacttggccgcggtgtctcgaatgagccaaaatccaacttggcaaaaagcttgtgccagccccgtggtgataagaggggcataacaaacctttcctcatcagaccgaaacggagctcattctttgattcgtaggcgaccctttaccgatcctacccgagcccctacgccttcatctgccgcaccaagcgcgtcgtcgtcctcctcacggccttcctcgtttatcgcctcagccgcggctcctcttggttcatggtgcagtatatttcagcccgctataactggaccatcgcccaagcaaatctcctcatctctttcaaaccggccctcacaatcccgctcttcctcttcatcatcccctacatctccaagcacatcctgcgcggcatgaactccaacatgaaggacttgaccttagcgcgcgcaagcattatcttcctcgctgttggcacattaggaatcggtctttctcctagcatcgcgatgctgatcccaagcctgatcgtgcagacctctgggtctgggttcgcgtacttagcgcgatcgctaatcacgacgctagtgaagcgcgaggagacagcgagactgttcactgttatcgaggtgttgcaggcagtcggcaatgtgatcgctagtttgtcaatcacgacggtctttcaggtgggattggattggggcggtgcgtgggttggtcttgcatggatgatgacctcgacggcgttttgtcttgtaggtgtgtcgatttggatgtttgagttgccgccggctgtggagaagatagaggagcacggcgattgatattgctgagcatggatccttttaattctctgaatatataaatattcatgtggttttctgtatataggtggcgtttcgtttatataggggcgttgggccgggctggactgggataggttatataccaactagactggattgtcaattatcaagttatttatcgagtatgcgactgatattctcgcgtctaatctggtcgagaagtgggcgtcttatactccaggtctgggtaaaacctcaggcaccaaggcaacatttcacatgtcagcctccagcaacaaacattagtgttgcgatacgatagctgttcacaatcccacagttgaggatcgc

SEQ ID NO: 7346 - DNA, 867 bp, Emericella nidulans
agcaagtgacatgttctgagaggtcttggatatcccggcaaatgtccgctccctgtcgttgtgccatgccggcccagacgtgaattgccgcgtctagccattaacgcagattgctcaatgaaaatgcctcccccacataagccactgctggttccgtgaagaaattgtcagccgctcggtgagactagggcactcggattggttcctgcagattcagcccattctatctcagtcttaagttgagaccgtttgacaaatgttaggctcactgtctgagctagctagtggcaggatcactcgacagagagcggctgcattcatcttttctcttaacattcgatagtcagcctaggctctttggaccgctcgttcctgcaagtaacagactggcccgtcgcggtagctttgttcgttctacaagagtcataccaccatatgagtagaacagctattacagtttcagtatgtgagagttgtttctcatctgcttatcttcttggctttcccatggtattacaatgggtattacggaatggtaagagaatctacctgtttccataatagagatggacccccaaattccactcattcaccatcttgttgcagtaatataaacctaagcactctttctctaagagtgcacgcacttttctggggcaaatacagtctgggctatctggatagtcagccactctagcaccagaggacgacgtgttaggtgttcacagaggtgaaataggtctattgctaatgtaaacatggtttagcagccaggactgttcttggcaaagtctgctaggaaataaggctcaaattgctccaagacagacataaactaatcaaacctgtctctagattaggaaaaga

SEQ ID NO: 7347 - DNA, 895 bp, Emericella nidulans
ggcgagtaaccaacttctgtgctccagatcccgttcttgtcaactgtgtgatgggctttcttgccgttgatgaagagattctctgcagtctttggtgccccgattacctcgaccggtgtggtggcattgaagtcggctgtaaggtgaagatcacggcctttgacataagcagtgcggacgaggtaaccggctttaacgataacagatgcagcaaccgccttctcggtggcataagggatgctggtctctgtaccgagctgcggcacccaataattgtatgccgagtttcggtctaacttgtcagtcactatgcgcataattgcctgggccacgtaccgagaaggaatatcttcaagtctccgatctgaacaatgcgccgagcaggctcaacgtcccaagcaactacgaccgcaccgcggatttgcttagaagaaatgcccgaacccaatccttcgacgaccttcacttttgccttagaggagaccgcaagttcgtggtgttccccaggtcctccatacaacacaagaactttgccgtcgtggaacttcttccatgtgaatacttcggcggttgagtacagaattttcgtaccagcgacgtcgtaatcaacaaggtgaacctttgaatcacgtccgttgagcaccagagagcctccgagctgcgggatcgtcagctgtcccgcactggtcgggagccgcagtttgtacggggtagacgcttgactgctatagtcgctgtggcggagtacgaagaaagagccggtgccgttcccgagcaatggagtcacagttaggtcggctgtattggtgtaagtcgtgttcgttaatttgcctggggtcgccaggaggtatcccggggaggacttgatgaagtttccaagcagcttaagctcgct

SEQ ID NO: 7348 - DNA, 566 bp, Emericella nidulans
atgatgccagttcaacacactcttcactttccctcaaaaggggcccctcccgtcccaacctgaacctgccggcaaacactcttcttaccattgacgacgcgttgcgcaaggacgatactcatgttgttctggagctgctagaagatttgaagacggttgcggacgaagcgggtgagaacgtctttccaaaggtccttcgaagccttcttcagcgggccattcattatcgctccaaagcatgcatttcggccgttattggccgttctggctcccttgaggaagaagacgatattaataaacgcaactgtatccatcgtttagtgattgcgattggtcgcgcccagaccaccactgactctgagcagtcggcgtcaatggtcttggatttccccatggataccccaaactacattactcctgccgcccttccgacacttcagccccctcgttcatttgcgaaggagtcggatcatgtgcagcacttgactcggtctgaccctgcggtctcggttctggagtatttgctagaccacctgcgaccagaccaacgcgagtctctgctttcg

SEQ ID NO: 7349 - DNA, 603 bp, Emericella nidulans
gggttatgcctttgccttagctaaaaggtgatcggacaaaagagatttttttcttaccccagtcttttcagctcatcggtggtctctatggtgcagtacctacatcaagatcatggcacgcgtattatttatttcggtcaatctgccagagctgaaacaagcaggactggggacagggtgaggctatgcaaaaatgcgtgcgtttaggaaaagacacatatattgttgcgcaatagcgtatttgtaggccatgtgtctggcggagcgaagaccgtcgataggccggcgggatccctggggcaggggtctccgaaaacgtgacctcggctactcctattatatctgtgacctgcgagatagcatactgtcaatcaataattactcctggagaatgaagttagcgtgcagcagtgagtagaagtatatatagcgaagcggggctgggtaccagagacaccacacagtaggcgtggaaaatccatacttctttgcatcgcatccgtattcgagtacagacatccctgaagcgaggctatcaactgtaattaactattaaaaggaaaagacaggctgtttatttcaagtgtggggtgcgggggactg

SEQ ID NO: 7350 - DNA, 658 bp, Emericella nidulans
atcatccgctctatcaccaacaggcacagacggtccagccgaggtatcccgcgaaaagattggcgtacggccatctacatccgcgagggcggctcaatcccaacaattcgttttctagaaaaggagttctgtgccccagcggccaacctgccttgtggacaggcgagtgataacgcgcatttgtataatgaacggctgcgagtagaaaatctgtataaaagtcgggaaatcttcagttacgtgttttcacggttgccggaaaagacttgattttttttatttgtttagcaaagcggtgacagttagaacgctggttagaacatagtcttctcagtcccatactttgccatcttaatcgcattccctcaatatggatctctgtagagccggtgtatgccccaaaaactttgtgggataaaccgccgcgtgccttgaagggaaggtgggcatgttgctgcaagccttcttactgggacgaggaatcgagttgtagtgttggtaggcgagaggcagaaaggaagaaaatgatagagaaacaaccattcttgaagatgttgcatgtattgattggacatcagggctaggcagaaatgattgcgattatcatgtatagtatgcctctaagggcgacacattaggatatggtctacgctacatt

SEQ ID NO: 7351 - DNA, 408 bp, Emericella nidulans
gtagtccagtccagccgtaataacgttgaattccgtagattagccgtcgtatcaccgtccacaagcccaaatcgcctctctctttcgagaatgttcaatgctgagggagtcagggagcacgaggggaccaaggctccaggcccagacgtcatgaggcgtcggtccacaaacgagacatggtcagctgattgatcattgggactgcctaaagcatcgtcatcgcctctgtcatccaagaccatcctctcaggcacaccttcttctccacggtccacgcgcaccgaatctccagggaagcatcagagaattctacgcatctgccgaaccacacgcgactggccactcgtttcccgttttgcaggcgtcgacgcgcgcaaagatccgggcccccgtccgtttatcccgtgg

SEQ ID NO: 7352 - DNA, 800 bp, Emericella nidulans
ctgtacatatatggccggtacatcgatggccagcgatctcagccacatatgcatcacaatcggatgagcaaacttatatttcgcgcagagctaacatcaatcgtggctcaagcggccctcgactttgccaacggcatctgcggcggtgccggagtcagtgatctccctcagtccgccacctgtgctagcgatgcaaccagcaccacagccaccgtttcctctactgtcacgaacacagagaccactaccaccacggccgtcacttcctccgaaagtgatcagacttcgacagaagctgcctcctcgacctcggccgatacttctactcagacttcaacctcgactgaaactgagactccagctagctctgaggatactgacggtgcaacgcctctccggggcaagagtgtcggtgtccttgctggtattgttgccggcattgcattcgtgctctaagagatcgggacgtgcttctgcttgtctgtagctggcgtgaccacataccatattggtcatatgaggatggagcctctgttcgagtcggactgaagtgaacgatgtactgcactgtatctattatgctctacttctgcggaaagcacgaagagacacaacgtactgcgtaatgtagtgaggaaatgtcatttgatgatcagcttcaatatcccgttgattacaataaagccattctgccttctaaaaggctatagatacagacccagtatatcgaaaaactatgagtatcgttcgcgctccgcaaccgcaccgcgatctcctgcctctattcacgccgcgtgatg

SEQ ID NO: 7353 - DNA, 1051 bp, Emericella nidulans
acccggagtatctggaggtctctgaggacccgacttcgaatcccggcgatgcgaggcgctatttcaaagaactatttgaatgtcccgtgccggcgacgcgaaaataagagattcgacgatgtggagaaggcggaccgtgtccgcaagcatttcccgctggtgagcatgaagggttgcggcggcttgaagagttcttagagaaagcgacacttcatgatgatgaaaggaactttttatcgggcgagacaacgtcgaaactaagtccgtactttgcaagcgggtcattgagcgcgcggacggccgttgcgaaggcacgcgaagcaaatgccggtaaaatatctcgcggcgaggccgggtatatatcttggatcagcgaagtcgcttggagagacttttacaagcacgttctggttcactggccgttcatttggtaaggcccacctccaccatttagcacagaaagctgatgctgtcagcatgaacaaatgcttcaagtttgaattcacgaacatcgactggtcatataacaacacccacttcgaagcttgggcggccggcaagacagggtaccctctggtagacgccgcaatgcgccaactacacgcaaccgcctggatgcacaaccgctgccgcatggttgtttcttccttcctctgcaaggatctgttgatcgacctggcgccgcggcgagcgctacttcatggagcacctcatcgacggcgacttcgcgtccaaccacggtgggtgggggtttggctcaagcacgggtgtagacccgcagccctatttcagaattttcaaccccatccgccaaagcgagcgattcgaccctgacggcgagtttatcagacgttgggtgcccgagctacgcggcgtggaggggaacgctatacatgcgccgtatgagaggggcgcgggagacatcgcgagggcgaatgggtatccagagccgatccctgatcatgcgaggcagcgcggtgttgaaataaggaagtataaggatgctgcgcggggagcataatataccaggtccagttcatatacggacgcg

SEQ ID NO: 7354 - DNA, 984 bp, Emericella nidulans
cctcgcgtcaaggatgccgcttcttacaggattgaggctctcatcggtgaggtcttcagcaatgatgaaaactctggcagggtgtgtcataggccatgtcccggacaaagaatgactccgactgactcctttcgcgggggatcccctccattctttggggggttgtcttcgagcgtcagattgaaaaaggcggtattcggcacgtgtgatgtaaaggaattgtcatgtacgttcctagctgtcgggctttgcgtttcagactgctcgatctggccgtttacactgacggagggcaccggcgggcgctgggttccttgtgcaacctgcgctcgcggcgcttccggtagcggtttccgcgcaactggagacgtcggcgggtagtttggattccgcggcgtggactgaggctcgcgatgtgacggagaatgcgggggtgaagacggatggtatacggggggaggagacggaagagggtgaggatgaggataggtgctggctacagggctcgccattgtcgcgcagtcgaagatgcacgccaccgattttggagtaaaatgtggccgagattcaaatctcgctgtctagcgagagacctgggtggatgcaggtggtacgaaacgagaggtgcctatgattcggacatggagggaggcgtaggacgaggactggcgcggttgaggaggccttggagcgagcgagcgaccgaccgggcgagtccagcgtgtgagaatgtgagttgttcagtcgacgaggaacgtggaagagcgaaaggttgatcgtcggggagcttataagacgggcgatgatcggtagaggaatcgcgggcccaccaacgagcgacaaagacaggactctattgagatgtcagcaacgaacggcgaatatacgacgacttggggcgggacactcataccgcaaagcacaaaggcaggcaataacaataaacgaaggtatggaatagagacggagacacagaagaaaaag

SEQ ID NO: 7355 - DNA, 716 bp, Emericella nidulans
tcgcctcatttctttcgataaacccccaaaattgagaaaactgcatgatcaggaatcgctcgcgggccatttggttagattcgaccctgcgtaccccggtcaacggccgtctgtctatatcttccgtcagcactacggagtacggactatagtgctctgcaagcgatgtgatcattggtcgccatctcgcggcgcccggagtacgatcgttcttcgtttctgaatcccacctccgtgagctgatctcgtttcacaaatgattacggaatctggggatctgatgggtgcaaggttgcccggttggcgctatctatctccgcgccgtcaaagcaagcggcggctgaattgtgagtagcgcagtcgtctatctcctccaggactcgattatgctccgcgtaccggaggactgtgaagcggccgaattgcccaactgattgctattttgacgaagcatggcgttggctcccggtcaaatcgtgtcgtcttactcagacttccattttgagtgctcggttgcctactacggctgcttggcccccaacagacagagggcttctttgtgaagttcatcttccttagctcgctaactcatggccctcaactcgccccccaagtcgcataagcaggggctgcgggtaacatgcgacatgtggggtctctcgaatgacttgatgtacacctagaatgatgcacagatcgaatacccagccattgag

SEQ ID NO: 7356 - DNA, 559 bp, Emericella nidulans
aggtttgatagtgcttggagctgggcgttgcaggatctgctgcaattgtattatgaggtgtcgaggacaggtggcgagacagaggtggatctggcggcgaagcgatgcaagcatattgaggatgcagcagaccccaggctcttggatgtgctgcagcggattgtaggcaggttcgagcagcagcccgtgctgtcgtccatgtttacgcagcttgcgcagcgatgtcgcgattcgttgctgcacggaccgagatacctagcgcggcctgatcagcagggcccgcgcacaacgatcagcgcagaaggcgatatcacctacaccgagcaggaacgggctgagccagtgccgcttgcggatctggtgtatcttccaaaaagcacggaggcggccccgctggagccgtttctgcatctgaagcaacgaaccggtggttcttcggcctggacatacagccacgacctcacggagcagtatcgcgccgtactggagcaagccacaaccgttggagagtccttcgctggacgctcagttctcatcaccggcgcgggagttgggtcat

SEQ ID NO: 7357 - DNA, 662 bp, Emericella nidulans
  unsure (1)..(662): unsure at all n locations
accaaaatgagaatatctggggtgatattattgggactggctttgaaacggcagaaccaagaccatcgagggaggaacggcaggcagcaaacgaacaaaagcagagaaatgcatctgctgttcagatatttaagtcctttgctagcgaaaccacctttgcacccctatcacagactcgtgagccaacagcagagccggtcgccgatcgtcgaaatggtttcctagacagatgtttcttcttgatacatgggtttacctcgaagcaggtgcgttctgttctacttttgtgcttttgcattcctaatatttctagacgaatgtattacggaatcacctttctttcaatggcgctcagttggtggactctctcagcgagttctctcgccccgacataccaaagaaaggtcatggtctttacatcattgtgccttacaaaaccccacgatctaatgtcccttcaacggacgatctcgcttttgagtgtgaagtcgtgacggatatgtggttggaaaggtgccttgacacgaagacactagtattgccggaatcccaccctgcaaacaccccaatttcttatcctataaaggtatgccatatntccatttatagngtttgcagacatctgacaaggcaaggctttatcggcatgaacatctgctcta

SEQ ID NO: 7358 - DNA, 659 bp, Emericella nidulans
agacctgattactcccctatttcctttttggtggttgatcctcgtcccctatcagtagaccctattccagaaaaggaaaagttcaggttcgaggcaatgtattttcgtatagtatctccagaatagagtgggcgaggcataaacatcctttcacccaaaccgaccgccctgatttctgcttaaaagggccactaaagccttgtcagcttcatcgacacaatgctaatctactgatgctttggtaagtgccgagtggcgtagttgcagtgaccccagacttgacgttgattaatccacttctatagtattgtctaagctaatccccgcaagtttgtatctgttctgactgaagaaagaagcgcttagccactctgaaaggaggttgctaaaggtaattaaccgttgctgaacactctcttgtcactccgcctctcttgtcattcccacctattacgtccacactttcccctcaacacttcatttgcacctgctttcaccgtcgatgagcgccaccccctacatgaaaaggactgaggtaggacatttcaggttgaccgtcaagttctgagttgtaagtattttctattgtggagggggtggagctgaggtttatcgtgcacttatactgaggatttccccgtagcttcaactgcaggcaa

SEQ ID NO: 7359 - DNA, 1000 bp, Emericella nidulans
gttgccaacaaagagggtgtcgctctccgggctggtctggtcgccaaaagagcgggcacggttttgagcgcgttccttgaagccgccctggtccttgttggcggggcgtccggtggcgtagtcgaggttgatcttgcggccgtcaatctcgtgttccttcatggcctcgtaagccttggcagcatcggcagcgttggtgaattcaacataaccgaatccacgggagcggccagtgtcgcgttcggtcataatacgcgcggacagctcaccgaactgctcgaactcttggtgaagccactcctcggtgacgttccaggaaaggttgccgacaaagaggttagcggaggcaccctcctcagtcttggatttcttggaagcagcagcgggctcttcctcagccttgcgcttcttagaatccgctggcttgtcgctgtcctcagactcggacccggagctaccagactcctcatcagaatcggaagaactctccgagctgtcagagtcagaatcagactcttccttggaggtcttggcgtcgcccttagccttggccggggcttcctcttcgctttcagagtcagagtcctcgctgtcgctggactcagcagccttagccttggccttgggaacctcctcttcctcagacgattcatcgtcggaatcagaatcggaggagtcagaagactctgactcgctagactcggcctttttaaccaccttgggttcagccttggccgatttagcgggtttcttctcctcctcactctcgctctcgctatcactctcgctgctggaggcatccttcatctcctcatcgctgtcgctcgagtcggactcggactcggaagatgattcagccttcttagcttccttcttcacctccttcttgaccggcttttcatcctcgctctcgctctcgctagagctggaatcagactcagattccgactcggattcagactcagagctgctgctggagaggctccttctcatctttggc

SEQ ID NO: 7360 - DNA, 487 bp, Emericella nidulans
  unsure (1)..(487): unsure at all n locations
ataaccatacgatttaggtgacacctatagaatacccctaggatnccgtgtttgcggcncatcagcgttccacacatagccggagcgcaggctgtttccaggcggtcacgatagcggcagcatatcagcacacgtttgcctgattttgcgcgcgcgtagttagtggctacgagcacgctgacctgtgcaaagtaagagggagcacggcgcccacaccgaccatacgcactatagtaactgtgcgagctctgacagtcaatcgtggcccacctatctagagcactacatacaccgcgatatcagacccgcgttatccacataccattgagacaataagctgcgagataaggcgcacacgactgcaagaggctgccacgcacacggtgcatccggatatcacaccgccagaccgcgctacatgagcaccgctatataaccgctaataacctacgatcatggacaaccagcagtaagttaacagcctgcc

SEQ ID NO: 7361 - DNA, 506 bp, Emericella nidulans
aaatacaccgcgacaacgaacggcaacaacgagactcacaacgcgcaaaagatgaagtcgaacgattacggcaatctgtgtccggcggcggtgggagaaccggtgataaccagtcatggaagaaatcgtcctcgtcgacaccggcacccgcaccccagcggccggtctcggttgaagagcgcaagaaccagatggcgcaacttgcagagctgggagttgcgatacctgaggagtatcggagtgatatggcgctggcaggggactggcagacggtctctgaaaagataatagagcctgagggggaggaaaaggaggagaaagtgcctacacttggggtccggaagcggaaacacgaccaggatgtagacgaggaagaagaagaagctaagagggaggctgagcggtttgttagtaagggatgggggtcggcaacgcggcggtatcctggcgcgaaagatgaggaagatgatatagatgcgctgttggcgtctacgaaagaagtgaag

SEQ ID NO: 7362 - DNA, 592 bp, Emericella nidulans
tactccataggcacggctctttctcgctctatttcgaaccaggccatcgctgctcatgccatgctttcttggttactgcggaagccgaacaagccctgccagagtttaccaccaggattcaccacaagctaataggggaaggccatgatgctctggaaaaagatcactgcttggagaatctgacctcagtatggggattccatcttcagcgagttgtttggctgaatgactcccagcgttttggcccctgcatagaggacgccaccggcgcgtaataacctgcctgagccacagcaagaagtcggccagcgttggctggcgatcgacagattttcgggaggaactatcgaataagaaagagcaggatttcctggatggcagatgagacttatattcagtgctgaatcgttatattctaggtactataatctcacgggaccccaacaagctacgacagaacaaatccctggtagcctgaattggcggcgcgatgaatccactcaacataccggccaatacctccaaaataacagagaggctgtttcttcccgtctgggatgttgacccccatgtaccacgagttggtctcgct

SEQ ID NO: 7363 - DNA, 1105 bp, Emericella nidulans
atcttttaaatagggagacaaccactttgataacagcatctttagcctcgcgcgcctggagagatcgcattttttatttccgtctctggaaagaactttatatcagtgaagggtggcgtgtcgacatcgatgcaatccgcgcatttgaacaggagaattcagtgatcccctcaccccaatcacgaaaatcgcgctcaaggtacgcggatacggatctaggagagcccaaactaaagaagcgtgtaccacctggctggcttgattcccgcacgcacggatcggaatataatggatcaagtacgcgtgaactcgaccaagacgggcatgcaaagccagatagggagggcgaccatttgatgtctgatgcgactgatgatcgggccacgcttttctcccttgaagagcaagaggctaggtgcagagcagacactacgcaggaaataattcaccagaaagccacagagcaagcacttccaaaatcttccaaatcacctctcctccttcgaatgccaaacggcacggcgaagatcaactggccctacctattccgacagcgcaggcgcttggaggagaattggaccaaaggacgattcacgaattttcaacttccgcaccccgcgcatatggaggaagctcatcaggaatgcgtatatgctatccagttcatcgggaaatggcttgtcagtggcagccgagacaaaactgtccgagtttgggaccttaacacaaaaaggctctggcatcgccccttgattggacatacgaaatctgttctgtgccttcagtttaacccgagcccgtccgaagacattatcatatctgggagtagcgacaagaacgtcattgtctggaggttttcgacaggcgagaagatccatgagatcgcccctgcgcatgatgattcggtcctgaacctccgatttgatcatcgttatctcgtgacctgttcgaaagacaaacttatcaagatttggaatcggaagaacctgtcaccagccgacaaggattatcctagcgttcatcagggctcgggaaattcatatccgtcatatatcgtcgacacgagcgtgataccttctcctgtactagaagaataaatagctga

SEQ ID NO: 7364 - DNA, 563 bp, Emericella nidulans
actgcatgtcgaatatactggccacagtcggacccactgccgctgccccatccttaaacacactggctagatcttcgggtattctgctctcatagaccgtgtcattacaaacctctgacagtcctcgagtcgcacaggtctgggtgatcgttgtcccagggcagggactctcggtcccacaaaaccgtgtgaatggcccttcactccgtaagggggttccatacctaaatgccgatctgtcagcaatataggagaattgcttctcggtggctgaactggcgggttcaatcgatgagtagagtcccaatggcgagcaaatggccgcgaccgatagaaggaatagcaggcctacttggccccaggatgttaggtaaatgcgccatggcacaccggctgtctctgtggagctgatcccaagaatgctgggccagagagaggagtggaagaagcgcgcgagaatggtcctggcttgttggttggcggaccacaataagcaaggcagggacttaccatgtaatgacagagttttctgcgacagaaatgcacttagagcccatggaatg

SEQ ID NO: 7365 - DNA, 108 bp, Emericella nidulans
tcctgtcagacactgacacacacaagcacacgtctcgatgctcacacaccagaactcgtctcatgactgccaactggcagcaatcgctacacacagaggccatgccgg

SEQ ID NO: 7366 - DNA, 502 bp, Emericella nidulans
atttggcagatgggccatggcccatggccagttttgtccaaactagccagcctttttgccaacgatggataccaggttgatgctggtcgactgtgggtctattatcatcatggtatcggcattattatgggcagcttcaacattaggtggctcaattcagcctggagtccctgaatgatttaagcgggcatcattagaaataatggcattatcaccgtgttttagagttatgcttagtgctaagaattgaagagtcctgtgcatccttgggtttcgagaggcatgcaagagctgccattcgacctagccatgcaccctccatcctcgaccatcgaatcaccagcagcagaattagagcatagcttcgagcctcgagtagagtacagtaaagacgagaaaagatcagtacaagcaagctgaggtcgaaattcgctggcattcggtttgtagagggcgactcgattgttgcccgccgctgcaacccaactactagtaacgattg

SEQ ID NO: 7367 - DNA, 1206 bp, Emericella nidulans
taaagtgcatatgaactccgccggaaaaacggacctgcctgcaatgagcccactaatagcaggccaaaaatcggcaaacgtacatggttatcactttatgctctgaacccataatattgtcgaatgacgttttccggctgatctcagattcagatcggtgtctgcacgttatgatgttacttattaccccttgggtttataatgcttacttgcttctggcaataatcaaccatttcaaaacgcttccccaattgattatactggcgttcagtgcatcggtatactacgaagtgaggaagtgagtaagcattggggtcctcttaatttacttaatcagcttaatggatgtaatattattaatgtgtcaatatcagttagattgtaaagtcttaaaacgcttggtatgaaattttgcgttcagttcaatactcgcctaataatgacatctagggtagattctaggttggcttgggagggagatcgctatgtgacgtcgaaagtggataagatacttctctatattaatcgtcgaagcattctatctcagcccaatacactcgcctggcgcgccgacgaacctcttcggtcttgtcccaatactcagttagctacgttgtcagtttgcaaatggttggtattgtgagggtggttggacaggccttcttcgagaagaactattactctagctggagcacattaatattacatagaaagcaaagcttcctcgtgcaattatcaactttgggttctggtatagtagtaaggcccaccttggtacgcaaagtatcgtcttaccattagaataaggcgctaaattccacacctgtctttcgtgtgtgctccctttcttcagcaggagtgtgccctgttctggttgaagcacgctgagccacctgttcgaactccaaatgtggttgggcagcggattgcggagttgatcgacttagatagctcagtttgtcccgaagtttggttgtctgaatgcggctgccgtgtagatatctgcgttggctcgtatgctgacatcatggatgcagtctgctttcatatctgcgcaccccccctggccgtaggtactctgtgtctatacctagaaagacaaatatcatactgtagttagtcacgtcgactaggttggtcccctggataagttctcctcttaacataggccctggacagaaaaaactcattgggcagcagcatttt

SEQ ID NO: 7368 - DNA, 843 bp, Emericella nidulans
tgcaagcctgaccacccttgaaaagcttaaaggcagtgaccagtaacaaattcaggttaaatctgtgatatcacttggagttttcggaaggttcgatcttttcccctgtactcttacacagtgcattgcattcagcgatatggaactgttaaaaatgctgccaatgctcaggctcatgtatccgctaccagaagcacaacagacacggacgaaaccattacgggtgatctgtcttggccttcctcgcagtggaacggagtcgcttaaaacagcacttgaaatacttggatttgatggggttacacatggtttcgagtggtggcttcatcacccgcaccatagcaacctctattgcgagctcctgctgttgaagctacaaaaccgtatgccggctccagatgtactcagagaacgctatttcgatcgtcttcttggagacatggaagcgtctacggatgttccaacggtgtggtttgcacctgaactcctgcaagcgtaccctgacgccaaagttgttttaaaccgccgacgtgatatagagtcttggaaaaaaagcttccgcgcatcagtactaccgatgatgcaaagctggcgatactggttagccagttggtttcatgcggaattattttggggcgtttggctcacacgccttggacaccatacgtttcttttcaaagagaatttcgagataaatgcggagaacgcgtatcaggaccattacaagcagttggaactaatgttaaaatccaacaatcgagagtacctcgactggtctgtggacgatggctggtgagatcccatacccctctctcgaaaccatgccctcgcacgtagctgact

SEQ ID NO: 7369 - DNA, 376 bp, Emericella nidulans
cctgcttgcctgaatcagaggcagacgtcgcctagataccacttgcctcctcccagtacatcttacaatgataccagctgtctggctgatctcattcctattagagacccggttgcttgccctacacgacgcgatatcagcaagggcttccataacttatgtctcaggctcattatgtattgacccttttgcgctcaatatacattgactgcactacctgagacgactccttatgacatggatcaagttatgcgtaacgaggatctggggtgggacgaaagacggttgcgcccagtttatgggttccatgtcatagtaagaacaaaatcaaaattatatacacagctcacaacatatacacctgctcgcatggtta

SEQ ID NO: 7370 - DNA, 535 bp, Emericella nidulans
tggatatggagagggaagggcaggtttttaagctatctgcgactagcccatgtagcaaacagtaattttacgcgcggccgcgatatcccccgaaatcggctgctggggacgaagaccggccagtcattgaagggtatccaggtcaaaattggctgggtcaggccacggcggcgtcgactgctactgggtattagagttgactgggcagagcaaaagacggattaagtccgtgctggactggcggatggcttgattgattgattgatttgattgattagatccgagagataaaaatcgcctagaaacgtgggcgtcacggcaagtggcaactgcagctgatgctcaagcttggccccttggacgtgcacaagcaagaacccccaaggatgagtcttagcttggatcccggcagaaaactctgatcttttatttcgtaattgcactgcctagactaccggacaatgtcatgacggggccagcgaagaagcaaggtcacaaggaagagacggagcaggatgcatgggtgttcaagtgt

SEQ ID NO: 7371 - DNA, 442 bp, Emericella nidulans
cgagacttcgaaatccgaaactccggcatatatcaagcatgaagatttggatgaaacaggccagtcgcttgggcttatgaaccgcatgaaacggacagcgatattggtgaagagtttactcctgaggagcaattggcgttggaacgggagcaggcggatctgatgtaccctcccgtacatcgcaaacgcctgcagaagccgggaccagtaggtcgggccgttccttggctaatcatccttacgctttttacaagctttggtgcttggtggcgcaaggaaaagattgagattggattctgtggcatcggaaaaccgacatggtcacttgctgagactaaggttcctgagtgggccaatgtcctcgaacctcaatgcgaaccatgcccaccccatgcgttttgttaccataattttgaggctcgatgcgagcatgactttattc

SEQ ID NO: 7372 - DNA, 598 bp, Emericella nidulans
gggcgataatacgactactatagggatcagaaacataacaagtattattataaaaattaataatatgggcaggagcttgccacagtggtattttaggacataaaattaaaattattatattatctagaccttaaagatatatatttataaggtagaagattaattcataattacaataatataaagttttactattaagactactaggatttactatttattattattattattcctataaacttatagaatattattaatttttataataccttaaaaatatatttctggtctagccttaagatctttaatatataacctcttcaataaagactttttttatagttattttattcctaatttcttattaaattattttataagtaattcttagtagatcttagtatatatagctctaaaactaggaagttatagttactaattgatcttcagttataggaagattgctaaagttatagttatagattttattatagatttttgatataaggttaataaaaaaattttaaaatagatcttaactgatctatattccagctctctattaaaatattactctaaaaagctaaaatatata

SEQ ID NO: 7373 - DNA, 489 bp, Emericella nidulans
ctcccgctcgaggtgcgttattgctgaaataagtctcatcgatcttcaagatccattcaaccttctgagcctctgtccgcgccgcgaagaggaacgtgttctgcggaccgtacactgcaaacacattaggccgcccctgagatgacccatcagctccggggccgtcgagaagtctggcgaaatcaggcgcatggtcgactcgcgcattgcggaggttgattgcgttaatttcgtcgccttccgggacagaatagatatgcaggtacggcagccgaagttcaacgaaccgccgtgcccagtgcgtgtaggtatcgtcaggcattaacagatacccagttttagacgcggaaggattcttcgggagagtttgaacggtagcgtagaaccgcggcgtgagtgaaccctgctcttcattatcgttcgtattattgcttgacggactctttcctcgagacgcaaacgctgcgccacgttctgggggctccgtat

SEQ ID NO: 7374 - DNA, 1241 bp, Emericella nidulans
tcgcgaggttggtgaaagaacaccacgagggtctaactcagctgaagcccgacctgaaaaggcttctttatagaggataaagaactttgatatatatgaacagcgtttccgccctgatgcaagcagatgcttgtgataatgcgactttggctcattgtttaacctcgatataagaagtatgattggtagacatatgccgattaatcaagtacatagcgcattataacatcgatagaagtctcaggacttctggctcagctacagccaactagcctcagagtttgtagaacggagtctaggcagcacaagaccgcgctgagagcatattcggtcccttatttgttttgaacactagccggagcctggcatgttcgagtcttctcgcctgagtctaaagctcgtgattttgtattaccattgccttaaggagatagagaggcgtcgttgagtctagactggtgaattactagctcggagacttttttcgtgaattatacagtaacgtggcgttgggtctcttgatggcatatcatacctgcctagagtatactcagagtagtcaaatatgatggctgatatattgccaaatgtttccgggccagcggaatataggctgacataacgatacgggagtgctaggactaaatatctgcggagtagcagggtcatgtatgcagttcctgccgcgcaacttcaggtgtcacgggtacttcaacgaacggtaggctttcatttcatgacgaggattcagaagaggtcaggaaaggttctccgtgatcatcgggatcatcatcaagccaagataagccacccggatgaccggcatatcacaagggctgtctgcttttctatccttacagagattgtttttatccacgacgcaccgatgactatcccatatactaaaggaataaaatgtggcacaatatggccattggccatgccacgcacttcaagaaaaatcatggtcatattcgcggcaggggcctggtcacactgcacagaccaggcaccctggaatgccatccatattcccgagtactcatcgcgaatcttctcggaatgaatgccgtggttcgatggtgtacagggcctagctatgtgatgaagtgtttgtgaaatcctgagggtcgcatgcatgatctggtttatgagctgtctaggaggatttcaagtcagccctaggagtttctgttaaaaaaacggcggatagaaataaattgagaggactagtcatatcc

SEQ ID NO: 7375 - DNA, 821 bp, Emericella nidulans
gttagcccagctagaaatctatattcgtgctgatccccagcctgagcatctcccaatagtcggtcccgacctcgaattcgcccggggccccgttggctgatcaccttccgcgcccacgtgcagtttcactgcattcgtctatgcttattccccgtctttgcctcccggatggtagattaagctttgagaagctgatctcttactggtttcctggctgaaactgccgtgctgcagatccgatccggtctatataatcgggctgtatcttgacactcaaactccaaaccttcatcttatatccttatcttttttataattctcttatacaatacgttagattcttataccatagacatcatgcttcttgacactactacatttcacaatgttatcaacggccagttgacatccacggccactacccgccactccctgaacccagctaccaagaaagagaacccggccgtcccggtcagcacggccaaagacgtcgacgacgctgtctctgtcgcaaagactgccttcaagtcatggtcgcgcaccagctacgaggaacgccgcagggcgtgcctcgcctacgccgacacccttgaagccaacaaggaggctctggcggcactcctcacccaggagcaagggaaaccgctcgaccaggccgccgtcgaggtcggcatggccgtcacctggacccggcagttgcccacgattgagatcccgagaacgtcaccaggataaggaggagtgcggatcgtccagcggtacacgccgctcggcgtggcggcgctattgtgcctggacttcccgtctgctggagtgggaag

SEQ ID NO: 7376 - DNA, 447 bp, Emericella nidulans
ccacctgcactcgaccgcccgctctcctccgttagagagcctgaagtcctctttgacgccgactcccgagaaatatgtagcagagacacggccgagtcgtagattgacccgccgagtgagcgcacctgggtaaagaatgtgggcagggaggtcgcgcacgcaacaataatggcaacgttcatctcgactattctgcgaatgattgttagcactgcggctggggctgtggactgagggttcgttgtcttgcaacgtacgagaactctgcatttcgcccctggacccaaaaagtatctgtattgtggtagtggatggaggcgttgatcagtcgagctagaccggctgcacaggcgctgcaagtccagaggtcaaatcagagtgcgtccggtttccggatcagatacggccatagagcgcaactcaccccaacccgcttgcaaaaactaa

SEQ ID NO: 7377 - DNA, 1258 bp, Emericella nidulans
gtggctccagctacgggagttctgttcgcgccgttgattcagagccgtatcctcgtattcagattcttcctcttcccaaaggtcgctccagctcttagaaatttgctcgctactcttgttctttcgcccgaataccatcgacagagacggtataggcttggctgcttggctaggcagagatccagtaatagtaacaggatcagagggaggcgggtaacgaggagcggcctttgtaagcactggcaaagcagtagaccgatacgagtctccgagagaagattccaagactgaagccatggagggagtatgatggaccgagaaccaagaagtgccggctgtttcggatggtgggaaaaggtcttccgagtagctctcgttgtcgggaatggcggagcactgtcgaatgggctgtggtgggctggactggagcgcctttgcccagggaaaggagtcgccttgattgatttggggactttggatggaggaagtccgaaggggttcgcgattggcacttgcgggaaccacctcgcgctcgtcagtacagaattcatccagagcttcatcatccgtcgtaaaggatacagcccgcatgatcgcatcccggatgccggagagagaccgcttctcagcgtcgagagccatgctgatcctcagaatctcaaaggtatcctgagacatgttggggaagatgtcaaaaagagactgtcggtctctaacataatcagcaaacaggatgtcggactcggttggcgtagcaaatgggttacgagcaaataaaacattcagtaggcagataccgatagcccagatgtccgctttcgcgggagagtatccgttgttagcggggtcgtactgttccggggccatgtagcggtcacttccaacacatgactcataacaccaggtctctcgggtcgccaggcccaaatcgccgagcttcatggatccatcttgagtaaggaagatgttctccggcttaatgtctcggtgatagaggccattagcatgcatgaattccactgcactcacaagttggagcatgaacttacgaacatgctccgtatcgagaggaccactgattcatctgatggctttccataggtcttcattcgcacaatactccaacacatggtaaaggtgagtagctgtcttcaagtgcgggacaagcatggacaatattaggatgatatgcgagggcgtggtgacaatcaagctcctcataccggctatagcctggagaacggtttcatgaatcatt

SEQ ID NO: 7378 - DNA, 162 bp, Emericella nidulans
gcgtggctaccagcacgcaagacaagccactgctccactcgttggctttgaaccagtgcaacacgttgtactacgctagtccgacgaaccgtattgatcagccgcagttccccgaatttgcgatctgcagttgcccgccactaagcggcaatgcaactcggc

SEQ ID NO: 7379 - DNA, 792 bp, Emericella nidulans
  unsure (1)..(792): unsure at all n locations
ggtaaaggctcgctcataattattaatactattgggaatatgttttaagaatgctctgaagagttgggccacatagagcagacaaggctcttctttttatcgctgcgccacatccgaggctaacgtcattcaatattaatactccgttaacaccaccaattctctctttctgatcccgtctgatcgactgctctggtgctgtcttagtttagccttgttcaaaggttatatactatttcttgttttctgtactttgttcaagtcttatcgtgtacagcaagatgaccatattcgctggtgcctgccagtctttcagaccatgaacagcgcctttactgcttgactattggactcgaatactcgtttcgacccctcctctaatccttgtcttaacctcttacttggatcacttggattctatcctgcgttcctgcctcttccgatccgatttcgacttcatttcctcccaacatggatacgggtgatcgtgttctctgccacgcctgcggccaggtatggcctcgcattttgtatgagacactagagtgtccgtactgcagttcagagttcacagaaatagtatgcgtcttactcacttttacccatgctagactgacctgcgcagattgaaatccctcccgatacagaccctgagccctcgccctcgccctcgccctcacacccacatncggatccccccgagtcctttccaggccagcgttcgccgacgccgtcttcatcgaatccctttgcagaccacaacccttgggcacacacggatgatattgatga

SEQ ID NO: 7380 - DNA, 545 bp, Emericella nidulans
gaaaacgcccggaactgatatccagcgtcgcgtagcgaaacctttgctgtcctgccagatagccgccagcaggttgtcctgacgctcctgcaacagggcttcatcgctgatggtgcctggcgtaacgatacgcacaactttgcgctcaaccggacctttgctggtcgccggatcgccaatttgttcgcagatggcaacggactctccctgattcaccagtttggcgagatagttttccaccgcatggtagggaatccccgccatcgggatcggctctcccgccgaagcaccgcgtttggtcagtgaaatatccagcagttgcgacgcgcgttttgcgtcgtcataaaacagttcataaaaatcacccatccggtaaaacagcaggatctcgggatgctgggctttcagcctgagatactgctgcatcatgggcgtatgggcgtcgaaattttctattgcactcatggggttatgtccggttccctgatattaaatggggtgtgatggtttttattttcgttgtaatcacataaggcgcacatgat

SEQ ID NO: 7381 - DNA, 491 bp, Emericella nidulans
gtttgcatcgctgatttgtgcggccttgtcgaggagggccgagtattccatgatctcggcggcgcgttgaagtaaggaaagaggctcgttggaagatacgggcattgaaatttgcgagaggtctttgccgacgttcttgcgaagaaacccaatcaagctaggcggcatcactgtcggtgcagggatgttattccgccgaggaaccgtgtcgagtggcagcggagtaagggtttttggtcgcgctgggaataatggagagtgttggtcgtgcgcagcaccgtgcccccggcttccgtagaatcatcgtcgctatcggacggcgcatcgtcagcaacgacatctgcttgggcatctgctactgtatcctcgtcgctgtcgcctttgatagtgagcaattgagaatcggtggcgtcgaccgcgtcaaaagattcctcagatctatctgactctacgctcattcgcgactgcgcagttagctgagggggctgacg

SEQ ID NO: 7382 - DNA, 799 bp, Emericella nidulans
tttgttactttacttattattatgattatcttattattttgtatcccatttctcgtgtgctctgcaccgctatggggctggaacactgccgccaaaggttcgatggagggatagaagcacaaaagtaccccttgtagatagattgttacgatacttgcggggaatcacgaataccccaacctaatgaggaaccgtaaccccttgctacctgcccagcaccacaaatatggcaggtttaccgttagggagacgccccacggtacgcacgctcgctcgccaggagctcacgtgggagcccgagcttttcgatccgccgtccccggcgttctggaacggccgcggcccctgctgagatgtgtccgtccacagctcccgcccgttatctcaatatctggactgtcaaatgcagcacagttctgcaccgatcgcacgcaaatactccgaggcagccattatttgggatcctcctgcacttatagtcgcatgacctttggagattattcgggctatccttgcccgaagaagctccaatgccattgatggcattggagatgacgtttcaattgccttgtacacaatgcggatcgcgcatagaatacgtgattatttcagcatgatcgcatatgatcgcatcgatggcagcgcatcgataccctgcgtatagccgtatgcggaagtgaaggtggaaggtcagctcgaccgataagtgtggggtaaaagctgtcgggcgagagggacccagtcgaaaaaggaatacgagtcgttgagagcaagactcagaaacagtagaaccaagtcg

SEQ ID NO: 7383 - DNA, 802 bp, Emericella nidulans
ggggatctctatgtgctctaaagctttagagaagcagaagggagtataggaaagtatatgaagatcttccgagagctctgttgcttagctttaacgttaaccaatgggtcagcccaaggagagacaaggaaaccaatgtagaaacgcctttcagggcggacatgggccttgttctcgtgtaaataattctgggaactactactctatttgcgaccagtctcaacgagatgaggccaagttttattcctttgcactcggtgccaacgcggcctatcaatgagagcggttcaccctggacagctatgaggatagtaattaagctttttcaaaaaggtagcattgcgaggatagcaggttgcaagttctcgagctgtccagggcccgtcaacaaaagacacggggcatatcgatggcgacgaaaccggccacccagcgaccttaccacccctgatcctgattctgcgtacaagaaatgaaacggcacacgcgaagaatactcagtctgtatattgagttagccgccgtgcgtgccgtcccagaccaatatcatccttgttcctgaggcaggacggcaagaggagcaacggcacagaaaagacgcaagggcgacgaccagggagttggattgcaccccggtagtctagaagccaagccgaacagcatgattagctgcgaagtaacgtctttttctgtagctgctctctggaatccaggacaaggctattgtcgtgattaggagatttcgtgccctgtcaggactagatcccacaatcagcaggggaagctaaagccgtgattcgcc

SEQ ID NO: 7384 - DNA, 644 bp, Emericella nidulans
caggcccagaattgcgcccagcaaatggcttgaatacgtggaggtaaatccatggtggtcctgaataactgcgtaactacctggaaagctccggctttcccatcagaatctctacagaatcaacgtcagtagtcgccttcccgtgccgtgtggagatcacgtacctcgcggtgattaatattctctccttcacagagtaggacgtaacagctatcgcacccagtaaggccaacgcagcaatgactgtcatttgcttgaactgggtgtcgcctaaagcagtcccaaagatactgacggtgtcaatagatccgattacatatccaatcagctggccaaccgccgtcatcctagtagcttccgttttttagcatcgctcctagattcatgacacatatgccgacataccccacgcggacccagcttgttgcgagggtataggtaacgtatcgacgattaagctccgagcacatgcttgtactagatgctgttagagaatcgtttatgttcattgttgtcggaaaacccaccgacgttgatggcgaagtcaacagcgtaaatgctgagcacggcgagagcaattgtgacgcttgcagcctaggacaagatgcggagtcagccatatggtaactaaataattcagacaa

SEQ ID NO: 7385 - DNA, 379 bp, Emericella nidulans
cgatgagaacggagaggttcagtctgtcggtacgttccgtggcttctgaagcattaccaaaaatatgtgacattgtaaccaagtctccatggggccatgaacactgagttgttgtagtattcattctatctgtccgactctctgggagcttcgcctcgataatcgccatacaccatgacttcgcaacaagctgtaccgtggcactggggctccgcgtcagcccgtacgaccaaggcctcctgcagcagggtaatgagcggcacaaagaactcttgggccacgcagtacttgtgtccacgatactggttgagattagcctctcgacaaacatgctgttcatgcaaaaggttcgtcaggaattaagcgctgtcgagaaggc

SEQ ID NO: 7386 - DNA, 1016 bp, Emericella nidulans
gcagcgcgcgccggctaggaatggggggctactaggctgctgcgggctgaacccatatatgcgatgggataccgtcaaaatggaaaggtgaaccaccatcagctctacggagcataagaacctgaatggtcaagcaatgcgactcatgctcataccgtgcgatcacaaggtccacttacatagcctcattcgattctagaaaaggccttgcgcttcactagctctggtgatggcgatggctccgcgtaatcccatcaaatgttctgagttgtaggcattgttgttcaaacaaagcggacccaacataatgtcgtcgattgtgaataatgcaagtcttgtgcgctgacagagaagcaagtctttttcaaacactggaaacttcgctggacaggctcaacagactgttccagcggagatgagtgccggttagagtcgaagttgacagagcattaagagaacttcactgcttaccacaaggccggagtaagctgcgagcagttagtgatagtcgtgtcgtattttatatattgtggctgttatcgcagggcctcgagcgttacactaactctaatttccttctgctggttggtatgatttggatagaatcaatatgcgacttgtggttgaggcgaatttcacaccatgctagtaatttcgcgacagagtcttggactcttgattgatcctgggcgcaatattactccgtagtgttgttacaaacacttcgatgaagcctgaaatagatctccacatatggaacgaactagcggcgtctcactccgtttttggcccagacagacacgatggctatggcatgcccacaaaccgctagttaccgcgtcggcgaggacaattacgcgagtagtcacagcctacaggcgttctaggtctggatctaatactagaaaagaagttcgtgtggatcatgcttaactgctttttgacgcttgaaacaaatggacaagctgagatcggcgtcgcagcaattcgtcgaaagaactcaagaagatgcgaca

SEQ ID NO: 7387 - DNA, 769 bp, Emericella nidulans
caaagacatccctcgcgtgtaactctgtccaaacggtcccccgcacatatccatctatgtttatccggcagcgcggcaccgcgcaggcagggtattctcggtatagtgtcttatagaggaaaacaaagtcggtgaatcgcctccgcacggtgaagtcagccttctgaaaggatttgaaatcggtctgatggttccagttaacgcctgagcttgaatcttcactaggcagcggtatagcttggctaaggcactccatgtgcacttacatgcgtcgtaaccaggtacgatatgtaggcatcctttgtaccatcattctcctttattggagtgtctacccgacattctaaaactccatctccgatgcctgcgagatccaaggcgtcggcatgtggtcccgcctggggaatctcactcgccgagctcatcctccgcttgccattggggtcgcgacgagtttcaggtgattctgcggtatctgttccagatgttgtaggtcgagaaatatcgctgtctgggccatggcgccacgagacgctatcaaagtcgtcatgatccatggggaaggagagcttcaagactctcgataagagtcaaatacagtaagcgctaccgagaagctacagaaaagggcaacgaaggagtgaatatgaaagtcaatattggtagcgagaagtattgattcaaaagtaggaagcaggctcaggctggtcggtcggatttgtcgatgtcgtggggagttgcggaggtgaagttggtcaattgggatggc

SEQ ID NO: 7388 - DNA, 684 bp, Emericella nidulans
cttttacgaacacgccggtaaaaccctttgctccacttcgcaacgtcttccgacggaccccgaggaagcacaggaacacggcgtagacggcgtttaagagcacctcgaggtgttgtctgtcgtccattctcattatttttcttgtttgatggttccatatacccggtaatcgtttgtatggagttagcggggttggcttggaccatgtgtcccgtcttgattttttctagatcgaggcgctttatggttctggagtatacttcctgttcggttgacccgtgggaagctttgctgtcagcaaaatcagcccattcaatttgtactcttatgttcgggctctgattgggcacctaaaatctcacgctcgcccacccccagtatatcaagtcatgatatgtgtgatgagaaagactggtcggcaggatggggccacggtaattgagtagcactccatccaacggattacgaaggggggtttcgaaattatagccgtagtcaaccgcaggagatatcgcactgttgtgaacttgtaacaggaggccatcaaggagcgtgacagcgagggatacactctacctaataatagtgacaccgtgaatctcagagcaagggagcctggaccgtgactaatatcatgtctgtgcaggaatgcgtatacatcacctggactgcttactcaaggaa

SEQ ID NO: 7389 - DNA, 841 bp, Emericella nidulans
gatgaccagggcggcactggaggattttttaggactttagcgatgaaaatgcagatgtatgttttttttctttgatttaagttctttggttatgagatggagtcgctgacgatacgtaggcaggaagagcgcaaaccactcgcgaaaatcgacggtgctacgatcgatgtcgatgcaatatgggctcagatgaatgcgccagattcaaaattaggtctggcgccgatcccagacgctcaaaaacaagacgaaaccccggcctctgacaccgaagtgcgcgaccaggagaatgcgaatccaacggagcccaatggaccggcagaaaagggatttcagcaaacatctgaaatggtcaaaatcaagcgcacctacaagttcgcgggcgagatgataacagaggaaaaaattgtccctcgcgattccgccgaagcgaaactcttcttatcgggtaatggcgatggcgaagtcataccagttactgaagatgaagtcgcaaatatgactggcaaaggcaatgaaaacacaagcacaaacaacaccctccgtatccgccgcccacttcgtaaaatttcccgattcgatccgaacccatccggcatgatcaagaagagctgggggaagcagtcgcttacagaaactggagctcgaactggagccggccaggagaacatccgcgggccgaaaatcaacaccgtcgaaaaatcacgcttggactgggttgcttatgttgaccaggaggggattagtgatgaactccggatgcatagtaaagctaaagaggggttcctgggtcgtatggatttcttgaatcgcgtcgacgcgaagaaggaagaagagagca

SEQ ID NO: 7390 - DNA, 998 bp, Emericella nidulans
  unsure (1)..(998): unsure at all n locations
tttgctttgcggctggggatggttcttgctggtagcttttatctatacttagccctggagatcgcccagtcggcaaatgtgtaatcctgccggaccctaggcacgtccagcagatgcaaagtcgagccgttgtcacctgggttagctctggtaatgattgatggatttatggcccttgatgagttttgagacggccgttgggagataatgtattgcagctaatatactcgatctacgtttgtatagttgtagccgtaagcgaggctcccagagtaaacgacgtcatgatgaatccaaaactttgacccacgactaaaggcactctgctatctaaagtccccagcaatggagcttcagccagcattcgcctgagtctgcggttctctgtattgttcagcttgtgcatcagcaaaagcaacaggccccagtaatttcactacttctgctgttcatgttgggctctatactgtgattgcggccccacttcaacttatctggacctagctccaaaaccacacagtctcaccagcttccagctcaaaaaaatccagcttcgatcaacatcatcataatggctgagcaacgggttaacgttcacataccatcccgccccgccgttctcgacagcgttcgcctccgcaatatccaactccctcttcccgcagcgccagacccatggcaccgcaacggtaaacctcagccgtgcactgcatcgctgaagctctcctactcctccgccgtggcagccgcaaatgccgatgatgtctctctctctctcgactacgggaagctctatcgccgactggaagaggatatccgcaacatgacagcgggaagcaaacccagcgggaccacgcccgggcagcatatgattagcgttgacggaagccggcaaaaaaagatgatgagggcggaactcgngcangatgtgcgtctgaccgcgggaattgtcgccaattgtggtctgggactgcgcggttgtcggcaactaggttcga

SEQ ID NO: 7391 - DNA, 837 bp, Emericella nidulans
tgatacatttgggcgtcgttccagataagactcaaacgcatgcgaatggctgttttgaaagaagtaaacacggcctgaaacaggcggcgcccatattcccagctcatacaaacttataagccggacgcagtgggcatgattcgtcacgcaatcacaagtgccgtatcttgaagattggaaaagcaatccaattgtgcagaatgtgggatagatcatattcatcctttgtatcttcggcatacatcgagaggaacccaggggtttttttcctgggtataattgccttaagagctggaagagatgaacaaacgtctaacctactgagacacattgacaattttattttgcatttattaagttttcagttttatgttctatctctatctttatgtttatgtttatattcagattcatttatacgttaatagtttgattttaattttgatatatttattttgcctctattttacgtagcgattcatcacccttctacactatctgcttgtttgaacgcaagctttgatatatgcatatattcggaaaaggcattttgatccgttttctgtgatccttcagggctctatgtatgttgttgtcatttgatattgaactattgctatctgtgtacttgactatggcggtctctatgggtcattctccgctcatagatgtctttagaactgccgcactcgaaccagtgctcgacataccctaacactcggaacacgcctttgaaagactgatctctctagacagtacatggacaccgtgacgtaacccatactcaagcattccattgactcacttccgctccggcaggtacacgcacatctcgat

SEQ ID NO: 7392 - DNA, 955 bp, Emericella nidulans
cactctatttcaagtcctcgccgttatgtgcctagggtacttcgaaaagtctttcatgccgcttctattctacttcctcaccatcttttgaattatgtttgggtcatacagcttggttgggagctcaagagccagggaacagcggcagggtcagggaacagcgacagaaacgacatgatagcaatgaaggaactaaaaagacctcggcgtgtgggagtctggccttattcagagtaaagggctacaaaaatgagagagatgttgttcatgaataatactagatgatatattggcaaaggaagtaatgctgtagttacatttactatacgcatatttcagatattacacatgcagtaaaccagaacagaactggaatagtcattggagttgaaatcgattcatgacctgggaatgacaccgccccaaactgaacgccgtccaatgcagatgttatgtcgtgtagtaagttaatatcagaacctgatccctgacgcctcgaatgaaaaccagacgaaaataaacgggcagtgcacccttgcatccttaaaccttccgcttcttcgccatcgacgtatcctcagtagcgtccgagtcccgcctagctccctttttccccttccccttcgacttcttcccgtccccaccatcacctatatcgtcaaggcctcttttcccagcagcatccttgagattcccaacctggtcatcgttctgatcgaattgcttccgagcctctttcagctcacgctccatgcgcagaagctcctgtacacgacctagcttgttcggatcccgacgcagcgcgaaacggaaatcatctactttaatcttttgccggcgcgagtagttcgcgtgctgggccgcgccgtggcacatctctagcacgaagtctgtgacgatttcgtcaagcacacggacagtttcaggaaggggctcggaaggaaaagacggatga

SEQ ID NO: 7393 - DNA, 119 bp, Emericella nidulans
gatgtactcgaattgtcgtcgagtacgcaaagagcagtattatcgctgactgcctgctcacagtcctgacacggtcgttgagctcaccccatggatcctcgtgtgatccgtgtctatct

SEQ ID NO: 7394 - DNA, 525 bp, Emericella nidulans
gatggtgaagttggcgcccctaccagcttagaaccacagtcggttactctacatcacgagtcatctcccgccactgcgcaattgctctcacagattggagctatcatggcggaacgagcagaaagcttacctcaagctacggcgctgccaagccaagtcagaaagactcagatgatgtcgccaatccagaagcattgtacgagcagctagagcaagatcgtcagaaaatcaggagacaatatgacgcgttaccgcaaaagaggccgcggaagaatcaagcgacgcacagctcggccgatacgagcagatgagagacaactatgagtccctcctagagcaaatccaacgagctcgtcttaaagaacgtcttgcttcaactcccgttccaacgcaaactgcggttataggctcatcgtcacctgaacaagacagactgctcacaactttccaattaagccgcgcgctttgctctgagcaaaagataaggcgggcagcggtgaaggaactggctcaacagagagctga

SEQ ID NO: 7395 - DNA, 1127 bp, Emericella nidulans
caacaagattcgtctttaaccaagccaatgcagacgtggccgacgcggaaagaagagtgcaccaggctaggctgctgtttgaagacatgggcagattgatgcgaaacgagctgcagagatttgagaaggagaaggtggaagacttcaagtctggcgtggaaacttttttggagagtgccgtagaggctcagaaggaggttagtgaaccccaaacactaaagaaacaatgcagacttgactaatttgcgcagttgatcgagttatgggaaacattcctgctgcagttggacgcgggcgaggacggcaatccgttctatccgcctgcgggtgagcataacgcctctgcagagtcggcaccaggagctccttctgaaagcactgtatcaacagctgaagcggcgtaaggtcgttttattccatgttctgtaaagaggcgagcagcagatatcccttattgtttattcctgtttcttgtgtgtaagctataataaactttatgttatggcaaattctgggcgtgcaatcgaccttcgctccatagtcgtgatcctccttaagttcaaattgctcaatgcaaaatacatcacacccaatggcagcaaggcgtcgaacctgatatgagttctgagaatgctataatactgtacaaaattctagaatacaatccagccgcagagaaagcaaaggaatcttctttgggtactacccagacaccccaatcatatatctatttcttcttcccactctcaacctcctcctgcccaaacgaactgatcaaatccaacagattatcgtcctcctcctcagcctccttctgcgcagcttttcttgcatcctccttatccttatcgcctcccgcagccgcactgtcttcgggcgccgcagtagcatcccagttccgtccaaacttcgctcggaaagcagctagacgccctgcctcgtcgtcttccacgctcttcagcttactgctgctcggattccacatgatcgagttgcgagtatcctagttgatctgtacacgggcaaaggggaggttgtgcgatgagtgaatgtgctcccgtcggaaagagtgatgagttgtgtgaatgtgtaggggcgcttcgggcggcggaggagggttgcatgcg

SEQ ID NO: 7396 - DNA, 537 bp, Emericella nidulans
gcaaccgaaggacgtactttgctccccggggaatgtagatttccaggatctttctctcctcggtcgtcttcttgcccttgcacttcttgcacttgtccttagttgcgaagaactggccatcgccattgcaggttgtgcaggtctgggtagacttggtcaagaattgacccatgcgcgtgaggacttctttgaagccgtggccatcacaagtagaacactttttcgccgtcgccttctctttgccacccttgcccttacacaaactgcaaatcacgttcttcgtgctcgcgaatttgactgtcttgcccctgtagagctcttccaagctgacttcgtatttctgctcttcgtccgggctctgtcgtggcctcggcatgccgcccatcccgggcataccgcccatgcctcccattccaaacatctgcgcgaggatatcatcgaggtcggggcccgtcgttcatccccggctcaccggagccgttgaagggcccatgccatgtgtatcatagagatgtcgcttgtcatcgtcgctaagaa

SEQ ID NO: 7397 - DNA, 526 bp, Emericella nidulans
tttcttcgtggccttggctgaacgcgtgaaccgcagcaggagcttcctccaccttgagggacagtcaatgttgccctagaggggtatactcccaaacaagcagcgtgatccagcaatgctactactggggatacattcaccctcccctctccagggggattcctgagctctcccgtataaacaccatgctgctcgcttccacattctctttcccaggctcttacattctctcttccaagcatctacgttcttcattgctgttttgtcacctttctgcgttctttgcagactgtaaacatttggccagctctcaatatctcgtctttggaatttgttctcattcttgggagcgaatcttggggtctgctccatggctactgactggcaacccgagtgtatggtatccaaaaccaagcagctctggagagcataggagccattcagaccgagctcttcagaatacgtctgggaacgtgcaggcatactcagacagcctagcacaccatgacacgactggacgtgatga

SEQ ID NO: 7398 - DNA, 1278 bp, Emericella nidulans
ttcttcgttgatgagatagatttagaatataccaggagagaatcactgtttgaaaaatgagatggcggtgggtttacagcgagcacaatatatgagataccgatattggtagcttttgagcaagcaggcttcttaaagcggccgtttgagtaggaggaataaaaaatccaatatcgttacttgacgccataatcctgagcaataatccatgcgagatgataatcggaaagggaaaaacgaaccgaatcccaaaatgaacataggaaaaatggaaacatgaggtccaggatcggttcagggccacgctaaaaaaaaatgtagaataccatgagcaacagactttgagtcatagcaacggagggttatcgcgtcctcgtgcttcgactgacatgacccttggtatcttaacacataaaacagagactgtaataaaaaggaaaactccgcccgctcagtatccttccgtcattaccactgcccgtctaaataccaaatgcgtaagagtcatgaaaagaattgatcggtcatcaaaagcgtagaataggaaatagcgagagacgctgggacaagacctgcataatcaagtcttgtgtcgcacccttctttttcagagtgtcggtttctctggcgaagagaatgaacatgctcatggcgcccagcgtccttatcgcatatcccagttaaaggttagattttatttcggcgagctccctgaagtccaccaggccagagtgttctgatagtatgttattcgttgcaacaaaagaaaaggctaatgcccatggagcttgcccaagcaagacgcagtccacaaaaaggaagcagggggaatgaaagaaatagccttagcacgccgacaggacattaataagcggttccctcgttttaatggccttgcccagaggttggttgcggccaaagccccctttggaagacgaagtctttctatattcgttccccgtagagaagcaagttgatccgcttcgtggactacggaaaaagtgaagtgcttgcgggattccagacttacatggagagccgcggtttgttaagagattaccggatgcccaagcgggactttattgcgccttcctacgtcaagaactccgggctttggttaccccagagagccgcgaggaatggcccacagtttcttgacccgaatttcggggggtgggtatctttttttttaagtgttttctctcaacccccgacgttgtaccttttttattgtcccccctcatattcgtgggcgggtttttttttttcttacaatca

SEQ ID NO: 7399 - DNA, 174 bp, Emericella nidulans
agatagacgttatacgagtatccagattccgagatgatgatctacaactatatgtgtccatcagactcgtcaatcaacgattgtatgctgaatactagtttccagatgcaagtactccaaatgacggatgaacagtgtctctaaactctgagacagtgtacggcgatttgacga

SEQ ID NO: 7400 - DNA, 556 bp, Emericella nidulans
agttaaaaattcgattggaagtggataaagatgctaggcctcgcagtgaatttcttggaccatctgactcgttctcctatttgctgcagaagtatccagtccaagaaagtctagagcatacactccctatatatggagactctggttccgaagccgaatttgacgaagaaacttggcaagagatatatgaggaagccggcgagtccatgctacctcagtctaaaaaccttggtccagcaaaggttgattctgttatcagggattgtgtctcgcaattggaaacgaagtggctcgaaacttatcaggcaaaggaagagtacaaggctcgaaagctctggctagctgccagaaaaaggattggtgttaccaggaggtcaaagctatatcaaaggacactgcgctactcgaactccgcttgcacaagttgagaaatgagattagcaggaatgaatacagcacagaggcagaactgcgtacgcaatgccaatgtttggagcagactgtattcgaaatccaaaagcagaaatggcgttcttcaatgctgaaacaggaaaag

SEQ ID NO: 7401 - DNA, 1019 bp, Emericella nidulans
gggatcaaaaagtgaaggtcgtgctggggttcgaacccaggtcaattggatgtgatgggagctcatcaaaaccgatggtgataacctctacactacacaaccaactgttattgggtcacgagataattgtctatatatcccagtgagcttaatcggctatccaatcatgctattaattttcttatttttgctgaactgatggggcagacttaatgttgcaatttatcgcgtgacggggaggcacatccttatataggccaaaaaaaaaaaagtttgcaaaaaagaaaggtcgtgctggggttcgaacccaggttgatcggagacgagtagatctcaaaaccgatagtgctaaccactacactacacaaccttctgatgactaactgtaaagtgggaagtttataatgcaaggtactctagacatattctttgacgtccagcctctgtgcgactttatttgaagccttgcaaaagctcctgtggtttgatgccatcgagctacttgaatatacggaacgtgaatgcaccagtagctttatttgtattagctttgcggcaccgaatagccgggtaactatctatgcacatatacgcatgtcaaccacagtccgaatctaccccattgccgctgtttaagtctgccttccacagagcaaatccagacttcattggattcgtgctcctatagtctcacctgctgttccaagagctaatgttcttgtggcttgaatccaagatctccaggcttccaggtgatggaggtggtcgagagtgagagttggttgctaatgattgggtcgcgtcctcaggcacaaactcaaaatgactgtcaagaaatatgtaattgggatcctagctaattaacacatggtccaaaaactttgtgagaacccttcaacaccgagccctctgggacgaaagaagccttagaatctgaaaggaaagaaagaaagaaaaaggggaaacaaagaataccagaataacagcggcccttccctatcccttcaccatagacaagg

SEQ ID NO: 7402 - DNA, 1061 bp, Emericella nidulans
gctggatgagttcttctcgctctgggcgttagactatcgagacgacgagcatctgcggctgtttcacatgtggcagaacgatcctcgagttgccagagctggaacgagacggggacactcgagcagcacagggagtatcttcggaaactcgaagaagatcctcaccagattgccgttctggccaaattcaataatacgttcttttcgtaccaccagatctactgggctaaggtgtgttgcctacgtctagttcaaattgtttttcgctgacaacgtccaggaagacagcatcggcgcacactacgacgccgacgactgggatcgcgggcgccactcgctagttggcgacgtgcgcttccgcggccagcatcgggtaatagtctggtggtgcagtatcatgcattatatgttcctggatgagtcacgcacgaggtacattgtcggcgagccggagttcacgaatctgacagtgctggcctacgatcacgctacgggatttggtctcgagaaactgatcgatctcccccataagcgctctgccctggtcaagtgcagccgagagaagttcttccagatctcgcccttccgattcgatgggtccgaccatctggagagggatccgtatcgggcgttgaagttgtagctacggagcactgcccctcaatccatgtactagctatcacgatcagtgactattcagataggccggagtaccggagtaggcgtgattaaccaagaaatcaaagccaatcccagactagcatgtgaaaaagcgccttctgccgccccttgagttctgtgtggatcgcattgcaccatcatgccatgccatgcgctgcaaccctccaacgatgcagtgcacccccacctgccacagggcatacagaaaacaggcccacgctcatctcggtatgcaatattcattgggcgcgtgagtcggactcggactccggagcgcttttcaagtatcttctggcattatgcccgatcgcccccactggtatacgctaagaaacaatacagcgacaatacatgtgtaaaaatttccggtcaagttccac

SEQ ID NO: 7403 - DNA, 635 bp, Emericella nidulans
tgaccactggtcccctcggtcagggtttcgccaacgctgttggtctggctattgcccaggctcacagcggtggtgtcttcaacaaacccggatacaacctcttcgacaactacacatactgcttcttcggcgatggctgtgctatggagggtgttgccagtgaggccgcttctactgctggtcacttgaagctcggaaacctcattgccatctatgatgacaaccacatttctatcggtgaggttgcagccgtcttatataacagaacacttgcttactcaacggtttttcagacggtgacaccaagtgtgctttcaccgaagacgtcactaagcgctttgaggcctacggctggcacgtcgtttgggttaaggacggtgacaacgacctcgagggcatcgaggctgctatcaaggaggcccaggccgtcaaggacaagccctccatgatccgcctgactaccaccatcggtttcggttctaagctccagggtaccggcggtgtccacggtaaccctctcaaagccgacgacatcgaagggtgtcaagaagcgcttcggcttcgatcccgcccagagctttggcgttcctcagcaggtctatgacctttaccccaaacacccccaagagggtgct

SEQ ID NO: 7404 - DNA, 713 bp, Emericella nidulans
atcgcatatcagtgtcacgtcccctaggtcccccagaatctgggtacaataaggctatgctcgaattagcatgaaccccgcaaagcgattgggctgtcggcagagtatataatattggaacttacccccgcgagaactctcgtcatatcaagtacccggatgccctgtagaggcaatgtcccatccgctggaggcagcggactagagtaggagcgccattgtgtcgcgtgtctgaagatgttggttctggttgatcgttgtatgctagggcgctgggcaatcagcaccctttgtaacctaaatgttgcattcatgacgagtgttagagagaaacctgttcctctgagaagagcgctcaattgatcagaggaaaagctataagtatgaagtagttctccgaatcgggcccatcgccggccccaaagccgaggtcgacccgcctgttccgctagctaagcatttcgactcattcccgaatattgcatcacgcaccttccaaagctcttctatatacgaaaaactacatcgtaagtatgtaactcgcgatgctcctgatatggcacgtgtaagcgctgacaaatagacgccggatcctagacctccagccgccgtgcggtagtcagctctttctttccacccctctttcgctgcgggtagcttaagccgaaccttcctcctcttccgccatgtttaccggactggttgaaacattg

SEQ ID NO: 7405 - DNA, 1272 bp, Emericella nidulans
gctaggtttctgcaactctccgcggcgctaaccctaattgtagccatttccacctggggctaattgtctaagctgaagagcactgtacactacgcgagtagctgaagctctgtatagtttgtttgtgaactacgctttgaaatcagaccattttctgagaaatggctgagagttataaatacttgctctttgtcccaagcacctgtctttcgtccttctatatctatcctcagcagcatgtcttcctacgcaatcacaggagcctcgcgaggtattggggtacgcagaatctctcttgccatgaccataatctaattatttcagtgggcatttctttccaacctctcaagcaacccggccaacaccgtcattgcgctcgtccgcaacaaagacggaaccgagaagcgcgtcgctgaagaactcagtggccgcaccaacatccacgtagtccaggccgacctggacgcctacagtagcctggaagctgcaaccgccgagacatcaaagatcaccgggggaaggcttgactatctcattgccaatgctgcatacctcacgacctacgaccagtttgactctcttagtactctgtaagaattcttctacatcatacacattgtgcatcgacgaagtctaacgggcaattacttacaccaggggcaaagacccagtcaccctcgaagagaacttgctcgccagcttcagaaccaacaccgtcgcgcagatccatctttttaaacctcttcattcccttgatccttcgcggcacaacgaagaaagtcattgccatctctagcgggcatgcagaccgttagcttgtcacctgtctcaacctggcacttgccccgtctcacaatcagcagggcgggctaacatgcgtgtgcaatatatctcccgtttagtgcctcgggtgcttttctaggtctgcctggttgggacccgcacttcaggcgggcctcgcgttatgttccatggctaggtccagggttggaacaatcttactttttctctccaattacttataacacctgtgtactctccaatacccttttctctccttctcgtaccagcctctattacgttctgctatctctaacttatcctcatttctacccccacacccaccttttatctctacatctatctagtcttctattctcatcttcatcttatctccatgaactattcttctctcatttacgtatactctcccccgctcatgtctatattttctcgtctctctaattcacttacttcacccctctcattctt

SEQ ID NO: 7406 - DNA, 150 bp, Emericella nidulans
tatgtgttgtgttgtgtgtactgtgtctgtatatgtgtgctctgtatgtatgtgttattctgtgtatactctattcctatctattattctctttgttgtatatttattattgtgtgttgtgtcattctattagttgttatatgtatatta

SEQ ID NO: 7407 - DNA, 557 bp, Emericella nidulans
caggattcctcaaggccgacactattaatctagccctaagtctaattaagactcagagaagctattgttcctagtttcgtactttagcaacgttataagttataaacctgttcgaggacaggcttttgttagattagagaaaaccctaccaagtgctttaccgtctaggaaaaagggctagagccgagacactttttacccctcagaaacaaacaaggctccattcgatatggaagcagagccaagaaacttcttcccgcatgccttaaatctgttgaagctgttttctagataattttcgggggtttcttgggtggcgcaaggccgagcggaagatataccggagcagcggccgggaagcccagggtcccccctgtctccccaatgtggtgaacgatgaccatttacttaagaccgcagaaaattacacctacatcgaatattgaaccgatactcattgtcagaatgaaactcactgcggcggccctagcctcaattgctggcacaccgcggccacctctcttgcacaaaccccgcagatgggatggaattcttgg

SEQ ID NO: 7408 - DNA, 872 bp, Emericella nidulans
gatcgaatttgggcggcggcatattcgtgcaaacgcggatataacttcgttttgatcgacgcttgtctctggaagggtccagcgcgcagccaaatcaacgaagattggctcatagatgtagaaaaacttctctgtaaaccctgattttaatgcgccgactgcaagcgcgttcaggtactgagtcccggaagccgtgcggatgagggccgcaatcccatccggcagctgctcaagaagttgggactcgttcggagtcccttcgtaggcaggactggcacccatcctgagtccaaccatccgaggaactcttctggtgtgtgagggaggagaaattgtgtaccaccgtacttttttccgccatcttttttctgccgataattagtggcaggtccccacacacgcaggcactcaccgcctttacttaagcacggaggcccgcagcagctccgatcatcaattgtatctccgggtctttcaaggacgaccaccatggtcaataacgcgtatgtccttgtatattatccatatgatctgccttattgataatggattcggggccggatttcgaggtccagcagccttcaagcgaaccaagtacgaacaatccgcggctcccgcgcgttcgcgacaacagcctttcgcagtatacacgcgaacctttaagtgatggtctgcgtgacgcgtaagtaggtctttgtgcaacatgactcaagctgacgcctgaatatgactaggatctcgtttaagcgcaaacataagcaccgatctggattcagtttatcgaatctctccaatatctttaggaccgactccgacggacattcgggtcccaccgtacagcatccaggaacggactgacaacagacattgat

SEQ ID NO: 7409 - DNA, 985 bp, Emericella nidulans
aagggaaagcacttggaaattctaaaatttcatgagcttcgctggatgacttccaatcgaacaagtatagccatggtgctaagaggttcagagcagcctcggtgcacagccgattacaatatctcgcttcaacagttgattacaatatctactcaccaccaaagaaaagtctgctgggaactccagcaaaatcattcgtccaaaaccatccaaaatcatccagaaccattgcttctttcgtaatccgaggctttgttgggattgtggtgccaattctctcctcagttcgaaacccagcttaaataccctcgagcatcgttggagacttctccattcagtcagagcgaccctagatcaaatctgtttagctagcagcgactatttaggctcagagccccgactttagcagagcgtcgaaattgctagccctaactacctctcccacgaccggctcagaaaagaggattagggcccagacaagatgcccgacgccgccaactcgttctacgcgctatgggacaatccatccctgaccctggccatcattataggcctcaccagctacatggcactagtcaatcgtcttcgataccgtcgcaaggccaaaatagaggcgccgttcgtgcacgcgcatggcgttggtaggagactactctccagcatgacggtcaaggaagcgcatgcgattctggcccagttgcaggaactggagttcccgtatgcgtttgcaaaggctcgtcgaatggctctcctcaaggtgatacccgcagcatgctgacggataaccataactgatgcaaacaggctggaggaatcccgacgatgtcgaagctgttcgccgtgacaggccagaacaacagacgcaatgcaggcaagcgcgctgtcgacacggagatcctcctcggcgaggcgcaatcccagcctcgagattcggaccgttatgcaacggccgtggcgagaatgaattatctgtatgtctatggac

SEQ ID NO: 7410 - DNA, 519 bp, Emericella nidulans
tctcgcgactttccacagcgaactttttcagttcccagaggggactttcaataaagctgcagcagctcccaatttcgaagcgctccgtgcatccacctctaccgagagacctctaagcaaagcttcaaccttgatgcctctgctcggcacgttcccacaagggctacctgacatcacccttttacctatactgtcccatcgcggcgagaggatctctgattatgttcttaatcgagaaacagaacagtaccaaaggcaattcagagtacattttggaggctgtcagggcttggaggaagacagggttacagggcacttgttttgcatataaagccatgaatggattagactgcaacagtgcacaatgtctatagcatatatgggtttctcgactatattcaatacctgcatctttcagataatatgcagaccaaattgtatactttgtaagcgcatgcgaatgttgagaggcacgtgacgtcaactcgggggctttcttggcgggcttacataatgacg

SEQ ID NO: 7411 - DNA, 892 bp, Emericella nidulans
aaatgaagttccatattcgacggcgtgttctcctctattgccagcgattactactgtacttcaagacaaggtttcggaatataacaacggcaatagatttctgttgccgaacgcgatacctctacggtcaacgcggttgtcccaggtctcgatgagctcgcacctaagccgtctccaagagggacgcaggacgccccagtcgacggcaaagatggcagaccccacgctggcccctgggtggagacgaatgcggagcgagatcgcaagagttctggaacactgaatgaacaagctcaacaaatcgccgagtctgccgaacagctggactctaatgggaggccgattccatactcgaacgatggtgtcatggacgaccgtaacagggccgcgccaaaagaaggcactcgtgggacagaggggggtgtctctggaaagttgaaggacagtacttatagtggggataaatcgccgggaagcccgaaagaagcacctccgctaccccacagcgaagaacagaagcttccaagtacaggagacaacagcgggaaggacaccaaaggttacagctctgattcaacccttggtgtactcgaggtattaccccttctcgcgtcccattgacactgagctcgactgactttgttttcaaagagacccgcagatatgccaggcaaaccgcatgatattccgcttcccaagtcccccaccaccgttaaagatggtctcgtcggcttgaataaagaaggctcttcgacagctggcaataaagtaccccctgaggaagaaagggatgcattccattcgctcctattctcctttaccatgatcgttgtttccgagattggtgacaaaacattcctggtggccgctctcaggcgatagacacgcgcgc

SEQ ID NO: 7412 - DNA, 479 bp, Emericella nidulans
cagctgggtccatcggctgccgacctattgattaaacctccgcatgggagcgaagaaaacccgacccctccagcccctaattgtgcgaggctttcacacaatgacaggatgtagaagtgagtcaggattgtccattggttcataattccaaatctcaccccgagactcttccacctcaccattcgctcgtcaccttcattggaccgatgccatttaagttaagctgggttccaaggtttcgactagagccagagggtcaaaacttaatccagcccgtcgggactcgagccctggaggcggaaacagaaaaaagactaggttgcctacacactactgacgccccccttagctagctagcaccagcaccatacccacttcaacccctctcttgacaattccgtatttcataatttcacaaaaaaaatgcagctactactagctgctacagcctacagtctggactaagcctacaagtacga

SEQ ID NO: 7413 - DNA, 1356 bp, Emericella nidulans
aaagaagaagatagggaaacaacaaataaaaaaaacataataaagaaagaagaaagaagaaaggaatgaatgaaaaaagaaaaaggaaaaaaaatataagttaaaattagagagattaagataatagaataataataagaaaaaatataaaatggaaaaagaaataaatgaaaaaaaagaaaataagaaaaaatagaaaaaaagaagagatagaggaaatagaaaataataagtaaataaaaaaatgtagataagaaacatgaggaaataaataaagaaaaataaattgagaaaaaatggaaataaaagacagaaaaagaagagaaaaacaaaatagaataatgaatgaaaccaaaaaagtgtttacaaaaatatcaaagagatagattaaaagtgaaaaatacaaatataaaaaaaggactgaacagaacataaaaatatgatgggagaccgaacctagaaaaataccgagacatcaaagggcggacacagccttcacatggttacaccttggtgacaaccagaggggttgatggtggtagctttagcagtccactgcacgagtattccatgagcgtcgtgttcttaatacccatcaagacaaatatggctataaagttgaggggtcatataagggagtgaaaagaatcaacttttctactattgcagcttgaaatgtcgttgagccccagttcaagatactagagatcttgttaacaagatcaaatgctctgtctttatgtgtcgttcgccacatattaatattggccatgcagtagttaccctcattctcatcccaaaaatgagcccagagctcacgcgagggcccttctgtggttgcagaaaaggtaagcagcggacaagtgcttgccatacttggcgctaacgttttcaatggctgtccctcacaagccttatatagcgcctttagaatctcgatcgctgatgcaccacccactgctgcctggttttgtgcttggtagagattactgcctgttgctccagattttgcttcaacaagaaagaacgggaagcgtaaactaagtgatgataacccaggatcgctgatgagtgcacgggtctcctgaaggtcatttaacagatattttgtattactgacgtgtcgagattgtaatgcgatcacaagtacttgatcagagatccctactgatatgtcgggacggggatttttttaaaagaacggagttgtaagtgtttgcccagaagttattgatagaggcgtctctggcctctccaaagtagaatcatctgcgaattgtgccgataaatttaagagaggatcccctgagatgtcattgcttcgatgattctcaagctcttgaactctgctttgat

SEQ ID NO: 7414 - DNA, 485 bp, Emericella nidulans
ctgcatcggataagcctgatgcagtctcgcgggaactcgacgagcgtatttcgtagggtcttggagaattgcgaccctgggacttttgtccacggaccaaattgcctccagaagccctcctcaacatcatcgagcgcatcatccggctccacagagtactcgtgtctccagaacccggaattcggcggtccaaaccggccactcactgccggccggctcgagctattacagaaactacacgccgtcagataccattaaccggaatatagcagtatggataggctgcgcatgacttactgaaaaccactcggccaaaaggcatcatgcacttcctgcggggtatatcccagccgccagagggggaactccggatgcgattgaggtgtgggaatggttatgtgcaggttcgccgcaacccaagtccctacatacttgtagaatccgtcgacctggcggattccttggggctcaaggaatcttttgcg

SEQ ID NO: 7415 - DNA, 946 bp, Emericella nidulans
atgtgcgactttgcaagcgtatcttcaaacatgttgagataagagaatccatgagggcttgtgaggttgtggttagggctcggggctgtcactattagatgtcctaacacaaatacgaaggttgcggtttgttagtatgtgtaagggtgcttgtgattttaccttgtgcctagtagagcccgcagtggcagcttaggcctcgtgtggttttccctcaagagtccaaaccagcgcaatttttccattttcgaagacctgatgtgctcagtagacctcaccgatcagacacctgggtcaggactagcttacttttcatgctgttactgagggcattctacccactaaaggggtacgcgttgttcagtgactgacaagagaagtagatgtgggtatcaatatatacaatgatttatactgcttgatcactctttatttcccaaatgaaagtcaccatctcccctttgccctttcgttctcaggaggcaattcaatgtggtttgtgtactctggtgctcaggccctaggaccttattgctgagattaatgcattcttcgaacagagcaatagattcgtcaaggtgtcccagatgcttccaggtgcgagcgaggttgtgcatgcaattcatggttccctcatcttcgggtctgacaccatctgtaagtctctaataatggcacttgtattgcttcggcttccttccacttttccaacttctgatatacctgagcaagtttttctgaagtacttagagtttctggatctttcggtcctgacaccctcttgtgaaaatttcagtattgcgccactaatgcttcggcttcttcccattgctctagatttcggtatgctctagcaggccttccatgcttgtaagggctttgggattctctcgcccgtgtgctttctgtgttgtgcgagtgcacgctcttcatatttttttggctc

SEQ ID NO: 7416 - DNA, 500 bp, Emericella nidulans
ctgcctctccccttatccccccgcctcgcactcatacccccgcagagagaactcgcccgccgcgtcccaacacccatacccgtcccaacaattctcccccccggcagcacaagggtcgcttccgggtacaccgcgaggctccactaccgctctctatcaccagtcaacaccttcctccgcacgccctcagtcctccggtcgtgactcgctctcgaatcgagcgtcgagcccgtgggtcaaccaagatggccagatgcacatgtcgccgactgcggttccccgcgcctcgcggcatgattatagggcgttcgataatactcctcaacgtgcctcccttgtaactgagagaagggaatcggatgagaatgtgagtccgaagacggccttcccaccgggctcccggcgtgatagcgtggcaggtagcgagcaggcggctctgtcgcaattgcatgacaaggggaacagcatagctgcgcagggtaatcgcacgtttgaccgaa

SEQ ID NO: 7417 - DNA, 878 bp, Emericella nidulans
gatccattttttggtatcagcctcctctggagtcaaattattggactcagggagcaattgcttgagctcctcttctgtactggtttgcgtcctatctcaaagaaagctcgaatcttgacttcccgaacccggtcccagaattctcgatctcgttgggagtttgcttccgcagctgcagctcgttcctcgtcagttgttgaccatacaggcgaccctggtaaagcccaattgggaagcccggagtcgcacgacctcccaccattgctagtggatgcgtcctctttgggccaccaggagctcgctcgcaacagcttcacgaaaaaccgatattgcttaaccaacacagctgcgaaaacatccaaagtgacgtcgaggacacggccaacatccatgtcgaaggcacctatcattgctttcaccctctcaaacgtatcctcaacgacctcggcggttggaggttcattattgctagtggtgaaaagttccgtcactaacttagagtaaccttcagattcctcgcgaagtagattataatttgattgccggtataggagatttgtctgcttcctgatgcccatccgtgcgaaggtgtcacggacaaggccaagcgactgaagtagaggtgtttcgagttggaggcgcatgagggccggattaattccagtggaaaaaactaacggtttgagggcgtcattcgtagtgtcagaatctgtcacaatggacagggtgtcgaggaagagagtgcaaggatccaagcacggtgatgcctgctcttggccatctattccgatattaccagcggcaacctcttctccgataatatctctgagcgttaaccagcttcttcggcaggcaatcgctcgtcaagacacaacgaa

SEQ ID NO: 7418 - DNA, 767 bp, Emericella nidulans
gcgaaccgcgtaaatgacgatggaccccaacgcttctggctatccaatgcagcacaaccccggttaccctgtcccttcgcagggcactccacaacagttcccttactatccgaatcagatgccgtcgtttccccagtcaaatgctccctcgcagccctctttcggtgctgtaccactgcaaccaggcggacgtatgatgcccccagcctttccacagcaatcgccaggtacgtttgaattgttactttctttttctcgtggcccctcaacagcgacacggaccgttgcccgagagcgttgccaggcggtggaagcgcgcgtccttgctcggagtgcctccaactttcttttctctcgccaacgcatttgaagaaaggcaagccgctgacgttgctttttctgcacttcaggacctcacgcgaacttctcgaccccattttcccagccccccgttaccggtccttttcctcagccgacaaccacaacgccaaatatacccgcgacgcaagcgcagaccttcccaccaaacatgacctctggtctgacgaagactatggctcctgttcagcagccgatccctgcgcaacaggctccgatacagaattctgccccggctgttcaatcaccaggcgtacagtctccggcagcgctggcgcgggaaaaggagcgtgtctcggttcttttggagataaactcgattctgctgcaggaggccatcaacctccagacatcaggcaaagcaggcggcgacccgctcaacaggggga

SEQ ID NO: 7419 - DNA, 662 bp, Emericella nidulans
atggactactcatatactgcgggcggagcgcctataggaaccctactctagtcggtgactagaagcaaatgcagatgcctggtccgcacgaggtttttggtccgctagatccgccgacgagaaatctatcagcctagcgtaggtgggtgacgtttcgaccaagccgaattgagaatgctgcgtcgtctcaagcaattctatttacgagcgtgtgctgctgctgcacgtccggcccttcgaccaaaaacggccccggacgtaagaccacttcccccaggataattatcccaaaacagcccacccaacatctcaccggcacagtacaacccaggcaccggtgaatctgtagccgatgagatgacaccgccagtttcatagtcgacagctaacccgccaaaagtaaaggtcacaccgcaggtcactttaacagcaagatacggcccccgcgtaagcggcgtggcccagttcgactttggcagggccagcttcctacggcttgactgcgtagatagaccatccttgatggctgggtcccacttgtggttcggattctcatctcgaaaagccgcaacagccttattatactccctaattgtatccaaaaactggtttggatttcgtaatccacgcttagcacattgatcagcccgcgttttccaaag

SEQ ID NO: 7420 - DNA, 729 bp, Emericella nidulans
aaagaaaagtcggagtctctgttcttcgagtcccattctcggagagcatcgaaatttgcattctcatcgaggaaacccatttgcttaagcttagtaagtcgccgccgcattttagctcgtcgattacactttcttgtcctctctgaacctgtcccagggggtttggcttcgtgggtcggctttaagacaggtttcgatttgccaacatcttcaggttcagattctgactcagatgccgagctttcggacgaagaatcactctctgaatcaagagacgaatcagatgtagtcgcggacgtagattcagattcagattcagactcggactcagcgtcatcggatgatgagtcttcctcgctcgactcagaagcactggagccactcacggagctatcgctatcgctatcgctcgagacagagtcgtccggttcttccgaagtcgaaccagcccttggaaccaagctctgagacttcgctgtccccaactcttgttttgatttgtcgaaactgacgcgcttcgactctcttcgcgagacgtctccatcagcgggtctgccgaatgatctacgtgaaagcgagctttttctaggctctgtttgagaattgctcggtctcgaacgcaaagaatagctgcaatgagccatcacatcagatatccttgattcgggtagcagccctgatcgcaacatatctaacttgagatcctgtatttcttcgctgagatctccg

SEQ ID NO: 7421 - DNA, 1312 bp, Emericella nidulans
actttttttcctaaccaagttttttcaccccctcccctttcccccttttggtaacccccagggaacatcccacaacaaattttttaagaaccatttttatagaaacccttttttttttgtaaggattttttgttacaccaaacggggcccatcccaagatggcgaacccattttcccttacaagtccggaagcgaatttcggggcccatttcccatttccttttggccacccccaaccccaggggaggggcccctttcccttgggccccttaaagcatcccccgccaaatttaaagcgctacctaaatttcttgtgtctcaccttgaaacttccttcccaaaaattttggcacatcgccgcctggtgaatactcgctaaccgtttccacgtgaaaggcgcgaacttcttgcgctattcaaggggcgacagaagtccttcgttattgaacgtgcctcgttcctgatcgtacgtctcctgccgttgaaccattcgactgcgaattctgcagcgttcctggatttgcccggactgatcgccgaaacgtcgtgatttatagctggttttttaaacacatacgagtgatatagctacgagctgattcctgtgccacgaatcgattagtgacgacgctctcgttactgtgagcagtatctcgaaccttcccaatcccgatttgccgtgtgcgtttttacgatcccgtacgcctcgatactgcaacttccggcttagtaacttgcatcgggattctacgaatgcgatttgcgtgagaggctggtctgtttagcaaaagacggatagttattctcattccgaggacattgctagagcggataactgtcccttccacttcgctctgatcaactcgataaacacctccagatcatatatcgagaagagagagtttcttgcaacgggaggttgcatcttggtggggttctagaagacggaaattaattttttcctgatttccatcggtattggaacagctctcacccttcttttgattacctagggtggtccctgttctctggcagaactattcttcaaatcccctagcacggacttattagatttattctttcgacggtaacgaaaagaacaatggctgccacattctcttacgctcaagccgcgaaaggcatcgcttcaacgcagccgtccaaaacgccgtccgagtctaccacacccatccccaggttggacgagcaggccacggaactgcaaaccggcgttgatgctgcatcctcgaagacagacgccgtcgctgatgtcgacagcgaacccgtcaacaatgagaaagaagtgagtgag

SEQ ID NO: 7422 - DNA, 242 bp, Emericella nidulans
  unsure (1)..(242): unsure at all n locations
tatatatgtgctatatgtagtttatagtttgtaagttgttatatgttccttctctatgtagttctatgtatgtagttagttatgtatgtgtctatgtctctgtgtgtgtatagttatgtctctagtgttatatagttcgttatntgtatatatagttttatctctgtgtttatgtatgtgtatatctatattatatgtgtagttctcttagttttatatgtctagtgttatgtatatatatg

SEQ ID NO: 7423 - DNA, 491 bp, Emericella nidulans
tcaatattttatccgacggcatcccagttggtaagcaagccttaacttacacgtctttttctcagatcagatctgaccagacgtacctgcagtctaccaaggccaggaacaacatatgaaaggaccatacgccccctacaaccgcgaaccactctggaaaacgtcttacaatacaaacggctctctctacaagacaacatcaacactcaacaaacttcgcaaccacgcaattcgcctcgacaagcactacgtatccagccacagcgaagagctctacctggatggttccacatatgtcacgcgcaagggctcagaaggctctcagattgtctctgttttctcgaatcaagggtctcaaggcggaccgtataatcttagaatacctagggcgtataagcctgggactgaggtcatcgaggtactaagttgcaagagagtgactgcggataacgaagggcagcttgttgccaaaatggacaagggggaaccga

SEQ ID NO: 7424 - DNA, 586 bp, Emericella nidulans
tagggggcgaagaagtctcaccggacgcaatcactgaaaacgactttacttcattcattacggccgccaacagcgcaatctcccccttcgatctcgaaatacgaagcactctcccccaagtcgagctcgacgaccccgcaaacgaacaagtgacccccgaacgtgtttacgccctcgtgaacacaacaagtgatggattgactcaacttgcgacgacgtacacggccgatgagatctcgttcgtcaaacgcatcctcgataggatgttcgagacgaacaacaacagaatcaccgaagccattgcgatcagctctatcgaggcaattcagcaagcgaaggcgcccggggaaggcagccggcgggcgtcaggttccgcaacacaagctacgcaaggcggggctgctcagtcgctgagcatgacgcaagcagaaactgtcttaaaacaacttgttgaggatggctggtttgagaagagccggaagggattctacacgctgagcccgcgggggctgatggagctgagggggtggcttgttgcgacgtacaacgacgacaatgagactgggcagaggaatacaagattaag

SEQ ID NO: 7425 - DNA, 888 bp, Emericella nidulans
gtgggtggcagttctcgcctgtaatcgtacatctggtagcttaaaagaatcctgaggtcagaagaggcctctcttatctgtagccctaaacccattggtgcctaactaatctgttattcaggtgggtaaggtgaatccttcaattatccatctaattgcatttctctggaggtaatatgtgaaaacaaacctctacatcttgaagcgaagacaagacagagaggctattgtgcctctagctaattaagatactgcttctcgattgcgaaactacagcccatgtcagaatttgaatctgtcgtgactggattgtaatcacttgtgagtatctgtgttccttattgtttgcaatcaggccctacaaatgcagccatagcacattggctcgtcttggacagcgtgccgagtatcaccaaggaaaggcctgatcctgattcaggcttttcagtagatactttacagcagatagaagcaaagtatcaatttggaggtgcccaagccgtcctaacatgattcgcggattacgtttgtatacactagtctacttgcgatgtgcattctttcgagggccaaaggcattccgtttaattccataatcctcatagacaattgaccattgaccagcgagtgctggaccctgaatgacactggatcaaatgaacctatcttgagcaaatgcactcctagcaaccaggatctgacgctgctactctcattggtcccttgataaatgccttcccagggcccaggtttaagacagaagtttgttggcttttttctttttttacggataaaaaatcctctgtttttacctttgtcgccggccccaaagcagagaaaccagaaaaccccgtattctccctttttgttttttgccccttcaatctc

SEQ ID NO: 7426 - DNA, 537 bp, Emericella nidulans
tgtttgtggtgtcgctgacggggcctgtaagcgagagtttgccgtgttgagggacatttcgcctggacctgacctcgaggcgtttattggaagttgaagttggatggaaggagaagagaagtggcaagggggcaggcaggtttatagttatagagttggggatgacgtagcgagaggcacgcctgctagagggacgacggagggcggcgtagtggctgcaggattaatgcacaacaataattcaaggttattctcaatttagattgtataaattcaacctatacccccttgaccgttatctaattgtccattttccatacttcgtggtcgaataaacggtcaaaaggtggagagaagtggagtttgcagtgaattacgtcaagtctgcagcttcgagctcttataaatccacatgccctccataactcctccgcccaattcttcagcctggattatcgagagaaatcaattgaagactgaaaatggcacctccacgcagaagcaatggtctgtcagaacaaggagacgactttacgg

SEQ ID NO: 7427 - DNA, 1189 bp, Emericella nidulans
  unsure (1)..(1189): unsure at all n locations
tccaatctcaagaggcttggtcacgaatttgatctactcaggttgcaaggaacagttgctcagacatggctaacactcagatactagaaatccccacccaaataaccgtggcttaaggcattatctctcgccaattacaagctggtatccagagctcgatttatcaggttttttgatatcgatagctccacgatctcgcactaaaccccagatggttgtgttttcccggggttgcggacccgcgcaggtatagaagctgtcattgggagatttgtgcagctctatcttatcagggccatacggctcctcgagctggaccttggcaccgccatatctaagcgcctttgatagcagtttcattgatcgaacccgatgttgttaacttgttatcgacgatggcccatcttcaatacttaacggggtaagtagaggcagaggtggactcttggctataaagataacaactcttttgcattcttggctcgcgaatagtcacgacagaggggcgacgatcgtcggaatcgatccagtctgaagaacgatggagccttcagggcaaggttaaattgtgagcaagtcctcttcgcgcagctcctatctgagcaagaccaacctcctaccagcgtcagcagaccactactcggtagagcctgtatacagccaccacgaactgaccggacaagaactttctcatcatgtctagtgtaggtcagctccattaacaggcagtgtagcccctgtaatcagctaacgccccgcgactgacagcccgaatatgatccctccatacctgatggcggagatacgaccaagctcgacgtgaacgcgccgtttgttggatttgagttccatgccgttacatcgttgcctgactttcatcgnctatttaatttttcgggaacgggttctttttccggggtttgccttgaaggaggcttcacagccctttttgttaagcgctttttgtcccggccggtagggttatattggcttaccccctcccaaccggggggagaggaaccttgggagcccacatttcatgggggtccgggggtcccccccccccccgggggggggcccccctggggcccccgaaaatttggtcatggtcctcggccccctccggggtttgcctctccaactcttttttggcctttctcctttccccagggggtatcctttccccccc

SEQ ID NO: 7428 - DNA, 898 bp, Emericella nidulans
tgtgcttatccttctgggaactcgctcctcgttatctccgtcgtattctcgtcttgggatcttggtgagttgttttgtggctgagtttgtgcaacaattgcacaacgttggttccgttatcgataagaatacctaaggatatctatggataactctgtaaattaacggtactgtgatactggtgaatatacccgactggagactcggcccggcagatcaagcccagaccagttggcgcgatttcgcacgactcaagctggcatgcctcagccggcgtcttacgatcagccaacgcagtcaacgcagtaacgcagaccacgcagccagataaagcaatgatgagaacaagctgagttcgtattcagggaatttccccgaaccagatccgtctttgagaaacgatgtctcagactgctatcttcggtatacgcccgaccggctgaattttttttatcttgacagcgagagtcgcgctggttgacgatagtcgacgcgcaatctacccgcaagaagtacgggtgtcgagcgtcgctgtcgactcgcgatgtcgcagtgtctcagagcgcccgttgagccgcgcctaaaatagaatggaactggatctagctctaaacggaggaacgggacccgtgtctgagtggaacatcgacctcctctatctgtagtaaccgtaagcacgggcacgaaacctatcaactgaccagttcacgactcctagcgagttgttgagagaatctacagcgtcggtgcgcagaagaatttttatcgacccatccagaccgatgaacctgcagaatcctcgacctgctatagggaaactaagcgcagccgaccgttctcgttcggtcccgaccggccggtcattcggtcgcttagcacagcccctgccctgcacaag

SEQ ID NO: 7429 - DNA, 503 bp, Emericella nidulans
aacagagtggactgtacacaaggagtgtttcaagaacgaagggaaaagatagcgcactagtcaaggaacccacctgttggcaccagcgcgccattagcggcattcataagagcatttggcaatacgggtccaggcagataatatgtcgatagatatgctgcggctgggagacttctggggtctttatttcaggtttaatgatatagcggccagatactggtgataagatacggattcagtaccacagaagagaatttcggcctaggggggactggttcgtacaatgacgagctaaagtgcccaggggtgttcgacttacaatggggaaaggcggacgcggcgccggatgaaatacgagagactggagttccgtggatgaagtgggcttaatagatgaagatgacgagaatattcaaagggtttaaggggaggatgaggaggatgaggagaaagataacgatagattgtcgggagaacggtgtgtcctaccggcacatgacagc

SEQ ID NO: 7430 - DNA, 775 bp, Emericella nidulans
cctcatgcagttattctacctcagatgtgatacctggacgaggtgtcgaatcgataacgcggctatggcgggacaatgaaatcactgggtgacgctgatcaagcaatgcatgatcccgatatggctgtcttgacgttcgctcagatgacgccgggaaagaccctccttcatacttcgaccaccaacccccgaatgtcgaaagattatcgtcgatttggtgaccagaggtgtaatggaacggtttattctacccagaatggtaatttactgctcggttatccgtgactcgtgagccattttctgctcgggatctgatgttggagcatgggatcctcagcgggagccccaagctgagttacccctctcgaagatgacaacagaggcaggaaagccgcactgcgaagggaacggccgaccggacaaacatcaaattaggttgcggccgtctcgcgtgctgaatgaatttttccgtcgcttctctcaccaggcaccgacattatggttccaagctttttacctgtctgaaatctgtggtactactctaatgggagagtcgatacggcttactttagagtggtaccgtagtgaatcggaaatagctcagtcagagtcgaaatgctggttccgataagcggttctgttgctgacaacgcagcacgataatccttgttgccaaacaggtgagccaatgcgatgttctgccaccagcatcagccgtcggttctctgacatgctgcagttatcgacctgcatctgaatcaccattcgatgctct

SEQ ID NO: 7431 - DNA, 800 bp, Emericella nidulans
taaccctcactaaagggttccgcggcctgtgtggccttttggtcgccttggctatcttggatgttttgtttagtgtctgaggcggacgagtccttattctctgattgtggattgtctccatttatcgcaccggcttcactttctttgaccttgtctttcccattctggacgtcgccggccttatctttgtttttgtccgcctttttcgattttggaccagtcttgcccttagctcgagatggagcagtgtctgcggatgtctcaatggggaatggagcgtttggatccactttcctgaccagcaagaaagaagcgatgacagtggttccgccagggagccactccaggatagtgttttctgggaacaggtaccgatctcctgatcctgcatggcctgacgtgctgcttccgtacggagttagaggtgatgtaaattcgaaaaccactgatttatagttgaaccttggaggtactggcggcttcgcaggagtggaacggtaatacggagccggagaaccgtattggggcggccgggactgaattggctgaccctgaaagggcggctgctggtactgatactgtgggcctggcctcgaggccgttgcctgatgttgtggcacggggggcaagggttgcgtggcagggctttgttgcgaggccggaccaacgctcggacttgagacacggggagctggcgttggcgcggccgtatttacactgggttcttgtatcaacggcagctctgcgggcatgggttgtggcgcgggagtctggcggttctgcgagaacccggcctggtt

SEQ ID NO: 7432 - DNA, 928 bp, Emericella nidulans
aaacgccgagtcgattctgactctagttcgagcttgattaaaatagagaatccactattcgttatacgatgaggttctctgtccgtgcttcttgtttgtttcgcttagaggcctgcgtttcatggaagtagcatgacgaaacaccataccactgaggccaagatctgagattaacccaccttcgcatgacggctgcgaggagattttgagaatgagccttgacgctgctgatggctttcaagtgaagaagttgaatacgacgccctagggcctgggaagtatatatgctccagttagtcagctactctgctgaccgatagtgcatccagacttttcttccagttactgaaccagagaagctccatctcttgagacccgtggtcgaggtcccggtttcaacatttaggatgcataaaactatgtagacgatacagtgcagttgagacggtatggtctctttggcctgttctccgagaaaagcatgcattctactacactcaaagaacggaactgctatatcacggtcgtcgaacaagacagacggactgaaaatagctcccaagactggaccatccaagtctctgcctatattaaggggtgatagtagatattgttgttgctatcttctgagattatgtaatattttcatagcctggattgtggactctggggcagccccaaaacatactatcgaaacctggaatgcgtgcggcggaatcaaccgttatagaaaggggctttgaaaaatgttcccacagctgtctatttttcgagcgaccctaggtgattctcctgagtccctgaatgcggagggagtgcaggcttcacttactgacgttgatctgggccacgaaggcgataatcacgcaatacaggtatttacacatttaaggctgcttatctttatgtcccagataggcgcccatga

SEQ ID NO: 7433 - DNA, 886 bp, Emericella nidulans
atcctcccagaccaagtacgatcagagctcgaggcaccaatgcctccgccgccacctccaccgggtctaaaaccgttaaaccggttgcgactctgcaggatgagctgtagccgctcccactgatctttcgggatccgagacatgatagttatggtggaaatgtaagatggtgtccagatgacaaggtcggaaagcccttgaggttcgtgcaacttgcggcagttctccagatttggacaccgccttggcagctctcgaccctctccgaatcagacgtagtttgctccatcagaaaaagactgtttctcagagtactcagaagaagagttttgctggataaatagaagggggaagtttttatatcaaagctgaaaataactgacttcaactcctgttgtctttcccaatattccaagtcatcgtgtgattccctcacattgttctcttgtactattcactatccaattcagcaatcgcgaagatgggtccagacagggcagggaagagtgttttcctgggaaatataccttatagtaagtagtttgttcacactggtcatgctcaggatcgctattagctgacaccctatgcttagacctcactgaggagcaggttaaagacatccttagcaccgccggcaccgtcacgaaattccgcttgatgatgaatcctgagacaggaaagccaaaagggtatggattcgccgattttgccgatgcagatgctgccgcctccgctgtacgcaacctgaacgactacgagatcatgggccgcaagattcgtgtggactggccgcacaacaacgagaaggactcttgtgcccgaagactactcgcaaccgttggaaatgccaggtcaggatgggcagttgggaggtccgccgctt

SEQ ID NO: 7434 - DNA, 729 bp, Emericella nidulans
atatcaaccgcgtcttgcggcctctctcccgcaccgtaccctctctccgccctttcgttatccgacccttggccagtcgtccccttgagaggggtgtttgcccttaagccttaaagcgctgggaagttgctatcagtcatgacaatgacatttattataactgattgctaatctgtcacttcaacagcacttatgcattctctactacatgtcgccggcgggaagccgatctgaccggcctcacgccgacgccaatcacacacctttccgaaaccgagtcaatgatggccgagacagtgtccaaatttgctgaggagcagattggcccgaaagtgcgggagatggatgaagcagagactatggaccccgctctggtagagcacctattcgagcaaggtatcatgggcattgagatccccgaagaattcggtggtgcaggcatgaacttcacagcggcgattgtggctattgaggaacttgctcgtgtcgaccctagcgtcagtgtcctggttgatgttcacaacactcttgtcaacactgcattcatcaagtggggtgacgcccaggtccaacggacgtggctgccaaagctggctaccggcacggttggctccttctgtctctccgagcctgtctctggctcagatgcctttgccctccagacaaaggccgagaagacggcagaacggtttaaattgaacggatcaagatgtgattacccactccatg

SEQ ID NO: 7435 - DNA, 1071 bp, Emericella nidulans
cgaggtcacatgtcaaacgaccctcggcttctcctatctcgactaatttaaacctgtatcttcatgagtaaacagatatttagagacgagcgatctaagggtaacaaaaatctcgcgattctgtggttgatgaagttgatatcacctaacgcgccagatagtagaaccaacaatgtaagaaaaatgtatcaagcaaatctgttgaggtcacattaaatataagagaaaaaccgagtggtctcaaaagtcttcgtagtagcatttctttgttgcattgacttttttattccctcctctcttctgctcataatctctctactcccgccgcgccttctattcttctctcgctctactgctcagcgccagcagaggcctggaggtactggtaggcagcgtaggcagcagcgccaccgatcagaaggatcgcgtagagaccgaagccgaagccggtactggagctagaggaggaagactcgctggaggatgaaccgtgaactttaggagtggggtcgccgggctaatagacaaatattgttaaaagatcgtttccaagcgacatgacagggggaacgcaccagacgcttcaggtcaccaacaaggagaccctgcaggatctcgcgagcctcgtcgctgtgcccaacatcctcaaaggcctctgtggcgtcctgaccacccacgtcgaggaggacttcctcaccaccactataattataccaaatcagtccatggcatgtccaatgcggtgaacatcaaaaagctggaagatacgtgagacgtacgggtgctcatcgacgaaagaactgcagtcgtagaccttgtcgtgaatgaccatgtacaggtccttcttggtgttgtgctcggcaacctccttgaaagtgagttctttggcagacattatggcggtagtggcggtggatttgcgagaagtttcaagtaatctggatgaggaaagaagcgattgcgttagtgtacatttctgctaactgtaggcaagggattcgcggtcaatgggagccgatcagcgaccgatcaccagcgagcggactgagtgccgttgataatggaattgtg

SEQ ID NO: 7436 - DNA, 729 bp, Emericella nidulans
gatcccggtcatgcggacatctcgatctatacgccggcacaacaatcgtgcggcggccatgaatgttgtattttaacacaacgaagccgtccctgaaaatgcaagttggctctggagacatatgccacacttgaagccactaattcgagtcatgattaaagtcatggagttagaaaaacagatcagaagagacctgcgaaatcggcagacctggcatccaatgccaagcgaggttgtgccgattcgcagaggtcgcaagaggaaaaacttctctcgccggacccttagacgatagtggtgaccacgcgctgcagctggcacttagttcttttctgttcattttgcatgaaagctgctgccatactggaatatggttgtatgtactatagtgatacatgatttgcatatggaaatatattctcgacgtcaatcatattgagatctcacaagctcaacctttcccggccgagccgcaagtacattcagtgcacagagagcatgctcttaagggttcctagaggaaatcttatcgtgactcatcagcctcagcctcagcctcagcttctctcactccaatcagtttatgtatcctggagatcctgattgatcgtcctatgctgatccagggaccggcagatgttcaaaagaaaacaagcagatctaattgatccattgcgtcatcgacaggcacggattcctgcgttgaatggatgaggtcagcggggatct

SEQ ID NO: 7437 - DNA, 1342 bp, Emericella nidulans
aagagaggaagagttgttgcgtgtctctgggaggaaaagagaggagtttgtgacctcttcataagaagggggggggggaaggaaaaagaggaagggtgaaagccatcccacgctatagtggagagctgaatgtagaggtgacagaagcaggggtggtacccgcggttggaccgagatagaaagattgtggaccaggattgagtattgcaaataacctttcaggagagaggccatcttggtggggccgggacgccaggggtgtaaaatggaggcggttttcgggtcggggttcagacgtcttccagagcgggcggcagaaccgtcttcgagaacacatgagtcccccgggccaagtttatgggaggccttggggagggccaataccggcctggcatttcgggcgggctctgcctttggggccaacccagagggtttgaaaatcttatggcggtggctcttcccagtgggggtgctcttttctcttcagtaagcaagtgggataccctctgagctctggcgagactctctgcagcatgagcctgacgaccacgctgttgaatggttcttagatatttctgattgtccggatcaaaggattcaggttcttttgacggaagtgaaatggatgtttgaggctccatagcttttagttcacgcagagcatgtccaggggaaacgcctgaggctgcaagtagataatggctgttgcattttttatcgtgtaagcagagcaacattagaattaagcacagcacgatggcagtatacttacgctttgctgcttggtatatgagcgtctctcagactcccagtgccgaggcctcttgccttacggcgaatatcatcgagacccaactgaagattaggcaactcctcaaaattaccattttcagtgacagtagaaagtggacgctttttaccacgctccagtaagctgttgaagaaggcaggttgcgctgcctgagaagagatatttgcgggctgcgcggtgcccggagcaggttggcccaatccgaggattgacgattgcgcaggctgttgagtctgaggctgaccgcccaagatagaattaactgatggagcttgtgtcgttgaagggttccgaagatacttgtcggattactcggagagaatatgcttgacggctgcggcggttgcgacggctgggctgaggcgccaaagccgcccaggccgcctgttccaaatattgaactcgttgtgaaggacatagattatcctagtgagctggaaagatgcgaatcactagaaaagcaccgttttggtatggcaccgctttcgaacgaagatttcgcttttgtagcaatgtttttctaacatttga

SEQ ID NO: 7438 - DNA, 790 bp, Emericella nidulans
ggtctcatatgccttccggagtttctctgtgtgctgctcatctagttggacgtcatgcgcctgtgctacgaccagatcgcatgctatcttctcccgttccacgacagcctcaattgcgggaatatgtgcggtctcgaaggctgcgagctcggctgcggcggtaatgccatgtgtctctgcaacagtgccgacgaaattgtacacgtccggtttcaggtgaccgcctgccatgagctgtcagtacgggactttggatttgattggtaaggtggaaggttgtaccattcctccccgtcgccccggaacagacctgccgcgcttcgaggatcacaatcgacggtcgagagaacggctgggcttgatcgagcaagtggtacgttgttgaggcgccggcatatcccgcgccaataaccacgatgtcagccgccgggggcagggtcgcagttgagcggtagttgtccaacgtacttggttccgtgcgccagaacggtgtgatgctgttagcaacaggaaatggcttggatatcatggcgaatggtcataaacgtctcagaaatcttttgaggctgcgaaaagccgacgttatccccacgaagcaaggctttatacggaggatcagataagaagggagctactaactgctacccccgggtccacagacagttggagatggtggaacgactgattggatcagacgataaggagtaagacgtcagaccggtgcttaaacggttagacgccggtgtgcgcgtctccaactaatacatgcctgtagatacgcccggtgcgt

SEQ ID NO: 7439 - DNA, 793 bp, Emericella nidulans
gtgattctcaacgctgtggggtcatgaacatcatcgtctttctcgatatcatcgcggcccatgtggttatgctagtcaaaatcaacctcttgaccagcttcttcttctttgaagctgttgcgcacgctatagcaattggcgtttctagtaaggagcttccattggcgtgctcgattcgagacaaacatgctaataggcacagtctttctcctagtctcagagctcccgtttttccgcagttactttgaccgccactggccatccctgggcgaagactccggttttctctcgttagccttcgcaatgctgatactggggattggagcattgggggacctaaatacaccggcaacgagccaggaggaattgggcctcacattctggcggatcgtcatctcggctgggatcctagccctcgttgtcagcgtgctcaatgtggctgcggtaagtctcttcgccctcttctcttacatatttgtgcttgctaacgcgcatacagaacttcgcctttgcagaccgcgatatcggcgtcacgcacgccacgtccgcgtctacggagccgtcgcgccgcagaaagttgcctctcgcacaggcagccagcgctcattccagctcagctacaagcgtgaagagacgctgccttcgtacaactcgtcaagtcctgtccgacgcgtctcaacggcgagcatttcccggttccccgtcaaaatctctccgccgctgaatccgatgccgatgcctatgtcggtgcctacaaattcgaactacgccccgtcgtctaagtactcgcggg

SEQ ID NO: 7440 - DNA, 209 bp, Emericella nidulans
  unsure (1)..(209): unsure at all n locations
attttcnnacaactcatatactttaatcaaanctcggatagacttnngtaaacttctaaataccgaactgaaantacgtcttccancaaacatnccaattcttacagangttanaatcccngctctatactcnagtttnttnnactacaaactccntgtcntccntcatcaccaatccggagacccgctataactcttttctcccctct

SEQ ID NO: 7441 - DNA, 898 bp, Emericella nidulans
ttatctgtagcgcagccgtggtcctatatagcccccgaccaggctcttggaggacttgtgcttctgtgttccttcgcccgcaagtcgaacttcgactaacggagcgtgatgggattcaaagtatcttgaaattggtcttctgggcgtgcatcttactggagttatgggctcgaggtatgctgcgccttcgttgtcaatgtatacagtgacggcgagtgcattgctcctgattgtgatggtttgcgcggccatactgctaacggctgggttgtataatacatgaagtgcttgttctcatagaaaagagttgggcctttgctgagtgatatgccttcaatgcccgtacccctctcgattgcgttaccccgctgtaaaaaagcaaataccgggccttggagatcggacaatcgtggccttgacaggaatagattaaatacgcgctcctgcaattggccgtattgcagaatagttcgacggcttaagatcctgggtcaaggccaaaattagccgggaaacctacggctcctggcgaattgcgtatgcactttcagcacatttggttcgtagcacatattgctctggctccagatttaggattggtgcgtcgtctgaagtggttcagagacatatctctccacttggtactgccacgccatccgcatggtttgacattattccactttagcatggcttggaggtgtctttagctttttgcattggatgttttatttaggaatttgataaaatcttttaccacccggagtgccatttcttcctgaagtcagaacttcaggaggcgctttgattttgtgtttagaacatactggggttaggtgaagaaaatattgccttgacttaaaatttaccggaaaggttaagaggcctttaaccaaaaatt

SEQ ID NO: 7442 - DNA, 140 bp, Emericella nidulans
tcggcgtacagtagttagccacatacttcctatggggtcgcgcggtcagcgtatacatggaacaaggagtcaggagactagacgtgtagatcgaagtgcagagaagagacgcagtaagatagaacgacccagcgagacgt

SEQ ID NO: 7443 - DNA, 560 bp, Emericella nidulans
gcagaatatatgaccagtagcgagtgcggagtgtctccctatcaatccaagctttcactcgattgccaaccccgcctctcccagtttcccagctccccagccaacagacctggccaggtggaaagtcagcttaagtggacaggacaattccatactctcagtatgagtatgaattatatctgtcccccaagcctggttccttaatagacgtcatatggcttgtttgatgaatatgaatacgccatctgagccagcgccggttgccatgcaacatgccatatgactggacgtagaagccaaatatccatctgaaaaacctctgggttggacaatgtacttctgtgatccactatctctaggagcatgacaatcattactgataacccaccttttctgagtcgattagaaatcgtcagtcacagcgcctgcggtcgctttggaagagcaacaaaaatgtttcagtgccgtacattggcatttgagttgtagtttgaaaaaaatattgagcacagcctgctcccgtctcggatgtggtagaggctggccaagcttacagagat

SEQ ID NO: 7444 - DNA, 1217 bp, Emericella nidulans
cagtaggaatgcggagagttaattgtaggatccgagaccggtatattggttttgcttcattctaaccccgtttcgagggagcatctcaattgaataccttctacccccggtaggtcgaaaccttatggggacctgtcgatttacgagttagcaagtctgtgggtggctgccggtggccatattcaaccacgagttagaaggtcatagaccggctcaaagcatcatattgcactgtaagcctgggagtaaaaaacccccgtctcgagggagccccactccctctccaactgatcgtctgtgctcgtgccgtggccatgtatagagtgaaatggcattctattactcgtcgctacatcagataattcacatggctgtgttgcagtacatattggattattttatataagttgctgactctcgataatacaaccattcgctttcaaacaagttttctatccagaaaaaccgccaatatgcctccagcagctaccgaagctaccgaaacgccccagacccagcttacccttgccggcaaagtaattgccagtgagttttccccctccatctctggctcccagtcttctctaattcgccagtaactggcgcaaaccgcggcatcggactgggtgtcgctgaatcttgcctcacaaacggggcatcccacgtctactctatcgatatcagcacccccgagccaaactgccgactttaccttgctatctgatcgatttcctggaaagctgcacttcataaccgccaacgtgaccgaagaagaaactatcgctggccgccatgatgccataattgccgaagcaggccgtctccattgaatggttgttaacgccggccgtactccatacatggaagcgctggtttttacccaagaggggattgcccccctgtccatgtgaaacttgtcggggcgttctttactgcccggcggggggcaaagcggtttattaagctggggttttacgggacgagtgggtcctcctcatagaattcctgctctagttccaattggtccttctcccttaataacacctcccttttcctattccctcttggttgaatcagattttcctttatttctatcacctttccaccatcattttctccatgccctctaaccttattctactttacggatgccttattttttcggactacctttattcttcctaccttatctcatctctcacctgtgtcctgttcac

SEQ ID NO: 7445 - DNA, 919 bp, Emericella nidulans
gatatatcgtctcattattctctcctttccgtctcttgttgtccgtgtcttgttgtccgtgtcttttcattagctccgtccgggtctatgtatgattcttttttttggctttgctttgagtttcagtgaatgttccactaggtcatgttgttaccaactcaatatggtaaagtcatatggtacagatttatacattgccaggtattattcagtcttcgtggcttggttcactagaacagcgctgagggtcaggatagtgctgagacaattcagtcttggtgccgaagtaccatgtattaagtgccaatgaagtctatatcaggaagagatgactcgctttgtactagatgtatacacatgcatataaattaggcccgcacacatatatatagaatagagcagagaggaaccggagacctcggactagaccttctccttgccctcaggcacctccttattattattattactagcccgtgccttagcctgcgcttccagaatctccttcctggcgcgttcctgctccgctaaacccgttttcgcaaccgtatgcgtcttgctcagcacgacaggcctgacaaaaacactaacgatcaacccaacgcccgcgatagctgtataaaagacccaaatccgagagagggcaaaagtgaatgcagaaaggacgacgcgtttttgatcatcggccaaagagcgaataaggtcgtggttgtttgcggcgaaggaattctgaagagattgcgccgtgtctgggcccaccgcggctgcgatggtggaggctttgtcgacgagcatattttggtagataactgtgccgattacgatggagattgcagccgagacttgacgcaggaaggagaatgttgcggttccggcagccatgtcggaggggtgaatatttgcctgcagacaacgaggg

SEQ ID NO: 7446 - DNA, 675 bp, Emericella nidulans
cagatccgtgcctcatttctgtttctgcataccagggcgaaacacacccgaaatgggtaaggggtgccaaggctacgctttggtttgacgttagtgcgactctgggtgaggatggatgtgtcaatgtagttgtgatcaacatccatgaagagaaggggatcgaggcgaagcttgatggtccatctggtgaggttactgtgttcactgttaccggtgacaacccagccgtgacgaacatgaagggcaaggaagaagttggtctggttgagaccaagtgggatgcccagggcccatacgtgttcccgaagcattcccttaccctgctgagatggaaggcttgagcagctgacttcaagcctaccgatacctacctcactatacgattatagaacgcagtgtatttaaattttaattccatctccttgcatccatttcattctcaaaagtattagatgatagaggcaacatctcaaatcattgcatcatgatccgtcataaaaccataggctctcagataagctctcagagactctcgtgaatagccctaatagcccctacccatagttcacatcacgaacgttctcgttctcatcaagatgaatattcaacctttcgggtctgtagtccatcgtcgtgaaatctcccggctttacgatccgatgagactcagggagg

SEQ ID NO: 7447 - DNA, 417 bp, Emericella nidulans
gagtttctagagggccagtaggttaagaacagctgatcagctgatcagacgcataatctacttttcagccgttgatggcatttccttctgtaggatagtggaagaatattggttaaggtggcaaggatggtgagcgtggtgacctagacgatttacaagtgagcaggatggcagagtcgaacctgatccagatgaacttcgaggatgtgctggaccaagtcctggtataccgggtaacaggggctatactacctgtctcgtgtcaaggctggagactgcagagttgtcagatgtcgtgggtctagagggtgagctttggagatctttgcttgcctatagagttctgaattggctagtgccctataaacatgccatatccaaggtcgtcgtattctgataacagattttcgggagggc

SEQ ID NO: 7448 - DNA, 506 bp, Emericella nidulans
ctcgcgaaatctgctctactcactatacggttcccacccgacgcacttactccccccgtttcgctctggatgtttcaaaaaacactactagagacgcttcgttgtcaaggcagactgagatgaagtcacaacatcaacctcgggcggagctgagagagcgcatagctcggctgattgtacagcttcctgtgcatcagataaggtgaaacagcgtcgacggcctcactgggtcacaggcccaccagatatgcaggaggcacgattcgctccccttctcgaagcatcatcgtcaagctaccttcctcttcaaggactgctcccgcccaaggcacgccgttgttgtggtagctgcggagtacgaaacgtacttctgctctacagctgattccatctccacgggtcatggactatgagtcacactcagggtgtttccgaagctgcgaatgcgcgagacgtcaccgcctaatccacattctcttgactgagcgtcattgttgacgaagtgg

SEQ ID NO: 7449 - DNA, 109 bp, Emericella nidulans
gcgttaccagctcagtcgtcacgggcatgtcagatacctggggcctatgacccggaatgggagatggcttcaactcgtagggtatcgagtggatccattcaagatgggt

SEQ ID NO: 7450 - DNA, 536 bp, Emericella nidulans
aacaaactcatcatcctagctggccttcttttcctgctccttgcgatcggccacttccttcacggcttgctgtaccccgggactattccgtacactgctcagtactaacccctccttcatagctttccgcaacgtagcaacgctttctttgtcccctttaaagggcgcaaatcccagttgaagcagccgtgtcgcttcggtatctgtcgctcgactgaggtgcagaagctgtgccagacgctgaagggtctgttgacgaagaagaccgggggatccggcgtctttcgccccgggaggtgcgatttgtgatatgaaaatatgtaggctgagggagatggtctcggccatcttcataatctgccacggaaggagagcgagactggaggtgatgggcacggaccctggtggcttatcagagccagattcaacgtaaacaacgcagcaaatgcaaaaaagcgccactagacgtagcagcaagtgcgaaccgcccaactgcaaggaactcacatagcgacccaatcagaccacaagtatag

SEQ ID NO: 7451 - DNA, 495 bp, Emericella nidulans
cactactataggagaccacagcttatagagactctatcctgaatgataacatcgggtcaggactgacaagttctggagttttcctgacacgcacttgcatatcaaagtgcttgtgatacgccccgatgctcgaccctgatgtcgaaaaccgaaccatttctgctgactccatgtatcttagcttaccgtcactgttggacctaccaccatcttgactgtgtttgcgtttgagagctcaactgacgaattgcgcttttagacggatgactatgtaacagagggatctctgactggtggacgaagaatgtattgttatggcctcgaattgagccgaacggtattacgctatagtagaaaagctagcaggctaactgaattctgaaagaggtgacataatttgagccatataaggcttgctccacaatatttttcacgacttgggcttttggggccctttcggtacacgagatataattcaaacccttgggccacaca

SEQ ID NO: 7452 - DNA, 1163 bp, Emericella nidulans
gtagatatctgtcattggatatggaggggtaacccgccccactcccgatgcaaattcttctcctagactcccaccttgggcgtcgagcctttacaacaccttccggaacggcagcccagcgcgactctttccttggttctgctccaccccatctcgttttcatggcttaggggcagaaatttttttttgtttagcttttctttacttgctatcgcctctacggtggattctcggatcgaaaaagctgggcatcaacgcgttgatggtcgcatggcggcttttatcactctgtactttgcagcggacaaccccgcggctgtacgagtttgccgccttttaatttgtctgcgaccagcctgcgatggagcgagcgagtggcgttgcttgatccacagcgtcaagatcaacatacgtagcaagatagaccgcaagaaaatgatgctcggaatccatattgactcacgaaaatttctttctttttgcccccctcatctgttgcctgggaggtgagtcaaattgcccctcactaaacgctcctttgcttttcccgaacttggcccgttcgagagcatgatcagcacaaaggcttaacttgggcggtgattctgctgtctcgtattaataaactataataattctgtttttttttttatgcttcaggcgtactatatgccatatacaaatgctatcaatcagaagttaggggtatcttttgagcgtgcactctaagtcgctagcatatacacaaacactaacagcaaacgttttattccatgttcgcctcgcttaaatatcgcaataaatagccaaaatacaacctaatgaacacctatcggcgattggtgcaacgggctattagttttctcccaccgagcaccaatgtagtacactaccagccccgtcagtacacgcgcaatttgcagtatccgtcgagcaggcacctaccttaggaatgtgtcatcgttcgctggctttgaatttgagttaaagagacccacggcgcattgcagctccgcaggattggctgatagtgaacgaaggcgattattaggacaagcttgttagagcccactacggctgttttttttgaattgcctctcaaaaaacaatcctttttttggtttttttacaaccccacaaatttcttctgctcttaataaatc

SEQ ID NO: 7453 - DNA, 684 bp, Emericella nidulans
gtctaagatcattcctacctttcgcagacgtctctacagtgtctacaatagacatgttcgtcttccgcaggcaggatctgcctctggatcctatattcccggcagatttgaagaattttagagtgagttacttcaagcgtatcctcgactttacaacaaatcatctggaatggttacttcatcaacgagaaagaccaaatccgcaaaatcgcagatccagaacagggatttcaatataagattaacaaaaatgaccgctggaatgaggtttagcgcaatgcaatgaacggtgcgggcatctctcatggcaactcaccccattctcgagaaccaacgcccttcagaaacgaccgcaccgagatcttaaatttatcactaaaggggagcagaatgcatccgcagatcgtgctgtcccgcctccgcgacctgggtctcataaaactctgcctccctctcacatctggccctaaaaagccgcatgttcctatcttggtttaaaaaacctaacctccgctcacgaatatccttgttttcggcgacccgtgcaagactcgagaatggggttaccgtacgaaggtacggagagcataacgccggtcggccgtgacttcgcaagcatcttcagctaccagacctagtcatctggacacgcaagctcaagaggtgtaagcgtttctgaatacg

SEQ ID NO: 7454 - DNA, 1251 bp, Emericella nidulans
tcagcactttcatgtaaatcacccacgaaggtctgacggctcgcgaaacgatcgaaagcgacggcgcttttccagaagtcgccgcttatttgcgcgaggtggctggtgtatccggtgatatcgagggcaatggcaccttatcggttggagatgctctgaaccctgctccaccgcttcctccgaatattaaggtgaatctggggacaatgtctgagcaggaggcgaatggaggcattggcgaggtagatccggaattcaagaggaggattgatgagcttgccgcgcgggaagacttccaaagtgaagcgagccagaacgagctgcggcggcttgttatggatgcgatccaaggatctaatattgaaacgcaagataaggatgtgcggaggaaggtagagtgatgataccaggcggtgatgagagatgaccccacctacatatcatttaatgccctgacgtgctctgtgagccaaatatattgcttggaatttgaccgagatctaccgactgcattgaagttgatactctctctattgtttgcctcgtatgagccactgccacttgaaaggtctagcatggatagaactatcatttgcccgtttcgaccatggatttgggctccttcatacggaatgcaggcatcatacttgtgctcgtgtatagagtctagtcaaatgtatcaaaaaaatagcacatactaccgcaaacgtagtggctgataagctatgttatcggcaaattgccgacaaacaatactgtccataccttatcacggtgtcggcagtctggcgtcggatagctgctctccaaatagcacttcgaagacgcaacgataaggtgaaagtgtgatacggcgcaggcatgtataagagagaaatgcaattcctctctcggcagcgtctcgagttcgacaactaaaggcataatgatatacatgccgctcatatcatccgtactagtggcggtggtagccgcgggcccttcggtaacgatccttaacggcacgtatgaaggatatcatccacctagccataaacaagatgtctttctgagtttgctgtatgctcaacccccagtcggaagcctgcgatttcaggggaccctagagccttattacctcaatgggtgcatgcaataccgtgggtgagttcttaaccagcaattctaaggttggtgaagggaaggtcataaactaaagaaccgtggaacaatataacaaggcccggattcccgggttattccccatgggtc

SEQ ID NO: 7455 - DNA, 790 bp, Emericella nidulans
tcgctgcgatggaaacaccgaaaataaacgaagggcaaataacattttcagaagctccaaatcccgcaattccaagcttcacacgccagatcatctcaaaaagaatctcaagaagtcatgacccccaattcacgcacgatatgtctgaaaataaattccccggacagagcttccgacggaaaaaaaagcattgcactgccacgtaccttggaccggacgtccgccatgacgcctggggtatgaggggccttccgggggaaggctctctgttatcgcagcaattcgatccgggaacgcggtttgcgattgacggagacgaggcaggcagaacctcgacgacgggaaagtcggtgtctcacgtctcctctcggggatggatggggatgattgagggaaggggtgacggaggtttggagaggacgttcctcgtttgtggttgtactgcacgaatcaggtaaggtgcggatggttgctaagcgaagctgctgagcgttgcattgattggcctgaagcttctagggcttagggtattgacgtcaccgcccgacagaccgccctgtcagatagcatcattgaatcgagcagacggaccatcgcagacgtaagtcaaccgtctgcctatcatgaccatccattaagtatggaaatcgcgggtagaattgccagatttacgtcactattgggccctaagacattttcggattgtatcctagctagtaccacttttgacgcaaagtaggtattcagtgtttttactgagaacgaacattgtgaagttagatacagagtt

SEQ ID NO: 7456 - DNA, 760 bp, Emericella nidulans
tgactcaccggtatcacgtgtgggatgactccttccactcccgcccgtaatggttcgatcagagctctcatcttttttttccaattgagaaaattagaccactgtacgagaaatttcgaacagcttttgcttggttcaacgcattgttgtcaggagtgttctgcagcttcactcagccatcctctcactcaattctccgctccgccacaactatctatacatacttcctaccccgcgaaaccatgtcctccgtgagtcacccacaccagcttcccaagtacaggaactcatcatatcgcagttcttccttccaaatcctaatttaggagatagcaatcaccttgaggattcaagaagtatgtattcgctgaattccatagccattggcattgtctgaccgagctcgtcaacagtccgcggatacaaccctctcacaccacccaacctcctgcaacatgagattgctctaacagagaaagcgcggcaaacggtccttcaaggccgagccgaggccattgccgtcgcccacggcacagacacagacaagcgccgcctcctcgtcgtcattggaccctgctcaattcacgaccccgaaatggccttagagtactgcgaccggctattgaaattgaaggagaaatacaaggatgagttgctcattgttatgcgctcttatctggagaagccccgaacgaccgtctgttgtagtgcctcatcaacgacccggatatcgtacacagcttcaacatcaacaaggcct

SEQ ID NO: 7457 - DNA, 804 bp, Emericella nidulans
gtcattaaataataactcaaaacagttcaaaaattgtaaaaggtattcagagcaatcttaaactatatgattgcagtactccgcgagcttcactccgacagccttgccactggagagcttccttcaatgacggactgtaaggtgttgtggttgagactatagagcgctcccacggtctggtagtgtggtgttgccggcttggtattcaacttctctgttttgaggactgaatggctgtaggccagcaagctttgaatattgtctggcttgagaccttgcggtgtgctgcggaatattcactccctagactaactagaagtgaaagaactactggcttgtcaggatccctcatccaagacgcatcttggcctcaagttcatcagacgcgcttcaaaggacctaacagcaaacaacttgtggacttaaggcatgagatgaatgtggaggcacgctcaagtgtcacactcagattggcttcttactccatcattttcgagccatttgacgcgcttttggtgacttggtggctgttgactagttacgaggtaaacacgcgttgacttcgagagatgtagtctggcgtccttaaaatgacgtaagctaatgctcgagtcgactcacatatgcacgtgaccgtaaagcaatcagccaaagatgctaaaagattcgaattgtaccaagtatgcaggttgttcgtgataattctttatatttgcagagaactgctctgacagtgcatgcgctataacaattatacatattggagaacgtctttcgttcgcactctgaatcaattaggttcct

SEQ ID NO: 7458 - DNA, 619 bp, Emericella nidulans
tatctttgtccagactttgtcccggaacagtatgtcgtcttgggttatccatatcgttggagtcaaggtgttgggacctgtcaaacgcgatacctcgatatcgtcggcttgtgcagcgtcgtggcgcatgcacatgcatgttatcctgaaagaactccattttctattcctggtgtttaattcaaggtacgaattcttgggaaaaatagccgaacagatatcctgattcgtgggaagaaagtggatgtatcatcttgggtttccagagaactgcggctttcctgaccatctggtctggaacttcagcaagcaaacatagggctgtctggttaggcctgaatgtctgctgtcatccgattgaatctcacacgtgtcgaattctccgagcagcatacgtgacgtccaatttccgtatctggagctcttcgtcctccaccgtatctaggtgtatatatcattaagggcggactcgcactatcttaggatcagctagtcaattgaaaagatcctttgctgttcgtgaaagcgataagtatcatctcaagcaacagccgcgcggctttcgaggagacttaccaacaacgggcgaacgtcaggtgacagccatttatactgtcat

SEQ ID NO: 7459 - DNA, 893 bp, Emericella nidulans
gagaaagagcgcatatgtcccgggtttaaatgggtaggcaattaaaaagaaagatcccggcccggggaattgacatttggtgacggtttgacccaattggtcagtgtggtattaaacttaacggtaatgttgtggacaaaagcaaacagggagagattttttgttctgaaaactgtctatgaaattgggcatgctcagctatactacgtgtttactatggttgttgtgcctggcaagagaaatatttgccgcaggtgacgaagctgatcttcttcaccgtctgtgaccgccgatttgcatagtaacaagaactgcaatacttctctcttcctggaccaaccggacgtctagctactgtgaagacctttaaatatatattcagagctgcgtatactcgatcgactatgtgtcgctttctagtaagtcaatctagcattttcagaaaccaaaatctaacatttctctaggtgtataagggcagacatgaaatccgtctcagcaagctagtcacagagcccagccattccatcttgacacagtcctacgactcacgcttgagacttgtaagcctaccagcgccatctgttaggctgtgccctgattgagcagagtcattcgcacgtcccactcatacttgtccaattcatttcttggggagtctatctaaccaagtaataggacaaccgccgccctgtaaacggcgacggcttcggcgtaggtttctatacagaccccaagctgggtccagagccctgcatattcacatcaaccctgccagcctggaactgcgaaaacttggaacggcttgcctcaaagacctgttcaaacttgatttttgcgcacgtccgcgcaacaacagaaggcacccttttcgacacaaactgtaacccgtt

SEQ ID NO: 7460 - DNA, 471 bp, Emericella nidulans
  unsure (1)..(471): unsure at all n locations
acactactatagggagacccagcttaggaactgcgagtctaatgtcattactccatgaacaccgcgattctcgcccgcataccgaacgcggaaaggccggttcttggagacaggattctcaagccacgttggatgactgacacccgctggctgagccatatggaaatatgactgcatctgcatcgagcggagctgagcgctcgaccgactgacaaactctgtaggctgggaagggagaatggttagtgaaactctagcaaggcttgcagcctggctaagaggctcaacgacctctgtcggccctttctcactcatatacacgacatccgatagccccagcgactggatanaggtacgtcgcaacctccaggccaagaccgaaaatccagccggattagttgataataagggatttaggggnttttgttgctagcaaggtgcggtactgctccataaggttcgcggcggcta

SEQ ID NO: 7461 - DNA, 518 bp, Emericella nidulans
aaacgccttccctgttctacatttatgtctatctgcggccagtgattgaagtccgactatataggctgattcgcagacgattacccaagcctaagctaacagatgatctatcaattaaggtggcatttgaaaacgatcttgtcgattggatggtacctactctcggacgtcgggctgcagaggagacacagcgcagaacactgtccttaatggaagatctgtcctatgagctgggtgcacttcggcaatggctgtcctctaagatacccttcaggtcacgctggtcttctcttgtccatacagcccaagagcaatccgagactccccagccgcagggtcaaccagcttatcgatcccttgatccagaggaacagcatcgtaggttgagaagtgcccagtggcatcctgccgatcaaactatgtccacccatggatctgacgcacgttctactgggagtccagcgcgctatcaaacgaagaacttcaggctcctaatacagacaatatggatctgttga

SEQ ID NO: 7462 - DNA, 461 bp, Emericella nidulans
acacatacgactataggagacgctactatatactactaggatctaggcaccttgtcagaatgacctggctctcgcctactgttgacattcgggtatagccccttgcatggactatcacgaccttggttactcaaaccgcgattgatgaaatctgcgcctgcgagcttctcgaaacctccttgcagctactatactgaagatgacgtcaactaccgtcctgcaaagggtgacccaggtaacgggacagcctaatgccccctatgacgcggcctcctacatcactagagatacatgcccgggcctaggaacacgcgatgggaccgtaaggactgatggatacttacacccacggaccagtgtgtgctgcatggacatgtgctgaccaccccgtctggcgcctatatatgctacagaaccgcaagtatcttacacttaacagtttgatatttgattgcaaccca

SEQ ID NO: 7463 - DNA, 582 bp, Emericella nidulans
gctcggtgagctgcgcgagttgatcaaagccgatgtcgaatgggcgaggcctgccagagagctccacgaccttctcgtctcctgtacagggaacgaggatgaccgtctctgcggctactctggcctgcattctgggtttcgcactcggcttgaaacccaagtctggggcatgtatgagcaggatcccactggccctctgaatatctacctctccggcaagacagagaaagaacgtgcgggcacgttcctacacacctacatgtccagtcggggttatacacgctatcagtgcttcatggctgaagtcgcactgtccactgcaaatggcaccctctcagataggtggcagctcccaacccgcatcgtcagcgatattgaacaactcacgcctacggaagccatgctctttctgcgtcggctgtcttcaacactcgaccaggactgtgcagaactcactgccaaagctccgcgcttgctgcgagcactgtctcataaatgtcccctccttgactcagctgcgcgcgctcgcctcaagtgagtacctgagcggtagagtctcgcccgaagcgctggtgtcagctc

SEQ ID NO: 7464 - DNA, 962 bp, Emericella nidulans
ggagtttgtagctatcagcacaccccgttatggtcaattgtctgagaccatcagagaccacgggaattagtcaaaactttctgtctatccctgtagaatggcgttggatcaaattcactgcagcttgctttgtaccgtagggtctttcggagttgatacgcagcattcctttggccattcctttggcttccagggggagggcgtttatcgcgcctataggtacatcagaggcgttgcaattatacaaatgaacctgaatagtatgttcgttagaaagggctgttcctccagtcaatgccagcctccttcctcagcccagtaagtggtagacattaactataaccctacccatagccctacctatccgagggtggagtacacgaaacatccagcatacttgaaacaacgtgtgcggtggagtgtgcagaaagcccactaaagtaagcccggatatacttagcaaggctttcgggtattaattctttgcttgcgagctaaatgttcgggcagcgtgggcacaagccctataactccggcaacgtacagctttgtctgatggctctgtaagcgtggattccacagatgatctgaacttggcctgagaacattgagtgtgcatcttcttccgtacaagcctgatgtcgacgtagcgcatgacttctcgtatggaacagaccgcatatgttgaactgagatatagtctagtgtgcttactgatgcgagcgcggtggtacattcccatgtcacatgtacgccatgtaggcgatgcagacgataatcaagggtatattgcgcagtgagattgcgaaagtctcgaacattcgcacgctaccaacttcagattttctcttttctttgatctctatttcgtaaccagagcggactatggccttctcttagcaagtgaagccttggctcagcgttgatcactgaaacaggccattccatcagcgaaataagag

SEQ ID NO: 7465 - DNA, 533 bp, Emericella nidulans
ctcctacttatgtgagcgctactaatatactactaggatcgccaccaccaactgcccggattccaatagcgcagtgcgttcccgcagggtccgttcaggggatcagctcctttctttatcacgcccactagtgctctccctctgtcctcgtattaatccattatttcctgttcctgtgcatcctgacttcatgctgactaggtatttgtggcaggaggcattcttggtaccgtaggcctaggcattccatttccaaggaactcctacctgaacgcgctgctcgttgtaatactgccgaatttctaaccgaatttgtggttcggcatacgactaggaaatcatggatatactttaaatatttaatctggctaatcattgactaatgcaatgcaacacaatgtacaaggtgcaggacaaacaccaaactccctagccaaaactgtcatcgacaagtaaggggtctcaaatacaggcagcgcggactgcaacaaacgttatcctgaatcaactacgtggacccatggccactttcc

SEQ ID NO: 7466 - DNA, 1091 bp, Emericella nidulans
aaacaagacccagactcacaaaagaactgcgccgtctgaaaacgaaagggaggaggatctcgactctgtttctgagcaggttcgagagttcctggaactggatgagtggcggtatgatgtccttccggggcttgttgcggacagacgtctaggtaatgaaagaggaagcggaggccatctttctagggaggaacttgtccagttgatggagtggaagttgtatgtttgccgtctatcccctttccgacctactacccacgtacaccagtgtataaaaagtggcacttatgacacgcaataactaacaacctactcctagaaagcacggcgtttaccgcccaaccctccttggcatgatccgacaaaaccaagagaagatcatatcagacactacggcgagtgcgttttcgtctttacctggatctgttgaagggaaggatgggtttgaggcgattgagaatgccttgttgacacttacaacgccccttcgcggtgttgggcccgcaacagcatcactgattctgtccgtcgcttgtccggagatgataccgttttatagtgacgacgtgtatctttgggtttgtgctggtgtttacccgtcctcgtctttttcctcgaaaaaaagcaaagaggtgaagccgaacggggatccgaatgtcaagtataatgtcgcggaataccggaggttgtgggagagggtggaagggttgagggcgaggttgaatgaggaggctgacgaagggaaacgggtttcttgtaaggatattgagaaggtggcgttggtggtgaggcattttggtttgtctgggttgggggtttgcgatgagggtgagaaaggggatctgagggagagtggtgagggtgcagggaggaagaagaggaggttatagatattaagggatgcgaatagtctagtataaaggagtgcgcacttcagggtcatccactgcaattagctcccgaactcgtcattttgatggtactagttcaagcatacatatcttaaatttaaagcatacgctaacatacatggcctcgctatgcaaccgtcaaaatgcaaacagggtatctctataatcaagtccgtgatg

SEQ ID NO: 7467 - DNA, 730 bp, Emericella nidulans
cagagcagaacatgtttgattgttgccccgtgttaggtgaatagctaatgtcactcaagccatgtacatacatatatacctccacaataacgcatacacagcctaacaatatcccaacccatagtcactcaagtaaagcaacaggaacttcaaccaccacatccctaagccaatcggcaaccccctttccgagcccatccaaacgcgaagaactcgaaactccgcgccccagaattccataaatgacaaaatgcaccgccccaatggccgggaactctacccgctcaatgaagtaatcatcgcgccagtcggtgccaagtaggtcgcgcattcgggaggtcgttaggtagtgtcggagccagaggctcaagtgtttttgtctctctctttgttttctttgtttatcggtttccagagtgaaaggggatgggggagaagaagggacgaagaagccaacattcaagttcccgcccttatcacctgagcgcgctaacacgacatcgcctagtttgacacgcttggttagtccgtcgaatatggtcttgtattctggactctctggagaaatagaaggtggatggtaattctcgcggggctggagaggcgcataagctggtgggtggccggtctcaatagaggttatcgtattatcgtcattgaggaggttgattctctcgcccaggtctgcctgtgcgatgagagccggataatatgctaggaacgggcgggg

SEQ ID NO: 7468 - DNA, 958 bp, Emericella nidulans
gccgctatcggaaacacaccaactaaggttctcctccctccattaggtattcttgtcctgctcttgttttgtttctcctcttctctccttcttccatcttgtccttttgcattctcaaagggcgtatacacacagtgcaaaatctcgaaagctcccacgccgcaaacggaaatcgagtccattattcaaaggtaccgtcggcttccccgaacagctgccgccaccgcatcaacaccacacttagtctcacctccctccgtcaacccctccacgtcataaagccgtacttgagtgcggggtgcgacagtctacctgggttgtaatctgtacaatatactatacgcttggaacaaaaaagaggcctcctgattttacatattttgtcgcgcctttttcaccatgaccgacaagaagccgtccgtgctgattattggaggtttgggtatgtgcactaaacctgacctaccttttgtgttcaaactgtgtggaaccgtgtttaacctacgtcgtcttgcaggattcatcggtcggcatttggccctttacatccacgagaataacctagcctctgaagtgcgactcgtggataaggtcttaccgcagctagcttggctagccccagaattcgaagaagcttgctccaaggataaattcgttcaagctgatgctagccgagaacgtgagttcccatccttttgagctgaactagatggaggggcttcggctaatgatgtcttcgttaagagcatttcccccgcatcttcgatcgcgccaatggcgaacagttcgactatgtgatcaactgcgggggtgaaacaagatattcccagcccgacgacgtttacgaggcccgggtctataatctcagtgtggccttaggtcgcgaggtggctcgtcgaggcattaagtcctttgttgagtgttctaccgctcacgtctacaaaggcggctcgacccc

SEQ ID NO: 7469 - DNA, 851 bp, Emericella nidulans
  unsure (1)..(851): unsure at all n locations
gacgatttccaaccccaggctgttggctggtgggcagaccgttcctggcgcccgggcggctcgagaattggccacgagcgagcgagccactgcgactgcctgtcgaatggcggatggcgccgcattgtctgggaatcggctaaaatatgggcaggagaggcgaccgactccagaggcagagctggctaagctgtggagattccggggccgcagttgtgggggattttcgtggagcctgtaagcatagtccaatcagggcgacggtactgcccaggtaagattgtccctgactgcctggggttctggaaacgagcgaaacgaggaaacaagccaacgagccaacgaggaaacccgccaaacgacccgacttctagcgagcccgagcaccgatgcattagatgcactagcccagcccgcgcatcattattcttcgcattcttcatctgcataagctccccaaccggaactgagtcctccgccaacggcgtactgcatgagaatcatgtgttcacggtcgccaacctgtcagaataccccagattttcgctccgactggttgtgcggccagaatatctgtcaagctcatctcccaaggctttacaaacagcgttcatccccgttgccattgacgagcccgctgatcaggcctcctggtaccacttgggccacttggtaccgactaggtacagcctaaggacagcaccccacgctatgacgtcgaggctggagccgtgccctgtgcgctgcagatgcctattgcccatcttcggactttcgcccgaataagtcgttatatcctcctggggaaggctaatatatcccggagtaggccttggccgnaaaatcggggg

SEQ ID NO: 7470 - DNA, 1017 bp, Emericella nidulans
tacgggcagatttacgtggcaagagatattgcgagtcggatgtgatctcgcacatgattgttttatgcttgaattacctgcacaatggagtaactctacatgatcacttctaatatatatggtgtcctaaccttttacattgatgaatcaagaccctgggcctatgataccgccagctttcgacagcccgagacctcgagcaccaaagttatgttcaaaggaggcatattgttgaatatgatggttgttagcttctcagagacatctgcagatgcctaaggaaccgtattgtagaagcatgagccaggtatatagaacaacacttagaaaaaaagtagtcctagatcccagacactattgctatgttacgctttcatataatctagaccctctcctgattcatctactctatagtcatattctgaaatagtcatcatgctcatcatcctttcttccgattatgggtcaagtggcttttcaccaacgagcccgctgacagagcagagcaaagactgagctctccagccagcacgccagccgccaccagcagggccagctcctgtgcgtttctacctggctgttcggggtcggccccttggacgcccatcatgtgcagcattgccttttgagggcccaggactgtccctcccccaacggtgccgacttcaatggaaggcatgaaaacagagatttgcaaatcaccattcacactgttcgggagttagcgccgcaacatctatcagaatatctttagaggcagtgtactcactttttcatcacggtcagagtgttgctgctatgcacattctgtgcgggatcctgaccagtggcaagataaattcgcgtgacaacattgtgcggctgggccttgaaccctgccagagcccctgcagcagcactgcccaccaggttcttgtagaccttgaggctgcccaagggcctagacactggtcttgagtgttttttcgacccccgtttaggtattgtcacctgcccggggcggcatggcttccccct

SEQ ID NO: 7471 - DNA, 853 bp, Emericella nidulans
cggctctgatgtgaaagttaaggcctacttgtgcggattttagctatttcgggacttttatatagatctatttatatttggccgcaggactgcagtgattgcggttacttaagctgctgaacatacaatcttggtaccctaatttgcaatggtcgaactggaatatactcaacatgttaagagttggacccaccccctacctggtgcctcattttaatcgctattgtattaacatcagctatctaccgtgaagatgaagagtataattgagtgaaaactgtttgaggcgtgggttgatgacaactaatgaagtattgaatattgtgttgacagctttaaacggttgattcctcttcttccgacatcagttagggcaaaaagtacacaagctcaacgggagacgacggtcaaagctcgaggctcagccagaagttaagcctttacagaactgagcacaagctatcgtttaaccctggtgggcgtagttggtaatttcacggctaccagctttctagcgaaaccactcccaatgagttgaagcttacggcgagaggctcgtctagttaccattacttcgatcataactgactcgaaggcttattggtcatcgatatatgcgtctatatttattagaatgccttggtatcctaacccttgtggcgttatcctcatttggccttctttaacacctcctctgatgtctctaccaagatgtcaaaggccctccgaacatacttctcctctgcgcgctcatttgcactgaccacacgaatcgcataaaccccagccataacagtagaggtgatgaagatctccccgcgagcgttgatggtctcgtatacctccttagtga

SEQ ID NO: 7472 - DNA, 789 bp, Emericella nidulans
  unsure (1)..(789): unsure at all n locations
aagagatatttgaaattcataggggtagtgctcaatagaaaatgtgattcaaggtgggaagcggatgctgtgtctcagaaagatcgagcatggaaacatttgatggaacacggaaaagcaatcattattatttgggcttacccctccctcagaaactgaccgtcttcaaagcacttgacacgtgtaaccagtgagttacacggctgagattgaggggtgcacatggggctcagagaagctcgacactaaacagccagccttgtaggatcagaccatcacgcatccaaccaacgaagctgaacgctatcatcacgggctggcgctgggaggtggtgttcagcgaaaggctcggcgtcagatttggcatcccttcttgtccttgagccgctccactatcctcccctctgtttatgtcgttgtttttcaccacgaaagcgaagtactttgtgtagcgggatggttaccggcatcgaggttgcaggactgatccttgggagcttcccgctgatcatatccgggttggaacattatggcggcgctttcgagtccatgaaagaatggattcggttccgtgccgagttcgccgtgttcatgaacgccctcttgccgcagaagatattcttccgccagaatatcgaggacctactgtcttccgtcgtcgactcggagtacgatatggcctgcatgcttgacgatccaaacaaccctggcttgaaggacccggaccttgtatggaagctcaaaagcggtatcttgcgcacacagatgattgntgatggatatcatctt

SEQ ID NO: 7473 - DNA, 1650 bp, Emericella nidulans
aaaaaaggtcgtgatctttatggcggagattaggcccgacgttaactttttgaagagggctttgagctcggtgagggtagagcccgagggtatgaccccagcagactttgtggggtcgtttaaaaaccctagaattctctcaaggtcgaaattatgctctccatctccaatctccaggaatgacttgcgaagccttcagcagcacgaacagtctgaaacatcataatcgattaagtatcttccagcttctgttgatgaatgacccagtgtccgtattgactcagaaatactgactggagtatcaatgtccgctactgtttacagttctggacccaacataggatgcaggattggcctcattgaaatatgaccccggtcaacaagcttgcccttcaagggcttttcctggaagtgggacatataatctggatttacgtctgccctctcagaggttcgagctggaaacaccctctacgacaagttcaggaccctggtgcgagctggatgggagaaataagggagaaataggactaattggcagccaccctcctggcacgagtcagagccgcgggcaattgtctttggaaatgtcgacctgaacgagcaccgggatcagagagactccgcagaacattgccttgcagttctggcagcagcgcgcgatactgaggcctagagaccaaactcggactcaattgacgatccggaacattttattgcgaggtgctaggcgctggaaactgtagatcaacggcttgtgttctactcaaaggcccggctagcgaaagacgtcgatctagatctggagagggcgggggggggggggcacttacattaatcttctctctcaccccgctgatccatcccccttcctactccacccctagtctctcccttgctcactgctgaactttcatcccctctacacacccatcccttcccctaaatcctcacactcctctccccctccatcaccttcccattcccctcttctgcacaccaagaaccccttcaacctgctttactctttcacccagccccgaccacctccccttccccacaccccacctttctttctctcacccttcacccatgtccaccatattgaccgctcattctcttctctccacgactcctcacctatctccatcgcctcctttgcttccacctctcccctcaccttcttatccccctccccgcatctttttcatcccaccccctgttttcttcttcaccatacaccctcccccaatcgcaccatatccttccccttttgctcttttccccactcaatacatacttctctaccattcaacaccgtcaacccttcctcctcgcttctacccctcaccccctccctctcccttttattacttctccacttccccctttctccaccccactcacatccctctttgccacactcccccccttctcccttaatatctctttcctcacctccaccatcccacaatccctccctttcacccccctcttttactcctcctcctcttccttctccctcatccccctctcccccccccccatatccccctctcccttatacttctcacacctctctcccctctctccctacacccctattttatcacttactcccacctttttcattttcacctctctcttctc

SEQ ID NO: 7474 - DNA, 513 bp, Emericella nidulans
aggtgaagctgacagtaatttgcctcccgtaagacgaattagtcgatgataagcaacggcctgatacgttacccggggagatccgccagcgtacggcactttggagatgaacgctggcagatgactcgcgggctcagggactcgtcccgtggataactcggccagtgaggcccttcgagcctatcgcagacggtcccactcgatcctgaattactggtctcggcaatctgggcacatggcagagataaggaatttttttttgccccagtggacggtcgggaaataaaatctctagcgcgctgtcgtgtgagcttctggaatgtcgtttctgcaggctgagtcctcatcttgacgcccatttcgctatcccaacggcttagccggtcgtctttgcacctcctatttgacctcacagacagcatggggtacgctgagtggattggccgtaccaatgcggccgtggctcgtagcccggtcggtcgctggtttcgcttggaggggccggtcatgtat

SEQ ID NO: 7475 - DNA, 1047 bp, Emericella nidulans
ttgacctattttcctacacacacggttcctttgcgaccctactccgcatgcctcatctatatacccctgttgttagttgcagatgccttccctctgggggtgaccgaagcattgacctccccgacagagtgagcctaaacgagttacgcgaccgaaaccctcaacccttctccgagagcgccgttggacgatattcaaataggcggaatattaccgacctcgaaagatatagaaactctagatggcatctccacaagggggctaccctccccaggaagggtacggacagcagcccgtggcctatggagcccctgttcagcagcccggggaagctcctgctccacaagtccacaccggagggagaaagaagagagcatatgctggagaggccttcgagatcggttctggtgctaatgctgctctcggcgggcagccaccagccggcggtgcctatggcgcatacccccctcaacagcctgcctacggagccgatccgtcgcagatggcccaaggatatgctccgccagttgctccgggagtcgcacagatgacccagcagtttggtgctatgggtgtaacggatcctcatcttatgccgccccagcaagcgccccaggctccccaggctccccaggctccgcgggcagtccctctcaaccagctctacccaaccgacttgctcacccagccattcaatgttgctgagctcgattacccgcctcctcccatcgttttggcccctggggtatgtgcttgataaggaagccttatgttgcattatgatgactgacatgtagcttagacgagcgtttacccctctccttatgcgaactgccctcccaaatacgtgcgctccacactaaatgccgtcccgacaacacactcgctgctgaagaagtcaaagcttccgtttgctctcgtgattcaaccttatgctgcccttcatgacgcggaagaccaggttcctgtcaaaccaaaccgagtcatctctcgttgccgacgaagcagatcctatatcaacccattagtgacgttccttgaccatgg

SEQ ID NO: 7476 - DNA, 227 bp, Emericella nidulans
gaccaggagggttgttgggctggggactttctttgcaacgtcttcgacgtctgcaccttctataggggctatggagatgggtaattcggattcgttgctgcggccgagcatgtgcaggagcagcttgacttcctcgtcggggttggatggccagacggcgaggtggtcaccggtcttatataccacgcctggagtgctggaaatgtcgaggtcgatgtgcaggcagt

SEQ ID NO: 7477 - DNA, 1365 bp, Emericella nidulans
  unsure (1)..(1365): unsure at all n locations
agtctgagacgggagaccttgaagatgggcggattgtttgataacatctctggtgaggctgcaggcagtagaactgtttgaagaagattatcaccggacagagaaagacggggaaaagcgtccatctgttacaggcaatggcgatgggattcacgaaggagtgggtagttattactgtgccggaaggtgagctcatacatctttctagatttcattccagatgaatcgttgctgattgaatcattagcacgggatttagttactggaaccactagctatgcgcccctgtctgaagaggagcccaacgcatacgtgcaaaacgcggtaacggcagcgttgctatctcgcactgtcactgctaatcagaaggtcctctccgcgctccatatttctcaacatcaccctgctctttcagcggttaagcccggcatgacgttggaagaccttgcgaaacttggcattcaggaccaggcgaacgcgtggcctgttttcaaggctctttgggcagaacttacagcaacatctgcggtgccaggcctcgaaaagaacttcagacctcgcccccctacgctcgtgaccgttgacggtctggatcactggatgcaaaactccgcgtaccgcaacgccaaacacgagcctatccacgcgcacgactttgtctttgtgcgacacttcctgaacctgttgatgcctggcaaaggaaagtctacccttcccaatggtggagccctcctctatgccacgtctagctccaacagcccgtccatttacgccttcgatgtcgcgctcatgcaagttgcagcacgccacgctggagtagacccctcgtcttctgaattccctactccgcgaccatatagcaacccggacccgcgcgttcttgagggattaacctgcccgaaacctcaactgctaagagggtatgctggacggccagaacttggtgggttgaccaagacaaacctggggttacttggatcttggacgcactgtctactttggagacggcagaaccaattgcttggagaatggccctgttgcggcgcctgacgggagctgaaaactggcagcggctgggtggctgttgataagccttcaagaggagggcgaagccttctttcccctggcggtctgctcccatgggaggaatccggttccctcttctgtgtttgaggtttttctcaaaaaggatttttacaacgttaaaccatttccgttttggggaaatgtgaaagttagccgctcccctgccccgggcgttattaaattatcaccttctcccttccacctcctgtggtggggatggttagcntctcactcctcctttacccacggttaaaacttctccctcacattggtaacccc

SEQ ID NO: 7478 - DNA, 635 bp, Emericella nidulans
cgaatgatgttggtgttgctgcatctgctcatttcgggagtgcaggatgatggccagtacgctgttggttggtaggcatgttcgccttggcctgaatgaagggctgggtggatggctgctgggagtagaggagtaggggtgaaggcaaattggagtttgaaacttgtcttggggctcatggcgggttcgagggctgccagtggtgacggggaagaagtcaacgctgacgggattgagtccggtaagtctgtctcgcgcttttggatcaatgagactactggtgactgttctccaagtatagtctgtggctgtttctgtctgctcatgaaaccagtacaactgccactaccgattacgacgtcctgagtgcgcaccaaaggaggctggcccttggcctgagcatgaaagtctatcgtgccggttgtggtccctgtctcctcgagatccatctgcttctcttccaggcaacggtgtcgccagcgaagaagagtgaactgtctcccgactctcccacgctgctttctcgtgcggcgtatgaagtatgcgatgacgcaaagtatcaggaccaggctaatgacgccgcctacaatggctccgatcattgtgcttctgagacggtgactagatgatacgag

SEQ ID NO: 7479 - DNA, 577 bp, Emericella nidulans
ggccgacatctgtccttatctgtgatcaaagggctcggcaacgggacatggacgatgaaatagcgtgacccaataagccctcaaaaaaaacaccaggtctgttcggccaactgggtctgaggtccatccgtcaagcctgtatttgacttttactacagccccggtcagtatacgggaagctctgtatcgcagaatcttctgggagtagtagctcagtacaatcaaggccggtgtcgattgcggttcaactaactcagcaaccatactttgagagatgggcgaaatcgcactaatggggcacctggaaacgaaatttataactgtgattgtatagtacttgaggctgtcaatcgctgaagatttcaaatccctctagttgccaatcctacttctcgtcttccttccactttccagtcctcccattcactgagaaggcccaccatgaccgaggaacgccttaggcaccttgcgctctatatagacacagagaagtcagcgcaaaaactgcacgatatcttacaggataggacgctgcggtatgcacgtcgtcaatattggtgcagtcaaactgggatta

SEQ ID NO: 7480 - DNA, 707 bp, Emericella nidulans
ggggggaggaatacaaaaatatcccttaccccaggtcagtagggccgtatgtccaaacgcccccatatgctgagttggcagtctggatggcttgtagactgcgatcaaaaggggccattgttttgtcacgtgcatggctggaatgttggagcatctggtagcttggggaagagatggaagtgctgacaaggaagaggggtgcgaaacagattcagtggtatatttctcaagaagattcttctaaagcagaatgcaaactcccagacctggtaggatttgagggataggcacaggcgaaacaacaagagagacacaagacagagacagaggtgctgccaaacacggggtcggctaggtggatcagctcgaggaggaactcgagatcatgaaagcggagcgggactagttgaaaacgagggtgtcaaagcttgtaggggagacagacggggttgaaaaggttgctggattcgaagggtgagttatgaggcgttcattttgcactattatccagagaaaagattgatggttatgtgtgttattgcggccgttatataccgtattaatccttcatctaatgcctgatagtgccattgctggctacagtcttggtctggaaagataaaaggaaaaataaaataaaataaaataaaacagcgaaaacatagacaacaggaacgtaaatgaatatccacccaaagatcaagcgg

SEQ ID NO: 7481 - DNA, 888 bp, Emericella nidulans
agctaatggagcatgattggccgggtggtttcggatatccggacacggagtatcttgtaacgcatgctgtgtcttctcaatagcaagaggtgtgtcatcagtcggatgggtatcccggtctgtttgagcgggcaaaagtcgcggacgtcgctggcttgggggagtcatttccagtggcgtttccacataagagtatcgattgttggctcccatgttggaggtatccaagcgtagtttgggattcatgtcaaacacgttcgacaagcaacaagcaggatttggaagagctcagtaagacggcaacaacctcaatacgacgcttaggtgaaaaacgtccacgtttgcaactcaatacgcctcttgtcattcccaaaaggccaaaaacgagtgagaaagtgagcacagagacagatgaaaacatggaaatatctcaagtcaatatcgaggagcgactcaggctcttaccggtcgcctgctctgcggggcgattaaagcatcctcgctagatccgaatggctcgactttcttgttcggaagatcgtctcggcgatggattgaagtgtcgccctaacaagttggcctgcatgggttccgagcgctgttcacaacttactgcgatcgtggttggttcgatgcctggttgagagatggatattccgtgggatgtgggcccattaaaaacgctgtctgtacatcaccgctttaagccctttttgttgccgacttgccttcaagcctgtttggtatctaacggccctgcccggctaaaattaattttattcttgtacctttggacatgtaattaataccacgtggattactttcaactccgaggccaaaacgtgttatcccgatatggtgctgtcccatggtaaccattttgctatt

SEQ ID NO: 7482 - DNA, 964 bp, Emericella nidulans
agtcggcgcccatgagtttcgtactccagagctccaaagggaaatcgcacctgttcaatatcatcgacactccgggccacgtgaactttgtcgatgaggtagccgcctcgtcgcggttggtcgatggtgtcgttcttgtcgttgatgttgtagagggcgtgcaggcgaacaccgaacaaattatcagacatgcagtgctggaggatctccctctgacactggttgtgaataagatggacaggttaatactggagctgaagctaccgccgaacgatgcctacttcaaattaaaacatgtgatcgaagaggtcaacacaatgattgaaaacgtcatgcctggccacggtgagaaacggcgattgagtcctgagaaaggcaatgttgcctttgcctgtgcttcgatgaaatggtgcttcactctacagtcgttcgcgaaaatgtacgccgatacttatcctaatattgagacagctgattttgctatacgtctctggggagatattttcttcaacccaagaagtcgaaaattcacccggaaaggggcggaggataattccaaacggacctttgtcaagtttgtcttggaacccatatacaaactttactctcacacgcttagcgaaagccctgacgacttgaagggaactctcgccagtgtaggcatcaggctaaaaccctcacagctcatgtcagacgcgaaggtgctgctcgacctggtatgcgagcagttctttcggcctgccgagggttttgtggacatgggtttacagcatattccctcgcccgggagggtgctaagagagttttggaacgtattatactggcctctagacaccaattggaaccgtattgccaactggatccggttgacccttggtggccatgtacaaaatttggaaaaccatatcctgcgttttatgctttggaaatctgatgccctgttggcagatgcaaaccggtcctt

SEQ ID NO: 7483 - DNA, 423 bp, Emericella nidulans
tcacatggaaaagatattcgcccgttattccattctatcatcaagcccggcgatagtgtggcggcaacaagctttggccctgttgatggaatgccatgggtcaaagctgctgatcccaatgagttgtgtgcttgtgtacaggatataccgagtatcggggaggtacagtcattcggcaaggacatcccaggcgcacttgactgggcatgtactaaggcagacggtgggcccctggttatagcagggagcctttacctcgtgtccgatgttctgcgtcttgttagagaagctaacgactcatgaatcatgacattgtgctttgaagtctacgatatcaagcaaagagtggtttggtctcacgtagtattgcaccactacgccttaactcaagaaatatcaagcccatttcatacaagcataact

SEQ ID NO: 7484 - DNA, 1176 bp, Emericella nidulans
gcttaatacagcagtctctttcccacatctcctctagatgctttatcaggtaagatcgcttatttcttttctgttatttctaaccaaaagaacagttagaagatcagactttcattctattatccctgatggttaatatggagtcatcaagctcagcgcgctcatcctaattaacagcacttgggctagataactttatttcacaagactcctcgtgatttaaaatggtgaccaagaccgcttcgcagatgctgcggtaagaatgtatcttgccaggattcccctactcaaatcgctcgctaataccagcagccaagttctcatccccgcagcgatggaccaagttcttccagaaacgaccgcatactgcgactttgacagggggtatgaaaagcattatatggagcagccacgcgccgcacttgcattgacttgttgccgtaatgatactgggaatcgcggagcaagatgtctaataaaattatgcccagtttgcttgctatgtcttttctctgccctgtgaacaccaagcaaatttcatttcccggaacaatcctcaatggagggaccggtatattgccctcttatgattatgttattgtcggaggtggtgtgagcggcctcgtggtcgcgaatcgccttaccgaggacccggagagtatggtcacatcatttgatattgatctaatgccggtaaagctgacggtgcaagtagcaaccgtattagtgatcgaggctgggaagatgtattattcgcagacattcttggctagagtactaacatttctagtgacaatcactccccagcgattcagtacccacgaaatgttttgctggctccggtgaacaatagctggccgattacctctcttccagatgccgaactcaatgaccgtacaacgcctgtgcaagccggtctagtgctcggtggaggaggagccatcaacggtatggcctttgatcgggggtctcccggtgattatgacctttggggtaaacttatcggggacgatagctggagctggatagggcttttgccgtattttaagaaggtgactttgatgagatcttgccagtagtactgctcatatggtcagagtgaaacattcacgcccacatccgagaatttacaagaagagtttggaatcggctttgaaccgcacgcgcttgcgttta

SEQ ID NO: 7485 - DNA, 112 bp, Emericella nidulans
gtcaggcgatgttgttgtcgcagtgtcgttgaaagccatgtacggggatgacctatacccggctacaccgaatgacaatgacttatctcgatagtatgcgctatagatatct

SEQ ID NO: 7486 - DNA, 145 bp, Emericella nidulans
gagatcgggaataaagagaccacatacagacaaatgaagacggcattcattacacgaagattgggcaaacctgcacagcacacattattggcccggacgctgtaggagatattgtcaagtaataagcgaagcgtataggtgaggg

SEQ ID NO: 7487 - DNA, 471 bp, Emericella nidulans
cttataatactctgatctcagcgcgagacgacgccccgatcgttggtctcagaacatacttttctcacgtaaggatagcacatgttggagagaccgaaagctgtcagtagcattccatggtcccagtttgttgcaaactacgcacatgactccatatcttacatgccgctacactctacagcactaagcggcgaccagcgctgtcaagaggtgctgggcattatacccggtaacgagcagatacaggctccgatatggatagacggctttgtcgctggcccgactggacagctcgatttagcctcggagatgtcaatgaccgttatccagctggggaccgcagtggtttatcgagactccccaggagcaaaggagggcaaggccctgccaagttctggattgtttttatggtactgttaagacaacggttcgggagactatcaggggggggctgagaccttttgaatttgg

SEQ ID NO: 7488 - DNA, 646 bp, Emericella nidulans
  unsure (1)..(646): unsure at all n locations
gaggatgacaatagaaagaaacagcggtgggcgagctagataagcctagctctatcgtttaaccagacgcatagaaaaaatctttcggcaagaacatacacagaatcaggcgaatatctcatctttatatttgtccctgtaggcagcggcaatctgctccattcctggcgaatccggcacgacatcaaaggagttgagactctgggtgcggaggtgctctcgattcagagggccgcctttcctgtcacgcatgcacttcagcatggcaagaagatcgctcatatccacctcaactttccgatctcggcccggcgcgaacatccatctgattttgcgcttcaaagcccacttaatcggggcagctaaaatgacgagatgatcgcctctgaacagggtgatattctgcttgagagccttccggaacaaatgtatccttgtctctttggtgacatagagtgccatgtcctcgttcgcccactgttcgctaatttgaagccttttcgatacccggaaaattgcctgctccaggggcccttttatgtcttcgtctgttgcccattcttgatccagcaggtagttaaggtctttngtcgtttctctggtcttgagataataaacagcgaggaaatcccgctgcgtgatcaat

SEQ ID NO: 7489 - DNA, 224 bp, Emericella nidulans
gtctagtaacggccgcgcgcgaaatcgagggaccacgggtcccggcccgacaagccggtgacagctgagacggcagccaaatagcccagcgcccgacaagacatctccgcaaggcatgactcggaggacaaagccaaacacggaaggcggccatgccactcagcgcaggactccggtcggcaccgagcccgacgtcacagatgaggaggcaacagcagcactga

SEQ ID NO: 7490 - DNA, 857 bp, Emericella nidulans
  unsure (1)..(857): unsure at all n locations
catcttcatcaactcttcacctctccttctttcattaccatttaccaatcttccaatcttcccattcctcccttgttgccattcattttggcaccattactcgtccccgagtcctccatcctccctccccttctctctctctctctcttttcgtccctgaacagactttcgtactttcactcggctgacttggctctcattgcccgccacatcactgggcagcaacttgttttaccctctttttggtaggcttgctaacctcattgccctcctctctcctctcctctcctctctcttttctttcttgtcttccccctcctaagtttttaacttcctccgaccggtgtcttaagacttgctttttctccggactgccagccgctctgtccctgtttctttcggtgctcttagattcattatttcccatcctcccgccgaattcgtttcagccttccccttcctcatattacgatcaacctgacactcgctcttcatttagctctctagaaaccgtttctttttcaattttactttttcccttttggctccctgcgctcttggagcctgtttcgatatttccttcgatcgataaatccccgtcgttcatgagccttcaggtcgattcaaattgttctgcagccacttgggtcccgtgtaactgcaaacattcctgccaagtgatccaaccctcgcccgtgcaattctgagagcgacttcctccccccaaaccattcaccctccttcgccaacgaatttgccttgagctagacgctgctgcccgaaacgccttgatttctgttgccctggttcctttngcgagcaacacaattttttttcctttcttgaaccggcctttg

SEQ ID NO: 7491 - DNA, 368 bp, Emericella nidulans
  unsure (1)..(368): unsure at all n locations
caaaggagactgaagcatctgtcggaatgcacagatgggacgcgcagtagtgctcagcagggatctaagacccagtcaggaaaccgacgttatacccagcattggaagtacggaccagagggtttaactagaccgagtggcaagacgtccgaattctgagctaaatcgtacagattaaggcccgcatcaggtgccagcgaaccccacgaatggcaggaagcggtcgctgcagtggagnacaaggaaacggcgacgagtggatatggtagaatcggtcgctgcagatnacaacaagaaataccgtatcacaccaaacgaaggactagacgcggaaagaaatcgatatctatcctcggcatggccgagtc

SEQ ID NO: 7492 - DNA, 759 bp, Emericella nidulans
aaccacaggcgttgaggataaatcacttttcctgctttcctcgtcctgctttatggtgaccgcaacggctagataggagatatcccaaccaaaacgatggcattgtcgaacgactggtcgatggagggacgtatatgtcttactaatcacaccacggatgtactttatccgcaccgccgagatttacaggattgtcgagcgtcaagcctagcgaacgacgatatctacccttccaatacttccacgtgacaggcctgggtcaataccgcattcagcctggtatgacgacattatgaaatacggggatcacaaagggtggtcaagcaatccaaatggccgagtcaataggagaagtccttgtacagaaacacagaatggaacttgctcagaatgccttctacccgaagaacatcttaaggcttataggacgttgatgtatttcacagcatctgcgtgccctaggtcgcggcgaacctggcgagtgttgtcagcgcctgaaaaaggtcccccggcacttaccacctcactttcgtcttgaggtcgttcgtctggcgggcttgaagctgtgttgagacctggaaagaacataacctttgaaaggcgtcacaggagccttcaacatcgggataagctgacgtttcttaagcgcttccgaactaaacaaagcctttttgtgcttaacagctcaggaagcaccctagcctttttgcctggaatcttgcaaagaagtttttaacccttttggggcttagggggcct

SEQ ID NO: 7493 - DNA, 937 bp, Emericella nidulans
ggaatactgaccaacccttaggcttccacctggggaactccttttgcggcccaatcaccaaagcgtactgcaagcgatgatttatcgaggaagcggaagtcggctgagtaccagacggagtcaaatgcctgtccgccgtggaggcaaactaacaagtccaatgtctttgaagatcgagtcacttattcacccacagacaagcgccaacgcatagaatccaagaattcaaatagtaagtctaaagctaatctggaaatgcggaagaagcgttttgagaatccccgaggaggatatgggtcttctccttcatcacgcggtacatctccaacccccgccccaactggtcccgtggtcggaaggtgccaggatttggagaagcgttatttccggttgacttcggcgccaaatccagatacagtccgtcctcttcctgtcctgatgaagacactggatctgctgaagaagaagtggaagaaggacaacaactacacatacatctgtgatcagttcaagtcactgcgccaggatttgacagtgcagcacatcaggaatgaatttacggtcagtgtctacgagatccacgcccgaattgcgctggagaagggagatcttggtgagtataatcaatgtcagacgcagctgcgggctttgtatgcgcaacaattgggaggtcatccgaccgagttcaaggcgtaccgtattctctactttatccatacgcgcaactggacggcaatgaacgatgccctggccgatctaatcccagcagacaagcggagtgcagccgtcaaacatgcattagatgtgcggtctgctctggctcttggcaactaccaccggtttttccagctttatctcgctaccccaaacatgggagcgtacctgatggatatgtttgtggatcgcgagcgaccgtccgccctccgaaaatctgtaa

SEQ ID NO: 7494 - DNA, 474 bp, Emericella nidulans
ccagtatcatcatgaaggacaccgcggtcggcagcgatgtcctataccgagccaatgctatccgggctctgtgccgcatcattgacgtgagtcgcacaaagctaccgaatattcatctctgacagcttgataggccactaccgtacagggtatcgagcgattgattaaaacagccattgtcgacaaaaccccttcggtctcctcggccgccctcgtctcctcatatcacctccttccgattgcgcgtgacgtggttcgaagatggcaaagcgaaacacaggaagccgcttcatcctcgaagcaatctaccggtttccttggatttggtggcagctcacaggcccacgcgatttcgcagtcaaatttcatgacccagtatcacgcaattggcctcctatatcagatgcgctcccatgaccgcatggcccttgtcaaaatggttcaacaatatggcgcacaggatgtggtgaagag

SEQ ID NO: 7495 - DNA, 346 bp, Emericella nidulans
  unsure (1)..(346): unsure at all n locations
acgcaaaggcacaagaaaccacaacgacccaaacccaggccgtccgcaaagcaccgcaccccaacacgaggggcgaagaaggaaggacgcgcagcgacccaaccaccagacccagaagcgcccacagcacggacaagaccggaaaccgaaccgggcacagannaanngcaaggcaagccgggccgccggcagggnagcacgggcganacgacagcgcgaaccgcagaacaccagcacgagcaaccaggannaggacagcaagagcaacgagcacaagacgccgcgacggccgagacggagaggagnaggggcgaacgcganaaagaggacngcgaggagacaaagc

SEQ ID NO: 7496 - DNA, 615 bp, Emericella nidulans
aattctatcttccccgaactcctaaaccagaatatcgctgatgaggaagctcgcaacgaggaactcctctaccagtccacagacctgacagcacgcattccgatcttataccccttcgccagtgatcctaacaacacgaacaccaagagattaaaatggctcctcccagagcaagactttgccatcctcgatgaaattcgctctattcgcaaagagacctcaaaaaaggaccctgccgtccgccgcatggagctcatcaaagcagcctccccgaccctccttgatctcatcaccgcccgcgcagagtcactcctcaccacaagtttcgggtgccaattcctctcggaagtgctcttcgacgccgatgatagcgatggaaagaaacacacggctctatctgctgtcgcaactgccgcgaaatcccgctctgacacgaaggactcaccgtttgtcggccgaatgctgaaatcgcttgttcagggtggacggttcaatgtgacggagaagaaggttgagaaggtcagcccgccactaggctttgatgcgctattttatgagcagatcagtgatgagattatggcgtgggcgacagggtcgaatgtttacgttagtggt

SEQ ID NO: 7497 - DNA, 738 bp, Emericella nidulans
gggaacagtatgagtttgaggcgagacgtcgtaagctgctccgtgacttagagtccgggggtgttgacgtttcgtttgtctctgaaaaggagagtctaactccgaactcgattggccctgacacgacggagctgcctgaagatcaggaggagcactatgagactgccaatgacgcaactccagctaacgctgaactttcgaaacgccgttctctggatgtagccagcactcgccggcttcttttcggctcccttggtgtaaaaaaccctcgctctaaggaggaagaggaagccacgcggaagagattggtgggcaaggttcgagaaagcatacttcacccaaccgagcgtcaacaggaggagcagggctttgccgagacccatgaaggtgagccgcatgtggactggcacgagaaacttgtacttggagctacggaatgtgtctacgacgacattgagctaagtgctccgccgttcccattcgaacaacgttgggacaacgaagctggggatgagataaggcgacggagaggccgcaacaagaaaagaaagaggagacaacagctccaggtctacgatgagggagcttatggtaacgaagactattatgatggcgaggaccaacaactgaactacgatgattctgagcaaccagaaattgagtctgagaacaaggagggaatggatgagatgacaaccaggacgactgctgagcctgaggatgacctccccgatctcc

SEQ ID NO: 7498 - DNA, 827 bp, Emericella nidulans
taagcagccgcatcaattacagtactgttcagtaccagaaacctgcctctggctcagcgacgctaataaaagcccgcaacccctcaaaaccgcatttgcttcactatcctcggagcttcatctggagtctcgctgtacggtcgtggtgcgactcaaatatttgtacgggcaggttcagagcttgccaactgcgttggagatcgtccagtgcgaacatcggtcggggcgttcggcttgtgcccggcgtctccctagcatgttaatgttgaaaggatcgaatgcgacgtatctgacatatgtcggttcttccgtaagccggggagctggatccctcagatatggctgggtgtgcacggtgaatgggaacgcggggagatggacgtccaactgctcacaggacctgtatcctaggtcccattgctttttctctgttttctcttctttttccctttctcaattatttgaagcatagctcatccattcggcgagaagccagactgacaatttgagagactccagacttgataggaaggttcaaagctaggtgttctgaatggcgagactttggcgatgtcaaggtggtgggttttgaaggagcccagccttgtatatgatgcgatgcggcgaagttgagaactatttaccgcacatcaggcattgtcctttcccatcggctgggccggcttccacagaacggggggtctcatggcctaagatgctaccacacagggcgttagcagttgcaagggaacttgcaccgcatgctgtgtaatatttgagaactgcagaggactggggagatcagagcttcagctacgaaaggtgcc

SEQ ID NO: 7499 - DNA, 225 bp, Emericella nidulans
agatcgtgcagttcccggttgctgaactcgatcggaccacggatctgatcgtcaaaacccacagaaccttcctgcgggttagcaaaacgtacaacacacggttcatcatcagcatgatgctcatggctgtggcggcacgaccgtcataacgcggcttctcacctttcgccatttgctcttcgcgcagcttaccaggcgctctttagagcaatagcatttataagc

SEQ ID NO: 7500 - DNA, 561 bp, Emericella nidulans
ggcttggattattatccagctacgaaaacggggcgataagaattgctggatatatctcctcctggtggatatccagacccaaacgatcggtgatggccactacctggacccagccggacgtgttgccgttgcagaggaactcaactcggcgattctaggtatgcctgcttctttcctcttcggattatacatagctgacgtcgacagtgtcactgggcaagtcctcagcagcggccctagagcggctgtaccagcaaacggaagtattggtcaatgagattagtgaagagggaggcgctggggcgttcatcaatgtacgaaatgactttttacaataggcttctggctttcgtggtttgacggcgccgggcgggttcgagtattgaagcattgcagactgtcatctgagactggcaccttgatatatcattattctcaacctctttcatctagctcgaactcctctctcgtatgcttgtcagacttcagcctaggatttaagtacactgttgcaataagttcacccaatacgccgcggatacctcggtcccgtaaaagtta

SEQ ID NO: 7501 - DNA, 450 bp, Emericella nidulans
  unsure (1)..(450): unsure at all n locations
ccaattaagtggacactatagaatacatctagagcgcttcagtatcttgcctctgtatgagccacaggaacaaagaatgaaaggtccccatactaaggactgcgcttgggagagagcaggagtgcgagttgctaacgatcaaaacgagctataacgacagggaaggcaggaacaatgcttgggttgggtagaccgaaacaacgcgccacagttggggcaacagatggtctacgnatatggcgaccactacacacaaacggccgaccatacagagtttctggcagagggctcaacggaggtgcattagggcacaggcatgttcgcgttaaacgcggtttgtgaccagtagccggcctgattcggaaaattgcacaatgagaacacggtttccggaaatattccgntaggacttaagcttcgggagaatggagtggagnnttagcttatttt

SEQ ID NO: 7502 - DNA, 548 bp, Emericella nidulans
agcactggagctgctgtcaagacacggagacaatattaacgtcagggagcttaccaaagcgaacgaatgattagggagaagccggataaatgatgctgatcgcgagacctctccgtccctcttacccttcagagcggtgggcggctggaaggcagtcgagagaaggacgttgcgcaaaagcagaccaaacgaataggagaagatttctataagccggcttccagagtatgaggcaggggcaaggttgggagaaaaagccagaaaagtatcgaggataaagactgacgcgaccaggccgtggcgttggatcacttgggatgatgatgagtgactggggattaatgatgtgggggcaatcctgaactattgggtaggcggtcaggctcattactatcgagtctcagagagacttttctttccctttgactcttctaagccattttatatgcgaactctcttaaataacacctgctctctaccatccaggcatcacattttaccatttgatcactgctggagattcagtcactcgtggcgttgaacaaggg

SEQ ID NO: 7503 - DNA, 1038 bp, Emericella nidulans
cgagtaacatcttccttgtaacaaacatgctcgacagcataagttttccgcagccaattgaaacggtcctcactgaaagcgcccagaaatgcaggctccttctcgacacagttggcggtattgaccgcaagcatctgaggggcctcattgaccgcaaacactctgagacgttggcgctgtatcagggtcagtcccggttcatgctggaggatctaggcgcgtatctctctgagcgcaatatcggctccaaggccaggaagaggatcgcgtctaaggttgcggaggagatgattgcggtacgtacagacaaccccctgaacaaaccgtctcacaagccttgctaataatgataatagcgaaaccatgcatactcaaaccttgtcgagcttctcttccctcatcatgtccgtcttagtattcatgcgtatgcctcaccagtccaaccccatccattacactagagcgaaactaacctggattttttccagacacacaaatgccggacccaaatttggcatccgcctcttcccccgcggggctgtgcgtgcggcaccaaccgcacaggctattctctctatttctcagtccaagtccgagtccgagtctggggcgatcaccaaccccctctacgagttccagatccctacgccctggcataactgtcttgttcgtgtagaggggttagagggcatgcttcttacaagatcaggaattattcgcgatgcgattagcaaaggcttgttcgagggcggctggtgtcagcgcgagggaggtccgggcggatactttgttattcgcaaggttaagcaggaggccgcgcctgcgactgcaatggaggaagtccacctcagcacaacgcagggtgatacgaggacccagacggagacgaagatcgagccgagaaacatggaacccatgtatctgttagcagacaagagcccgctgaggatgttgggcgtctttgtctgggatcagctcataggcttctggactacgattcgatcagttgttgggacgagcaggtagttctgcacatct

SEQ ID NO: 7504 - DNA, 713 bp, Emericella nidulans
gctccaaaccggtcatattgtgggacttgactggccttctcgacgtcttcaatatgctgggcgtagtgtgctttcttttcggtgacacctttatgagataggtccgtcattatggggcttgctgctaggaaatatcgatttggtcgttatagtaccgttgattcaggaagaatggattttcatcgacatctcgaggcctatttgaacttgatatagtctagactatgaagatttctgcgctccactctcccccgcttatgatggagaatccggggtgtgtagctgcgtgggtgataactaccagttccgagacgccctagtgctgtccggaaacgcagcatgccaatcggaagagttctcatatgtaaatcaaaggcgaactaatgctatccaatggaaatcttatcatggcagtgacgggattttgcgctgccaaggcatgttgattggacattccggaactgcatcagttaatgctagtttatccggctcctgtaatgtcgaatttgcccgggaatatccgatgctatccgggctctagtgagctctagtacgaactgacaaatcgagtcttgtacgtgagcctaatgcatatgctgtgtctaggaggcctatttatttgaaactggtggactgctgcaagccttttttgcagaagggtacattgcttaccccgtccaaaaggtaacgagtatgttctaaaataaaaaatc

SEQ ID NO: 7505 - DNA, 1025 bp, Emericella nidulans
cattttattgcagctcccggccattatggaacatgcctactatgccagcttcgggtaccaggtttactatttcttcgcagcgagtagtcgctacggtaagcccgaggatctgaaggaactggttgacacggcacatagtatgggcttggtagttctcctcgacgtggtgcacagccacgcatcgaagaacgtcgatgacggactgaacatgtttgatggcagagaccatttatatttccattccgggtcaaaaggtcagcacgagctatgggacagccgactgtttaactacggaaaccatgaagttctgcggttcctccttagcaatcttcgcttttggatggaggaatacggctttgacggttttcgatttgatggtgtcaccagcatgttatatacccatcacggtattgggacgtgagtcacgataatctcgatattttttacaagtgctcaccagtgtcagtggcttttcaggcggataccacgaatacttcggtccagcagttgacgacgatggcgttatgtacctagccctagcaaacgaaatgctgcaccggctttacccagattgcataaccgtggcagaggatgtttcgggaatgccagcgttatgcctaccacacggccttggtggagtcggattcgactatcgtctcgcgatggccattccagatatgtatatcaagcttctaaaagagaagtcagacaacgattgggacattggcaatctcgccttcacgttgacaaaccgacgccatggcgagaagaccattgcatacgcagaaagccacgaccaagcgtaagtcctcccgtcttctgtaacagacccaaatcctaacataacccagtctcgtcggcgacaaatctttcatgatgtggctctgcgattaagaaatgtacacacacattgtcgtcctgacagaatttacccccgttattgaacgccggatggcacttcaccaaatggtccgggtttggacacaccccccttgtggccaatgcttccctaatttccaagggac

SEQ ID NO: 7506 - DNA, 875 bp, Emericella nidulans
tgagcccccatggtgaaaaagagaaaaggtaccgtgtccaaagtgaacgtgagctacagccaatcgaacatttaattgccaattacggcgatgccactttcacctcatggggcgacgagcggtttaagatttggcgcgacatggccaccggtgctgcagtttcctatgtggtcagcagcaacaattacgtcgtcattccaggcaatccgttgtgcgacgcgaggcagtatggtcgggtcatctctcagttcctgcaatggctacgtcgtgaaactaaatacaggcctatctggctgttgtgctctcccgaagttgagactgttctcggtgagaagctcggctggcgcagtttgtcctgtattgccgaagaggtggtagagcctgcgcgcaaccaagctgctatggacggcgaacttgcccggaaaattcggcgcacagagaatgaggggatcaagattgtgactataaaccagggtgaaatggtgtctgaaagtgtccgagaggcgatagacaagcgaattgaagactggaaagccaaccgcaagggaacccaagtgcatctttcagacatccacccatggcgcgaccacgaacaccgctggtacttctatgcagttgacaaagaaggaacaatctgtgcctttgtcaccttggtcttgatctcgcccacgtacggcatgcaggtcaaatacacctttgacttccccgggtctccaaacggtgttattgagtccctcatcactcacgctattcaaacagccggccgctcgggcgtaaagaaactcacttttggcgctggagcaaccaacaccttgacccctggccacaacatgcacggcgcccagatgaaaatgctttgcacactacgacgccct

SEQ ID NO: 7507 - DNA, 1193 bp, Emericella nidulans
  unsure (1)..(1193): unsure at all n locations
cagatccccagtgccttctcagcagagctaaggaagacttgtcagcatcattggcaaccacacaatatgttaaatccttacactgcgtgttcctgaaaagcactcgccattgccgttcgcatcaatgtatgtgtcgtaattgagctccaactgccattcgccgcaaacacgatcagccaaagactgaccgttcaggggctcccacccactcaaaattttttggcatggctttggttggacagcagatataacgccaccagttctctgcgcactccccgtgcatgggaaagtcggcgttcttctgggccggagaatgggccatatcaactgcggtatagccgctcttatacacctggttcaaaaaccagaatacccgaacagcggttcttgtgtcacttggtgctaatatgttcgataactatcgcccgcaagccatatatagattgattctgcttgtctagattgacatctgattggtactctgtgcgtgtcactcccgacataacacccacctgggcggtctcagttacaaagagcacgttctgagaggactggtgtacgcgttcacttacctgccacgtaattttaggtcttgcactgattctttaggaatatgacccccggatccagcaaatactcaaagtcgtccccgagggagcctggagggagtttgcgatggtggctggaccctgtccgcgagatatcacggcatgggacaaggatgccctgattggagatgcaagccatccgccctcaggggtattcggatctggcgcggcattcactatggaagatggctggattttggcgcaggctctggcactttaagcattcgagaaactccagcgatagcacggtacccggaaataattggagatctttcagcagattcgtggtccctactatgagcgcatgtgagtgccagacttctgtaccttgaccatgttgctcaaatgctgatttgtggttgttttgataggtacgattacctgtcatccaggtaaaagcgcacccagggtactcggaaagaagtcgtcgactttgacagcatcatcaaggcgaggatagccgggttcgggttcacctcgaccggtaagatggactggatatataagaatgacaatgcgcaggtatggcgggaatatcttgctgaagagcaagcggcagggcgcnaatctcgtagaaacaagggc

SEQ ID NO: 7508 - DNA, 652 bp, Emericella nidulans
gtataaacccccaatcaaacaagctaagcttcggaagacacgaaagaaaaatcacataagctgaggtgtgcaaactccttagattctttaccgccccgcctcattttacgtctagcgaattggttgctgcaggtggctcttctccttgaactcgattgcttttgtaacctctcgatatacataacaagcgatgtccaccactccatcagacgccccgaccccaactccagctacctcacagccggcgcctccggttgacggcaataccgtcgcgcctgatgttgagaagctccacgtctctccggagggcgagtctacacctacccctgcgcctgcctctgagtccgcatccgcacctccaaaagaatccctagttcaagaagagccggccgcaactcctgctccccagcaggagatagagacaattgacagtctgaacctcccctcctccgctgccgatggcctcatccaaaaacccttcgtccgccccgttaacacagcaaagccacctccgcccgccaaattgacaccagaacaacaagccaagtatgagagcgtgcttaatccgtttctgatggacaacttgtccaccacagccgcgaagatgcccaactgcaccatacagacatgagcgcatgtcctaccgtgatgc

SEQ ID NO: 7509 - DNA, 636 bp, Emericella nidulans
tcactatagggagacctaggcttaggatcttgctgtgtgtgaggtgcctcgcaggcctagacgaaatgcgaattctcgcggctttattcgtcagaccttcgcttggagacagtagctcgatcgaacaccgccttcacctccacgaaggccccgatcacggacttgccatcgccggtgtggagacacgctatttgatccatcctcacgctctgtccgtaatactccattatgtggagagcagcagcctgcctagactccagccctaactatcatgggtttagcaaggggcgctctgaaaggggtttggtgcgcccatggaccgctttcgctctacttaccaaagcgcaattttcgtgcgtttgttctgttaatgctttctgtccattttttctagcgagttttttcttttcttttttctttcaaattctctatattctttctttcttttctcttttacatcgcttattccttttctcttttgtctcttactctttttcgtcgttttcttttttttatcatctctcattttatctctttctttttgctacttatctatatttgctgctccttttttttctctccttattttcttgtttcttttttcattctcatttctttattatcgtctttcttcct

SEQ ID NO: 7510 - DNA, 712 bp, Emericella nidulans
gaccctaatatactcaacgtgatgctgatggcgacatgacatcacaggcccatgaactttgtatctaccgaatccaaggtcttggtaggagtgtggaccgtgcggctactagaggagtaaaattcgtggttttattggctaaattcttactgtttggtaatggatatttctccgtggctttgttttgatgtggagagcacgagtgagggttgtctttctccgaggagcaaaaggggaagaacagttatgcgaagaatgaacaaaccagaagcccgagttatttgtgcaaaaatacctgtgttaatcatttcgattgtcattcttcatggaggtatctcaggaggctttaaattggctctatcttaatgactggggacattggcgtaggaacaccctaagtcgtcataaccgcggagaatgtagcctagatccaactaaaagcatcgtcatatgccctgacctcgccaatgcttaccaagcttgtaaagccataagtactcacatggtaagttcgtttgggcggatagtgatctaatggttcagaagaatctccttcctctgatctgatatagaaggtggcatgaaccatgaagattatctaggctaaggtacagttaccagaaaaagcgagtatactcaattgaaaatatacatagaacatgcggcagtacgctactatgtttatttcttctatggtccttccactagggga

SEQ ID NO: 7511 - DNA, 1084 bp, Emericella nidulans
agaacgagccttcgtctctcatcgacttcacgaaaccagcaacgcctcgcaactcctcattcttctcggtgagctcccgatcctagttctacaaggctttgcttcctgctcttgacaggggcttgaacttccagaatgccgtgtttctgacaatcatacacatgctaaatcgcctcgtcgcacccgccgagaatacaagttggctagaacttccgaaaatccactataagtgaaaatcggagaatccagtctctaacggggcagcccagcggagtgccaagaaataacaatagattatttacagtactttagttatggagtacatagccgtacaatatatattattgtattcaagagctgtaagtcatagacatacgaaaaatgcctgccattgcctgtcgcaatggacgactatgcactttaaacggcattataattgaatctgtgcgcttacatttacgaatcatggcaacaggacttgatccccaaacgcggacatgatactgcgtcgatgcctgtttaatattcgacgatgagggcctggagtgttgtctgatgtgaagtctgaagttgcgggcgctaagttttgatgttggctatgtggtatgtgaaatctatcaagccatatcctggcattgacaatgatcttactggtattataaacggactggttaagttccgggttcgtcctctgttgcagttctggatggactaacagtctagactcagtgcagtagtcaaattatcaaggatagaatacatgatcccatgagacagttaagtccaaggtcataatgtgtcgtagggtatgcattcatgcctgggggaatccacataagacaaccaacttgtgtgattagacactttgacctggtaatttcaagtgtgagaagcgtttatagtatcaagccaaagccgccgttcgtccgtaatacccgaatagacgctccaagtaagaggaaagagaataaagcagcgcactattaagacatgatcagccatgataaggacaaaagttaacagttgaccaggtcgaaatccccacctcgccgcacagggcccgccttaaattccagagtttatg

SEQ ID NO: 7512 - DNA, 1116 bp, Emericella nidulans
tcttaatttttagagtcccaacgctcggttgggtagcgatcgcatcaaggtcgtactccggcttcttgtctttgcggatccgaaggaagcgcaggattgcatcaccaagaactgactccatccgttggctctgctggcttgccaatgccggagccatagggggaggcgctgtggccccgctgggtacccgcgccatgtcctcactggcacccttggacctcaggctctcaatgtcagagcccgagggcgtcgagccattgacgggcgtggcgcacacggtgggctgcttagcagacatcttgcttagttgtcggcagcagagacacgcgtttaatggggctaaaacaaggatggcttactgctacttatattgcaggaatgaccgactcagtccaggttggtttagcttcatggtaacaacctggatatcaaaggcgaacccggcccctccgtgataccaagctaattcttagcgtcgcctctaagattttgacctaccgttcactcgtaaatatctgaatgtgcagctctactgaatcttcgctaagacaacgcagtttcttagaagtcaggttttgtggttttgctcgagggctcgagagcgttcccaaccccaatacttggtccactgcagcattattccagaatgtaatgtgccgtggacatgtctgataaccaagacgacatacggcgggtgtcttgcgtcagtctgccgtggactgatgaattgattcataattgtctgcgtgaatgtcgtgctctgtgctagcgtggtggtttcgaccctaccccacacataattgggccggccattcttggtatgctgtcgagactcgtgttgaagggttctgatagagctttgacttcatctaacggcataaggcttttgtcatggccataaattcgtcatgttggtcaagtatgtcgacttgtgtgggggtcaattgaacgtgagatacgttctgagcgaagctgaatacgaccatgcctattccctgaatctgatatagtgggtcatttcaagtctagcagacaccttataggtctggtcatggcggggttcatctcggcccgccattcttcggagggattcggagttgtgtggccccctggggt

SEQ ID NO: 7513 - DNA, 568 bp, Emericella nidulans
attgggagatggagatcgtatggccgtcagcgacattatggcttccctcgacgcgggcctggtactgcagttgtcgggttacgttgtcgcttccggtgacttggtcgaagaagacagggttgacgttgggggcggattgggcgaggggaccagtgcggttgactaacgtcactttgtcagcgatttcgttttatagaaaggagggtcatcagggggatgtaccaaggtagctctgtgcgtcacgctcgatagggtcatcgtaggcggcatagtagtcgtagaaaacgacatcagggtgctggacgacgatttctgtctgcatactcggtcagcttttctcccaccctgaaagagaccttgtgagggacagggtgcatggagcagcacgtacgttagggtgatccatcaagttctcgccaacaggaaggttgatcactggtcttcagaaatcatggtctctccatcagaggcagagcacttgacgatggcgagctggtcttcagggccaattccgcatgtatgtttgattagcatatatcaaggccatgattccaggttgggaaatgcg

SEQ ID NO: 7514 - DNA, 183 bp, Emericella nidulans
cgggaagatgtcctgctttaatccaagtatattggggatcttataaaatcagactggatagggttatgttagatgtagcttaaaacgagacagacgctcgtaaacatcttcatccaacgtccacaagcttagtcaatctgtagtagtcggcaatctcctactgttcgtgcatgttgcaaacat

SEQ ID NO: 7515 - DNA, 786 bp, Emericella nidulans
tggtcgcttcgtttgttgggaactgttctcccgtgaagacgaggaccgcgatcttggtcagtagcgtgcggcattgtcgaggagatatcggtgatgaattgaagagccgtgctaccggagtagaagacggtcagcaacatggtctccggggccacggtacagctccgactcgggtgtttgtctcttaccatcttggaaaacagaggtccgatccagcttgagtcatggtctggtcggcgtcctcatccttcttcatgtagctcatgttgctgagcggcagacgttgcaacagagataaaactctctaacttgctctctgtccagaaagtggccgcttgcgggtagacgtagggtcaatagcgagggggaaacccaattgaccgcgaattcaggagtcggagggattggtagttcggtacgcaagaggagtgaacggtatcaaatcctcattatctcgtgaggataagacaatatgggaccagatggaattgctgttaaggtgaccggcccaacagacaacaacagcttagttggactccgactttcagttcccgtcaagcatccaggtggccttccgcctctgtgggtgctagccacaccccaacaaacattgcaaacatgccgcagcctcttaggttgaggcttcactcaccaggtccagatcttcaatgtctttgtgcacactaaatgtccttcttgaatgctctcatgctgacacggcctatgatctgttctacgagagtctaggctcagcatacctattgctacataaggataacagaccga

SEQ ID NO: 7516 - DNA, 1012 bp, Emericella nidulans
ttcttcccagcctgtacttcggattaagagcgtgctaggggggctatcggtagcaagagtgctgaggaggcaaggaaaaaatgatgcggtcgaacgcctctgtcaacccatagcgggcaactatttgagcacattggtcaaatcccatgaccacgcgagaatacgccgcatcatctgaggcagacatgaagacgtaagataatgtggcgactacaggtttccaggtagccgcgaacatgtctgcgtcgaagacgttggtttgaccaacgactaactctccggcggaagctgactttgacagcaactccctccacgcataatcgaatgcgtgcttattatcatgttcgtctggtagtatgatttcgttttgtttaatagaatcataaatcttctctaagaactcgggggcaaagtcctggcctgcattcaaaccccttaggtttttcgagaagtcggcacaagacattcgactctgagctttcatgttaggattgtaaagagtggtgttcagcataataatagcataagtcaggacaaacagcgagtccttgtcagcaacctcagaaggctgggccttctcgatatacttttcactgaatgtagtaacaatccgctcaattaaagctgactcgccgggaagtcggaacgcaccaagtaaatctcgaagcccatcaactaccgacttgccggagaaatcaagcagatcgacaaatgcattgagaaggccctcgttggatcgtttcgatatgaattctccaagaactttctttgacagtcgtgtggttcccctcaaaaatctggcgacctgaacaggatcgtcgggattctcaatgacaccatgggacgtcaaataagcaattgcgcctttagggtcgtcgctgttgaacttctgagctgcatgtacaataatacgcttcgtgtctcgttgcttccgcagacgttcatttgacggaaagccctctgttacaggtggctcatcaagcctgtcgtatatagattaacataactcagg

SEQ ID NO: 7517 - DNA, 752 bp, Emericella nidulans
cttctggaatcatcctgcgcgcctgtttgtactacctgcagtccagcacctagtcagtactcgcaaagtcactttccaagtataggtaaacaattgcacctaccggcataatcacaggttgatggttgctagccgcagccatcgtacacacccgataaaaacccattggtagacctcctggcacaacgaccgagaatccatttagggcatttccttcaccaaagacagtctcgaaaaaaacaaacttggtcggatcggggggcactccgtagccttcaagctcgtcatttttgtaattgaaaatagactgaatagtgacgtggacgtggccaaaaacctttccgtcctggagagcctgaggggcggaataaagggtcaaatttgggttggtcacagatcctgcattgaggtttgagactcggaatccaatgacaaaaggtatatgcgctgggagaagttggtcaggaagcgggaaagtaataacggtcgagaccatgttcttgtccgaaggaatatcgcccatcactgtttgatattgtgtcggttagtttggcacggcagaataattgaagaatctaatgagaagcctggcgtaccaattccattgcaggatccctgcttagaggacttgccgttggttaagaccctcttgctgcagtaattgatgaagtttgccggatccctagaagaatcgacagtcaatagagaattgatagcgaacgagaagacggctggaacgtacgtagcccaag

SEQ ID NO: 7518 - DNA, 789 bp, Emericella nidulans
tggtctgttcacagtacgtaccgtcaatgtctgcaaaccgaattttatcaccgaggacgccgttaatgcccggcgcaatgaccatcttctctctccagttccgaccatctcctttcccgctgggtgcgagctgtcctgtgttgaggtacgcctcgacggcgcctccctcccaaaccaccaggtagtctgccttgccatcgcctgaaagaactcagtcagtcactcggtacatatacgcatctaacacacacagaaattgtggaagagaaaaagaggaggggcggagaagggggtgatacataccattaacatctgcaaactgaactttctccggggtgactcctttaagaccaggagcaagtccagggaggcgaactaggctattaactcctttatttagccaggcatcgaccgctccgttaatgctaacacggatataatcgtcgcgcccatcgccgtcgagatcggcaaaccggatagcgccagccttgtcatacattccagtgccagaccagacgccaaaagcagggtctgtgtccggattcgccacgacgacgtagtcgggaatcttgtcgtgaatgaacttggcaaagtgaacagaccctttgggattctggacgccggtggagagcagtgtccggttagaccagttaccaccattgcctttgggggccatctatgcttgttgccatgaagggatgggattggctgttctgtccggcgctctttttggtttgcattgacaaaggggtgaaggccattggagttgacttatacgacaaatttttg

SEQ ID NO: 7519 - DNA, 561 bp, Emericella nidulans
ttggaactaaacttttctagtgttgagaactttggggtgtttgaagggtgggtatttaatttgaccatagagtgtatgctgcagaatcagacgcataggaattcagcaagagtgctttcttattggcctactggaagtattataaaatgtagcttctcctttaattgtttttattccaactatagttttgaacacactttttttctgtaaaggttattattactgattaatgttatagtggcaggatctatcatttatattcttaccagggatgtctttgtaaagttgactttgattttctgaggtaaaagatatgatttgtagaagcttaagaattgtgttcttaatgcctctaatgaaaattgaaatgcagcttgattaaaaaacatcactctcagcctttcccagagtcaaatttgaataactaccatatgtagtatgtcatactgtgcagaacagcatgttacaagagttgaataaggaagtgttaaagcaactagcatcttaaaatttcttctgcctttaaatttacagggctgttcatgcccttaaaattggttt

SEQ ID NO: 7520 - DNA, 786 bp, Emericella nidulans
agcttgttattacacgggtgcgctactggctcgtgggtaggacagcttgcagactccccaccagattcttatagtagttgatccgtcaagtcgtcaattcgagtcagctcaacgaagacgacaagccaagtaggaactcgcatgtttgtctgctcctggcaagtcgggcactgtatgctcatcatcggtgtttcatagggtaggtgaacgccctataccaaccgatgcgctatgctggagatctgtacacacaatgaagtagtgaccacgagaccggcagggccagaacgtaggttctgaaaaggaggagcaagcagcggagccgtccccagcgccaactgtgcaacagtgcaagaaagttcagaagacatcatctcctaaatggcgaagcctcgacgatcaagaggaccccgagtccccgggatttggattcacatgggcaactgccgaagatatcgacgaaccatgtgcttggaacccaccgttcactcaaatcgatggatttctgatctgggtgccatcgcaaggctggatccctagccaatgttcttccagcgagcacccctttatttcgagcatttgtgggccttgtggcgaagattgaaacacgccgtcagtgggtttcaagcatccactgctaaaaagggtgatcgactgaatgtatcgcgaattgggcgatgtctgggcggaagaaccctgttacgaacgtagaagtttatcggatgatcggttttcttgaaatgcacctctgtagcacttggagcacacgtagtacgtagtactgta

SEQ ID NO: 7521 - DNA, 215 bp, Emericella nidulans
cgaaaagctagtaggcgtgcctgcgcggattaacatcactggcctgctattggagtaattgccaggtgaagtcaggcacctggcggagaagggagtagtagcgctcgtatatcaggttatcctcgtgaagctggtgacgtagtgcctcgtggtgggagattgctagtagtatgtcgttgaacttgaattgcaacgtggcgagtctgtccagcttc

SEQ ID NO: 7522 - DNA, 489 bp, Emericella nidulans
ttgctggatggccatgttataatgtctccagagtatgtgatcaaggcaggtactaatggcgggacaattgacttccttgtcgcccagaagaaatggggattggaactcctgagagtccgcgatcggatttcccaacacgtggcaagatttgaaccatgcggacaatattctaccatgatacaaaacgagaagatggaacagtacgctgttctcgactttactgacaaactcccacagaaattccttccaggtatttctaccgtcctcacttatagcttaactaacattctctttagagtttcgtggcagtctgtatcatgtcgtgttctcggaaaatttctgaaaggtcaaagtgatcgatgcctcagatctaagcgaagttgactccttggttttgatagaagatgcaaatcccattgaatgtcagcctgatgtcaattgttaaaattgagaagtaatggctaccgtaacctttaaagcctcattgtg

SEQ ID NO: 7523 - DNA, 651 bp, Emericella nidulans
gagcccccagagccaccggtcgcatcgcctcgacgcccttctgcagggtctgcactgagcataggatggttgtatttgccattgccaaataggatgaccctgagctagccgggttcgtggatatttgtgcttgaagtagccgaagctcgttccatcgccgaccgtcaagacgcagtttcgtgagagggtatgttgtagaggtatcgagaggcattataagcgattagtcaattctcgttatgaagtcctcaaatgcggtctgatttaattgtgctgagctcgaatgattgttccccgcacccggtgtaactgctattcgtagaagaacctgatgatcgcagaaagggaaccgtgaaataatgtgtatatatccagtaaaaagaagtttaacaggcacagtaccaaattatgctgcaagttgttcgaccgcaggagtgaagtccaaagggtgagaggaagccaacttttccgcgacaaatttgatcccagcagcttcttatcgcttatcgccctctctgcattattcctccgccatcaaccccttgcctttattctaataatctgctgatatttcgtggttttcgttcaaatttagaatatgcattggatatggtccttactgatgtactggacgacctatacacggtcaca

SEQ ID NO: 7524 - DNA, 351 bp, Emericella nidulans
cactatagaatactaggatcaccgccatctgcgactccctttctatggaatgaccttttgatcaggagtcccggtcacctgtggaccccccaacccatgccctgtagcatggtttccgctaacaaacccaccctacatggcaggaccggttcggcaaatacctacaggtctagaacaaccgctcccggctcagacacatggtggcaccgactgatcccatttggacagggaccctggagtacgccattgcttgcaaggaccactgtcgactcaagccaggggggaagcaccagtgccgacacccccgtgtcctactgatagacaaccacactcctatatgcaggggagcca

SEQ ID NO: 7525 - DNA, 966 bp, Emericella nidulans
acgttccgatttctcttatcctcgcggcttggatctctgagcagaccaatgtctcttccgtcttttagaggcactatcacccaacggagtcaagtatatagtttcccacaagtgccagagaccccatttagaaccgattatattcctcgcaacactcacagttgtggtagcgggccctggtcacgttgtcggacttaagtcgggaattaccgttcccgatcggcccatctaactcgcaggcgcccacctgaagcctgaattgcttttagctcccgacgtcgcaccttgagctttggggatacgcgaatacgacacccttagaccctaccacatcatatgtgcagacactattggcgagctgcagtgccaattaacatatgaccctatagaatttctctgagtccaataattgcgctggcaactgcgattttgtttgtgatttggacctcgtcggtctgatgataaagcattcgctgttcaccccgaatgccctcacgtcgcagccatacaaagtcccggcgaggttgttttcaatgtaagcggagacatgtcaaggtctgtgcagtttggtttcctgtgttgatcttctacaactgcgcgttggactacataccaagtctgctccccgtcatgtcttaaaagttgcacacatcggattaaccgggctgaacttcgctgacgaccaggcatagtgcgacgaggagcttcctagatgtagtctttgcaggaagcgaggcctagattgcgactatccgcagtccggggacgcagatggccagctttctctcattcacaggctccattaacatatgcccactgccggtccgagcttgtcccacagatcggtcttagaaaacctttcatatacctgtgagctattacgctgcaagtgggtcaggcggcttacagggcgcccgcctaacaaaacctttgtgaattgctctttcacccgcctgggattctggc

SEQ ID NO: 7526 - DNA, 338 bp, Emericella nidulans
agacagtcacaggtataatgcaagcatgatagagatatgctttcattcttttgggttagggcggaaatagagcaagtggctcagaatagagatgttgattcagaacgcagctctattacgtactatgtgtgagcttggataggttaatctgctagtttccatggatagaacatggacatgatgataataaccacggtgtagtgctggtattgtgaggatagattcacacatctaacataatacctgacatttactatgggctcaaatagatagatgctgaggtaatagtagtgtagtagtatatggtgatgtgggtgttgtgtttgtgggaagaagtg

SEQ ID NO: 7527 - DNA, 1164 bp, Emericella nidulans
cattacgtgagagcacatattatcaagtgagcactgctatttccaaccggctttctttcatatgggcacatatgtttggtatcatcaactgactgaacctagcatacatctcttgtctactgttcgataggtcacaataagaaacaatggataaagataaatcacctcgccgccattggcatggtaaccctggcgaccgctatgaacaccataatgtctgggtgagaggaggtgcggcttcaagctacagacgaccttcttcagcctccgcttcggatgtatttggggcaactgacagacgggtatgtcattcgaatcaaacccatccgtttctcgctctcttctgcaagaggcatactaaagctgccaccccataatagtcctccagtgcatctgagggagacgctggagcacgcagccctcctccttccctgggggagcgaaggaggtccagcggccacggcccttcgagcttgttcgagagcctgactagccagaagcgcaattcgaacgacggcgccttcgcgcaacgcagacaaagctggaatgagcaggctcgacctggtggctatttctccaaatggtggtctgagtatattggtggtaaatagcgccgagatgtagttgtaagattgtaggcctgtctgttgctataggcgcaggacccttaggatgctcatattcatcgtgttggcgctggaagccttgcagcaacatgggtcaaaacgagcacatggagcgttgacgcctgaggcttttgatgctttatgcttttactgaaatctatttgcatcagtttgtcgaattataaaagccaaaacaggccttgacttcggggcacccatgggaatctcagccccgaggacggcagtttggatatggtgtcaaagttgtgggttgctatgctttgaaccttggccatttttccaggtaaggctccgtgtaggaagatccatgccagggcggtttctgttcaagatgctggccctttaccacggccagtttgaactagctgcctccgaacccgtgggggtagaaggaccaacctctagtcgtttcgcccgaaacgttgccagggacctcccaatttgtttttattaggggaaatactttctctaaacaaaggcttttttcgtgcgggtttcctttctggtttccccccct

SEQ ID NO: 7528 - DNA, 899 bp, Emericella nidulans
ggtagtagtataaaagctggcttgacttgtcgttaaacaccatatccctgaccatcggaccgcgtgtattctcgccgtgccattttcgtaattgacgagagaagtaagagaagcctacaagattagacgtaatttcatattcagatccttcgagaacagtgtaatggaccactgcgtggttggaaaacatgcgatgacaccacgcaatagcaaatgtcccatcgctagctacagtgaaagccgaaggttcaaaatctgcatgctctggaaaggtcgtcatcttcactggtccatttggggacttgagggagtagcaagtgagataaatgtatccctcacagccggactgccttgcttgcttcacaaacgggtggtcccaatcttgaccatgtcctccttctttaaacggggtaaaacgatgaagcacataaagcccattactaccgtcagaggctgttttcaggatgtcaattgatccccactcgccccatggcagcctcgctcgtgagaggagcatgatttttccggcgtgcactcgaaggatctggaccacatcttcatcgcggcacgtagcaaagataagagtttcaccagcacagtgagcaagcgacgctgctttagtgttgggtacccggtttccaaatttgaacgttatgcaactcgcgtcatactggctcccatataattgcttcgaggcgcgccttttcagaagcaagaagagatgccttgtcctaagattagaagtatcgaggaatggccctggtgttcttttgagatggtgaacgagggcttctctacagctggaagcgatctcataagagtcccgcaggatataaccgcttgtagaaacccggggtggtgcaataagcaaacaacttgaatcagctctggggaagacc

SEQ ID NO: 7529 - DNA, 792 bp, Emericella nidulans
agtgccggctagggttagaacgctagccagctcctatttggatataatgcccgtatttcagttggggttctagctctgcaggatctagctagctgagtcgaacctgcttattcggccgaatgtgcactaccgagggtggtcgccgggcaccgattctctttcgagaaagtcctcaaaacattcttctaagtataatttcagtctgtagcgcttcgagactctcctatccatggatcaactttctctggctctcacacctaatcgggggcgtcgcagtgcgcagtgggcgatgtttacatcatgaagaatgaaatggacgacgtcagcgatgatctcaacacgagctgccgaacagctggagagaagctagatggatctctcctgattcagaaagattgtgcggaaagcttgccaatccggcaaaggttcctccgtggcgcaatctggcttctgatccaagacggtctgacagaatcgtgagcttctagaagacatctggaaggcggttagacaacgtcgaagcttccacgctgcagccccaataaaattggtagttataggttgaataattcaccagacatctggatccttcgagtctcattcgattaagggatgagggtaatccgctgcagtgcatctgccatcttcgccctgttctcaactattgacttcttgattagctattgaccactagtgagctgcgagcactgggcggggagaccaccggtgacgttgatccgcatcctgcaacctcggagacagaccatctgagattccgcacagtagacttga

SEQ ID NO: 7530 - DNA, 817 bp, Emericella nidulans
caacgagcgtcatcactgcaaggatccctcaagcacatcgcacagtccggcgtcagtgtaccactccgtgtctgggagatgtctcgccatcgacctcactggccctgcattaggggcccccagcacaactccgaagatcgaggatatcttccttcccatcgcggagcacgtccgcgactactacctggagatccgaaataacgaagagcacatcaagcttgtgccggcctactgggcaatgtcaatactcccatacccggaaagcgaaccgcctgcgatcccaccgcgcaatgagaccccttctgcctctatttccagtatgggtgtgctggacaaggtcatccggcaccagtacggaagctttagtgtggaaaatccatgggtgaccggggaggagctaggcacgggactcggactgttcttgggtacgtggaaagggagactgacccttagtgcagcatacaatgaggcctggcacggaagggaggaggtactggatgtcttgaatcgatgcaataagatcgtccttcagggactgggcctttgacagataaaggtggtcttgtacatagtgcagagcggaggtgtgcgcttcactccgtacttatgtacatatcaggatcttcactacgggggtatcggctgggctacctaacccctgcactacaaagaattggcaatgcacgagctttatcaaatcttctccctaagctttggaaatagacgctagaagaggctagacctgcgcatagggcttggagggtttggtcgactagaggtagaccttttaatatcacataggcatagggagatggta

SEQ ID NO: 7531 - DNA, 240 bp, Emericella nidulans
  unsure (1)..(240): unsure at all n locations
tgtgagagagtgtgtgcgagcgtgagcgagtgtgtgtgtgtgtgtgcgagagcgtgcgtgtgagcgagtgtgtgagcgagcgagcgcgcgcaggtgagagtgcgcgagtgtgagagtgcgcgtgagcgcgcgnnggtgtgcgagagtgtgggagagtgacgcgtgccgcgcgcgagagcgtgagtgangcggcgagagcggggcgtgcgcgcgtgtgtgagantgtgcgagcgagtgtgt

SEQ ID NO: 7532 - DNA, 1118 bp, Emericella nidulans
actgcttatcgaatgctcgggcggtgatagacttagattgaaccgctcagttcagactgaaaggtgaccagcattagtacatttgttgatttttgccaatttgcatctgtgaataaactcaccaatacccatgcatgtttacttgcatggagacgggttagggtacgtggtagcggcttacagccttggctgttatcttatcgctctccgcatagactgcactttttcccttctccaattacgccatcatggacaaccatccagtagatcgtccggccaaacgccctaagatatcatctcattcagagccagaaaacctcaaaaactcatcactgtctgacatcgcctccctccgccgctctataacacccccgccggcgcgttctgagcgtcccagcgtcagtaccacctcggtcatttccccgcaccagcactcagatcaagacattaacaaggccaacgcttcccaaattataccctctcctatccaactaaaccatatcagcgacttcagcgactcgctaaggaacaatgacgacaccgtcaaactgcgggatatcctgggtgacccgctcatccgcgaatgctggcaattcaattactgtttcgatgtggatttcctcatggaccagtttgatgaggatgttaggaatctcgtgagagtgaaggttgtgcatgggtcatggaagaaggactccgagaatagggtgcgaattgaggtgagtgtcaccttgttctcgtcctcaatggaggcgggctaagtgtggatgggggcagtaagctaatggtcgttctgtctcagaaagcatgccagcgatatccgaatgttgagcccattgtggcgtacatgcctgaaccgtttgggacgcatcactcgaagatgatgattctgctgagacatgatgatttcgctcagtatgttttttggccagtatgtgggagtgctcaaggctgaccaagtagggttgtgattcacaccgcgaatatgcttgccggcgactggggggatatgtgtcaggcaatctggcgttcgcctctacttccgctcacgacggtcatgaagacaaaaattctactgcatggggcacagggccgcggttaaagcgtgacctctttgc

SEQ ID NO: 7533 - DNA, 1005 bp, Emericella nidulans
gagaatggaaatataccgtttgtgttaaagccaggagctgacgtggacatcgttgtcaccgccatgatgcctgtgttatccattgccaggaagtcttcaaagccggttttcgtgtctcgatcgacgggtctggctcatcgagtcatgctttaaagtgcttccttccgaggtattcgtctaggacaaaagggcggcaacgaggaagaaatcgccccggtttatttagggaggcaagcacatataaaaattccttccgggccaatactaacacgatcagacagctgttaagtgggcatagccttagtgaagagccacaagtgataagatgccatgactacgacaattttgcacaccagttcgtggaaaaagacgtcgggtcatcaagaaaagattcatacttgctaccattggcgcaggggatagcatcaatcgcgccgaaactcattataccctaccaagagtgcaaagaaaattttcctagcagagagccgatctgtaccatattgggccatagggctccgagcagtctcacagcaaatccgatcatcaagatatcaactacatgagcttcattatcagatggtcgcatggccaagccttgcatacgggctataaacccggaacgggcgatgccactattgatactcaagcctctgaaagcagttgagcttgcgccaaatgacagaagttcgccaggaaaaagctcgtacagaatcactctccgagattcgaatagaaattatgcataagatgacgagtgaatacggagcgacttcagattgcgcgtgaaaatcacggcaacgttatttcggcaaagcgaagaatccttggaaaccagttggacatgccgaacacccgggcgctcggtccgcaaggtcgggaaccatgtacccacaacaccactgctccaatatcaaagaaatgtgcagtggtagtttgtgcaccggattcgggcggtggaacccccagcagtcgcccggtctctggaatgctacatcgtggtcc

SEQ ID NO: 7534 - DNA, 786 bp, Emericella nidulans
tttgatgcctggttcgtctttcgaaagagaaacagacttaagctctatagacaccgccagcatcaaacgaatttgaggcatttcttaggtaatgctcatgacggacgctactcatcggattggctgtgatgcctacgggcttggacaccctaggttgtaccttgggctgcacaagaccccatacgcttaatatcatgcggtgagaatatataattgcgtgaaaccacataagaattatttctagtacacgcctgagtcttccaccacattcctcggctcataaacaatatcgtcatgaagatccaaaacgcgtatgcacatagtacaaaaaaaaaaacagaaacaagatcaaaacacgctccgtccccaatacatcataaacatgcaggatggccatgaaattatactcgtaaagtttcatacaggagctgcgcgagcccccctcgcaaacgaaaacagttcttaacaagcggctttcgctcaaagaaaacctttggtgttgctaggcatccggtgcaggtcacctgtggtgtaagcaccgctgcctttccggcttccggcatcactgaaggcgacatggctccttgcgatggcactacctccgcgttcgactcggagggctttccaaccgtttagctcacgctccaacctcaacgacttttcgcgctcttcacgcagctctcgctctgcgcgacgcgcttgaagttgcgaatccgactcgctctgttgaagtacgtcgatgtttttcagaaggcgttcaaccttctcgcgaccccgagatcctcc

SEQ ID NO: 7535 - DNA, 601 bp, Emericella nidulans
ggaaatacgctaactcaattgagggaagggacttatattgcttactagattttcgtttaaattcgtaagcataggggcaaatgtagaatgaccccctgctcgcaaatataaatgtttagctcttctaggaagtggaacaaggattatccatgacatatgaacagacttggcccccgccattcccacaataatgcaaaactcttctaagaaagttttgagaatgaaggattttgctaaccatgttaagtataggctaggaaaggtcctgcaacgggcataaggtgagcgatttgatattgttggacacatggaattgcaataagatgacagggagaccaccccttcgcctaaaaatatccacttatcgtgctgcactcacctatataggaattcaaaatggaaacataaacaaagaactcgaaatatgatacaaatagatattctgtaaatccgagtgcgtccttggcttttgcttagctctcttttctgcccaactttcatgcttcagtacatcaggcacttcactatgttacagtccctgatattctttaaccgtgaacacctatcttaccagagtatagcagcggtctagtgtctagtt

SEQ ID NO: 7536 - DNA, 696 bp, Emericella nidulans
tcactcactatgggagacccagctaggatcctcgaggatcagtaactgtacaccgcctatggagccaggcaaatgagacttgtttcctatcatcaacacgaggtgagtctggtcttcatgattgctggagagtacctcgatctgatcttgcgatgggcgggcagcctctcgcagactgatgggagactacccctcttgtatctgtttgccgcccatccaggatggccctgaccgggaatacaagcaattgtctgatgagggaggtgtcagatataatattcgttgggggggggggggctttctccctttttccattttttttttacatttctcctgtctttagcttcttgtttctattatttttgttccatatgttcttttatctatttcttttttatgttaccttgttactttctatagctctatttttttttaatctcttttctcatttctttatccttcttctgttatattctttagatgatcctgttttctctcactatctttatgctttttttttttattatcttcctaactcttttttccctaactttctcttctctcttgttttgtttatatttctctctgctttttttcttgtatttccctgcctttctttttctttcttattctttttctttcttttatttttcttagtctctttctttcctactattgtttcccattctctcttct

SEQ ID NO: 7537 - DNA, 512 bp, Emericella nidulans
gaagcaccggtcgcgcatcattgctttttcggctctgttcgtcgtcgctcaccagagaaagtagtccggcgcttgctcgttgctagctgtgctagctgtgcccagccagacctgggtcacctgctttgcctgttttcagctagctggctgccttggggtcacttctttgcggcaagctggtttcccggtctttattcgttctgtggcgatgaccttgagcggtcctttgagcggtccctagtgtggtctttgaatgactcgccggtcgtatcataccattaaattattcattattacacaggacgagcgactggacaacagccccgcaagatctgctgtatgtacgacggctgcgggcgtcgggccgtcggtagcgcctgcctgatccttgtcgtccctccaaggttgaataatcgaaatgaagagatttggagtcccagccggtcgcagacgagaacaaaggaaagaagcatcgcagacttggaggaaatttagtgcttgcgtaggggaaa

SEQ ID NO: 7538 - DNA, 1050 bp, Emericella nidulans
acacgcagctacgattcccacttgcaatgaagaatacgtcatctcagcaccgtctgtcaagtatctctcccgaaagcaaaacagtcagctctgatcagagcccggaacctgacattcatgacctacgcctggaaggtgcagtcctccatcacgtcctcaactcgcgttccaaaaaatgggggtgatctatcgctgcacctacaacgacgaggccacgtggcagcatcttaaacaatggatcgtcgatgagaaccgggaaagcatagcaacgtcaaaggcacccacacttatcgataacctcgacatagtcttcttcgaggaccgggcgcgcttcgacggggcctcgcgcgacgaactacgggttcatttcaaggagtggcgagcagaccagtttaccaggctgggacctgcggatctggaggtgatgcgaggtactcggctcggcgaattggtgcctcggattaccatggtgcatcccgaattgatgggttcgaggtttcaacagtttatcgaggttgatgaggagtcgctacacagtatgcgcgaggggttcgacgagcccgttagaccgtacgggaccggacatgttgatttggtgtacgctgattggccgcatgacctagaggactctgatgaggatgaaagccaggaggagtatgaagattatgaggtctttgagcccattgatgggtgtacagaggagaatgtggggtggatgaaggtggtggctactgggctgggccgcccttcttcttcttgtcgtatggcatcgaatggtggcaagaaagttatgtacgaccgccagacgttctctatatctgagatgccaagacgaactatatgagatggccgcatagcgcccagaggactcgggaggactaaagcatactgcctacattcctgaaccgcttgcaatcaacaaacatcctcatcacaaagtagcctgcctgaatagtttttccaatccttcctgtatctttcatcttgccgtgcccggaacagcttgcacatcccctgatcagggctcaaaataatacttcaattttggga

SEQ ID NO: 7539 - DNA, 1555 bp, Emericella nidulans
  unsure (1)..(1555): unsure at all n locations
tgttgactcgtttgagctattcgtccttggcaggcaggcatccgcaaatactctcacgtgatgtttgtctttcttaccaactaacaatgaccctcttttacacattatgcagcattctactaaggaagatttatactttgaccgaatgataagctaacaaccatgaagttcagtttaaggacgcactagctagttatgcaactgtggcttgaccataagatacattactcctggtcatcttataagatgaccgtcagctaccgtagtctgcctccacattaatgtaatggacaggccgaagagactttagcggcgcgcgctgatactgagcgcttattgattatccatgggtagccgtcgtggatgttgcacgtcaattccactgcaacctgcccatcgtatttacaaaggactttcagcgcgcatttgagttagagtcagggagagttgcaagagcgccacacaaagcagattacgtcagtgagatttggtcactttaaacaaggaaatgtatagggaatggcaaaggcgtaagaatagcagactttgaaaggagaacagaacaaagtcacgtctgataacaaatccagaccgtcacacttcttgttcctagttcatatacctaaagctcttcccgtccagcagccggagcctggcctcctttcccatgctgtttggcaatagccagctcatggcagcctcaacgtgatccatcaaaccttgtcagcattctgctcaacgattggctcatcgtcgttgtatgccggaggaaggtcctcaacaggctcggccatcagaccctgcttctcagaaaccgatccctcttcgttggtttccttgcgcgaagagcggcggtaacgctgccacatgaagatggcgagctggcccacaagcatacccacggcgctggcggccagaccggccaagactccgaggatggccgggacaacaatgaagcgcacaacgcggtgcagggtcccgtcccaagtcttgtggaacttatcgtggaagtgtggggaggaggtgagggccntgggtggccgtgatgaccgtgaggctcngcccagactcggggcggcaaagtcgcgggggtggcaggaaagaggaggcgttgcggtgccccataagctcggacagcctgtccttgacatgcaagatgcgctcttggccaagaacatggcctgtccgtggccaagaactcaagcccagcgttccgcgaatgtccaaattagatggggacctgattggtccgcctgtagggccccaccttggaagggtggcatccgccggaccgtgccacaacaaccgatgactccactcggtgccgggagggggaaaaaagcaacatggtgctttttttccctcccctcctctttttaggccgagttcctctatgatgcattcttctcctccttgttctttgtatactcacttcccaaatacataaaggttggttgttattaatcttctacctccttatataaggtgttgccttttctataaaaaaaatcactcctctactgagtgtgcttctctactcctcacacatcccccc

SEQ ID NO: 7540 - DNA, 627 bp, Emericella nidulans
acctcatggtgcacacggacctcgacgatccggacgccaaaggaaaccaagttctcgacctggccgaaccgagcaaggtttctccgttaatcgttatttgccattgtcctgaagcagcccacaagctgtacgcgaggtcaacatcaatgagccacaatcccaaacccattgtcgagttcattagccagccctgcggcccccgtaaacttgctaaatcaatggagctgtgtttgaagcgcatggggggccaagagacagaccaacacgaagaaacacgatgggtcgagttgcccgaatcctcccacctaccactcgatattgggccaagagacgcccccgatgagagaatgaaggtcagcaaacgactcgctgaagaaaaaaatgatgagcagcactccagaaagccgataaacgacaatatttctctcccggatgaaccggggaccgtgcccgaagtgacggctcctgatgggatcgcagagaacggcccctccttcggtcctcctcgttgaagacaacccaattaacttgaatattctcgatgcatacacgaagaaagaaggctggagcagcacgacagcccaaaacgggcttgaaggcgttgaaaagggttcacagaacaccccg

SEQ ID NO: 7541 - DNA, 719 bp, Emericella nidulans
gcagacaggtattaacatgctgattgaagtttaaacgaaaaattccttatcgcatagaaaaataataggaaatcatgacatgaaacggatattacgagaaatagctgcggacggccgcctggttctccgggctcacaccagcaagaatttgttccgcgttcaagcctgtcgcttgcaccaaagccttcgcggaattggccactcgaccggcggtttggccctggagggtctcggcatccagagcttgcacaatgtacccgaaaacctggcctgcgttggacatcaccgcagggttttgtctggtcatgttagttgttttctcttctcattttgctaaagacaaacttactggtcaatcaactgtgcgaggaaagagtatgcatatggcgcggcctcttcgtcataggtgattggtagcgtggaaatccagttggccgctatttctgctgcgttttgtaccttgctggagttgaagtgcagaatcttggcaatgcttgcagatgcgttttccgtagcaaacacgtgttcttccgtccgtgattgggcgaactgcgtcacctggaagagactcggaaggcaagcggcaacgaattcactccatggtcccccgcccttctgcgctgcaactccgacgccataagctgcggcctggcggttaaaagaatttgaatcccgcagcccagcaaccagtggctgaatatgcccatcggtgtccgcca

SEQ ID NO: 7542 - DNA, 1013 bp, Emericella nidulans
  unsure (1)..(1013): unsure at all n locations
agccttgtcgtggacgtcaccaacctgctacctcggcatattagacccgacctgtacgggcaatttatcgtgcctttcaatacgctgactaccgctgtacgagagccgcggcctgccttgcgtgtcagaagacttcaatatcaaggcccggggcttatactgtatagaccccggatacggtctagcccagccaaactaacgcttgcggtctagggctatcgccgatatagcctatatgtatagaccgagtcatggcgtcatgatcctagccatcaatgcaggtacgtcgatttctgcacttcgtcattctaaattaaagaaaaaaaataaataaataaaataaagtagaatgtatttctaaagagttatagagagagataacgtctagcaaccgcatcacttcaaccacccaatctccttccagtactgcagataccccctcacgcacccctcagagaccgcatccactctacgcagagtagcagacgcctttcgtgctttatccgtgcctagaaccacctctccacaccccatacggatgaaatcgttcgcgaaaaagtcttggagtttcttcgctgggttgtctgtgtcgcccgcggctgcgacctgctcttgccattcgttccaggggagtgcgtcacttgcagagagatgaagcaccgcagcgatggtctgaagcatatcatgccacgattggcggatcgggttctcgatgtggtagatgagctctgcgggcgcaggtgagaggagcagctctgtgatgctctgggcggcgacgtcgacggggatccaggatagggtctatacgtgtattagcaaatactgagaaaatatggggtgagatgatgttggggaagggggatgtacatttagtagccggggcagtcttccgatccgcagtgatgagcgtaccagggctggaatatgctagttcaaaaaccggggccctgtggtgctggatcctngaatctggcccntgcggncgtaactgnctgtcntctcatgcgggtatg

SEQ ID NO: 7543 - DNA, 616 bp, Emericella nidulans
acgtatgagtcgccgagctagctatgcaccttcgtgatatctgttatttcatagagaagcatctacctagctgaatacgggccccaccgacagataggcatgaaaatttctgcctcaatccagtcaatccattcaatacgggcgttgcgatcggtgtagaagcgtcacgagtcttgtctcgttcctgggcggagggcaaacctgggcgtgtccgccgttgatgacggagtcgggttatgttctgaaactgcgcgcaaacccgggcgacgggccatatgagcggttgttaacaccagtctaagcaaagcacccaagtaggcgcgggcgcaacatgggtatccgagcagttggtagctggaagtagtgcatcctgggcccctgcactgatctccgttggcgtacgtctttaatgtgtagcacaagatgccgaaccaagactgactgccagaataaacaaaaaaaagtaaatcccagattttcaagaacggatgtcaatgtatttttcgatgtcctaggcagagacggttggtgcctgctgacctgaggttgaagcggagtatgacactgtctggccttgccaatcagcgcccacgccccgtaaacagcctgaaagagg

SEQ ID NO: 7544 - DNA, 802 bp, Emericella nidulans
gtgtggtgttacacctgttgaaaaacaagaggaaggcaaggtctcagcgggaagaaacaggaagttaacattgtctaaataacaccattgaattcaaaatcgtacactgttaacccgtacacattcgtcaagccgatcatcgtccgtaatatttccccatactcccgccccaatataccacctggccggagcagtggcaaagctggtcacatgacgccgacttgcatatcagtggcaaagcccggggcgggtttggtctaaactgtgatgtagatatgttgagaattattcctgccgggcaaattatcgtttggctaaccctgttacagacatgaccttgcatcataggttggggataggccagagaggcagtacaactataatggagtaacatgctctactccctagtttaagtggccactgaccaagatggatatggagatattcatggattagtcctctctctgtactttgtaaaacatcagagttagttaaactacatcttagcatgttacggagctaatagacagagtccatggaccagccgctgtggccagcccgttgctgtacgagagcgttgtaattgtggagtccaacttttggcatggagtaaagaatttttggggtctttttcgccttcgttgtgagaagagaaaaaaacccaatcggagccactggctgtaacagcttgactaagacgaaggcaactttctagcagagaaaagacccaaacagtgacaccgtattactctcttttttttttttttttttttgcgtaagtccactgacagtaatttaatac

SEQ ID NO: 7545 - DNA, 1525 bp, Emericella nidulans
agaagaggaaatatgtagtatatgatattaaaagagtataaaaaagtttttttttatatataaagaaaacatggttatggcaacaaggatttgctaacaaaaacaaatgcttcagtaaggttaggaaaaaaatagccctttttgccacacataaaagcaccggttacacgattatccggtgtttttattctgtggttaaagcacgatttatcttgtttgccctgtggtcccccccgcaaaagccggaaaaacggtcccgcgcaggggcgctcccttcccttcccccaaaaaggctccagctcaacaagccggaccccccttgggatattggtcccattagacggggcccgctcctctctatacatcgatcattcccactgttttgggtcttccatcttgcttccggacatcctttcccttcccctcggctttcgatcctcgaagtagaacatgactaccccccttccccctcctttcatcttcatcttcctctacttcaatcctccgccggacctaattccttccctgaacactctccatcgatgggcagaggctgctgtcatactccgcaggcctaatattactcgactccggtgatgaagacagcctatcattaatcaattccactatccatcggaagagtctatataaaccctccaccatattccatactaatagggtaagtgcccggtgttgcagagcatcaatggctcagctaatcagagcgacccagtcctcgaaactctttttggtttcatctgctggcagagaagttaaaggagacaagatgactgtctgctacgaacatccctcgcggggcctcacgccgacctcaatggcgacgctgtcagatcgatttgaattgatgaaggaggttggtgacggcagctttggtagcgttgcggtagcacgtgtacgaaccgccggttccaacatcgcccgtcggggcactctggtaggacagcttgtctgatgactaaggatcaatatactgatctggactgcaggttgccatcaaaacaatgaagaagacattcgattcattggctccatgcttggagctgcgggaagtgatcttccttcgaacgctccctcctcaccctcacctgggtccggcccttgacatttttctcgacccgctcacccgcaagctgcacatcgccatggagtacatggacggcaatcttaccagttgatgaaggcacgagaccacaaatacctggacggaaagcatgtcaagagtattctctaccaatctgtgtggtcttgccatattcacgcccaccattttttcaccggatataagccagagacatcctggtttacatccgtccgacgattcaatttagcggttttgaatttggacttttcattaccttccattatcagggaaattgcgtttcggttgtggggacgcttcaagtacttcacaatacgttcaacatgtccggctcaagtttttctgcgggaattttgccgaatattggtgtggctggatgaatggcttaacctttccgggaaagtt

SEQ ID NO: 7546 - DNA, 727 bp, Emericella nidulans
  unsure (1)..(727): unsure at all n locations
atccggtcagctttagctgacaaacaaatctgccctgaaggactttctgctcagcactaatacttgttcgttagtgtagacggatcccggcgtgatcgtatagcttatgctggtgaccttgatctcgccgcgccagttcctttgcgagtacggctggtcaagagtacgtccgcggctctatcatactgcttggtcccttgcagatgctgcctgggttcttcagcccgactgcaaaggtgcgacaggagcagcggttgacggatattcctgccaacgtcacggggttgatcggatactcattcaatcttgttagtgctatgagccggtattatgaacaaaccggcgacagatcaatcctcgtcgagtgggcgccaagagatgttcgcgtatccgactgggcacactctcagctgctaccaaacaggctgttgagcatttccaccgcagccattggtagatactggaactactatgatccacaggttggtggtgttgtcgccaaattcaaccttgcctacgcatatgctctatccgaatcaattcatcttcttgctgatgtgggtttgaacgtcaccaagcatactcaacgcctatgcgagctcagagcttctgtcaataagcatctgtggagtaataacttgcaggcttactacccacttggattcttaccctgggtttatctctcaggaagcaaacgcccttgtatnctcagcacaccataccaaca

SEQ ID NO: 7547 - DNA, 217 bp, Emericella nidulans
ggggggctatatgataccatccatttagtggacactatagaatactaggatcgcccttcttttaacccgtcagaccctggaaccgggattttttaatataatctggagaataaagggaatcactggatgccatggttacgttgccttccagcgacgtggaggcctggcccggtattgcccaggacggccctgcctaggtacaccctatgctcagcat

SEQ ID NO: 7548 - DNA, 1034 bp, Emericella nidulans
  unsure (1)..(1034): unsure at all n locations
cttggttctgttgcggcttatcatttcgggtgtgtctgttctcttcgacgccaaggctgcgtcaaagacgaagggtagcagaaccaatggggtatcagacaaggcagaggacgtggagatgacagatggtgtgattggtactggtcctgaagacgaagaggccgattcctcgcttgacacttccgaagaggatactgtaagggagacgtacacctacccaacgggatatcccttagaagagaacgaccnctatctatgtttctatccatgatatccgggaaagggcaggctggactcttcacaaggtgcataggtacttgtgtgagaagcaggaggacgacgtgccctgcttcagtgctctatactctgcttacaaatgctggttcgtcgatgttggtatcgagaggtccgcccatgtactggatagagtgactcgccttcttcttgccgacatccacccttataagatgagtggcattcgcaaggattacccacgtcccctgcttattcgacgagccaacatgtaccatctgcagcgcttaagacacaatgccgccccacgctgccggtcacgactggatgaaatcctgctcttggatattgcagagtcgtgcgtatctgcttatactgagacgcgccgtaacgctcaaacggcgggagagtcggccttgaaggtcgtctggggctcccgcctactcgtcatccccccacttctgagggcgctgcaaaatggcatcaaggagaatgactacgcgcgcatcaagggttcttttgttttctctattgtctagcagtgtggccagaaacccgtggccgtcattggaagtatgctcccactttagtccgagctttattgatgcgaggccggctgtaggccctctggccaacggatatcttgagtgtagttatcaaacatggattttggccgcccaaggaaagaatggcaatctagacgagacctgtggagtccatgttcaacgtacagacgtcgccagcaaatcagaaaacgaattactaacacagcggccctttgg

SEQ ID NO: 7549 - DNA, 208 bp, Emericella nidulans
  unsure (1)..(208): unsure at all n locations
agtgtgtgagcgagcgtgcgtggcgtgagagagtgagtgtgcgtgggtgcgtgngaggngtgaggcagtgtgaggcgaggcgagttgcgagggaggacgaggcgtgacgcgagtggagcggtgtgcagtgaccggtgaggtgtggtgtagtggagaaggcgcggagggccgaggcgagacgagggtgccgcagatggcgtggtgaggt

SEQ ID NO: 7550 - DNA, 954 bp, Emericella nidulans
tccttcacaagccttgtctcctagtgctcgacgagattcgcctaccgggccaggagccattgaccgatatcctcggcggctcaggagcttatggttgtttctcgcccagtataaattcgattttaaagactaacaaggtcctatacgttcgctcggtgctcgattgtttcttcctactccactgagtcgctcccttggctggatgatgaatatagggaatgactttcccgagctaagacagcgctatctcgaaagctggggtgctacaatgatagtaaaggaggaatgtagcaagccatcaacgagagggttgctcgagtacaaggataccacatttggacgtgcaaaatcccggtgtccagtcattcatctatgcaagaatcaaggctaactcatcctcagccaaagacttcatgtacacaacatcaattctccaggttgacgtcagtagcttgaagagtacaccactctcaaggtcgaaagcctatcacttcctcgaatctccggcaaatatcaggagccgagcctcggaaatcttagctcttagacagggtttcggcataccgaacccgctcatcatctgggaacccgcccccctctcctgcaaagcagagaacttgcagccatgcatagaggccacaggtactgtcaatgtattctcaccgaatcacctagagttggcccgccttttgggagaaccattatccacccgctttttagacaaagagaagatccagtctatggcgctggagtttctaaatacaaatgaagggattaggccccacccgaagggggtcatgaacggcccaaactgtatagggaagctgcattggattccaacgctattatccaacgacagggatacggctgtgtgaacgggacttgcatattatgaataagaaaacagctggaacaagtactgactgcaacggagctgttaccattagacacctt

SEQ ID NO: 7551 - DNA, 119 bp, Emericella nidulans
gcgcgtgagtgtgacgtgaggggagtgtcggcgtgacgcggtgcgtggcgatgtgagatggcgagtgggcgaggtgctgggtggggccgtgtgcgaccgaggcgaggtgtggtgagtgg

SEQ ID NO: 7552 - DNA, 773 bp, Emericella nidulans
aaagcttccaactcttgctgttcactttcaagatggggattgctgttgtcctgccgtagatacatcggattttcgatctcgagcggaaagtactgggagcacttctcgcgacccgcttccatcgtttgtgtaagcatgacaaccactgccacttctccggtttcatggaaaaccatattccaaaagtggtagaggtcgtctagcctgggaccctatcgtcgattgagcattattcttccactccagacaatgtcgctatttacctgtgttgcgatatatttcctttcctcttgcgaaaccgaatccctaaggacgataggcgatgcatttataaaatcacattcgccttcaggaacccgtaggtgtatgcgagaattcgcccacgcttgtacattcgcatatcgattcctagccctgacttcgggatccgcgtcgagcgcccaacggtgcgaggggtcgttcgcccgggacccctccaagattcgagttccttgcatgtattccagctcttcgaacttatgacggatatctagatgtagagaaataatgagcccatgactttatcgtggcagaaattgtgatcaaggcaaaccaaccaagaaccgactggcgaaggaaggggggaacatgttcattatcccccagctccatctccgggttgtcatcatctgatccatccacaacgccgactccatcctcattatccgggtgcgagcgcttgttggcttggacgcttgtatcaattttaatggtgggatgcgccatcctggcgg

SEQ ID NO: 7553 - DNA, 391 bp, Emericella nidulans
acactatacactactaggatccataccgaacaagcttcgaacggacctaatgatatatgctacaaacacgagcagggtgtctaacgcggattcgcatggtagggccctggatgccagataatgcaagacttagatacagcctacactcggacccactaatgactgaacggaagtgcatggccgacccacgcagcacagtcaggcctacgtacaaggcttagtccactctctatgagcgaggtggaagaggactccacccagaaggagctacctactctggacggacgctagcattcacagatggcatcgttcgcgaatgcacaagatcctgaccgagacgctgttgcatgggaactatttgtaagtcaggtaaccggtcttacgctcagag

SEQ ID NO: 7554 - DNA, 695 bp, Emericella nidulans
cgcttttccctgactcgttgcagctgtgctgtccttcacggctgcccccgaactctttctggttctgtagagctgcatcgcgctaaatccgccctggagcagactgtggatcatcctcgcatccgcctcctgctcgccgagttcgagctctgcctgctctgggagagtgcctcatctatccctgcgagctgcccgaaaactgtcaatgacaccttagatcactggaaatctcagtggcaagaatctttgaccggcggtaggtgacatttcttaacctccgttgatttttctctgctaaatgtgtcttgtcgctcaagctgccgcacccggccaccaactgtttttttacttccacttcacccggttccatctccttacacacctagttgatgaggcaggcgaaatctatattgccatgaatgaaactttggaggcagcccaagactttctacaatggttcaaggatcttccccccgtatccaaggaccgtctgcgctatctgtgcgacttcgcctttgtactcatggtccatgtttgcttgtgcgttattcgagctctacggggcgggctagtactacctaagtgtcgaaaagagtttttggaactcgtacaggacgcggcggtcatgatgcagtcattaagcgttagagctgacacacggccggcaatctacggctgtgcacagacaccatggc

SEQ ID NO: 7555 - DNA, 440 bp, Emericella nidulans
tgtgtattgcgagtatctgactcgatcgcgggccgtgacgcaacagggacataagctatgggttataggacaaggtgaagaatagccatcagacaatgtattatgattgaaatactggaagcgagtctaacgacaaggttgggagcgtgagatgtgcgcatatatgtcaaaggtaagggagtggagcgcccggtctaagctgtatagaacgcctagcagtgcgactttcggtgatcaagcctcgtgggcgtcgctaaagccggctgcatgggtgaaacaaaggtgaagcgtcagtgatggcgcgtctcactgaagaaggatagcacacctagaacaagagatttagggccagaaaagaaaggacaggagagggataacagcgcaataagagagttgtcctgggaggagtggaggcagtaaggataagcgatacgattaga

SEQ ID NO: 7556 - DNA, 136 bp, Emericella nidulans
ctgaacccccactcaaagcatatcaagcagcacagcggacggaaaatgccgctcaactggacacgagcgcatattaacaccagctgtaaccccaactgtggcaatacaagccacaaacacatctacagcttcccgt

SEQ ID NO: 7557 - DNA, 1236 bp, Emericella nidulans
ggataggaagatagatatataggagaagaggaggataataggaatatgaaagagtgataggagaaggtaggtaaagaggagacaacgtcgccgagtggagagaaaagaacgaaagtggtataaatatagagagtaaagcaaatcacaacgccccggttgtggtcacgtgtaactctggaaacttaaggaggctcctctcttgggaggatatataagaaaaccttggccccaatataaattgggtcccacgctccctcaagatttccccacatttttttggagggtttttattccccggggaaatttttctacccctggcgcaaaagtgttaaacttagcccccccgctgggaaaatctaggtaccacattcgttgaaaagagcctaggcgcaattgatatccatcacctttcgccagagattgacctgtgaagcctctaaagggctttagggttacccttggtatgggaggcctcctactttctcccaagggtttctctcgaggattagattatatgtctcttaggccacttcgcgtatattagtcaaaaagactccaaaagcaacaatcgggttcctcgaacatgggcaagaatctttcaggcgcctccaagctttagcaagagaaaagctttcagctatccttacaaggcagtactcccgtgcgccgcacctgcgcgactatgaggagaatgaacttgcggctgtgaaagagttgctcaatggctttggcgaatgatcatttatccaattgatcagagctaaatgtataacccgtggattattcgcgtttggtcctatccagctctatcgtggtcaatgccgataatatttatcggagaaagcaaaaaaaagaaagcaaacaacgattcaaaattacccctgtgtcgcttaacttccgtcgacgcggcagtgttgatagcgctcggcatctgtgcaaccgtgcaaaaactgtacttggttccgctagccgaatcagcaggacccgtcgatggctgctgtctcataagaaaatttgcgagtaggtggctgagtccaacttatgagaatttggttagaatgattgtgatgtcgataggcggtttgctgactcgaccctcgtggagctgaactgtaaagaaactttaaatccaatacaatcacagagagcatagagctggccacccaggcatatactatataccctgtataggcgtacagtacgaatgagcctcttgctagaatgttgaacagtgat

SEQ ID NO: 7558 - DNA, 777 bp, Emericella nidulans
gcagagaccggagtggtgagctataccgtccagacttctaacgcgacgagtggccccatccggatctcaattctcgatgaagaaggaaacgaggtcgcaacagcgtccggagccactgggacagctaccattccctctgtcaacctctggcagcctggcgctccctacctatactccttcactgtcagcatcctctccgcctcccaacggctgatcgacacatacacactgcccatcggtatccgcactgtggctgtcggcaacggcactatcctggtcaacaatgagccggtctacctgaccgggtttggcaaacacgaggatagtcccatccgcggcaaaggccacgacatcgcgtacctagtccacgacttccagctgctggactggatcggcgcgaactctttccgcaccagccactatccttacgcggaagaggtgatggaatttgcagaccgccagggaattcttgtcattgacgaaacgcccgccgtcggactggcgtacagcattggcgcgggcatctcaacggacacaagcagggtgaccttcgcgccggacgggatcaacaacaatactcgcgcagcccacgcccaggctctccgggaactcattgcacgggacaagaaccaccccagcgttatcatgtggtcgatcgcgaacgaacccgcgtctgatgagccaggtgcgcgagcatactttgagcccctcacgcggctcgcccgctccctcgatcccgcgcaccggcccataactttcgccaacctcggcctctta

SEQ ID NO: 7559 - DNA, 131 bp, Emericella nidulans
tcgcctcagatacaataaaggtatccagcctcaggttagagcagtcgtcaaggacagccgggctatggaacctagcacgaatgagcatgtagtagaccgggtctgaaactcgcttacatagcagacggaga

SEQ ID NO: 7560 - DNA, 714 bp, Emericella nidulans
ataaccctactaaagggatccggattcgattccgttaagcgagccgtcggcaaaagtggtctcatgggtggaatactaagcccattcggtgaattcgatctgcttgacgagctccgtgatcaatggactcatgagtcaaaagtgcgtaatgcccacgccgcccatccacacacgtaggcaacaactaacccaacatgaaataacaggacttagagcgaacctacctaattcgcaccctccaaggaatagcacaccagaaatctctccgaatgaccttcctctcaggtgcagtcaatgtctgcggcgctggcctcgtccacgacccagcgcacccctcagaccacaaaacaatgtaccagctcatatcctcttccgttgtaaacagccctccaccttcatatatcatcaaaatgctccactcgagcaacaagcccctctacgtcccagcaaacggccaccgctccaccccttcccagccctccgacacgaaagaggacatgatggagatctttcagaatgacgttactggccaggcgcgtgagcataaaaagctcatgggtagacggaattacgtggccatcgtcgcctatgacccggattctattggcggtagccagatgtctcttgcaatgtatgggcagcagggcggtggtctacacttaaaccgctggcaacgggaagttgaatctcgctattgattttatggtgcagggg

SEQ ID NO: 7561 - DNA, 666 bp, Emericella nidulans
agagggaatgctttggtttggtttcggccgcccatgggtccgaagcttgaatgcaaattcgtgatgattcccggcctcgggttagaagccaaattcttcttggaagagcatcgggttgagcgtaaaacgcagcggttaaatgcagaagacacgtctacaaagtcgcctggcgcggtacaccttgtccgaagagccgattaccttctgtccatcctcagagacaaggctagcaatggctccaatactacggcgaagcgagcggtggacaaccatcatcgcaacgcccgaaagagcacctcccggccccacgcaagcgcaagtgtctcggcatctcccgctccttcacttcagcgtaagggccaccgggaacaggatcggagccggcatcggtctcatactcacggagggcgggatagcatggagcggcacaacactccaaatcgcgattctcgtgctcgatctattaacgagaatgatcgccgctatagaccgtctgatgcctctagtgaagatgttcgccgacgcaaaaacagcgagaatggacactcggcgagcaaggaggatatgtcacgtcgcttcttcaaacctatccgtgatgatcttaaaaaggttgttgattttaccaaaataaccttcccaataaagcaaaaccagctttcgagcttc

SEQ ID NO: 7562 - DNA, 829 bp, Emericella nidulans
tggcgaataaccctcactaaagggatctgtgccggagctctgccgccacaaacccagataccgtgagagcgttggaattggccctacgcgaggtcttagataacatcaaagctgcaacgtacgcctacttcctgggattgtcatgtaatacaactaatttctgtttaggtctcgtatgcgaccgcgcatctctccatttgagttcgacatccaggttcaaacctttccctctctctgtctccaactcctgcctgcgccacctacactattcgcgccgaacccatttccctcgaattcctccttccctctcgaccctccaggaccagaccacctcaacatagtccgccaggccatccgcgcgaagattgaacaatggcagtcggaccagctcgccgcggagtccacgaccaaccttggaaaaaccagtctcggcatggatgcgaccacaattcagcgtaacgcgcaacaacacgaggaactgagcctgcgacaccttgaactcgcctacaagcactggctatcgctcccctacgactcgagaagagacgcttggcagcttgaaatcatgcgcgcattcgcccgcgagtccgagaaacgcaagtctcttgacgagcagctcgcccgcgtccagcaagaggctaaccaacttcgatcccaagtcgagaaacttgggacgtgtcaatggccgcgggaattcgcgctctttccgcccgaaacattgcccctgccgcgcgatgtcgcgcgtgaacttgatgccaaagagagccaaatcagtcccggctccgcacgctgggactacgaaaatgtcgtcgaaaagtagaagcgggtt

SEQ ID NO: 7563 - DNA, 105 bp, Emericella nidulans
ccactgaactggtcagtcggggattccgtacaatctggaagagcaaggtgcgtgcatcttgcatgtcgaaccgttgtgcattctaaatgagttcactacgtcggc

SEQ ID NO: 7564 - DNA, 544 bp, Emericella nidulans
ttggttctatctttttgctatattttagatgcatgccatcatggcgcgtcgcgcccgtcgcccaccgccttaaccttccctcctaaacaatgcctaatgtgaaccatctgctgttttctcttttcacttttcaaacttccactctgttttcttgttttttgggccctccgtgacatccggggttaccagagtggaagggccccggatcctgcttgaagcctcgggcaccactgccgcccagtaggtgatacaactctggacccgaatagacttcgccaggcgattctagactcagagcagggaatgttccatggaatatagttggaatcacgctgcctaccttaaagcgactcaatagcaaaacatttatttattaccacatggctactgcgcacgaccaggtgatgctagaaagatctataacactccatgaccaaacatccctggcctcgccactccgtacaatacacgtgcgtcagtcggactcgccagagacggtttgccaagagcaagcgctttgttcatgcacctgcaataataattg

SEQ ID NO: 7565 - DNA, 565 bp, Emericella nidulans
catcaagacgggcagaatgtctagatcgggatctgatcaataaaataggatagaagcaatggcagcatcaaggacttacctaggtgaggtgcggagaatatgggaagtagaggcgtggactcgatgggcgcggcctcgtcttccccgtcagcatcctcatcttcaacactctcctcttcagcatcttcaaagccagcgcggtgttcacgaattccattgtatccctcgttttcgttcagcaatggccatcgcgactcgtcggtagcgtatcgcgacgcgaactgtgagctttgcgcgtactctcgtcgctttttcggacgaagaagagaagcgagcatggtttagtctcccccgatggacaagcggcgaggctaagtcgagaattgtcaacgcatggtcaaggaatcggcggggttgaacgtcttgggtgaattcgacagagacctcgttaaggttcggggaaaataggacggtcgtcggatttgagccgggactgctgatgattgcctgttaaataacgcaccgcaggcggcgcagctggaatcaaaaagaagagggggcaaat

SEQ ID NO: 7566 - DNA, 125 bp, Emericella nidulans
  unsure (1)..(125): unsure at all n locations
tacaaccattttcaatactacactttcaaattacccacctccacatactcactttccntatctaaatcccantaccctcttttcaattntcganaaccctcccccatctttctcattccctctca

SEQ ID NO: 7567 - DNA, 1235 bp, Emericella nidulans
gcgaattaaccctactaaagggatcctggagatcgtctccatttttattctcagcccttccgcaggcacaaggcgtacaacacggtgggttcgcaactgttaggctggggatgcggggagttggcggaagaaggccgcgggcagatgacgaaaacctgcgcttctctcgcttcatttctccggagccttgcatcaccctaacctggcgtgaacttcgatttgcaacgataacaccgagaagacaaaaaaaaaatgctgaacgataatgtgacgataccacagaaacagactttttagtcagacatctttattcatggagcccgtccggcgtgtagtcgatgctcaatgggtcaccgatttcctgcaatacgtcctccatcacgaccgttttggcatactggccatctgcatgtcacgagaagcatttcttgagcaattgctagctactatcaatcttcactccgcggcgcctgctagccatgaattgatgagcaaaactctcggtttgctctccacgtcccgcaatgtcaggacagtattttgccctactttggagcatcttagagcttacctctctgccggtctcgatggacagctgctggctactgagcggggggggaagcaacggccgtttttggcgatcttaaaccctttggctctacatagattcaccagggagttttccgctcaaggattatcaaggacatttgccgccgcaggggaagtctcgtctaaggcaaatatggatctcttgctttgcgaatgccgggatgcccttgatccgaccaatatggaaactgacgatgggggcgtggcacaccggtggaagggttctgagcaactcactacgttttgggacagaagggattcctggccccacaaaacgggcccgtcaaaaaagtttgcaaccaggttttggtttccaataagccatggaacaggttttcatgactcttttaaaaagggggtggcaattcaaacccccaagaaaccgccagaacaccgggtcttaaccgccccttaatcccggaaaaaaaaaaaacttttcaacactttcctccggagttaccgatggcacctcccgggttcccgccgccttttttgtttgcctcttaaagcctttgccaatctctttgggccccacaccgttacccttaggcaatttctttctcatgggtttctcttaggagttaaaaacaccctctcctccctctgcaacattcacactgctttac

SEQ ID NO: 7568 - DNA, 1061 bp, Emericella nidulans
cattctcgccagcttgcaaggtagcgcctcagcacgacgattttcgtagttggaccgagattgaccaggcagatcccattctgagctctaggttcgtggttccggggaactgagcgtcagagaagcgcttgagcactggagcactgactgagcacgaaaggggtttgctgcgctgcttgtttactgagtcgctgcgggttgtaagtgaggtccctagaatgtaggacgagcagcggacaaactggcatctttggacacgagacgcccttgtctcttagacagcagaaggtgcagtactgcagttactgtttaccaaacccacccgagctgcgtggtacagactagcacggaagcagtaagacggtccaaaccagctctggggaatcggagaatttacgctgaagagagaaacatagcgcgtggtcgttactagggtcttcccgtcatacttcgggttggcatttcactccgctgttgaagatgataatgtgcccaagcttgttcgtcggccctgttcgactttgatgaactccaccatgcaaaccaaacaccagccggtttggcgccgagtgtcgcgacccaagatgagaacaataacgagggtggatgcatcattttcggatgaaatggcaatgatagagcactcctgacctattattattcatcaccgccatttcccaacaatgtcggtgcgactttctcaagctgaacttaagagggtcgagtagtaaaccgggctccgcaggtcatctccgccaccagggatagcgacgatgatccaggtttgttgggaagatggcggtggcggtcatatctcaccagtgttgtcattgtaatatgctagctattgatttttatctacatgtatcttatgttttttattgtctcattgattagttttcttcttagctgattatccagtttgatcttttttaatgtcaatttatattaaatttgctatgaattcgattagtcgttgattctttagtttttaacttaattttctttatatgttgtttctttatggtctattgtatatcttttattttttttggttatct

SEQ ID NO: 7569 - DNA, 790 bp, Emericella nidulans
acccatttgcgtaaagctcacgatggatgatactctgactgtgtaagtgcgccagtcctttgcacgtctagtcgatttgttagtcaattgttccaaacgcagcacaatacgggagcaactacctcagcacagattgtagcaatctgatcttcctgaataacacggttgttgtcgataacatcggtgagagctccaccttccataaactccatgaccacccagagttcattgctctgctcctggagaaacgagtccagaaagtttacaatgttagcatgttggctgtctttcatgacaatgatctcgttgacgatcagctccttgcgcggctgactacgtagatccatctgcttgatggcgacttggcagcgtggaccatattgccgatatagctctcgagcgactccagaagtggcattttctttgacccgagcaacatacacagatccagaagctccctgtccgatctttcgctgcttgctataagactcattggggttgtccttagacacgaccgacctcagtctatccataacttcattctcgctcattgccgacatgcggacttccttcttgtgcgggtcggccttcttggtcagagcagcttcggcctggcggacaccatttggggtagcctttttaggtgcctgcttgttcgcaatgttcagaggcttgactggctgcacaggagcaggaagcttgctaggaggagggccatgggcttgttgggtctttccattgttctgagtgcgagcggccgacgtttgggttcgagaatcttgggaagcat

SEQ ID NO: 7570 - DNA, 706 bp, Emericella nidulans
ttgacagggcctgtgcagccgtcgtgggctcacctcgccaggaacacagacaccctcaatacacccaacaatagccctgccggtctgctgccgtcagcatatcaccgtgatatccacagggattcccagtccgcatttctcggaggtagggcaaacatacattgatatgctgaaccaccccaatccccagctcgtactgcatcggcggcacgccaatcagaacaatcttcccgcgctgcctgagagatcgcagcccatcctcgatgagcacaggagcccccgttgtgtcgacgatatggtgtactccactaggaaacatctcaaggagtgtcttttgcaggttgaatccaggcggcgaagtatcgattgtgtgtgtagcgccgagctctttggcgagttccagacggccagggagcctgtcgacgccgacgatggcactgtgcggacggatcaatgccgtctgtccgacttattagcatcacttccaccagtcccatgtttctaaaaagagggaggggaagaacagtaccatgatcgacgcaaggcctacacttcccagtcccagaacgacaagcacgctgttctcgtcgggctttgccacattctcgatcgctcccatccccgtctgaaacccgcatccgagcggcgcaaagagggtcagttcgtcttcacacctaatgagatccactttagtaaggggttaatt

SEQ ID NO: 7571 - DNA, 99 bp, Emericella nidulans
tcgactggaaggttgcgactgaggcagtgtcaggatgaaggtgaactaggactccttgatatgagcatggaaagcaatcgtgggtatccacatcagagc

SEQ ID NO: 7572 - DNA, 244 bp, Emericella nidulans
cgaaaccctagaaatcgtccggctcgaagagcatcagctgcttcagtggagcttcccctctcacgtgcggacagttctacccggatctatcagagctacggatgacgaagctgtccagcgaaggggtcttcattaggccctgagcgagcgagccctggtctatcccaagccatgtcgtcgtgatcgcgtcgtccgcaaagcggaatgctggcctgagatgaactgaggtagccgcgctaccaga

SEQ ID NO: 7573 - DNA, 115 bp, Emericella nidulans
  unsure (1)..(115): unsure at all n locations
gcgtgcgcgagtgagtgcgcgcgcgagtgcgcgcgtgcgtgcgagcggtgcgacnagtgcgcgcggtgtgtggggcgtgaggtgcggtgagacgacgcgtgtgcgtggcgtgcgt

SEQ ID NO: 7574 - DNA, 560 bp, Emericella nidulans
atgcaaaagccaaagcagtcatgacatcaacgcgggctggaaagtaccttgtttgatgtatctgcagatagtctatagctaagcgttcttgtgaggcatgattgggtcgtctatcactactgttagaaggctggctgaaaacagaagagttgtgatgtcagtgataataataaagatacattttactataacccctgtcattcgttctttttaagcctagtatcaggtgaataacaagtaatcattggggagatgattggtactctacatggataatatgagaacgcaatcaatctctcttagaccagttcaaccatttccatctggacgtgcatgagctgactataactttgggtctgtattgggctgtaatgtgacagatttacgagtcctcagcttgcgaatgttgtgtaacctgtaaaaccacactttgcacaaggatgctacatccgccttcacgcttggagttgctggataagcctagctatgagttggtacatgcttgacaatccaggagattgttatgctgcggctgtttgacctgcaggaatagagaccga

SEQ ID NO: 7575 - DNA, 528 bp, Emericella nidulans
agaaatgtgggatggcatggcccactacgtgtcccgatgtcggagtcggaccgtggggacgcttcaaatggagagcgggatatcacgcaatctacgctacgacattgattgattagatgatcttatcaatcttggcgcgaacgtgttattcataaagaagccatcaaaagacagcaccgcgtccttcgtcatcggtgagctgaatcctacgcaacaggaacaaccgggtggtaaggacaggattatggagagcttaactagctaggaagaactcaccacctcgacccctctctcagcggaaagaaataagcaactatgctttgagaaaactctatgctcacgcaaggaatacgaggattccttcacagaggcgcatgatcggcagcattactagagccaagtgtagatcacagttcaagtggacaggctacgttttgttcgctccactctgtcggttttcggaattgatacttgccgagcacattggagtttaagacattcttcatcttataatgatgatcctgcagc

SEQ ID NO: 7576 - DNA, 1427 bp, Emericella nidulans
actcggccacagaaaagggtatggttcgttatcgattctcgcatgggatgcccttcattcctgatctcaacgggggtgtctgcctacctcaagtatattgcaagtccagaccagaccaggcacagtattcttcatggatgatattgatttccatccatctaagaaaggcctattccagttacttgtttaccttgactagcctaatgaacttgtctctgcctgggagattgtttatgctatggggggctattcaaagggcgagatccgcatcgatgacgctacctaccttacccagagcacagaccagtctcgaatctttcgatgatcacggtagcgcaaactccgtatatcagctcgcaagtacggaagattttgcgaagtctccattgtgcgataggagacctgagccacagcactatgatatgtactatctcggaagggtgctgggagggcgcaagtatgtgattgtccgtcccgatcggttcatatttgctgcgtgcagtaaccgggaggagctccagacggcaatatagaggctgtcgaatacttgcaattatgattaacctcacttctgcggtttgtgctatacaaggtcattctgtcgcactgttgctttgttagatccgtcacggaagtggcggagagcggagttattagggttagataggcttgatgccgctaccggtacaaagtataaagctacataaacgtgggtcaggctattgttccgtatcaggcctgtacaacgatcgttatctagacaacggaaggtataatgtttacggaagggacgaatcgacgttctctaattgaagatgacttaaattactgtagcttgtcacgtgtatattcgttccgatgccgggattggaaatcttggatcgtctcatcgctgattactgttattttgccttcccccgtagctttaaaaaattggacccttcgccaccccctttaccaagtcatatattctttacataatctctacatccagttaataccccgggtaggtctttttttccaatttattttggcaacttatttttaattaaggcccttcatcacaaggcttaattgaccctttagacatagaattggattcccccccttgtggcctttaatttattatttcccggggccacccctggggttcattggcccattctctttcgtgacgattaaccatttaatttcccgggccgtttttaaactctcgtctctcaaatcctccaataggaggttgttcttcgttccgggagtttttggttatctaactttcagcccaaaacaaggttcgaatcctccgcgcatcttttctttcttatctcgttgtttcctcggacctcttctctctatgggctcccctcgccccatttcgtctgcgttggccttttctaatgattaatacatattttcttttcttttcc

SEQ ID NO: 7577 - DNA, 531 bp, Emericella nidulans
gctaaccgagtaaagaagacgactttcccgagtgcgatccttcagcaggcttcgacaaagtagaagcggagaaggcagcggcggcgcaacaggcagaaaaagatgctgaactggaggcagaagaggcgtctcgacaagcagacgagctgattaacttcgatgaagcccccgcgtctcccgttgtggaagaagccaaagcgcctgcagctcccgaagcagaagctgttgaccttgcgcctgcgcctgagccagctgaggctccggcggaggaagcggcagccgtcactgttgataagacagcggaagatgaccccaaggccgccgaaccagaaactccagctgaggcgcaacctgaggccattgaagaagcacccgcacctacggttgaggaagctgcagcggcggaggaaccgtcaatggagcctacaaaggagcctgaaccgagcgaggctgctcccgtagaacaggccacagaagaaactccaactgacgaggttaaggagccggagcattgcagtcgctcctaatgag

SEQ ID NO: 7578 - DNA, 599 bp, Emericella nidulans
  unsure (1)..(599): unsure at all n locations
cagctcaggaccacggcgaagaggccacacccgtaggacacacgccaagaacaggnattggcagggcacaaggcgcagagaacggggaaccgaggggcgggcgtcagcggaccagcaagcacccagggcccacagcccaggggaccgaagacaaccaacagaccagccaaccacgacagcggagagcccggcccgaggcaacagaaaaaagccacgggaggagaaaagcccagcagggcctgacgaacaacaaacgggccgcggtcaaccgagagacaacagacagcaaagacaggcgcaaaggcgcagggcgaccagacaggacagagaaccgagcacaccaaaaccacggaccgggggccgccaaagagaaaggacaagccaagggcggaggaaaaatagggcggcggaaagagccaacccaaagcgcgggaacacaaaccagacacgaccagcaaaagcagaaccacggacgagagcggaacgccagccaaccgccaaacacacgcaccccagacagaggaacagacggacaccgaacaaagaccagaccgaacgcccaaggaagcaggcgagacagaccaagccccgcgggcacg

SEQ ID NO: 7579 - DNA, 1008 bp, Emericella nidulans
  unsure (1)..(1008): unsure at all n locations
gatttcgcgatgtcattatcacagttatttccctagtcaaagtttagcctctacccttcgagccaacccgagatcctgcagtgaccctgtattggtgggcgtgatccgcgagtgccgcgcttaacttcaatgacccatgaaatggcggggagccgttaaggggaacgctagttacgcgtctgataggaggcataacagggtacaaggaattaacgtgatcaagatactatgcggatgcagagatagggagacgggcgagagtgaggacaactggcccagtgatcgcgagcggcaccaatgagatagagtaagggccgaagaagtgttggttgtggacgtcgcagctgctctagcccgacctgctttgatccatgctgaaatgctttaatggtgcctgctggctcgactgatacagctctgctggagtcgatcaaccacactgtcgggtcagatagttgttggtgctcatgagctagaggcttttttcatgcaacatgcagcaagttcggtctcccaccgacattctgttgcgaactcgtagacgcctaactatcaggtaggccactagggaagggtccgtgtccacattcgaatgcaacttatgtcataggaagaacgttttgaatatacaggctctcgcgccagttagaaacgattagcagacgagcaagaaccgtgtaacgattctctaacggacgcactctgcaagtcaacagaccttgagcattgactgcaggtcggatgagatatgctttcggttgcctaagccggcttcactgctgagaatcatttctggccagcgccntatgttgagtgatagccccaaggaccgagttacctcctgacttgacagccatctgttaccgcttccttgtagtttcgacctcaaaaacaagatttcggagagatttagaacgccttggcatcccaatcgtaccactttgaagcaagtcagggccaggatagccctggctgttgtgccatcctgcgaccagtcaaggagtcaga

SEQ ID NO: 7580 - DNA, 779 bp, Emericella nidulans
atcctcgattgtagaattattccgaacaatcacggcctcgctgaagtcaggctcgacaccttttctgtggtgatactaggtttcggtttctgaaaacgcagttatagttgacgtaccgtttagtgtatatccgcatcaggcggagttccttccagatgcgctctacgacgtcttgtacagcgagatcgagctcgcagctcatgaccgctgtgtgtggctcgcgagcaagttggtcgagaaattcgatgctgacgctgtctattttgttgtagacgtagagactgggctaatcagctttcttctgccagaattaacaagctcgggattgtggaattaccaagggatgtatttcctgtggtccttcatgatcacgtcgatgaaatcgtcgattgtagctggtatagatgttaaaatatgatgatgatcaagacggaaaactagaaacgggagaagtaggcgcaccattttcgtcacggacaaggacctcgcagttaagcattttatagtctcggaggacgttgtagatcatcttttcgtcgaggtatttgggtggtgtctggaaggtgattttcatgccacctgctttctttgctttcaggtagatgttcctgggctgacgttagtgaaaagctatgccagattgcgaagggctactgtttggtattctcacggtggttccttgttaagccggatgccaacagcatccaattcagcctcgaggagggcgcgctgttcagcctttttggtggcgtcgagaaccatcaatatcagatcacttg

SEQ ID NO: 7581 - DNA, 295 bp, Emericella nidulans
tcttcttctgtacatagcagctgctgaattagtatttcattactttagactcccttcgaagccgttcgtggtacccactttaggacgtgttttcgtgccgtagtagggccactgtagacaaacgcatggaggattctcatgcgggtatcattaatttgagagccagaaagctcattcgtttatccgtatatggtgcagtgttaactcgtggataggttgagcttttagggctgaacattcttggctaagtatgcagaaattcagtaacttacagccagagagaagggatcaacat

SEQ ID NO: 7582 - DNA, 2151 bp, Emericella nidulans
tatggccgaataaccctactaaagggatcttgcgttttagtgcgattttgcggcgcccatcaccctcttcatcaaggctattgagccccctcagtaacttgattctccgtcctatcttggctgcggataggtggcttgttgtcccagatataatagtggtttcacatggtaacttaatagttggtgcaaggttttcaattctctcaaggatctttttggcgacgggttccatgacctagagccaaattgcctagcggtctatgtacggatttgcaacgattttgccaagagcggggagtgaggcctgctatatcggctacatccgtatttcaagtagaatatctatgcccattaacttgtcagctcaactgtttgcagaaccttatgtttatcaactttacctcacggctggctacaggttcaaatgaaattctcaatcacctcgcagggactatggagttcgacacgctacgaccatggtcgtcgatggtaaggagacggatcataccattgaatagttagcgagcaaaatatagtttcatggcttgggcaaccatactacgaaggaaatacagacctcgggaagatcagccgcaaccgtcaaagatggtctggatcacatccgttcccgggctgagcataaataatcgggccgagcgtccgtgtaaattggttcttatgtgtcttgcctcttcgggacaaactttattgggaatttaaagtacacagcctcgcaataatgtacaggaaaaaactcatctgcctccaaggccaccttcctcgtcagctccggtggcccttgccgcggcggctctgagtaggggcgtcctttcatccgcgactgggcgatgtccctctaatcggttgcatctctttaactggggcccatcctgataagagtcagggtgattcatgtctatgacgttctgcattctctcgtaccgggcgcgggctttctcgatgcaagcattaacgtctcgaactgcacgagcgcgatcgccatatttcagcttaatctccgctcctgcaatatacgtctgaacttttctaatctcaaccaaatccttccggtgacgttgtggcaatccacgaccctccatgaaggcaaggagaccagcgatgacggtagtcacggcccctaggatggtgattaccacccagtacttgccggctaatggatccagggcggtgattgttgccctgtcccttagcttgatcatggcgagcaatacgccttacgcttgtcaacagacggcgtctgctaaacttttatctctcttctgggtctatagccatttacgttataatccccgctttctctcatttctatcttgctctttgtcacgatgtactcgggctactctgcgtatatatatacctagacatgtttgtcctaaattgctgtgcgttatctctaactacatggctttgtacttctatggggacgtttcccatcctgcataacgtatccaaatacctcgtaatcctcgcatcctcttcttatctatcttccatatgtttcctactgagtgcatactaactccgttattcttacatcccaccgttctagttactagcacacatctctattccttccctatcccctgtgatgagatcattgcatcgctacgtcgatgtactactagttactcgtgtgtcttgtaatttctgtatcagataccttctttacctattcgctagtctctgtacatcgacttgtactctttacttatcgttgcatgctcatatgtttcctccctgactactcatgctctggcgtgcaccgatttggtctccctatgtgcatcttattgtatttagtcttctctgaccgctccttctagctggtgcatcagtatctagctcctcagtctgttaatacattccgtctagtataatatctccaactttatttctgctctcatatttcgttcctctctttgtactactgtcccattaacaccttacatgtcttgtgatccatctatcccttcgtcataacgtactccctcacgtttctctatatattacattcatttagatctttaacatgccttccaatataagaatttcgatcttatcatctcccctttactctactatgcacctgatctttcatgcaagtctcagtatccttactctatcctcact

SEQ ID NO: 7583 - DNA, 120 bp, Emericella nidulans
gcgcgcgccgtgcgttgtaggctcttcagtgctttacctcggtcgtccggcctttctgggctagtctcgatgcgctgattgctaagatgtcaagttccggtcccatcgcctgtgaccctg

SEQ ID NO: 7584 - DNA, 1051 bp, Emericella nidulans
ttaaccaaacttgggaagagaaattgatcaagaccgaacagatccacaaagagcgtgaagcggctctggaagagcttggtatcagtattgagaagggatttatcggtttgagtacaccgaaaaagatgccgcatttagtcaatttgagcgatgacccgttgctagcagaatgtctagtatataacctaaaaccgggagtcactcacgtcggaaatatggatcaaggaaatcacgtcgagatcagattgaacggctccaagatcttagctgatcactgcaagttcgaaaatgtggataacgtcgttacaatcctgcccagcgagggggctgcagtcatggtcaatggagtgcgcgtcgacaagcccaagcggttaaagagtggttatcgcatcatcttgggtgactttcatatctttcgattcaatcacccccaggaagcaagggctgaacgagtagaacaaagcttactccgccattccgttacgactagccagcttgcctcccctgcgccgggcaaagctcacgagagaaacgttagcaaggcttcagatttggactgggattcaagcagagctgattctccaatgggtttccaacgtgggagagagtcggactggttttatgcgcgtcgtgaagctgtgagcgcggggatggatccggataggcttgcttatatgcctgatgatgagctcgatgctctgttcgagaatgtacagaacgttagggcaacccgcgtgggtattggagatgaaaagactcggattcttaagtcatatccattccgataaatatttccaggggctattgcacttttctggcacgggatacaatgcagggaactttcccggaaaaggaccaccttaacgggctcagattcccacccttaagccaaaaagcttttgtaataggaatgagctccataagttccaattggtaaagccctgggtttttttcaaaaaacaaagcttaagaaagattgacttaagtttcccgccaattaaagtcatcccggaagcccgttcctgtaaaaatcccaaaggatttttttaag

SEQ ID NO: 7585 - DNA, 913 bp, Emericella nidulans
cgcgatctgctaatgaaatgcacagtgcaacagggttgggaatgggtccataatgcacattagtttgctggcgacgtcgaggtctttgactttgcatttcatactaaagtgttttagggcaggcattctctctgtggagttgtgacagaactccgtccatatcttcaatattgtgcggtgatatgatccatttaacttgagattccggcttgctaggtagccaagattaaggtgcagatatctgatgtatcgcagaccccatctagtggccaatttaaagagattgtactcttgcctgccgcagaggttgatgctaaagcgattctgggcgaaaaacagagccccaatctcctcccgaaccgcacgcgaagccaagaatactccgacaggcaagggagggtggccgcagtcccggttatatggagacagccatttttctggccaaaatgttcgtggcatacgtaaactattgctgctgttgcacaaatgggaaccattgtattctttggatcgatatttttcagtgccgaattggatgagacaaggccgcaaaagtccaacatactccagtatccttatcttaacgttttccggtaagtcgagaaaggtaagcccactctgagtaaccttcataggcagatctccgagttccacgagtatttctctctgtgcataatcggtgttcgatcgagtttctttggcgcctatcctcatcatataaagggcactgtgttcatcctcaaaccactcgaaatccatcaggtcctatagtgaacaagacatagcacgggtgagtaatgggcgcccttgtttgtaaagacattgatgggcgcaagccctgggaacgtacgggtgttgacagtggagtcaaggtctagacggcggaaggcaatgttcgatgggagagtaaaga

SEQ ID NO: 7586 - DNA, 1006 bp, Emericella nidulans
gtgtgcgctgttcgaggtcgagtgtagcggtgcagttccaatggcgcatcaactcgccctattttgtgtttatatcgttgtcagtgagggactgaccgaaaaggtccgatgtatattcgacaacatgctttcgggcaatcgtctcaaaagtcctatggatctcccggagatccacggcctggcagagcgcgtatatatggctagccgccatgagcgagaacacctccactgcatccgcagcataccgtgccccaatcaaggccagcgagttgacaacctggttattcacgtccgctgattgcacaaagttgctgactggattattgaggtacccaagctcagacatgtaagacgccatgttgatatcgacgcctttcaaggcgaacgacaacgaggggtcatcggcacacaagttcgggggaaggcccttgctgagcatgggattgatgagctcagagcactgcccgaagaccagtttacctagggtctgcatggcactcgtggtcttttccatggcactcgtgatggacattgcttgaaagttgccgccgtggtggatggttgtcgttggcgacgtcaaagagcggattgtccgtcgtggaattgagctcgatggccacttgggcttgcgccaggccatgttctcgacatgcgggcctatccattgtgaggccgtgccgagggggtaacgatctgggcgaggttcttgtcgaaggtgaatgtcatgaacggtcgttattgggaatcggataggaaacgaaatattgggggtcttcttttggctggatgggcctcctaacgataagggtaaagtgccatgtccagcaacttaatgcatgatcggacctgtgagggtagcttttttaaaagacagttttgccatgtgaagcctcctagagccagctctggtaggaagttaatagtcttggcggcaacaattgactgcttacggaaaaaggcccagcctatactggtggccaaaatcccggcaaggttttttattagg

SEQ ID NO: 7587 - DNA, 1032 bp, Emericella nidulans
tccttgtccattgtcttaaacggcgggaggggttgcccatgcaaggcagcttcccacgacttgttgttagtctgtatcgtgaataaatcgcctatgatatggctgacagagaaggtgatcagggtagcatcactaaaccgggttacctggactgtaatttgtggccggtccgtctcgagaagctcctgcatgttttgcacgccgttgaacgccgtgcagcgcttttcgtcctctggatctgccgcatcagcgacaaagacgttgtatgagtgactgggggcgcttggtcccaccccaaatccgccgcagtagtcagtgatggatcggtaagactcgtctaagcagaaaaagtctttgagatgatcaggagctgactgttggcgctcaagatacttggccatccccttgggcgtgaagacatgatactccaggccggacggtgcagtcctagagcggcggacgcgcgcctgcaggataggcctggcctgaagggcacggtaccatgattcttgcagtttgtcgaacgagagtggtgcgtcagcgacaagactggtgcgagcctaataaatcagtaaccatcttacccaaaaatgaacctggcagtctacgcacaataatgtcggtactggtgagagcaagattagtacttttttagcatcttataaaaggccacaaacttactttccaaccgtagagaccaaaaacgtgagggggacaggggcatattcgttggccttcatcttgaagcccgtactatttctgccttattcggtatggatgggttatgcagggactgctacctcatggagataggtatgtaaacgacgcaaggtgccctgcagcaatgggggtttgaagcaattgaagcgtactggagcagggggtaaaggcgacccgggtacgacacgggggggtgtgcggatcgaatcaaccttagtggcgatacatagttgaaggacattaccgaacattagactacatggcttgggattatttaggaccaattactcgccggctaaaggtaaaaccttc

SEQ ID NO: 7588 - DNA, 223 bp, Emericella nidulans
  unsure (1)..(223): unsure at all n locations
gagagcacacttgagttcccaactgtcctactcaaaccgatggatgcacagtcggttttcctcaaggggatacccatagccacatctgtcgaagaacatatngagtgtgttttcacgcttccgtgagaanacanggaggcgtactctgagnagaaagtggattgcttaatggaatcgaatgcgagtgggctaaacgcgacaggcccgacgctgccgcatccat

SEQ ID NO: 7589 - DNA, 102 bp, Emericella nidulans
actcataagatatagatttatggatcgaatctaacttcgctacgagaccgttcaacacgttcgtgaccagttcaatttgacactccctctaaaaccgctgtt

SEQ ID NO: 7590 - DNA, 1271 bp, Emericella nidulans
  unsure (1)..(1271): unsure at all n locations
actccgcagcccatggccgtacagtatcatcattgaaattttactgtctcccttacgccatgcggggaagccctgaggtcgttttgacctatctgcatccaaaaatatctgaaaatcaaccggcggcccgcctagacggattataccaaccggcctttcctcccctcttttatattatatttaacttattacgctcattgcaggcttcttcttgggacatctaggttgcagtcgagtcttttcgatggggcatcagttcgaatggctccaacatgtatatggtaattttccaagttgaagcaatagtgccaggtcagatactgctggacgccggaccatcgctgctattttatccattgatccccgtattctattagtaccttctcccagcacctttccagacagtctaacagaagcaaagtctcaactcgcaccgtacgtattctgcacagaattctggtcagctgtctccgttcctttgaatcgtatctcgtcctgggattccactggcttctcctaggcaaatcgacagctacgtcttcgctcatcaactagacaaataattagggagcgtgttattctctgcatggtaaggtgctttgtcacgcttatgtacgtttattttgtcttctggagccagcttcgaccgtgctgggaaaatcggccacttgtttgagcagctgctgtgaaggcttatagtctatagaccaggtatacgtactgctgcggttattgtgtcaaagatattgtgtgagttggggtttgattcccttggatggttgatgccatttctttagcgggtctctactgcagagggataaaggaagctgccctaaccctagtaaaccctacccaccaccttcacttttatgagaccaccttataaagtggaatactcaggtgtaccatctatcgagctcaccatatcatatttaatctactccaagatagcaatagtcgcatctgctcggtcgagagcctatctgcaccctcaagaattccttttcgaggccacatcaacttcccttatcgcagcgcattgttaggcgtccagcgtgcggagattgtgtgttggaattcctgccataatttagggcccaatgaagcgattttaaatctggtcttcgtgagtagggcgcctaagagtgattcgctaactgtcattcgctgaacgttggggaggcgagtatcccgggcggngaaggtcataccaatctttcagtnggatgtagacataaagctnggagagaaaaagctggaaaggcaaagat

SEQ ID NO: 7591 - DNA, 527 bp, Emericella nidulans
tcctttccaagtcagatgaactctttgttgacggaaaattccggttgtttgagttctggaatgcaaaaggcacgcccttcggcgacgccaaccaggatagtttgacacggcggggagtcgattgggaaagtgatctccactgtgcggcagaccagccccaaggtttatcgctcatatttgactctcacttttgattttgattttttttttttataatatatttttacttatttgcctttgctggaagtcaacatgaaaggctgaattatggagctcgctgcttccgacagcggtccttttccatggttgggacggtctggagccgtgtcgcattggactttggagagaagaggatcggggctgagcctaagcctcctgtctcactcaggcaggccgctgcaacccttccgcaaaggggttccaatccattcccagaggcagcctggggctgtgaaattagattcggatatacttgtggttggtcaattgggcacaacgacgtcaagaagacgagccgagtacgagtt

SEQ ID NO: 7592 - DNA, 617 bp, Emericella nidulans
tccgcgccttactttcggttggtaatttgctaccgggatcgtgaggccaacatctggcgagcgtctcgtgggccaacctcagtgcatgaggtgcgcgatggacagagacatcgcttagttggaaaggttctgattcaggtatggatctcttgatacagcgcacaagactcaagtacgcattctgatcgtattttcaccctcagggcgaagaaaacatcacctctgcagccctctctaccgacgggaaggttctcatcatagccacaatttccagcatcaagatcttctccgtgagacgccgcaaaggcgacgaacgaggcgccttgcgcgcccaaaagatcgataccccagcctcgatctctgaagacggcgcccgcttcgtaaccatttccccagatagccggtggctctgcattgtccgccccaacagcgatatctccctcgccaagatacagcctgcttcttccgcagcagagaagactaaaatcctgccgaagcttgtcaaccttcaccgagcacccgccacactcggttcgagaatatctcgcatggcaccctaggcaactacgagcggacaatccggtgcgtcgtcttttcgaacaacagcaagatacttg

SEQ ID NO: 7593 - DNA, 1026 bp, Emericella nidulans
tacgggtagcttactttcatatcttccatgcacatacatcaatatctcttgcttcgttatgaaacgctccttttcaggtcactatgttgggagagttgcaatcgtgacccacctgaagctcccgcagaatctgcttcctgacgttttcttttgcgtcgaccctaataatctagcagcgttgtcaacagagcccaggacccatgctatataggtaaatcctaccttccgagccatgacgaccttggtcgaagcatgcatgactttagagaccgtccctccatttccggcaccgagttctttcagggtaatcaggtcctcgctgcgcaaatccaacctgaactccaaaccaatctccagggtatcagtgcggttgctttcgccgttgccagcggcgccgggaacctgagaatcgccattagacaaagtcgacgtagacttcggagctgcgttcagggcaagacccttgacgtttttacgcttcaaggttcgcgctttgaattgatcggccatggcgacggcgactgaagattgcctgcggaacgggtggtcgggacgataacgaaatcgagagagcaggatatcgacaggaatagaaaacctgtcaatgagccgtacgattagggcaggtcaacagttcgtgacaagagcttgagccagccaggtggattgctcgttgggcgccactgcagacaagcgccgcaagttcaagccaacaaggtggggggttcccctggacccagatgcgacagtcggcgtcagataatctcttcactttgttctgaagcccgccaagtggagattgacaagactcaagaaagctccaggtgagaaatcgacgaaacgctatcggcgaccggggaaaggagggatatccgggtcggtggatggacggtggacggaacttaggacttcctagtgtgttggtggagttgggcggagatagagggaagtggaaaacacaggcgccaatatcagcggctggagggcttggcttgaatagttattcactgatcataagtccagagc

SEQ ID NO: 7594 - DNA, 989 bp, Emericella nidulans
gcgtgtttgtattttcgcttgttgttttcgaaattcatataggacttggtgtgatagggcgggtctttcgttcttgatacccaggatagtgagactacccaaggattcactatttcttcttcttcggacacctttcactggcttggtgtatctactcccatgtagcagcaggcggctcatgcatcgtcatcaaccacttcctctccgtagttctcttcctccttggcttcattctctgacaattggcggccctgggcttcagctgttttcttgtccacctccatacgttcggtcaaaaacaaattgatgtcattctgtagcgcgggaaccagttttcgaagctccgagagataggtgactttgacttttatgttttcctctgaggggcttggtgcgggtgagttgatggtgtgctcgaacgtgcggttcagctgaggcgaggtgtattgggcctggagccgatacgactgagatgaggatgtcgacgccattctgaatatctgctagcctgttgttcttgaagctgctattcaggaggggaaaagaggaaagagggagaaattgatggcggggcgagctagcagcgggagtcagtccagtgttgcggagcagacaaacgatcgacaggaatacctaacgatccgctggccggctggtcttctaggctactgtgttaatctctctggaatagattcgaatcatcagatccaaatcagtcaacatgacaatgtctgcatagtgaagaatgaactccttgctgtcttgattacatactcagccccgaacctccaccggcactgcccgctgctggaaatcgtgcgctcccccgtcaccgtctctccagagcgctcagcctctcgaccaccgctccctcgttcctcttctgacttcgatgacgacccagaccgtccaggctcctccggaagtgatgcctcgtcggtgatctcaaatgcgactgcattccaaaccacccctcatcgccgcgaccg

SEQ ID NO: 7595 - DNA, 759 bp, Emericella nidulans
acctgctgatgggtccaatgaagacgctatatgcaatgaagcagcagcttgtttgccttttaacaggaaatcatggtggagagctttctgtggaacaacgacttgccaagtgtggaaatcagagggagagttagagaaactctgatatgtttcagtagaaaacttgtgcattaattctagcctgcgtaactctgccgcacgtagatcatcccctggcgatgcacttgtgacttgttggtagggctgggacacatacggagtcgcactataactgtatccaggggctgttggactggcggatgtactggataggctacgagacaccggtgttcgcgagtagaagcactccagctctcttgatttgcaattggagcacggtgggccttgctcatcacactacaagcgtcagatggcacacatgatatacggcaactctctgaacttaccttaacacgtcgtttcttacactggtcgcaaccattgcgtgactttgtatgagatctccggggcggcatcactggcgatctatgagccgcatgaaaatcacatcccggtgttacccaaatgcctgatttgccgagcaatgcccaatgaccagcggccagtaaactggtatttggagcacaggttgtcggctaagggaggcaagatcacgatttgcatatgacggctggaatgagacgcttgacgctggagctgacggtgaccgggtaagcccacgtgggtccatgtgttgaatatctcgcttactaatcacca

SEQ ID NO: 7596 - DNA, 550 bp, Emericella nidulans
gataattcctgttttcgcttctctcctacctataatccatcagatccattacctggattgtcgccgattcaaccgctactgtcacttctcaagtccaacatcgcctgtttctctcacaatgcacaaaccatccctagctcaaatcgtacatcgagctacctttccgcgccacgcaccagcgacccagcaacatttgccgcgcatatcgctctcaacctggttccagaggttcgcatcgaaacatcaaccttctacggatcgctagacagcgtggaagcccaatatcccggactggattattcatacggcccccatcgcatgaggttaagccgatttccttggcatcgcaagctattcagggtatttgatgagcttgggttgaccgaagctgaaatcagttccctatgtcgttgggaagggactaaatcggcccgccagcggtacgagaaagaggaaggtgtgaaggtcagcgataccaccgccgatgcgatccgacctgcgtcaccttgcccgcgtccttctgtcacagtacatgtcgaagacggccccg

SEQ ID NO: 7597 - DNA, 826 bp, Emericella nidulans
tccagtccctctacattcgtcaacctttctccgaaacaatcagatccagccttgctgtgctccgtatccatccgagttgaagcaccgtaggagctagagcttgactgctgcgctggttcctttcgagacgagaaggcatgactcgcataagccagcgttgatgatccggagcaggatgctcagcgtctgtagaacgagatgaacagcggccaggcattgagagccaaccatttcaactttctgcattgtttcctgtacaccgtcatgtaataaggttcggccttgacagcacaaaagcaacaggttgcagaagctacgtatctcaaagcgcagacaatgcatccgcacgaagtcaaggcagcaaacccggctctgaattcctgcctaccaggctacgggattggagccgtatcaggaagacgtacaagggtcgaaactcgggaactggtcagagcagggaaattcgcagcattggagattgatctggcacgctccaacgtcgaatatcactccgtgttgaggaagcgtaacagagctcaattgcagagggccgccacgtcagtaagaccctggtcgatatcccgccatcgcggctcgccatatttggctaattatgccgttgttgaagtagaaagcctgatagggcaatggtaatatcatattgcagggatatcaatcccccgaggtccatcctgcactcaaccatggattgcaatggcctcgaaggggggattatagtgcgttattaactgaaacgagtcatgcaaaatataacaacgttcgtaaagcagtatgagtggtgaattcgttcttagagtaccggata

SEQ ID NO: 7598 - DNA, 470 bp, Emericella nidulans
tatattccagtgacaagcctaccagattatgtgcagatgttctccagtcaatcgactgtagatacagtgccattgagcaaagaacctcggcggccgcacagggatccttccagagaaaacaatagtccggcagcatcatgaatgcccgcgtaaagtactctgcaccgggtggagtcgtcccgcagctcttctctccaataaacgcctttcccagggccatgatggccaaaaagtgtataaaccatacgttttccgtgtagaggttacgatcaggagcctcataaaactggtggagttgagacataaagcggtcctcatcgaagaggtgaaacatctggcctgtacgaaatttggtcgcattgatcaagaatagagcatgatccagtgacggaagccacggatattggctacgatcgcgctccgtagaccattcccttggagactgtcggtcattgtctggccgtggtgcg

SEQ ID NO: 7599 - DNA, 924 bp, Emericella nidulans
tacaaattaagttatatcatccagcgtaacgcgcaacgacagcagcgagatatacacttcggtgttcagagttgaatcaattgtctacacatcaatctccttttgtagtttccttaggtcaaagtcgtgcttgtccttgctctctttgagcatcgagcggacatcagggtagactttgtctgagaagagaccaaccaccggttgtgtctcatcatctggctcaacatcttcccacccctcttcatcggtggcatcagagtcctcagaggcaagggaatcgcgatcaatgtccttcaaagggcgttctgcagcggagggagcggacatggcgactactgcgggggaaaaaacccagtctgaggaaccgcgacgcttaattagtccagcaatagattccgtcgttcagcgcgacggtctaagtatctcaaaggcgaactgataccgcggatgacgcctcgaggttttgatgtaaaacgagcagcagatttgttggccttcagcaggggaagaaatttgccagaaaaatgatggttgccccgcctccggctgggcgggttgagttttgtttgatttgtttacaccactacggtccggttactgataaggaacccggagatcgggcccagcggcttccccgccaacaagcgccggcttccaagcaacaaagcatcaagccattcgagatacatctcacctccaatatacctacctccctgaagaccttatggctccgcgttatatcccttagatgtcctgattcttgattattgcctttcacacccttcacgccaatttctttccctttctttcagctgtgctattgataagataaacaagaatggccttcttcttcaatcggggtcgatcccgccaaccatccgacgttgtgagatcaatcaaggacctgctgctgagactccgtga

SEQ ID NO: 7600 - DNA, 797 bp, Emericella nidulans
gattcatgtcaagcacggacggattggacaattgatatcctgccgccccggattgggggacgaaatttatgtaatagtcagcagagctcgttagtgtccttggtcggtgtgcatacgattatccatcagaaatctggtagctttgtctcctccccaccagccggaaagccgagggcgaaataattccagttccccgtcgccttgacctgccttcacctctccatgtttttcatgcacgaatatcccggccattccgcctgggccactattgaggtacttatagttgcaccacgcagcgaagtccacgttccaatcgtgtaatttcaagtcgacatttcccgctgcatgggcacagtcccaaccgaccacgatgcctttagactgggcgtgtgcagtgatcttctcgatgttaaagtactggcctgtgtagtactggatagcagagagaagaagtaaagccgtagttgaagcatgctcgtcaatgactcgaagaatacggtcagtttcgagaatcggatgttcaggatcctgcggttcaatgagaaccatggcatctttgggctggagattatggtgcttgatctgagattcgaccgcgtactgaggagagtcaattagtccatgttcgactgcacagtcaagagacatacatggtcactgggaaaagctttcccttcgatgatgatcttatatctctcagtagttggtcggtagaactagccatgagcaaatgcaagtttgttgttagactgcccatacagctactcgctctccaacgcccaacaactggtgccatg

SEQ ID NO: 7601 - DNA, 902 bp, Emericella nidulans
ctcaacaggggcgagcgggaacacggatttgccgtcgaggtctttgaaggcgagcccaatgagcagtgtgcatgcttgcgcaatattctctgaaagtagatgcagcacgaacttttggatgttgtcgaagatgcggcggccttcttcgacagcgttcagaatcgatgcgaagttgtcgtcagtgaggataatgtctgaggcgtctttggcgacgtccgacccggcttggcccatggcgatgccgacatcagcgtgtttgagagagggtgagtcattgacaccgtcaccggtcattgctgcgaacctaccgcgccggtgaagggcgttgatcatgcgtacttttgtttgaggggcacatcgagcaatcacaagtgggagggttgggaggtcatcgatttcttcatcggagagtctatcgaactgagcggccgtcatgaccatggcctcggccacatctgttccgaggactgacatatctgccgggaggatgcccacctgctgggcaattgctttagccgtccctggatggtcgcccgtcaccatgtgcaccgtgatcccagccttatagcaggcagtgatggaccccgcagtttcaggacgcggcgggtcatacaagccgatgaggccgaggaagcagaggttcttctcaatatcatcgcggttgagatcagatccttcaagggttcggccttgctcgttgtaaggccgatgagccagtgccaacacgcgtaagcccaatttggcaagttcctccatgttctggagaatctgactgcgcatctcgtcgtttagagccacaggagccgatgagttgtcccaaacagccgtcgtgcaggcgtcgacgatccgctccacggcacctttggtaaataccatgctgtgctccccgtctggagtctctt

SEQ ID NO: 7602 - DNA, 901 bp, Emericella nidulans
tccgctgtgaatcaccgtcccaagcaagatcgtttattcggccattcacaatgctgtattcgcccttcgtgatgccttcgccaacgcaatcccacactctaacaacaccgctagcatctccgctagcaacatagaatcctgatggtgcgaagcgggcgactgttgtctgcaccttatgctcggtgtactgacgagcgacagcggggtcatctatggagcggaggaagatggatttatttgactgttcgtaaagacatctctcgggtcagacaggtgtttaagcatggcctaagagagctcggcaggggtgctataatataccgcgtaagcgagacgttcgcctttagcatcggaagaaagctgggtgggttgacccctcgtggtggaggggctggcggcccagattgcctcttaagaacaagggttagcggacaagttggtgatgaggtctacaataagggctgaccatttatgattgacatgtcacaaaagctagatagagggagtaaaaatggttgatgtgataaacaaagcaaaaggcgggggcgtgagagatgggtgagaccgagtaggagctctgtttacggaggttaccactacccgcttggatgcctggcgtgggctagatcgtcatagtgcaactacaccagttgtcatcgttatcgttatataggcatcatatgaaacaaagagaaatggaactgggaactttgtacatttattggttttttggtatacctgatggattaactcgatatttccacaaagtgtaggtgattgatatagtacattgctctgtaatgccagcattcatcttgataacaaaagggaatagaacatcgtttcatgagaaagctcggtctgcttcaagtagaggagcatcatgcacttctctcagaat

SEQ ID NO: 7603 - DNA, 593 bp, Emericella nidulans
tcagacactctgttgcccaccccgtcctccattagctccccgtcctgcgcgtccaccgcgccgcccaccgcgcctcttctcccccccattccgctcgccccttcccgtcccagcactgggcgcatccctcgctctagcatggggcggtgtcccattagtaccagtgccattgccattagccttagcatgaggcggaccccggtgtttgggtctagcagcagccaactgctccgcgctcgcgtagttgaagcccggaacacccttgagccccatcttgccgacgatctttttatccataggcgggggctctgggcaagccatgcccttaatagcgagctcattagccagctgtacgagaccgggcttatcgagacggagctgcttcattagtcctgacccagcgaaaaagccgatgtacgatgagtaggcgcgctgcttcgtcgtctcgtcgacggcgtacatggcctgtgtgacggctggactgcagctagtggcattggcgaggatactgcttgcgtctgggtgcggctggatgggaagatggcggtttgctttaaggaagaaggactcggactctgttagaaggatgactg

SEQ ID NO: 7604 - DNA, 181 bp, Emericella nidulans
ggggggacttatgtacctccctttggtgtcctgtaaatcctggatcaaaacccctggacaatgtgcctataaaaccttttagctttgggctatgccgaccaaggtggggggattccatggcaaccgtgccattacccttggaaaaacttggtggtgcccccggccccctctgggttgcctt

SEQ ID NO: 7605 - DNA, 562 bp, Emericella nidulans
ggatcactccgctgcagggtttagaagacttcggctacgcctcgagggtgcccacggcagaggaaatcgaagtggcattgagaggcgtcgctgaggcaaacggctgggagaaatgtgagcgatgcactgcccgctttcaggtctatccaggccgacgcgaggaccgcaccctcaccagcggaggcacctgggcctaccacccagggcaagcctactaccctccacggaagacgaccgaccatatcacggttgctatgagagagggacacttgacctgctgcgaccagaagctcggctaatcctcaggctgcaccaacagacgccacgcctgggttcaagagtctcagaagcagaaacggctgggcatgaggcccttgccgaaggaacagaatgccagtgtaacccagacattggataaccacggacccggttaagctattcactggcaacattagcccacaccacgggggccccggtgggggggaggcccgcctcacgcgggttcgcaagctcacctatgaaaacctcccctcagagtaaccccccggggcccccatgtgcg

SEQ ID NO: 7606 - DNA, 513 bp, Emericella nidulans
tgtagtccagatgtcccagtcctccctctagcaagaacccagccaacactgcccaggtctgcctgactgggccagtggcggtcacccctacaccttgtccatgcagctcatccgcacggctggcaatctcacacatggcaacccctagatcagcatagctcagacaaatcgcctgcctctggttttctttgtccttcatgtcagtggtatcaattaacctgtaaccagttgtctgcgtaccccgcgcatcatgcagagtcggcgggtctacaagcacatattgcaacagcccctctgtcgccgctgcttcatagaggacacatgctcgtcggagatccgcatagccagcagccaagcaaaagcaaacaacgcgatgcacaaatcgcggcacttgaaccgcaagcacggggttcaatgacgccgaccgaagctggatgaccgttagctcaccgcgtggctgtgctgtcggcgtcgggcctcaatcagcgcggcggccgtgttctgcactagggt

SEQ ID NO: 7607 - DNA, 730 bp, Emericella nidulans
agttcggtatcttcaacaacatagagttgcgtgtgctccggagatcaaaccttgggcctaacggaagaggcggtggtggagaggtccaattggtcttcggccatcaagttcggctccccaagactctgcacttaatgaacgctgggaggatcaagagggtacgcggagtagcatactctgttggcgtctctgcttcgaacaatgccaggatgattgacacttgccgcggtgtcctcaacccgcttgtcccggacacttatatcttctcggacgtgtcgtcagctccactcgttcccgccccggaaaggaacaacccctccgctaagaagaagatcggccttgggtttggcttgtctcttgttgccgaatcttcgaccggctgcctgttctcagctgacgtggcgtgcccgcccagtggtggtcagccgcctgaggatattgggaagcagtgcgcataccagctacttgagacgatctcaaagggcggatgtgttgcccctgcagctttccccattatgattggattgatgaccatgggatccgaggacgtaggccgtatccaggtcggtcgtgatattattggggatgagagctcaatccagctggcaagggacttgatgaagtttggtgccccaggttggggtctgagagacgctggggatgaaagtaacgatgtcatcatcagcgttgtcggacgcggtattggcaatgttggacgaaaggtcgcttg

SEQ ID NO: 7608 - DNA, 151 bp, Emericella nidulans
cgctttctacgttgtcctgactcctgcgtctcgtccctcgatggcccatcgttgtgagttgtctgtgaagggagtgcgtgccctgtgcagaggatcctgttggtccatcgggctgtgggggtggaagtctttcttcaggtggatcaggttt

SEQ ID NO: 7609 - DNA, 791 bp, Emericella nidulans
atgggaaattatatgggggctatgtttccactcgcagcttttatcgcggacgctaccatgcgttgacggatcggtctcgactttcctactctgggtactgttgcgtggtcgctaaagcctccgagcgaaaggtttccgaacggctacgggaagatcgaaaagattggtgcgctgggcgtgagcggacttctgctcgctggcggtgtgttcatgggtttgaattctggacaggtcttgctcgatcagttcttccctgaggcagcggaggcgatctctcatctggatctgggacacgggccactctcacagccatggggtagacgttcttggacccagcattcacgctgcctggcttgcggcaggctccattgttgtgaaggagtggctctatcatgccagtgagtttgcgctaggttcttttcaattgaaactatgctaaccactatctgccaaccagcgatgaaaatcgcagttgaacgcaaatcgtccgtcctagcgtcaaacgctgtccaccaccgagtcgattccctcaccagcattgtcgctctattcaccattggcggaacctaccttttccaagacgcctcctggctggaccccgtaggcggactactcatttcgctcatggttatcaaggccggatggggaaatactcgtacatcgcttctcgaattggcagacacgacggtcgatgatgaaatcaagactgccgtgcataaggctgccgccaaagctctcagtaccatcaacgaaggcggccttatcaagattcgggatgtacaaggcatgaa

SEQ ID NO: 7610 - DNA, 555 bp, Emericella nidulans
ctggatttcggcgcgctccaccttcccgatagtcgagaacaggtcaaccaaatcgtcgttgcatgtggaccagggtagctgttgcatgtcagtgggtgaggccgctttgttctgtattcgcgatactcacattgcggacataaatagtgttactcttctcaccaccagaggtagcataatcggtgaatgggttgggggggaccgagggcccagcgtcaaacccaggaccgctgggaggaccgccataaccaccgccaaaacctccacggccgccgaagccaccgccgaagccgccacggccgccaaaacctccacgaccaccaaagccaccacggccgccaaagccaccatagccaccgcggcccatgccaggtcctgagccggcaaaccggtcttcacggacctcgagggtacggccttgccaatcatagccgttaaactgttggatagcgttacgggcatcgtccggcgactcgaaggcaacaataccagagcccttgggcggtgccagagcggtcggtatggacatcggcacgaatcacggtcccttgctgg

SEQ ID NO: 7611 - DNA, 593 bp, Emericella nidulans
catatgttctcgcgtggctgtccgcatctaaaaagatgcggtctctctacagttctagcggactgcgcggctggccgtggacctcattccgatgaacctctcctcttcctctatccgcgctggttcgcatcagcagctcgagaacagcggagactgataaacacggacaggtgtagctctctttgtgactctcgaggatccctgtctcgccctacacctcacagcccgcggaaccggaatcagtctttcggcgcgtcttcaagaaaaagatggctctccactgaacccaggtctctctcttcgaaaattgactcagatggagcgactgactcgccttcttcaatgaaggcaacaatgtctacgacacaaacggacgcggcggatattgcaaaatctagcagtgaggaggaacaccggaaagtcgatggaggtacgggttcggaaagcgacgcggagtccaaattgaaattcattcgagacttctgggagaagtatgctgagcgaaaactgcctgctccttcatggatcgcggctcgaaatgggatgcataaatcccgagctcttgttcgacctttgaggcgcagtgtaggacc

SEQ ID NO: 7612 - DNA, 99 bp, Emericella nidulans
agtttgagaggttccgaatccgtcattatactacagtagatccggatagagcacagttagactgaagatgacgcataccgagtgacgatgcgtcgtaca

SEQ ID NO: 7613 - DNA, 971 bp, Emericella nidulans
  unsure (1)..(971): unsure at all n locations
gtcaggtatctatctaaaagccgagttgtgacgctgagagcgttgcgtctgcaagcatatccatcagcccggaaccattgtccatatccatatcgaatgtctccagaaggccaaactcggaaatgtcaaaattactgtaatccagatctgttagccatctgcacccacaagtattagaacggggaagaacatacagagttgtgtcctctaaagaatcagctcgagattcagggagaatgcctcctccagcattcgcttcagctccattcgcctgactgtggaagtccaggcttcggtgtccgctttgctgggtgtgctgcatttctcgtcgagactgcggctgcatgatcccactctcgtgcactctggcctccagctccggtgccaccttctcacaccacccaaactgttccatcccgcggacggtctcgaggcagagctggagcatttgccgatgcttttcgaggcccagcttctgcacggcaagaatcaagatccacatcgcctcgccgatgcagtggcaatcgaacaggatccggcttgagagggtctgttctttgaccatgcgcttgaagatgtcaaccgactgctcggccgcttcaatacactttctgctgatttcctcgtagcaccgcgccttggcgggctccttgatcgcggccgggcgcgagactgtatagaggaggaaaggccgcgtgacaaaaatcacggagctccagtatcgcaaatgaagaatggaaacagtcgtcggtgttgcggcggctgggacgcctcacggctgaagtactgaggtatctcgtcgaaccaggtccggagcgcattcagactctaaacacctgtcgattggtagacggccccggcttgcgcaggacaacgagcagctttgccgatcttctgcggatccgacaagcgagacaaanagggatggtttcgagggcatatttgggcaggaccatacctagcggtgacat

SEQ ID NO: 7614 - DNA, 459 bp, Emericella nidulans
tggggccgtcgtctgatttctcttttcctacctatcttactctgcgagtatgatgtctgcatcttttttttggcgttcatctatgtgccttgcgaaatgaagcccgttgctaccaatcaagcgtttgctggtatctccttctgcgtctcttttggcattttcccacatctcgtgtctctggtttcttattatctacctcattctttttctcgctctctccattcttatttttcgcttctcttccatcatgcaatatcattcttttcttgttgatctcggtgtctttatattcctcggaccccggcgttaggatataggcatttgtttccgctaaagcctttattttagtatttttttatttccaggacttcgactaggcttttttccgcctgtgactcatagttttaatttataatcctggaatttctaattgtcagtccatgcttctgctcttattta

SEQ ID NO: 7615 - DNA, 842 bp, Emericella nidulans
gcttgctctgtcggctagatctgcgactgaactctgaactttactcgccctcatatttcactgcgcttggcatttctcatattgatatgatcttcgaggacggtacctgccctcccctgacgctggtgaagaaattcatcaggatggctcacgagatgatcaatgtcaagcacaaagctattgctgtgcactgtaaggccgggctcggacgaacagggtgcctgatcggtgcttacctgatttaccgatatggattcactgcaaatgaggttattgcttttatgcgcttcatgcgtcctggaatggtcgttggcccccagcagcactggctccaccttaaccagggatcgttccgcgagtggtggtttgaggactgtatgaaggagaagctcgcccagatgcagccgaacccggtcacccctggccgatctcccgccaaacaccgcgccgctgcagtgactacccctccgcagaatggccactcgaagcgatctgcactcggagagattgacaacaacgaagctactccaatttacgatgataacctaccggctccaactccagggcagcctcggaagtcgcacaggaaagactctcgacaccacccctactctcggaccgcatccggaagcctcgttgtggataaggatacgaggaagaccaggcgaagcactgatagtagtgagagtgaagaggagacacaactgcggatgctcgccaagcagcgttcatcaaaatcaccagctgcatcaccgggccagcgctccatcagctactcggccacggtcacggctagctacactctgaacgacgatattcatgaggatagggaaaattggggc

SEQ ID NO: 7616 - DNA, 605 bp, Emericella nidulans
cacattagggcttgcgctagcgctaccaacttgctgtggcatttggccttgtggccaattgctggaggtcccgaaagattgctctgaccagggcttggatgggctgatcccgggagatggggcgagccttgcgcaccaacgggtagattgagatgggccatccccggggaagcgaattgattcggcccgcccatgctaggtgctcgcgcgttcggacccggctgcattgcagggttcatattgccctgcatgaaaacagggttcgcgttctggctagcttgcatgttgcttacgagactccgcaacgattcagatggagttaaattcggattttggtgcgagtattggaacagaagctgcatttgagatattgtctcggccacctatacactcacagacgttagaaccaatcttttcatggcagcgaagcagagcaacatacctctaaaaactgcaatacgggataagggaccccattagaagttaccatagactcgggcaacgtaaatgcgggctgctgagcctgctcctgcgaggctcgcttgccgttcttagagagataagggctttgtttctgatcaagctccaaagccagtaactggctt

SEQ ID NO: 7617 - DNA, 234 bp, Emericella nidulans
  unsure (1)..(234): unsure at all n locations
gttgctcccataccaatgacttaggatcaatcatctcagagagaatactagtggctccgaggccattgcattatcagttgccggcgccggtttagtgggatgnnggaatgtctcgcactgacgagcgtgacatacgacgcgaacctgcttagccgcttggccggcatggctccaattacgatgagcatgggcaaccggtangccatgctatggatgatgctgagcgctgacggg

SEQ ID NO: 7618 - DNA, 831 bp, Emericella nidulans
ccaggtcctggtgcgtcgaagccaacactgattagtgaggagcggtgatttttgcatcccgatgatacaggatcttcaatgtgggacgaggcaattgagcttaggacacagcaactggcgctgaacgagaatcttctggcttcaatcgatagtgatacatgtgacgactgtaagctgttgttggcctctataacctgagtaattagtgggctaacaaacgatatggattctcgtgtcgagttaggaggaaccgccggaatgatactaggccaggcactggttgataacaacatatcttcgagctttgggaagttgagcagtttgaggccctcgaagactctgcacaatacgtgattaacattgtttttggccgcccctattccaactgtgtgggacactttcctgcctcggcatatgcctcagtctggtactgtctgcttgttctttcttaatcaagtatattcttccatcttggtgagatcaaacccctgaggtggataaggagagtatccgtcatataggggttggcgttatggtgaacttcaagaacctcaccgccgaaattggagagaatatttctggacgagctcgagtaacgcgatcatgaatatgctgccttgtttggagaaagcgaatggcaacttcagtggccgtcctcaaacggactttgctggacgtgacgtcataagcaagcccatgattgaccccacaagattacgaactgggatcgaatatatttcgacaacctgaatatttggggaacgcctcactctgggacatttggtttcagtcaacaaattacctggaagcgaaagtgtggcagatgctcga

SEQ ID NO: 7619 - DNA, 664 bp, Emericella nidulans
cgtgacttttaatgcctcccgctatagatgcctctcgcttgatcttgcaatcctccaatcatagagcgccaatcacttatagggcacacgcacctccaccagagattttccttgtatcttcagagcggcactgtaactacttcttgctttctctccatattccatcccacatcagcaagtcgacacaatggctcccaagaccaaggcccccgctaaggacaacgtcactctcggccctctcgccggtgatggtatgcgcccacctaatattattccaagcggcagtttgccagagcagatctaatcaatatgtttccaggcaagctcgttttcggcgttgcgcgtatcttcgcctctttcaacgacaccttcgtccacgttaccgatctctcgttcgtctcccttatgcctacgccctaatgggttgcatatatataatacacattgcgagcagtgaacactaacgttctatcagcggtcgcgaaaccatctgccgtgtcaccggtggtatgaaggtcaaggctgaccgtgacgagtcttctccctacgccgccatgttggctgctcaggacgttgccgcccgctgcaaggagctcggcattaacgctcttcacatcaagatccgtgctactggtggtgcgactcttatttactatcaaattac

SEQ ID NO: 7620 - DNA, 917 bp, Emericella nidulans
gttcagggacatgaagaagtgaagcttgccgctctccgcttcctttctacgattattaagctccctctaccttaaatcgataccaatgccactgtctatcttacggaagctgtaaagcttatcaaggaggcacccagcaccaacactgaaggcgcacaggcggccctgaaattaatctccgccatgcttcgagagcggaaggatgttaaactcagagatggacatctcgcttacctgcttcagcgactcacggctgatatcgaggagccagaccgccagggtgtcactttcaacttcattagggcggtcatggctcgcaagtttgtggtgcctgagctttacgagctcattgacaacgttgccatgatgatggtcacgaatcaaactcggtccgcgcgtgatcttgcccgtggtgtgtacatccattttctcattgagtatccgcaggccaaaaacaggtggacgaaacaactcgctttcttggctaaaaatcttgagtacaaacatcaagacggtcgtcaatccgttatggaggcgattcacatgctgctctctaaaacagggcaagagttggcccaggacatcgttggtacattcttccttccgattgtcattgtcatggcgaacgacgatgcggctgagtgcagggagatggctggtgcgttactcggtgaattctacaggagggcggaccgagagacgatgaaaactatccttgagccacttcggtcctggattgagcagatagagaatcctccgctcgcgagcactggattacaagctatgagaatctacttcgaggtggaggagaccgacaaggataaggaggcaggctttgttgctcagacccttccaacgatcatacagcccattatcagagatacagagacgaccaactggcaaactctgtatttttc

SEQ ID NO: 7621 - DNA, 674 bp, Emericella nidulans
gttggccgaggcggggttgggtgggccgcgccagaggacgccgctaacatggatctgattcctttgcggccgataccaacaccgcggattctgaatgcttctcaagggctctgggaagctagaactgattccccttcttaaatgatagactggcaacatcctcaaacagcatgtatcccatatcaaaacaagtgccggccatattcactcggccaactcccaattgagcagaacgtcaagaaatcatgccaacgcttcgtcgaagctttcccacccctgtctcagactcagagttcagccggtgactgccaagttgcgaaggaatcgaatgcttgtttctcaccagccaatcaccatccgcatctagccaggtgggctgcgccctgggactgttccgcttggactacggacggccaccgctgatcccgagaggcggcaggcgcttacggcggcgcgccctgtcaggcccacttgacacaatgtgattgtgggcccgcagcgctggaatcattgccgattggtatagatatatgaaattgtgtggggcgattctgaatccttattccaaagtggacactgctgtgccctatcagcagacgaccatcccgatgtgacagtcgttttcgacctgcaattagtagcgaaaatgacgtttttgaagcacatacacacga

SEQ ID NO: 7622 - DNA, 551 bp, Emericella nidulans
gtactagacaataagagctgaagccagattgctgctgaaagaatcacgactgcctgatgcgcttacataatcactatctacgtcactgaacaaacgggcactacaactcgcctcttaccgtcgatattttgcattcataaaccttgtaaaacgtgtacctgtcacggcagggtgacaggtatgcttgcagtgtagtgacagaaatgaactggagtagctaaatcatcagctcatcatcagttcctcggcctgatataaaactgccttgattccaaggccaccatcgccccacttggatccccagcatctgcaaacaacggccggctgcagagaaactgcatctattggagtcaaatgcagcacttaactcctaaggggctctttgaggactttgttccagattcgaaaatccgcttaagaccactatctttcgttttcctatccttgtccttcgctagcgcactctttgcctctcgtttgatcctcggtcgatcatcctgtgaactcgtccaaggatggcctttctttcctggtagacccgtcgtctatgt

SEQ ID NO: 7623 - DNA, 125 bp, Emericella nidulans
  unsure (1)..(125): unsure at all n locations
ttctgggatctttaaccaggtactgggcgtgcgtagctcgtgcagtgcccaagagctacgtggtggcgtgacgatacacgatccttctacacgtataatatacctcgtttnccagcttcgtgctt

SEQ ID NO: 7624 - DNA, 732 bp, Emericella nidulans
agaacgagagactggttcggagtaaaaatccatgaaaagaagaagcgaagcgcgacagacgacaagggaagggaaagaacacgaggcactcaagtcagccctcacgttgaaaggtgatttatcggccggactggattgcgtggacttagacggctaagagcagaatggggcttggcggccgtcttccccgattcggtctgctggacgtcaacctgggccttgtccacagctgtcccccgcgaacccttctagacaccccgcgaaccctagcctctgcctttccgattaactgccgacaggccttcacttgtcagaaatcatgtcggctgcttcgctggagccaccgacctacctcagctccctccaaaacaacatccgagctcgccctatcccgtgggagggagctgttcgagctggaaacatcacagacgatcacttgaagaagattaaggctgtagacaaggtccgcaaggaacaacggcgtcagacaatcgatggggatatcccgggatacgtgaccttgctggcgggaggttcaagcgggaagagtgtcctcgaatcggccgcaaggagaagcgatattgtacagtatattcttgtcctggcagcagatcttataaacggtatgccactgccaacgcctgactgataagcaacaactgacgcgcttggttgctttagatgctccatccctatcgtccgccctgatagctcatcccaaccatacaaacc

SEQ ID NO: 7625 - DNA, 626 bp, Emericella nidulans
aatcagacctgttttgctggaggtgaatctgaacaattaacgcgactctgcaaatcgtcagctaagaccgtcccatatagcctcccaggcatgctgaactcacgcctctaagttcccctggtgctttcccagtagtgccaacgcctcctcacttttccctacattctgcagcactgtgccccctagaacctgcaccgttgcatcgtcgggataattctccgcaagatcttgggctagctgtgtcgcggcctcggcattaccggcagcgaactgcgcgagggccttgacggcgctgagactgggcgactcctcagtctcgccttcaatgtcggctaggacatcatctgtgttgccaagggcaacttgggcgcggagcttaaggatgcgtgcggggagggcgttctcaggggagaaagaggatgtgttgaagtctatgacggattggtattggccttggtggaaggcgttgtggatgttgatgagttctagagtcgagggagttagtggagggaacggggaaaggggtttaaagtgataaagtgatgggaagagtgctgcgtaccgccttctgcagagaatggatccattgtgacaatgggctgtttagttcttttaattgtgaatag

SEQ ID NO: 7626 - DNA, 558 bp, Emericella nidulans
acaagacgctgaaggtgctgaaagaggtgagcggcgagatgccggttggcgcgtatttcggacgaggaacgccgcagacgcacgcgaagttcccagagatctgggaagagcttggagaggagttcctctggtcgagcgaggtctataacgacgatgtgccctactggttggacttgccatgggaggaaaagttgccggagagtgagcggaaggggatgctgctgatcccgtataatgtatgtcccttcccttacctttcgcaccctccatatgagcgcagtgcgtaacgctgtatgctaactgttcttcaatgcgcagtatgattgcaacgatggcaaattccacatgtcgcccggcttcggtagcagcgtggcggagtcgtacgaacagtatctaaagaacacgtttgacatgctgtaccgcgagggaggcaagctgatgaacatcccattgcatacgcgcatcattgggaagcctggacgatgcgaggcagtgagaaagttcatgctgtatattgctgagaaggaaggtgtctgggttaaaccagacgcgatattg

SEQ ID NO: 7627 - DNA, 1063 bp, Emericella nidulans
taaaggtttctcaaccattcgttttccaatatccatggcatttcagaaaaaagccggtttaccggtttggcagttgagggtgtcataatgtccggaggaaagcaagccggtgttccaataacatggatttgagtcctttagctcagttgtcttaaggctagggggcggcaagaggcacggagcttatggtaccaaaatttgtcatgttgtcaagctgtgggggctctttgttatctgagggccctagggatgttagcggtacttaggccaatgtttcctgcgcgtgtgaaggtataagtagagttggcgtcgccagtcacctgaaattaagtctttggcggctttacttgttatcaagatgggtctttctcttttatagccagggtgaatcagagcttagagcagcatatcagtatattttgtagtgcattacgagtctaggtgcatgcaagcctgcagctggccatccatcttgggatttaacgagattctctgttcctgtggaatagtgggatgcgatggcggcagcagcaccaccgaccaccgcgacgactaagattcgacctgcgaactcggcaatcatgctgaaggctagcaaagggagaataattgcggcagatgcaatgataatggcagaatggacaggagatggggctttcggatcggagactgtttgcggtgtgagggagactaagtccttacggtggtcgaggaagcgcatctcattggtagcaatggggctgttgcctgtcatccatttccggtaggtctctatgtcagaggctgcggcgcgggggagcgtttgaagcactttgctatatgcagtgagtgcgttgtctgatggttctaagtaagtatgcgctgcgtgaagagcacaggtgcaggattggctcactgtattgctctgtcttgtgaatcaatgctcccatgacttcctcgcgtctacagtgcagggatgagtaggcttgcgcctgcacatccatgcgtcgagatgcaggcattaccctgcgttcccccctgttctgcgatgctcctccgctgcatgtcttcgtagtcatcgagc

SEQ ID NO: 7628 - DNA, 954 bp, Emericella nidulans
ccagtgctgtatggtatcttttctcgtttacagtacctccaaatcatgcccataccgatcattcattaactgatattatgccagactccaaaagcaaaacagaaagccacccgcctcggacgccactgatgcagatgcatctcacccagttaaaccaaaaagcaaataagatccaccgaacgccattagtgtctaaaaaaagacgggtctcgtcagagcaagcacagaggcagatattgtggccgttcaaaaacccagtgcgtcgggaatcggcgtttaggtatatcggagtagtctccgtagtatgggtacttcggaaacgatttccgatccgattgacgacttgggtttgcgctctgcgtcacgatcagcgagcatgaaagcagagcggagggtgcggtctaaggaaaatacacgttagctagccatgactgtcacctcggtgacctcggttaccacaatattttcagcgtcgtggaaactcacctgctatggttcggggagccttgattccgctcacgcgagctctcgagggccggtgggacgaagggaagcacgacagcagaaactagacatgatgatgtgacgaagcgcgatgtgcgactagttgtctgagcgcggtggactgaaaagtggcggattgttgggcggacggcctgaagctggatagtagacatggtgttgaaggtctgagtgacttggcacttcggctagtgatattgcgactttgcaggaatgtctcggatttgttcaaaggcagagaggatctgaaagaaataaaaagcaataatgggattgaaatggggactggccttccgatatataccctgattgtacttgggtatcagcaggcataccatacaatgaagctgtgggggtcatgcggggctctccactctctctactgcaggaggagctcctctccttctctctctccctgcgagaacactggcg

SEQ ID NO: 7629 - DNA, 584 bp, Emericella nidulans
atatcgaaagacgtcgtccggtcgtcgcctagagccaaagcaaaaatcacagcattgtttccaaggcgactgatttttaaaaggtattgcatcgatgattgagcatgagcgtatcgaaaagaggacgttgaatcggcgttccattctgcggggagggatgaactgtcggacgagccttctgcgaaacatcaatcgttagaaaggccagaagcgcgttgattatacgtacctatggtatgatcttcaccaaggccaactaatctgaaaccaacagcgaccatacaagcgtggctgatgagagcgacagcttcgtagggagtattgaggctgaactcagatctgtcgtcaggacggagagctcgagccgccagccccaccacattgttggggctcaaagagtctgtgtttccgaccatgttgggtctgttcggtatttgaatggttgtacaatttcagaagaagacagagatgttttggtgtttcaacgcagaagatgtagggagaatcgtcgcaaatcagtctggataagtattgaatggtccaggcgccagagttgcgtggcctgccccagctgaatgcttatc

SEQ ID NO: 7630 - DNA, 166 bp, Emericella nidulans
  unsure (1)..(166): unsure at all n locations
cgtgaagtgctcagcccatgtcctatcagaaccacatcggtgccggtcnaatcatcgacatcggtgctaggcctcatactacgatctgatanactganacatggtccacncttatgtcngggcggtctctctcttcttaaccactgtcgtcacttccgctcagaag

SEQ ID NO: 7631 - DNA, 1159 bp, Emericella nidulans
gtcctttctggccttattcaatcattcatccattctctttattttcttatttccgcttcattcctgttttgtgtacatatacccgtcagccatgattgcatattttctttgaatataaaacgatactttggccctgcctcgcatttcactcacctcgtctaacatcagatcgaagtctactatttccgcacttcccaggcattagcgcagtacgtctcttaaggcgcgggactggacgggattttggcgagggctgttggacgcaattataaggtaccccagcgagcctgcatacgagattctcgcctcgatggacgatattgatcgcgttcttggtatatttcctgtgtgactagcctaccccgacctctcagccttctctaggctcgaggtcttcctcatgcagggataagaagacaggtggacagtatgaaagtgtcgaccacgggtctaggcctccgtacattcaatacgacgctctctctatctgcatataagcctttccgagggttacagccttaacgctttctaactagctagagataagcctagctgaggataagtgggtcttcgtgcactaagtgcacgccgttatgatatatctatccgatatcaattcgacgccgcacgaacagcctcggacccaaccgtgcatgcaccggttatccgaaaggcttattccagcatgtgatgtgtctacttttcctacacgacaaaaagcgtgcgcagcagcctagactaacatcatatgtaacggtagtggtggtggccgtaggacagcctgttagcgcagaaatatatatttgactcaagaagtcagccgaccagccgggagaagcatattagacatattccctttattccaacagctatgccactgttacgtttccggaccaccggcctgccttagctccactctatatcaccagccttactctactcatatgaaggatattcaatatcgaagaattacgcgaggttccgcattacggcactcttgtcggcaagacccaactctagatgcggacggcgggtccagatactctcgcatgcatcagtatggatacgctatacgtcagagtctgcaaaaggcagcgcgaggacgatttttctatttctgtttcgatcgaccgaggtctgggttgacatcgcttgccca

SEQ ID NO: 7632 - DNA, 803 bp, Emericella nidulans
catccatttttggtacccgtgtagctcgaaatatatatttgggttatctcccgcaacatgagtaggtctgtcctaaaaatagacatccagcacttattcgctgattgaatcgacatcgccaagtacggcaagcacaatcctggtctacctagggtgttcaatcgcgacctgggcccgattaggcaggatatgggttattgcgatggtaactccaagcacatacccgagtaatatattgaaacacaagattccatacaagccaaaggtgccagtgtcgagcaactacaacaggcgttatatgaagcagaattaatcgtgaggcccatccagacgctgcctcgtgtggcacgtcgaccgtattacccgtgctgcagggatatatggtacctaaggtccatagtaaatgaataaggtattcggacaatgtctggctagacgctatccacacttacggacggaaaatacttgagagtcagagagctcaaattttgtacccctagagaagcgctttacattgcgtgctagaacccaaggttttgggaatgtttaaactgactcaggactatggctctctgaacgaaggtttgaactagcctagcattataaaaatcagcccgataggaggaagagcggacgcaggcgtttattctgattggctgatcataacctagggcaagcgctagtaccaaacagatttgagcccccgaagctaatactatactgaactatatctggtgaccacgtttcgttgtccggagttctggctagttttattggcttgagtatttaaaataactgagagt

SEQ ID NO: 7633 - DNA, 191 bp, Emericella nidulans
  unsure (1)..(191): unsure at all n locations
tcatgttcgattttcctcatatgccctatatacatgattttcaagtgcgtcatagaccttcccattccgtttccgtgctcnccccacgccgctattagctcacagcgtagtcctctagcgctgcgctcactcaggccgctgctcaccgctcgtcgctgtacaccctttcggcccacttgagtagagggact

SEQ ID NO: 7634 - DNA, 757 bp, Emericella nidulans
aataatacaggatgatcagcctctcaaaatatccaaggccaacagaagaatcctgagaagtgcagctcagtaaattcattcaagagtataccaagtggaatctcatagaagcgggcggaaacaggagcgatgcctcagcatcagcagacaactagtgagaaagccgacctaattgttccatactctaaatcataatattcataaattcttctcctattaggataacggtccccctccaatttctcgtacatatatcatttaagcgttgtagatcaaacggaagacatcgttgaggacgaagtagcttccagcaccatcaggcataagctggaaggtctgtgtgtagttcatggggttcttttcctcatcgacctgtacggcacagtcagccgtattcaccgttttagtttatagaacataccaggagagcacccgtaaccaagaccaagatgccaccatgctcaccggagggctgagcatctagggtcgaaacctgatgttgcaccttctggaaaggcagagactattttcaaagcaagttagtggtttggaagggacgaaaatctaagccgaaacagccaactgtgactgcagcaggactgagatagaaggaggatgcgtgtcgggcctactcacagtgagcttctcaatgataccagccacaccttggatggcagatgtctcgaaggtgagcatggaatggtcgcgctgttggatgcccaaacgagacagtgttgctgtatgatgaggaagtggg

SEQ ID NO: 7635 - DNA, 726 bp, Emericella nidulans
cgcaattaaccctactaaggggatcgcctcggtgagttctatccctacacaggtcgacgacgacaactgaatttgcccgattctcatccgaaattcatctcaatgagacgttcgatcgcctctttcgacatcgccctcgattctctaccctctcaacgcgttgtggctgcgcttcttcaatagctaacaaaatttgcttccggttgacaggttcgcgcggctgttcccggccccctctctgctgcttctaagcaggtccgtacctatgctgctgaggccaaggcctcgcccaccgaggtttcttccatccttgagcagagaattcgtggtgtccaggaggagtctggccttgccgagacaggacgtgtcctttccgtcgggtatgtcgccttcatgggtggaaaaatttggtgtcggcttcaaaagcgcttaagctgtggacaaagaacaccaaaagctacctcgaaactgcttagactatcctagtgctgtgactgactcaattctatcgattagtgacggtattgctcgtgtccatggcatgaccaacgtccaggctgaggagctggtcgagtatggatcccgatattgcttcttcattttgaacgctgcgactaatattgaaataggttcgcctctggtgttaagggtatgtgcatgaaccttgaggctggccaggttggtgttgtgttgttcggttccgaccgtctcgtcaaggagggcgag

SEQ ID NO: 7636 - DNA, 847 bp, Emericella nidulans
atatccagcatcgcacgagtcattttcccaacatctacagctggttcccccacttcgcgttgtgttcctattcctcctttagatattgaatcactctcagttgctgaaattcgggctttgagtcgtgctttcgcctgttacagcttctccgcatcggatttcttctccgcatcgaagtgctccgagtcgggaagggcactgatatcgacagcttcactccctttgtcgcctgacggcccttccgcaatcttattctctgcatcagattcgtaatcatttgcatcgtcttcctcgtcctgcatttcttcgcgctcttcccttatcttctttaaaatccttaccgcacgctttcccaactcacgaatatccccaatatttcgagcccctagctgcccggcatctcggcacttcgctaggagcccccaagcccaggcaccgatacgtcgaattaggactgcatctccattacgcacgttatccgatatgagccgcgccacgatcaccaacactctcaggacactgtccatatccatgcacgcaagctgcactgtttgaggatcaacctcttttatcaggcgtctccactctctctgtgcaattttggatgatcggggaaaactgatagggtgcgagtcgtcgagcgcagatatggcttcgggcggtggcgtgcatttcagaatcgaccgtaagagaaggaatctatgatggaggaggttgtagtaactagcttgtgcatctgataaattctcgtcggcgtcgacttttgttgtggcgagccaatatatactccgtccgaatagatccttctgggacgcgatctgtagtactgagttctcgtcgagtacat

SEQ ID NO: 7637 - DNA, 519 bp, Emericella nidulans
tatcacggaggatgtcctcatccaaccgttccagaactttgaggccgttggggaagagcccgagtccgccgccgacgactagcgtggaggaatggggttgaccatcgcagttttcatcctttgtgtctatccctgtgtcgtaagcttcgtagatgattatctcctgctgagaggatgtattggcctgggggagatgctttttgagttggagatatactgcgcacgcagagatgccgcctccgataatgatgatcctcatggtctgagatattttaatttcaggaacctacttgcctcgtgggtccagaagaatacctgctccatcgtgagccttaaaggagctgaaataggactaaagagctgagttgtgctgcctggaagtctggtcctcgtgacgtgcctcgtattccacggtatcctcatctggcccgagtaagagaattatggcacggaggtcatggaacgaagtggcgtctttgacctgccaatcgttcataagaaatagcgaattttgtgcta

SEQ ID NO: 7638 - DNA, 607 bp, Emericella nidulans
cgggagacaaattttgcatatgtcccgttccgatggcgctgaccgaccgctcgcatcacagaagaaaaccagatccagcggtatctgaggttttcctggagattcacatacacaacaacgcaggtgttagggtctattgaagcgtgggagtctggcacaatccccggaaaggcctggaagaacgcgaaagataacaagtgtacctacatattgctttgattgctctgtggttggagtgactttgtgaatcatctagtagttggaagttgactggtcttatgctgttgaaattggtccatcaatcatccgttcagcatctgtatgaccgagagaccacagtcatataatgagatgcagcaacaggagaatactcatgtacgggtaggtattccatggattgtcgcccgttcaactggggttagaatatttaagcttcaccccatgaggaatgtcaaaggacattactcgccttactatgcgcctacccgacgtagacggtcgtcgcgttgctgtagccgaattgatatctctcatgcgaaggtcggtcagggatcatcccggatgtttggattgatgagggcttcttattgaagagcggagaaggaat

SEQ ID NO: 7639 - DNA, 1120 bp, Emericella nidulans
gagtaggtgttttcaggtaaaattcaccagcagggctgtggtggagtatccagctcatcgagcacgcttttccacgcacatccgccttcaggaatcatcctctagcatgttggtcctgaaagcagtttcctctaattgtatcaccctgaaccaagacaggttcttgggctgaagatgacggtgagctgtctgtctcctctactttccctttggtattgtcatcatgcccacttgactaactctatacaagtatctgaagtttaggtagaagacccactactatatgtaggtccgtttcgagctaatcaccacgccctggccccatttggggaagatatataaattgtaggtagttgtcactgcaagctgtgctcaagtcatacagagtctcacccgcagaaatctaccattagtaaaatcccacttacatttatcaagtcgcggtgatgagacatccggtcaccgaatcatgaacagatggaggccctttcttccaggtatagagtttagtgaaactgatttgacaggatttggagtgggacaaattaaccgccgtgctcaacttggctgtaatatctggacgtcatagccatagtatgccgtcagccatcaacgaggtcggattgcattgcgagtgtagtggcaatctatagtgggggtctatataagtacggttatagactgacaactgacgcggctggcaataggtctggaatgcttggagatgggatatgacggtgaggttgcctcctacttaccctaatctggagaatccagttagtcttcggaagaaaggatggatagacgttggtcttgctctctttttccctgttattgagctgatgtcaattaaaaaaaaaaaaaggtcaagcctcgcaaggatgccgcttcgtcgcctggattggtcgaggagaatggaggcatctagttaccatgttgaacttcccagttttcgagctccaaagcagtggtattgcttggtgtagatggagaccataacggggacgttcacatgcggccccccgttccctgatcgcagcggttgcagtgcaagggtgatttacactgatggagctgtgcatgcacatacttcggctgacgggtccggccccaaccccgc

SEQ ID NO: 7640 - DNA, 273 bp, Emericella nidulans
agaaccgccatcagacgggtcgacgacgcccatgccgaaacggagtccgagtctgggacagtatcagtgagactcaggtccccggccacagtatcgcttgcctctgcatacgaatcaatctcgagaggacatgaacatacacgcgacttcgaacctcagagcctgcattcgaccgccaagaccgtcgcagagtgctgaacaccgtcaaggagcaccaagctcggtagacactgtatgatgtgctcgtgcatctcctcatcgacctgcaagcaa

SEQ ID NO: 7641 - DNA, 1232 bp, Emericella nidulans
caaaggagaaggacgtattttaaacctttttactttctgcccatgtaggaacgtattaggttaagggaaacatcgagcctgtccacagctttatcacccttcggaatctctattaaacggtataacgccaaatctggcaataatcatgtcatgtgaaggcaaggcctcacctacattcgcccaacagggggctttccaacagatgagtggctatctcgccctttcccttaggctctgccggacgatctgctaagtcccaagggacggaaattggaatcaccgctccaggattggtcaagaaatgtgcagccaggacacatagtcgaaattaaggcgcccccggcctaacccgtgttagctgttgcctgtcgttcttgtcggggcttgctttgatgtctatcaaggatagacttaccaccagcaatttctcagcaagttcgtaagctccattcgcaagctgaaagaatgcaccggcaacgagggagaatgtgatgacaaggaggaatagcgcggagaagagacagacgtttgtccgtatcgagcagatcagatatatgaacgttaggaggcccaaaaagacgtagtagaaagctgccaacgtaatccgtattagccgtcttctatgtccggtatatggattgagtagagataagtaccaattgttgccgcgtattcccctgtctgctgtccctcaaaagaattaccggtaggcgagtagttcatccccgaagcgaagaatggcatgagcccgccaccctgaacaagccagaacgtccctagaatcaacgttaaccaggtacgagtggtagttagatcaactgcgatgccgcaccatatgtaaagaagatcgcgcaactgaacgtatttccaataatccattcgccaataccacccagaatttggacaattccgccgaagaagatatacgtcgggacaagcgcgctaccattcccgccggctccgcgccaccccatcagcatacaagcatggggtgtagatgcgatcaggaaccccatgagacagatcggggtcgggttaccgaacttcttcctcaggtccgtctgcacggaggggtgtttgggggtcaggtaaagcttctcgaaggtttcgcgggaaatcgggaggaagacactctccgcggttttcatgcggttcaggttaatcgtctcgtcagacggtttgtctgtgatatcgctcatagtggcgggtgtacttaagaatatggaaaatgg

SEQ ID NO: 7642 - DNA, 395 bp, Emericella nidulans
tcatatgtatatacccatccagatttaggggactctataagatactctgggaccacccgtgtccggagaaggcgctggggacttcaaacctagctctaggagatatgttgaccgttcaccggtttcaccgcctctcctcaatagggaacacgaggcattgcgccagagctcgagctaaccggcgactgtagtagctgcatgcactgcaagcatgagtgctcaggatcaccccagatcaggtgactgacgccgtatgagggcacgaccgatggatggctgcactcgagacaaggcggccgatcctgaccgagtgctgggccttttataccgttaaaacgctaagctctgattgtcttatctgggcaactgacagcgccgcgacgggtaaaaccggt

SEQ ID NO: 7643 - DNA, 743 bp, Emericella nidulans
cgttgttcggcgtcacggtcatcgatcacatggtagtccgtacgcttcaatgcaagctcaacgccatatcccgagacaaatagaggacgcgagatccaatgttgaggtggccgataccgcactctatacgatatctcaccctctttagccaaagcactcagagtctgatggaaatctttaaacatcggcgaggctacatcggcatatagaataaccgggggtaaggaattggggcctaagatgcgatcgaaaggtaatgcccgtccgtctctgcataatcaccagtcagcaaccggaccaccgggaaccaacaaaggacacctacagatccccttcaacatcctgttgcgcccgctccattgcagatgagcagtattgctttccatccgagtgcacccagacagggcaagcggcatcctgcgccgccatcagagagtgctgcaccgaggtattatagaactgatagtgggctgcaattcgagggctggcggatcggatcgacaatgatagcttaaacgacgagacactttcggggctgctaaggtgtccatcttcaaccaccacttgcaggaaacggtcgaatagctctttatccgtcaggtaatcatcaaaagctccttcggctatgcgatcaagtagtgggaagtatgacgttgcgttctcttcggctgccgtttcgctggtagtctatgaataaggattctgaaagtaaagcaattccaagacagccagaactcacagca

SEQ ID NO: 7644 - DNA, 188 bp, Emericella nidulans
atgcagcatataccgcagacgcagctcctagcagtctcggcttcatgttgacatcgcgccactctctgcattttcgagcactcctgtcaatagcatccatggtaccgatgcgcaatcgattgacagcagagcagcaaggcacctgcgatacgtagtcgatgtcgtcaaatctccagccatacgatcaa

SEQ ID NO: 7645 - DNA, 906 bp, Emericella nidulans
gtcataggcgtgagcccattcatcgtaaaaactttgtgcttcggaactcccgcggagagagaatgcgcgctggaggtagaaatcgatgccgctgacggcaggcgtgggttcttggggcatgctggatgcagggtacggggcaaggtggacagattcaggttgtcgatatgacgaatatggcgggggattgacgtattgcatgctgcttatgtattgtggtggtattattactatccgggccggcccgtcgggagataactggtccgtatggagttgccgatgtcagttttctggactatatatgggcacgacctgggcaagtagtcaggagactagatgaggacgcatttatttgcagaccctgtagccaacgataggatgatttggatgttcagtaaggaggccatcaatttagttcattgttttgccttgtataccagtaggctgggagcatgcagctctgcatggggatatagcaaatatctgtggttatgagtaaaatgaattgcttagaaagaattttccgagcgagaatgtgagcaagggtgtatattagtggtaaaagtagcccgctggcttgccattaaagtgctccgcttctgccttgggcgacgatgtaagctgacagttacaaagccatcgggaataactacttaaaaggtatctgatatattagattataatcagtgttctcagagaataaaatcccgcgcagttcccacattgtctcgctcattgacctctcccggaacagtttcaactgccctatacaaccaagaatagagcaatcagagttcaagacagagtgcttccctgaacgcatataaccagtccttcaatcatttcctccaacctcttcaccgcttgacgaacgacacaattacggtcaatcggttgctcctgtca

SEQ ID NO: 7646 - DNA, 1126 bp, Emericella nidulans
  unsure (1)..(1126): unsure at all n locations
attgtcaaggaatagtctagttccgtctatagcttcgtttggaccacatcctcctttcgctcagttttcccgtctgaaaagctgtaattcctccacttccctaagatttgctggacgtccctagacaggcgcaggtctaactgcgcatcgcgattctccgtccaccctcctatcccctggctgctccattgcagcctcccattgctccgttgcagaaccttgagtgcagtcgtgacattctcttcaacttcagctaccgtcgtgcctcccatgatggtacccacacgcacgtctgacgtggagcagtgctgcgctcgtcgaagggcatatcgaagtgcaagacgcgccagcacctccccctgggaggcgacataggcggccgctgcatgggccgctcttcgcagtccctccggggctggatgccagtcccccagggcagcaatcggcacgccttctccccgcaggagcccgctagccagcgggctggaattgcagacgcagttgacaccggcctctttgaatgcctgcagcccttctctctctagccggacgttctggagcgtcatctgtgcccagttctggattacatccaacggtcggccgtatagtttccgcgcgcggcgagcgactctggccagcgtgttgatgggataccctgacaccccgatgtaacgcactgtgccggcgtcgaccaactctagcagcaccccgatcgccttcagaacactttcctcctcgacgagctcggtatcggggcagaagaccccgtcgagaaacctcgtgcggaaccgctgaagggaccgcgcgaccgacgattcgatcagtctgcgaggaagcggattcgcgcgctccccggcgacttgcattaagagagtccgccttgctttctgcccggantggtgcagaacctccccttcaaccttgacggtaagaccggacttctggccgacccaattaaagcggcaccccctatccttgcccttgggtctgaggtgtgtaaccccccaataaccggcgccttgtttgatctaaggttgcacccgtctaatctcaccacccccacagtgccccttcttacctaggggcattgcacactccctatctccccttctactcttctttccct

SEQ ID NO: 7647 - DNA, 959 bp, Emericella nidulans
aacctcaatcagccgacttttctacaacaaacgcctacgcaatccggaaacagaaacagagtggacagctaaaatcatgactccatcctattcgcctgctccgcattgaattcatcccgcgcactcgtgaatttatccgtcacaacatcacacagatccatcagggtgtcaaggcctttttctagggcttcaactgcggttgttgagtctgtctctgagttagtctttgccatcactccgacacggtaatttcaggggaacaaaccgtaagtctgaattcgaatgttcatctttgactccgaagcatgcggaatcgtgtatccacagaattcgacctcggggctgttgtaaacacccattagcacaatgctttcccatactgcgacctttccagcgtcctgagaagctccttaaagaagttcaaagtagatagaagcactggcgcagtgcgagcaggaacatacttcttcataatcgcgaaacgcagcgcattccctaatgtatgtccttcaccctcaaactgaaacgacgctgctgtgtccgtggctccgggtaactaatttatccgcattagaatagtcttgatacggcaccgtcgttcattccacagctgatagggcagaacagtcataaagaaaatatctggagtacatacaacgatgatccgcttttgctcaagcaatgtctcgtctatgtggtcttggttctgcgcttgagcatccagcattgactggtcgttgtcctgagagtgtacggaggcaggcatcttcaattatctattcgctgcgctttactccgacttagggtcgtggtcttgcgggggtttgtatagagaagatcggcgggtgggtgaggagtcggaacggggatacgttttcgtgatgcagcgtcaaaattggtttgctttcattaacgatcgcttgcgatgaatatcaaatgcgccaggaagccgacggtga

SEQ ID NO: 7648 - DNA, 205 bp, Emericella nidulans
atcatttgtagaatcatagctaggtgatacccgaacagtgatagcattggacttcccagcggcactcattatggagttctgaagaataagacaaaatcggatgacatattgcgcacaaacgtatcaacgatcacgttcagtgaccacacgaagaaaacattaaaccgtacccgctatacataaatcccgaatctcctggagaacc

SEQ ID NO: 7649 - DNA, 609 bp, Emericella nidulans
ccatccgtccctccttcaatggaacggcgttgagcggacctccaacaaacatccccttcgaaccagggcccaacaccatttttcgcgaagaagttcctccctcagctgcagcctcagggtttccgtccgcgcacggcacagaacttcgcacccacgaccccagcatcatcaaggtcggaagcatatactactcttacagcgttggcccgagcatcacaatccaccaggcttttagcctcgacggcccctggacggaagttggtgctctgctctctggcgaaagtgtcataaaaaaaggcgaccgaaaagccccctgggccgcgaacacaatctacatcaacggccggtactactgctactactccgttagcaattcggggtgtcgtgacagcgcgattggcgttgcatcaagtgcgtttcccggcccgggagagtggacagatcatgggctcattatccagtcgggcactggtgagggaagtgatgtgtttccgctgaaccagtcgaatacgattgacccgaatgtatttgtggatggtgacggcatgcgtacttgaattttggcagcttctggacgggtctttggcaggttcctcttaatcagtatca

SEQ ID NO: 7650 - DNA, 670 bp, Emericella nidulans
acccaactctctagtccggtgacccgcaagttcccgaacccagctaccggcccggatatgatatcggaatgcataatatgaacgaaagttgctcaaaccgttgttgcgaccattgtgatgatgcagagggtggctctctggcgattactactcctgggttactcagcaaaagaacagacgcgatcaggaagtacatcatcgtaaccggcagctctcgtgttgccggggatatcatagccactcctccacgccccttgaaactcgatatagcgcctgggcggtccacaatgcataaatatgtacaacgcccaatgctcgcattagccgtgaacgaggcttagctacccaagcctccaataccccggcgctgtcatccatttcccagggcacccggtgaataggcttgtgccagataacgatattttagaagggcatcacggagtcggaggaattgtggtcatatattgatggcagggactacggcgccatgtgttggcgggcgtgaggtcatagactgtggtttcaggtgtttaatgcagaatgacgagctcacgaacaacaagagcgctgaagagcttgccacgagctgtcctcattcctgtgaggcgacagcgggggaccgtgaggcttcgatctcaccgaaaaataaaggagtggttagggtgataga

SEQ ID NO: 7651 - DNA, 803 bp, Emericella nidulans
gcctctcgcgcgactcgttttatagagatcatgcttcgagctgtcttggccatccacagacagcttttcatgttcctgatgctggagtctagtcaccgtatcccacatatcccattaccacatctacgcagcaagaatgaccggcttgagaaaacagtattgctaagtagaatataggatcgctggagataagtttagaggatagaattcatgaaaagaggtatagacagactcaacaaagtgagtctagactggcccctataaagcctagcatttcccagcttgactgaggcataggctggaatcacgattggtcgactggatccactaggatgcagggaaatatccttatgtggaatagcctttagaactccaccattcacgcttcgaatttcatggtatgagacccgctcagttacgagatttcagccgcagataggagcccaaacatttaacaccatccaactgagcagcgacagcgcttccagtccaccgcggacctcgacctgttgttttgcttcgactccagctacaccccaaccctacactaatggcttcaaggctagctattccgccatggctcaccccactcaccagctggacccttctccagactctcaccagtctaacagtaacattcacaccgtccgcctcgtctctccggtatgtggccgcggcaatgaccgctatttgcgcttacatattccaaacgagcatccaaaaccacttctcaggagcgcccgcgtcaggcccgctggttgccatgtgctgggtgaacgtgctcaacgcgatcgacttgctgg

SEQ ID NO: 7652 - DNA, 761 bp, Emericella nidulans
gacgcatcgcattcagacaaataatcacaggtgctaacgcagtcagcgccgcagtagtcatctcctactccacagtaaccgaatttgttgcagcatccggtagcgcatggattcagtgcgctgcaatcctgggcgccgacttgagcggatagcaagaataaggatataactagcaaaagcaaagaaggtaaaggtagcagaggtactatacctcgccagtacgcgacccccatttctctggaggaaatagtctcacaaagaggggtgcttggagaggaacttttatggcaatgctgggggggcttgctctacctacttaaacggatcacacgtaggcaaggcaatgatctggtcggctatgcttctgagtgggaattatggtctcatcactataaacaaacattctaccactagcctactaactcagactaaagcgatgctactgcaaggacttcatagcttcacaactgactagtccaaaatgccccctgagcttgggcataccatgcacaggggtttattcggaataaccagacacgggcagtatgacccagacgctattggagattcggaagcgcaccgttcttaggggtggtgtggtagagcttggatctcacaggaacaggacaagggttccatatttgagtgtctttgtgctatagtatgtcacgcaccaatgcgaattgtgcctgataactgaatctgaagggtagacggcagaaattctgatagacagtggtaaaatccaagcgacgctcatc

SEQ ID NO: 7653 - DNA, 499 bp, Emericella nidulans
agactaatcggcgatcattggatcgactccaatatcgaatgccactctccttgctagtcactcttcaaagtggatggaccttgttggattgataagccaacgacgctaggcagcgtgacagcgagcgtatagctaatcaatccaagttgagcctttaacctgaatggcccagcagccaatgaatccccaatcacagccaccatagccctaaggacaatctaatgcgggctagtcagttcctgcagcgtcttagacattcgacgagcatgcgctccatggggactgctgtgccccagaagcatcatcagctatatccgtctcttgcaaaatccaccgcttcggtgaaccgtctcccactcccggccactcagatgtatcagtagcacaatctctttatattgggataggctccgtttggctgaatttatcgtttcattatactgtccaacgatggatgttgttccgctatcagccaattaatggcgagacctttgcccca

SEQ ID NO: 7654 - DNA, 913 bp, Emericella nidulans
gcgatacgaaaactggcgggatcattgtgttctgttcatcaattctaaataccaccgtatgctaattttgcatcttatgatagggaagtatggagtcaactctgtgatgctcgtgctccggttcacgggctttgctcctgcctaagggggagagtcgatcgatgctgtgagacaaagagaaacacttaaagaaacttcgtgatagtggaaaggccacttgagtatatatccagatcgaagggccccggttttctgatagaatcttactgaggtgcttaatccgaaaatccttccaagtcctagttcccagtggggtcgacactaactgatcgcagcccggtcctaccgcaatctcgcccccttccacgcgaacttgccccagggccccagaagctaccggccgcttggtcttcgtcatacaagatcatttatttaaaggttgaaacggcgacgctcaaaccacgcccgaactcaatcggcgactagcttagtagctggtcctggtcctggcgaacaacggagccgccacataacatctctgtcatccgccatctcatttccttgggaactttcttcctaacagcaagcgtagctgcaaacagccttgaaagtctctagccgctctaatttggaccgaaatcgatctcgtctgaaggctgcagcagtctgctaataatgcctcctcgatcgactcgggccgctcccgcaacagcagctgcgccagctccagaacaggcacccaaaaggcgcgcttccgcaagagttgctggagcctcagctgcagcgctaaagaaacaaaagtacgactctaccgaccctaaaggatctcctaaatcgaccgccaagacaagcaaatattttaagacagacgataccgaaaagtcaaagcgcaaggtcaaaaagcgtgcggcaa

SEQ ID NO: 7655 - DNA, 1188 bp, Emericella nidulans
acaatttcatgcttccgccacgccttctcgctatccaagcagcaggtccgagatgcccttccttcggtgacggtctcgttatcaagtaaaccctctacacccgtgagccctctctatcccgctgtctcatctaacactgcgattactgtgttcagtaaactcccaccagatttctcaagcaactgatacaaaacacgccggggaactcgttctgcaaccgcaaccctcctccgacccctgcgacccgctcaattggccaacctggcggaaaacggtcgtgctagcatgcatgctccgtctttgcctttgtcggaaacttcacatttagtaggtattgccagcgtgtttcctctgtatgcgacaccgcttgcattcaaccggcccgtgtccattgggaggctgagcaccttggttgcggttaagcgtaccaatttcggagactacccatgcatcaagggtgcttgctggtgctgacaggtacaggtaaatgttctcatgatgggcgcgtcgaatatatggtgggtgccgctagcgaatacctttgggcggagacccatcagcctgctcagcatattgatcctgctcttttgctctctgtgggcgggtctggcagacacttttgacagtttgcttgcggcgagattctttatgggggttggtgttgggccggcagatacgagtatgcattttctatttgcatttcattctagtaacggtgaaggttgtgctgatggtggtagttgcgccgaatgtgattggagagatatactttacgcatcagagggggaaggctatggtataacccggccctggttaattgcgagggtgctggatggctgaccttgacctgatcatctagggcttctacactgtctttctatgcctgggctcgctggtcggagggatctcgggcggatacatcgcaggtcacgggctggaatggctgcactgggtgaatgtcatcatctgcgcggtcctcttcgtcgcttgtctcatctttgtccctgaaacgctctacaaacgcgacgagcctcctccagttatgagttcagagaagtcaacgtcgaaagagatcgaaagcgcacaggtggaagaggtggtttacccccctgcgcaacaatatcaggaattcctttcgtccgctcattgaaactatacacctaccacggcaacctcggcgacttagaa

SEQ ID NO: 7656 - DNA, 709 bp, Emericella nidulans
tgggagacaagtggaccgagcttgaagaaccgctggcagaacggagatcaggctggtttggggcctggaatacagagaagaccgcgtttcagcagaagttgacggatatgcgattcggcggcttgaaggaaggggtataaaaatagtccaatctttatacgcatgaagcgagccagtgacagggtaagcctaaggtcaagtagattggggagctagcgataaacttggggaagccattttcactgagattatttagaagcctatcactatggatattcttacagtacattcacttcccaaaaaaaaaaaagaaaaagaaaaaaggttaaaaggagagactaagagctacgaggaaactagggttgcaaattgcgcaaagtccggattcgctactagccgttccatctgctccgctaataatccgacgacaatttcaaccgacccatcattcgcgcgtggttgaaagctgcatatgcctgcgaattggccacggggcatccgaaaggtatcaatgcgcccggtagaccccactgctgggccaaaatccagctggtagaaggggagcccgacccaggaggtagtgacgaggtcttcagcaaaccaacttggaaaggcattggccaagggctggcggacatcaggaatccccgcggcgagggtgacggcctccttaagccgtgatggatcgcggttggcaatagtttcttgg

SEQ ID NO: 7657 - DNA, 557 bp, Emericella nidulans
cggacggggtcagcagtacattcaaaataagtaaaataaggtataaaaataaaatgaaaataaaataaaagtccttgtgctgtatcttaatttcttcagatttgagtcaaatgttggatatgtgtggttctattgtcgcgagcagccactccctcctacagctcccgatcaggataaccagaactcggtgcggatattgtctcggcttctgcgccggcatcagcgcggtcatctgcaaacccactgacaatacgcttgacctggttcacaatggcctccatctgcacccctggtcgccccagtcagcacgacggcatacggaacgcggaagaattcaacataccacccttctgatcggcatcgtctccatacatcccgatccagtcccagcaggaaagggtattcgcttccaaatcgccgccccagatggtgtgcgacgatttatcgacggccgtctgcgggtagaggacgatgatgtcgttcgtatctaatcagatcatgcgatcagtcaatccatgccttaagagggtagtggttctccgcgcaactgggaagag

SEQ ID NO: 7658 - DNA, 718 bp, Emericella nidulans
catcttgaatctggtctgggaaattactccaactgtactagctatcagtgaaagttggaagtagctgtgacggcgcgagagactctgccaaagtccatgactcgactgaatctgaatccaagcgtcatatgccttaggattcatctagtcctctcttccgaactagacttcaggacccgacgtcagaatcttcgaagaaagaagagtcgcctggagatcataatgtcaccagcagcagcccgtcaaacttcagatgtgtgggaagtggcgccaaacaaggcccggttccatgatcgctcaacggtgagcagataattgtccgcacagataaggcaagagcaacagcgcttcgacagatatggcgaaagcctagaatgtgatcataccccgtaattgtcctgcgatgatcagcctaccttaagaggagatgatgcaacggcggaatccactgttagctttacaaagctcgacgctcgagaacatctagaagccaatttcctccggccaaagtctctagactaacgagctccgagtgtccgagtgtccgaacgaaccatgacgacgctacaaatcagacctgaaatggtgatggaggagacaccaacagttcccgggcaacaaatgctcttgagtctacgcgaatctcagacgcacagtgcatccctgctcctggaacaactcaaatggttctgcttccgaatgccctatctccatttgt

SEQ ID NO: 7659 - DNA, 544 bp, Emericella nidulans
tccggctaagtatgactcccttttcttccacaaaccatgagtctccaaagaaaggggctgtggttcgaaatgtaatacatatgtcactcaagcaattcgccgtctcagctctcttactccagctcttacttgactgctcaacggctggaactcttcatccaggatcctgaggatcctggagatcctacattattgacgactaccactactgcagcagaatcccctggctattcactggtcgtggtcggtctattaaccgcaactgacaagactccacatcttcatactcggagtaaaccttgcgcccctgcaagccgtcccatacagtctcggctgcatcagactgtcagaatccagtttttcattttacacttttaccacacaaagtcacgggctcacatactctccgagactgtagtctgacagacacaatcgcgattctggtgattctggtacctactttagcgctcttcgaactggaaaaaaaataaataatataataaaaaagaaaagagagaaaaaagcaagaaaagagaaaaaatgt

SEQ ID NO: 7660 - DNA, 1310 bp, Emericella nidulans
atgagcttcaatttggtggactgccggtggtatttttgccctcaacgtatgtcagattcagatagcgtgtctcgagtgggcaatgagcgtacgtcttgaggagctcctcgatcctctgccggttgaagttgctaactccaattgaccgcactttgcctttagctacaagtgcctccatcgcagcccatgtatctttaattggtacgtctatcacatcgattaaaccggttttctcatcgacaggctgaatggttgtggttgagtagcggaagccactggccaatggatctatatgaccagcaggtattagcgacgtttacactctgtcacaacagaacttgaatgacttacaaggtaaagatcaagataatccgtctggagatcgctaagggatcgatctactgcagcttcgacgttctcagggtcatgatgggtattccataatttgctcgtgagcttagcacgtcagttgaacacacaaacctcttccaaagtcaacgtagagctcacgaatatctctccacgcggcacaccagatgccttaattccgttcccaacatcgcgctcattaccgtagaccgcagcagcgtcgatatgacgatagccaatattcagcgccgcagttaccggttcctcaacctcgctcggtttagattgctatacacaataagacattcataagcttggttcctgaaagatgaagtagttgttcgtacccatgttcccagtccaacggcgggtatctcatagcctgtgttgagcttgaatgtgcgtttcagagccatgttgcgttgttaagtgcgtggacttggtaatattttgaccccttgagaattcccatgcaactatcttgtcactgtagtcgtttaagtacgctgcgaagtgagccgtcggatttgaacccgggcttcgtcttctccgggactcgatttccttctccactgctctcatcagcatattattgagcctgagttagctcaggagcttgctcttttgcacctggtagcccctcatttgctggcatttcggtcactattatctcggcgattgtccggaaatagcttgcggcgttgtttatccgaatgcttttccgaagtaaatgcgggggtggagtggagcttgtggggtgatgctgatgatggtcgtgagcacggcacggagttggtccggtcaagccgtagctttccccggcctttaagcaatcatctaagggagcaagccatcacagagattacgtgttcgaaagcctgtcgaaacttaccgcggaagacctttaagccggtagacgaacactaacagcaagatggccc

SEQ ID NO: 7661 - DNA, 1072 bp, Emericella nidulans
gggaagaagccgtcattgcaggattgattcatacgacatggagacgtgaagctattgttatcgggaaaaacgcggcgcctctagtggtcacgtttctgcttcagtattctttaactgtagctagcatctttacccttggccatttgggtaagacggagctgggtgcggttagtcttgcgagtatgagcgcgagcataacaggctatgcaggtgtgtaccggaaatgttcttcctctgctgtcgagatgctaagatatatgctggcagtctatcaaggtctggcgacaagtttggacacgctttgtgctcaagcatatggctctgggaagaaaaagctcgtggggctgcagatgcagagaatgattttttttttatgggtcatcaccatcccaattgctttgctctggttctttgccgataagatcctactaaaaattgtgccggaaagggaggtcgctgagctggcgggtctgtatctgaaagtggttattctgggagctccgggatacgctgctttcgagagtggcaaacgatatgttcaagcgcaggggattttttcagcgtctctatatgtactgctgatatgcgccccgctcaatgcatttatgaactggctcttcgtctgggtacgttccaagaagttgtgtgagactcaactaacactcggttacagcaattcggctggggatttattggcgctcctattgccgtagcaatcacggacaacctcatgcccctattcctcttcctttatgtttatctcgtcgacggctcagaatgctggaacggcttaacgagacgcgccctcaacaactggggcccaatgattcgacttgccctccctggtctcctgatggtcgaggccgaatgcctcgccttcgaagtcttaactctaggctcatcctacctcggcaccacccctctagctgctcagtctgtcttagccactgtatcttcgatcaccttccagattcccttcacgctttccatatcctccagcatccgcgtcgctaacctaattggcgccacctcgtcgacgcggccaaaacaacagccaaggtcgcaatgtgtg

SEQ ID NO: 7662 - DNA, 1352 bp, Emericella nidulans
acaacgctcgaccggcccccctcgatctcctttccatgaaagatttgttgcgttgctggcggcccaactccgttgtctcaacatagtcaccgccagtgtcatctcgccatccttcgactacaggaacattgctcttcctgacgcccaactcgattcgattttccagcgccttttctgccaagtcttcctttggggtagcctctgaatacctgtgctccacctatagtcgggccctgccctactccaattcaattctccactttccacattttcagttaggctgacgctcgttggatctttcctttttaagaccatggcttctatctctcgcaagcccataggtagttagacagtggcccagagcctcactataaacatttagtagaagcactggcagcaaatatcggtccgcaccatgggaatctaggcgaccatcctgctaccatgtctatcccccaccaatctactccagacgtgacaatagacgacgtcgtctctttgacacaaactttggtccaaatcgactcttcgactcccgggtctgggtcaaatactgccggagagaccaccattgccacatatattgcagcatggcttcggcaccgtggcattgagtaccactggatcgaagagactcccggccgtccatccgttgttgccgtcgtccgcgggtcagggggcggaaagaccctcatgttcaatggccatactgatacggtcacccttcaggctacgacgcgaccccttaagcgggcgtatcgccgacggaagactctacggtcgcggatcagcagatatgaagagcggccttgcagcagcaatgacagcaatagcgggggcgaagaaacttcatcttcgaggtgacgtgattcttgcggctgtcgcggatgaggaatgcgatagcatcggtacagagcaagtccttgcggctgggtggcgggcagatgcagcagtcatcgcagagccgacggagtttgccatcatcaatgcgcacaagggctatgtgttgtttgaggtggatattcacggcattgccgctcatgggtcacggccagatcttggagtcgatgccatttgcaaggccggatacttcctcgtcgagctagatggctacgctcagagcctgcagcagcgaggtcccagcagggtcaacacagatgcgcccaatgttcatgcaggcatcattcgcggcggtgcagagattaactcgtatactggcaagtgcaccatctttattgagcgccgcaccattgcttgcgagacacccgactctgtgcgcaaggagcttgtgggcatcctggagacacttggattcacttgtcccatttcagttttgatctccgcatgacttc

SEQ ID NO: 7663 - DNA, 682 bp, Emericella nidulans
tcacatccagtcaagatgagtgtcgatgagcaccaagtttggctttagcgcagccctagaagttagatggagaagatcatgtcagcagagccgggcttatctgacgcaatatgccagcgtatgtcgcgggtgggtggattcgagctgtcaaacaaacggccctgataagactgataccgtctatcagggctatctgcctcccgcggaagtggtccaggcgttgagatcgtcgtcctcctgggcagccaataagagcgtccacgtttatcttttaccatgtcagcccttacatcctcatccccttggcttcgtctatctataagatgattcggcctcgcaggctctgctacgccgcggagttcttctgcccgttccacagagcttatcaggttgatcaagctcttgcatagattgaatcttccttcctgcttcgacaatgcatcaaactacccggcctggaccacgttcttcctgtgcacatggacgccatgaaatggcaatcggtctgcagcagcgaacgcagcttcgcgaaagattgaccgttgtagtgacaactatttctcggcagagatcggacaactgcaatatatccttcttccgcgggctccgacttcttttcacaactccagcttgcttggcgagtgaatatttctaggacatggaactgaagatgaactctgac

SEQ ID NO: 7664 - DNA, 973 bp, Emericella nidulans
agcggttggcgccgattcaactcatctgtgcacatttctaacattcttcatgccttgttccagggtgatgtcggggtgatggtgcttgtcaagggttgatagacagtagtactgagcatagccatgggcggcatatggaacactggccaatgacgcgagataatcaatccagtaaaggtgtggtttctgagagatagggtctacaccacccaaaaggagattgactgtgtaggggttccgcgaacgtaggcttcgtgccagctctcctcgaacaaagttcgcgacggcattcggggacagctcggtatcattccgcattgtgtatagctgaacattagcttgaacatattcggcaaattgtactgtaatgggggcctcgattagttttctggtgttgaagctcaaaaatatataagcgcgaacgaaccggtgtctcccgcctctccggagaaagcgacaagagtgtgctcgttcagttgccttgtcttatcatcttcagctttgagaatagtcgggcctctcatagcagcctttgacgctgctagaatgacaaagtctctgcctgtgatgccaagtagaacctccctatgacagtgtcggtcagcatattagtactagctatgtggcagaggtgggcacatacatggtaacggtgcaggtctggaacgcttttgaagatgggtactgtgctggagtaagggtaatgggtttaaggtggaggaagacgaagaaacaagatacaagaagtcgtttactgtctatcactggccgcgcggagcttgactgcctggacctagctgttgcttcctgcagcctcaggcggagagctactgcgctgactcagcgagcgcttgttaccacaccgccttcactggccatgggcagaaaaaaaagttcgaatatgaccgtaaattcatgaccagcatgaccgtgttaacactgcttaattgagatattccaacgacaccttctt

SEQ ID NO: 7665 - DNA, 760 bp, Emericella nidulans
tgtctgccatgtaaatatcagagcgcatcgtccttgcatccgaatggtggagaatcgcaaaagctttgttacggtggccagccgcctggctgatcgagttcgatatccaaagactacccagggtgcgaggtactattgcatcatcccactctttgccccctaggagtggcgcgtatacagtctggaaggcggcatccagcgtaatggggtgaatcagagtctgatatggagaatcggctggaattgcagtgtcaggaatgaatagcgagctgtcagcccgctgattgtttccagcctgctcgatatcggtgataatctgaaatgcgggcccgtgatagatacccctctctctcatcatgtcatataaatcgctggggccgaaacgtcgagtgtagccagaaagatcagcgggacgagacttggtaatggttttatcaggagcatcctccggctccattgtaatgaggccgcgtgcgtgagttgaccattggttgtcagcagagaccgaagagacctcaaagcgtttccagcctctattgcccatctctttgtcgctgacctcggataggctggtttggatctcaacgccgtcgtcattgtctggtataactagaccttgcagcaaatcgacatcgcgcaaccggtaaccagcagcagcctgcggagctttagattgaagttctggcagcattttgattgcttcaatcgccaaacatataaagcctgctccggggaataaaatgtcttcttggacaacatg

SEQ ID NO: 7666 - DNA, 138 bp, Emericella nidulans
cacatccggccgcagcttgcacttggaacgcggccatggctgagccagcgtacgactgcgcacagcgtgcaagccgtctgcagtctcctccccgagaacacactgaacactgcctgaccggcacgctgttctccacta

SEQ ID NO: 7667 - DNA, 569 bp, Emericella nidulans
atacttgttcagagattccattagatcttcaattgcttgcgctgtggtggccgaattgggcgtttcctggacgctctgtaggatacccaccagccctgactctagggtcttcaggtgtgcaataagacggtccatcgcggcacgtatttgcccttgtctggccaagagtatcacagcggcatccaccgctccgcactcctccatggacgggagtaactcttcaagcttaatgtccccttctcggagggtatccacaaagtcggctaccttcgcaggatcatgcttgcagagtagctgaacgtaacgttcgaccatccaattctcaatagaccgggaattgcggttatccaacgcaggttgcactttatgctcaacaatgacacctagatattggtattggtcatagtcattgtcttgaagagctttaataaacgtcccatgtgtctctggagcgaaatcacgcatcgtctgcgcggccatgcgaacatctatggccgcaatatcatgggcacgggcttcagtcacaccgacaacagcccgtctttgcttcttactcaagttagacccag

SEQ ID NO: 7668 - DNA, 626 bp, Emericella nidulans
  unsure (1)..(626): unsure at all n locations
taaacgactcactatagggagacccaagctagnatctgtttgctcctatcgggttggagaagccgtttatttgnaaagttagaatggaatgactaagaaaggcagcccagggggccctttttataacttggccgccgtcgactttcactttagtatgatccattctgtgctgtaccttgttcttttttttttttttatttttactcacatctattatttcaacctttttcttctttttttttatgcttcttttcttaccttgtattttatatctttataataataatgtctatttaatttttaatcttatttatcttaaccaatattcttttctataatcacttctgtctaatattactaaattttacatatgtttttttcacctctaactatcttatctcctattgtattaaattctatcacttattataattatcatctcttgtacctttttatatatctttttactaacttttaacttattctcttctgtttactcaatactaatatatctcatgttttatatttgtccttgcatactgcttctcctttttcatttactcttcctctttctttacatctgctatttttcttcgactataaatactgtcatttacctctataat

SEQ ID NO: 7669 - DNA, 521 bp, Emericella nidulans
tacgagtttaggtgcactatagaatactaggatctgtcaaccccggtatcggctgaatcttgcgttctcccagaataacatacgcatatttgcacgctgaccaccacatgtgctgtcccccctatggcgcacatattgaacataaccggagtcgctcactactgaccttgttgactcgtacacaccaactgtctgtttgccactaggccatctatgaagatcgatccgtactgctcacctgatcgtgatgaccggatagtccacaccacgacccatgattgtagactagccaaggactgacaccattggctcgttgcttgctgattcatcgacgtatacagacgcctcgtgccactgcaggagacagacaggcgctggaaggccgacgcgctaggatgggttgcggtccagctggactcagcgagagccagagcttctaccttctcgacttatcgatcgtctatgcatatggttgctgaccacctcatatgccatacccggggaggtgctcgctgagttgc

SEQ ID NO: 7670 - DNA, 2091 bp, Emericella nidulans
ttccgggtggtaaatgccaaattccgccgatgattttggtatgtcaacccgcaaccagaccggtctcaaaaaccgacgaaaaccatctgagcaggagtaagccgagttggactttataattcacacgggaactgatggtaaaatggcgccaaaaagcggcacataaaaacgtgcaaaaccaggcgctcagagaaagatgtacgggccaaaagcagctgctcaccatccttatgtagtgggtatatgcttggcttgtgcaacatcatgaagctgctcaacgttgtagcgtactaaggaagcgcatttttgggtagccaataagtcgcccagaaccctgtgctgccatcctgcgggcaccatcttctcctcattttccttcttggggagccgctcttcacagtctggggtagggtggacaacggtcactggtggaagcggacgatcactggctctaaacctttaccccagacctcctgaggcacggcaactgtctagtctggggaagatccacggtaagaatccaccactcacgcacgatcacaccctggaaactccaagcatgtgtgttgccggttttctagcccaaaaggctttgcagggcattcctcatatttgcagggtccattcactgactgaggctgttgacagtcgagtttcattagtgcggcaggaagcaagtgatggacattccggagtgctgctctctatgctccctcccagacctgttgtcttccatcacggcaatactagagctgtcgaacaatggatcgtcatcgcgggtaattaacgccaatggaatgagattcggagaatcgcaagtggctacgccaagtcggataattcgtctctggagcataaaatgtcgggagctggccgaggtcagtgggttgaaaaggacgcttgaaacaaacaggaccaacaaggctacgccagatcaggtgacgagtaactaacgcatatttctattccaatggccaaactataactcggcgcttgacccgaactctagacatatttctcgaaatattcatctaccatgatacatacatgcgtaacttgtccaaagaggtaagaatggccacttttcatgggccaacgtctatatctaatcagagacgcatttggcactgaaaccaatacttcctcaacccaactttatgccttcttcggctttaatatggctccgctctccttcacaggagccgtcacggtagtgttatacaagcgacgctctactaccttcagaatttcattgatgacgctgtcgcgataataattaatatgtgttgccaccgaaggagcaagaaagagctttacatcacgggggcactgtttgccaaaacgggtttttcattttggccaatccaaagaaagggtttgcaaaaatccttttcaaaaggggtatttttataatcccaaaacgaaaaatctttttcagaaataggggtgctataaccatacttttattttatttttataaccccaaagtgggggagttatttttactagaaaaggagggggtatttattttcattttcttctttaaaacaaaaaattttattaatatccctctgttcttgtgtttttccaccgctcttatattttattttataaatcattttccacgcatcttttttttggtgaaaatcgggggaaattcctttttgggggtagagggaatttttttccctttttttgcgtgatccccccctcaacaaaaacttgtgtttgggctttaccattttcaaaaaaaaaaatccgggggctcttttggtgtgtagaagacacctctcttttttcctaattcctgtggtggccctctttggctccttccttttaattataggctcccccccccaagatggtttttcttttttggggggttgttttttatggctgttataattatcataaatagtttctaccccttgctcatttacatataacttcagaaattatttgctttcatgagtttaagaaaatacccccccgttcgcgaagagtctaaattcggtttttaaatctctttatcagggaagtaaatttttcacattttcggattgtctaagtatatattaatttattattact

SEQ ID NO: 7671 - DNA, 827 bp, Emericella nidulans
ttctggcagcagtcatggaagatccccgtacggtgaccgacacaactcggagggttctagatcgcatcgaagcagcagacccgatctgtctattctcggattaggcgggactcagatcgtgatgttgcgacgatacttgaacatcggcgagaaaccaaacaggagcgagaagctcgtcgtctggagaaggagcgtgcggctcggataaaagagcgcgaaaggagcatgagggaggaacatgttgatggcggttacttggtaacgcaaggagtctatacagggacggaagatttcaataaggctatagtccgccagttgatggtaacccttatgtgtgcctttgggaaggttccgatgatactgatgtctttgcctttattagattgaacgccgacttgcgccgttctggaggggtctgaatgacttctcggattcatggactgagcaccaacttatggcggcagcgcgcggcttgccgattccaccgcctgatgaaatccctcctgaactggaatataggaatccgccaaaggttgtcgaggaggccaaagaagcatcaaatatacagtctgttcagcatttgatggttccaataacgtctcgatccgcatctaatggttccgatgtatctcattcatcccaacccgcccattcgctaccttctccctcatcgccgattgcatccggcacatcgagctcgcctctttttcgatctcgcgcgaagacactggcttctttaacaacctccaggcataactcccaggttgactcgacccctcaagagatacagctgcctcgggatcctttcgtcaatggccagcccattg

SEQ ID NO: 7672 - DNA, 824 bp, Emericella nidulans
tgcaacacgaacacgatgccgtctgtcggaacccgggcttcgtccgtcctgcagatcgccacgatgagcgagagcggactgcgccggtgggtattaaaagccggtcttcccaggatttcttgcctcccacccgctggtctcatgcggggaggtcagagagcgcagtacgagaatcagtacgatagtacaagagtttgtacaagcgtcagtacgagggttagtacgagatttagtacgagagtcggtacgagagtcagtgcgataggacaaaagtgagtacgagagcacaagagtctacgcgagccagtatgagtgttctcctggttttctcgctcgtgacttttgcactgcagggtctatgcagcctatctcttcatgagagcgactcgcctcacgtcctccaacttggactgcggcgaaaccagcacaatgaccccgtgggacgagaccggcggcggttcaagcggcagactggtacggtggccgtcgatctccacggcgattcggtttgttcactctctgctcgacgcaggatccgtctaacgtgctgatcggtagatgggcggcgacatctattccacgaacctgaccatcggcgatcccccgcaagctgttgaggtttctgtcgacacgggcagcgccgatctctgggtcgtatacagcgagaaccccgtctgcaatgttcgaggggcgccggtgtgacgactcggggacgtacgatcctactgcttcgcccttgttgacgggctatccgacgagtccgcgatcgagtacggcgatggttcggggcggagggttctatgggatcgacaccttgacgtcgc

SEQ ID NO: 7673 - DNA, 537 bp, Emericella nidulans
gcttcctagaccttgttagctagtgtctattcgggcctccttgcctgcattgaaaattcaactttaaagacgacattcagattcgaccggttattctctatctaccttccgacgaggtggtagcagaatcagatgaacagaccttagcaaggatctctaccaaaaccgcggctagtacgtagacttgaagtggagatgctgacactatatctacgccacctatccaaagtcaaagcatcgcgtgatataaatggaccaaagaccatggagtattccgtttacaattgaattgataccgatattcttgtcaagaagaggagagtatatactcagagtagagaaaacgacaatagttatggtgatgaatgcattgaatagcccaggacttagcctcgactaggtgggtagctagcctggccagagatcccgcgtcgcgctacgccaaccagcgccacactatggaatgaagccaaatcacacggcccggcttcacatcctgcggggcagcagtggatccaccagttgcaagaatgcagt

SEQ ID NO: 7674 - DNA, 800 bp, Emericella nidulans
gatacttttgaccctaatcaggacgatggtgaggacgtcaagaaagacgaagaggatgtggacgatgtgaatgtcaagctggaagaagaaccaatctccgtggctgatgagctactccgactggaaaccctggatttagtctccatcctcaaacgcggcaggaagctgctgggcagcgggacaaagaccaggaactttccttggcagctatggactctgcagctcgattacaacaccagaaaaaattgctaacgcggcgactgggtctggcgggagaatgttccgacgacgacttgcttgacgatagtgagctgttacccaagacgccaggtttgaaggaggccgagccaagactcttctctccgaaggagaagagtcacctcaattccagcgcccatccattaccctcacccagtgagcctgccaatggcgaggagtctgggcttagcagaaggcagctgaatcaactgaagcgaaaaagcaaacacatcgcgagattgggcgcgaacaaagttcgagtagtcgacctatcgtctcggcgccagtcagagaacgtcactaatccttcaataagcactccccatcccgtgaaaacagagtatggtgacgggcagaatggagatgcaaaaccggattatttctctcttgagaggccggcggatcacgatgatgaatctaaaatagtctccgaattcaagggaacaacacttccagacaagtccattattcagccagatcttgcagtagacactgcaaccattgcatggccgtatgaacgcatgtgcgaattcctcaaggtg

SEQ ID NO: 7675 - DNA, 410 bp, Emericella nidulans
gcggtcagcatccaccacataccccatcaagtggcgatgaccagcaccatcagccgggtcacagcccctcataccgccgtccctcaattctgcgcaagggcatggttgctgccaacgccagagctcgcggcgtgtctatttcgtccagaaagcatgtggatttctcgctcggtatgcgagacgtggccagcaacgacattatgggcgacgtttttgaagcacggagtcctgcagccgattctgcagtgcgtcaggtgattgccgaacgccggatccaggaggaagaggcggagagacagagcgtagagtcatctcgccaacgaaactcaggctctcgcaccaacctcactgtgccgactatctacaacgaagcccggcactcgattgattccagggcgcaacagtctttc

SEQ ID NO: 7676 - DNA, 973 bp, Emericella nidulans
  unsure (1)..(973): unsure at all n locations
ctgccacattgcgtgctgcgcgagttcaaaggcgagactcattttacggtagcgggccatatagatgagattttgtcagaccttgtccctgaggaattggtccaaaagcatttggcgtaatgcccatcaacttgtttcgagttcatttattgtcattgagcgtctctactcttgtaccaatatagccttctcacatcttggaacataagacatattctgcagaagcccacgatctatacaccgtagaagagtagataccctgcatacgtgcctacatttttcagactgtgtatgaaaaaaatatccatattcattctgcgtcaatatccatacaggactattgtcggcggcctcgccaataaagaacaaacatctcgaattccagcaaaaaatccccaaggtctggaaaccaggctcaccccagatgcagaaacttgaaggtgagctacttaaagcttcccaacaagaaagtcagcagcatccggaacatcatcaatgtaactaagatgagccgcagtaatgacgagcgtgccctcgcaaaccagatcaccaaatgcacaaatgatctttgtcttatcagtgggaaagttcggaatacgttcggcatcctgtttatggcgcgtgtcgccaagagaacaacccccttgatctggccctgaacaagacttcagagcgtnnnattggaccatgcatgactgccggtcctggctgtttcaccccgacgatctggtgttggggactggacgcgcgagtcaaaagggattgctttgtatagcatttggtcgttcttgggaaaagttgaagcagtcgctattcccgccaacactggttggatggcggttttagtttggaataagaggggccccggttctcaaaatatagaggcttttggtgccctttaaaccccccccccccttaacccccctaaaatggtcttgggccccgcacttctctctctggaaggaaaaaaaaa

SEQ ID NO: 7677 - DNA, 844 bp, Emericella nidulans
tccccgctaacgagatgagccgcgagctcatgcgactgctgaacaccgtgggaggtcaaggttgggtcggagggattccctgtgggtgtgggaaattgagagctgtatgtgccggttctgtagtcgattgtccaattcaatcggtgctggagttgattagtggggtgccggcggtgatttgggtgagagacctacgccgtgccgagtcaagtagattgtgtcaaggggcatgatatagtcgagaggttatttattcgtatctaggtagataggttcgacaacgggtaagaacatggaaggtaagttggggttatagggtggaagttgcggggaatatcgatagcggccctgaacctcggcccgttatggtcactaatcatcaatggctaacctattacatgtactatgttacgcctactactacgaagaaaaccaggttcaacatggtcatagattatcgaacgtaactactatctagcgtccagtacagggtatcatcccccaactcctcgccgcatatatagccgttctcagtgaacgtccatgtccgatccataatttcagcttttaatagatcttttcatgtcgagtctagtagaagaagccgaggagctagccagcaacgtgcttgcgacgagccacctcgtggtccatgataccagaagaggtggtcaggacgacgaaaccaaactgacgagaaggaaggagctggacggcccagttctcaaggtcaccgagctgaacagggtaacgggggttgatgacaccgcacttgttgagacggccgttgagctggataacgatcttgccagagcggtggtcgtcaaccgcctcaaattcaccg

SEQ ID NO: 7678 - DNA, 109 bp, Emericella nidulans
tcatcactttgggctggttagcgtatacatttttgtggcactgcgagcagcaattgggccacctaagtgtccagttttcctccgtcggttaggtgtgtgagttaggtca

SEQ ID NO: 7679 - DNA, 1123 bp, Emericella nidulans
ctttgctcccactacgcccgcaacggagctgtaaccttgccaaggacgttataagcgccagtgacggctcgcttgccggttgtaaatgtttgagcgatgtgctcggctgtttccaggcgtgggtaaataaggggtattgagaccatccacaggcaatgctgaactgtgggagggagcatggcgatcttgggaaagatgccttggtatgtcggtccagcgagtacctggtgttggttgcgctctgaccgacagtcgagaccaacgaggactacggctggcccgaggtatttgacgaaatgccagccggtacctgtgatggtaaataaatcatggtcggtgctaacattacggaggatatcgagtgtcgtgtggtgctggaagagtaagtacatttcaatcccaatgcggccgatgttcttaaacatattggaaaattgcatatgctcagggtatgagccgaagccgtcgaaactagccatgtcagcttgtctaacaaagaagatcagttgcgtagagagctcacatatcatggtcgtcaatttggcaaacatatgggatctgagcaaatgactccctcaagtatggctggtcaaaatgactcgtgtaatagtggaagtacccgtgagaaacgtcttgctcatgggcggccgtccaaggcgcagtcttcctagcttcttttcctcggattaagagccattgcttcagcgatggaatctctttccacatgcggtcggcatagatctggcctcctaaacacaactgagcgtggaacccgccaatctcagtgtgtttctgcatgatatccttccacatgaggcccactccccccagtcgtgagcggtcgttctcattgacgttgagtgagaagtcattgcctgaagtggcaataaagcgccagctcgtctcgtgttgaccggcaactaagaactcgtagcgtgtgcagccaaggtgcgacgtgatggcgtatgtccatttggcgggacctgactcttccatctttaaatcgatctcatatttgtagaatgtccaccgttggtgcgtagagatagccatcgccttcaactggcgtggatttggagaaagatcgatactctgatggatatggatagtgggtggctgaccg

SEQ ID NO: 7680 - DNA, 110 bp, Emericella nidulans
gaagggaatatcgtcgctctgggcgtctgtctgtgagcacaaggagaatctctactgtagtacttgagatggatatgcacgcaggatgtcaagttcaagtaggagacttc

SEQ ID NO: 7681 - DNA, 784 bp, Emericella nidulans
gcgggcaaagtctcagcatctcgtcagtgagaggattagtaactcattatgaaagcttgggctgaagggcacattgaggaaaacggccgggaaaatcccacccaggacgcagaggaccttaacatctgcctccatagagtatcttcattccagatacaagactcaggagggactcggaggatgcagggccgccaagccgccgagacgagctaggtctctccccgcatttcaccccgcaatttcacgccagcaggttatgtatctggaacgagtcgtgctagacgagattatggttgattgtggagagctcgctccatgtgatcatccccacgagaaagacatatcaacaggacggtaattgtgggacctcactctgccgacctggctcgagattagggcactttggccaaccagtcagcgccactccgaggcatctgcactcccagagcgtaaggccgggaggtataactaccgagcctctccttgctaagctctctagattgccgcgttcacttcccagcgaagtgcctagagtcatggcgctgggctggtgaaggtttcagcgagttgcgtcacgacttcgcagaaaacagcctattgacaccaacataaacgggatccgatcgaaagccagatcgcattctacctgatcgacggcatcttgatcttgggccagggtccccgaatcgaggagcgggaatctgggagcgggatctcagtcggcacgtagactctccagccggcagtagcgggctcgcacctcccggccgccaagcgtccagaa

SEQ ID NO: 7682 - DNA, 487 bp, Emericella nidulans
gtcaagtgactgtaaatagttcgttctaggcacgggtggcttcagctgcccttgcattcggtgagatcagatcatcatcaaactctgccgcatgcatcgggccgtctgtttgaccttgggggctcgggtgcggtcagatatcaggtcagggcaggtaatggggggatggaattggagggtggaaaaattccagatttggacgcgctggctggaatgtgaaaaagattgtgtgtgcgggtgcataaattgtattacataaaaatgaataatgcagggccagaccggtcgggatagacagcattgaggccgatcgtgatgccgaccagcgcagaccgaaggctcgccgggcccccggaactgggactttgaaactgagacttggactaactgagactggaacttttggcactattttggtttttctggaatgccccagcctcccccacgccacggcttccacggcactggccagctcacctcctggggg

SEQ ID NO: 7683 - DNA, 1377 bp, Emericella nidulans
cagggtcgacggctaccaagagtgcttgcctgccaatacactcacccctctttctccatatactacccgccgacctggtacgaagtgcacaaccacatcaacttctcgcagcatattgcggaccctaagaagccggacgatgggctgttcttgtacttcttccctaattgtacattgaacgtttacgggggaggaatgtcttcgttccgcgtctgtccaacggatgaccctggggtgacgagaatggaattcgactactaccatatggagtccggcgagaaattcgaagagtactaccgctttgttcgccaggtcgcgacggaagactatgagctttgcgagaaggcgcaggcaaatctgaacaagggcgtttaccgcgagggatactgaatccggaaaaggagaatggcgtttcttgtgagtcaagctctctagtcggcgagaggaccaaactgacaacgtttagtttaccaggactgcttgttcgagctcgtttgccaacaatatgcagcggaggtagcgaagctagaggacagtgactcgaagctgaaggaatccaacacaactctaggaagtgtccatgcagttgcgtgatcggcgatcagatagtcgagtaacgtagagtcgtattcaatttgataatgtgatgcaacatgaaccagttcaagcaataagaatggaccagctgttctcatattgatcccgctgagccaacctggaaaagtgcgccagatttggcaatcgaggcagagtctagtcctgagctgtcggtactcatgctgctaaaccgctggactgccactatcgtactgtagagagttaaataaacgaacttggtcctttctagatagccataggtggttcacagagagtgttttcacatcggttgatatggagcccctcttcgcagttgtgttcgccttgctggcggtagtaatgtacatgtgtcgatgggcttcttatccttctattaccaaacactccgagactaaagcaatgcagccacagtcagattcacacgcggactcaaaaactgatttggttacaaaagagctagacctgcccgtagactggctcacatcacgctcgatctgcgaactcgagagacgcgccatcttcagcaaggtctgtcccctcttctcaccacacctcttctaacatccttccggctataaactcaactcaactagtcttcactaacaatgcaagacaggaatggctccccctcaccttgacccctctttttccatctccaagtgtatatcataccaccacgcccgcaggaatcccactcttcgcgatcaagtctaaagattcgagaatcgcgttttcacaacgttggcggaacaggcataccctgttttataaggaagaatc

SEQ ID NO: 7684 - DNA, 1497 bp, Emericella nidulans
ctatctggtacgccagcgcggggttctgcggaaggaactcgttaccgtagccttgtgcggcttggtaactatcctcgtcgcgtgaaacctggtgtctcagtcgggataacgacgtatccaatgacgcgtgagacacataaggtggacggcttgtggcgttgggtgtctcactcatttgcattctttcgaggctggtgctcagctccgtaggattgttcccataccggttgggaaacggagtatccgagcaaaatgaggggaaagcggcatggttgggtctctgagaagcattggaagtcgaattgtgagatgaatgagcatagccattgcggatttgccctcgttggatattatccgccagtgtctgcatagaagacatactcattgtccccttgtgctctgaccttgcgctctccaagggtgttgcgaatcctgattgtgccgggtaagccgccgtgccagcggtaccggtgaggcctacactccttctgtcgttattattaaatagaacacggttccccatagcgctcgtttctcctgcaggagaaatccgctcagagccagaatccaaataagtcacttgtcccgttcccggtgacggacccaaagtagacgaaactgattgtgtaaaataactcgaggcgtcgttgccgtccacgagaacaccaccaaggtcattagagcgattctggacaggagatgtggccatcccattgccttgtgccctcgacggccaggggacgttccgccgaatgtcccaaccatcagactcagatgatggtagaagggagctagaaccagagattccttctatcgtagaccgcgcaacagagtctgaaaataggttccgattagaaaaaaacaccacacgcaggaaaggcaactcaacgacataccatccatattgttcctccaaatgtcgctcattccccagctcgaattgccacccaaaccgctgctgatgccgcccatgagctcctcgagtccgttcgttgagggccgaaggctgcatagtggaacctccgtttgattgagcctttgagcagtcagtcactcgaaagtcgagtcactatcatcggcattgacttacctttctttgatgtcctgttataacggtcatttcaacacaccttcaaagatatcaccacgcaagtactctttattggagggaccgacgacgagtaaaaccgatatgtattctcgctctgtgtatattgttcgggatggcagggagctagtccgcactggaggaagcgagaatattatggacagtgcaagaggaattccctagacatacggcaagcagcacgagtgttagtcatacgagcacgagtctgttgcgagtgtgacggaaaagaactcaccaagtactgggtccccaagcgaagggtagatgtctaaggacaaaaaaggtccgaaaagcagaatgtgttttgatccagaccgaagcctgatagcgtccgatggagatggaagggatgacgaaagggggaaaaa

SEQ ID NO: 7685 - DNA, 866 bp, Emericella nidulans
cttatacaattacagggtcgatcagcacagggccttgtccataaagaaacacagaaacggttttcatggcttcatatttaatcgcgtgcgcctttgggaacactctaatgggaagaacgagggagatacctgggcgcggcctgcataattgcacactcgtgggcaaaggtgcttctttctcaggggaatcctatcgcaaaatgccgttgattcggctctcgattttgctttggaaacctcagcacagccagcagttttaagctaacccagtactgaccggacttgtcaaggtccccacaagaaggcttatcatgtacctgctcagacgaaagcatccgttgtaaactctagactatcggtattattgaacatttaccgaagatgactcaagaccttctcccacaacgtatttaatgtgtgagcatgcattgcgtttacggcgaagcataatggtaagatatatagactgtgcgaacacatgagcatctccaggtcatgtctggagcattcccagtacaatcgtagggttctgcctacaagggaaagatactgatgttaatctccagtcaccctaccaaccttggccggtttaaatgagctataagaccgaaccatcgcgataatacgtgggtgaagaaccaaccaagcattttaatcattatgaaatatgtaagatttgctccccgaaactgcgagtcacaccatgaattaattggaggttccatgagcaatcaatacacgggaaaagtttcaagataatctggcaaattcccaatataaaacgtcctataggctccctttgtctccctcgtgtctggtgtctcatctgcatccacaaaagtcaacaacctttacactcagttaga

SEQ ID NO: 7686 - DNA, 1222 bp, Emericella nidulans
ttatctgggtcgctcgatgaccttcctgtgctctccttaccagctgcttctggacgatgagcgtttgctcttgcatgggcacataaccaatggccatgggacaaggggagcagcgcgccatacacgctttcttcagaaaaggtcattatgaatcccggaactacatataaataagtgcttatttatatagacttcgaaggcccaacgccccttgtacagtctgtcgaaaatagcctcgcttgtcccacctcttcccaagaagccaatggatcgcctgttctacagacaacgcccgtggctgcacttgaccacgaccccaacatcaatcgaagaaagcggcggaaaacgagcaatgatgcggaagaaatatcatctaatgacctcgtgacgactgacggggagcagacggtcacgggtgtgagcgcgccggttgaggacggaactgctcttacgagcacgcagacgacaggcacgttggttgcggtcgaaaccacgaatgatacaccggcggaggctgaacaaaagaagcaaaaagtgattaaactaaacgcaaatgggaagcttctcagctccccagtcgccaacagattcacggatatgtctaaaaaaaagggcaccaagcgtgggaagccagctccgcaacattcagatagtcttgagagaaagcttgtcgtgatcaagtatcttgataagactgggttctcgcaaagtataggacggcaaattgacgacatcctcagcggaaggagaaagtatatcgtctcgaattcatgctacccgtcaaattaataccgtcacagcagcgccaacttcgaaacaaccagtttaagccactcatccgttctttttgaagaagactgcacaaaaggcttaaggtactcttcattttcacacggcactgacattgaatcatttctctcctgctgcctgaagatcagagtttggcacaccaatatcctcagacagcctaaaataactgttcactcatctaaaattttcccccatcaagccatgcctttaacaaaggttctcaaaacccttgcctttcccttttggtccccccattatggttataatcacgtgcggaactctaagaatcttacatttatttataaaactatccgttaactccaattccaccgtaatggacaacaggtaataaatgactcccgccgctcatttatctgataaaaaaatgggctttctctaatgaagtctttga

SEQ ID NO: 7687 - DNA, 419 bp, Emericella nidulans
ctaggatcttccatgcatccgcactggacccaaccaagagcacgtcatttatgccggcgtcaacaagaaaaccattgcggaggcattttcctttactagccccaaattgagctacccatctgtcagaaagggccactcgaccggagccatgacacacaccaacaaacatagacaccgccagtcaactctgggaccacggccacgaaccaaagcaatcgccacttatacaccaagaccgcaaaagttgggcatcacctgtatggagaagatgggtggccaggcactccaaatccaggttctcaatctgccgcagcacacgcttgccctaacggcatatgtgattctcgccaccccagtcgaacacccgacgggtgtcctccctgaacgataaagaaagccggacccaacctattacccag

SEQ ID NO: 7688 - DNA, 764 bp, Emericella nidulans
aagaggtaagcgagattgaaggcgaggatagagaagtagtaagcagcattgaaggaggggtagacgttgcggaggaaccatttgtaggcgtgcatgaagcgttgacggatggttggatgtggtggtaaatcgtcgctcggattatatcgagggccgccattcatgatcagcgaggcttgcggacgagcgtggatgtcgtagccttcgtctagcttgcgcttgagatacggaatgccgaccatgacgaggaggttcttccacacgtctgaattacgcagcttcaagctctcgcggacaggtccgggagcaccaagctgagcgcgaggtatctcgccattcttggttaggaggacacgctcgcgcttgagtgagtagaagttctctgtgaaagagccgccgaagttgcggaggtaataccgctcaacgacaagggagagcaacgcgtaaacctcatcaaaggagttcaggacacgtagcagatatcgcgggtgacggtgtgtagcgacggcgagaatgtaacgtattgagggagggagaaggtctgatagctgttgttccgcgagcagttctagcaagatgattgtcagctttcgggcgcttctccgcatagagctggcgagacttaccaaagagcgacggcttgagctcatcgaactcttgctgaaggctaggtagatacctcatgatcctgatgcagaaattagcctgattggcacactgggactccattgcgcagtagataaagttgaatggttggaaggcca

SEQ ID NO: 7689 - DNA, 1276 bp, Emericella nidulans
gaccacaaggtttttatgaacagtcctatgtcgcgttggagtggggtagggcaatattatatgccaatataatggtttcgggccggaagcggcttccttgtacaaaagccatgagttgggaaaacaggcctagcaagattacttgctcaatcccattgctgcgtctttcatcgcctcataacggtcggcgaatgacattccggtggcaaagaaaggactgctgagatcgtcgacagatgttggggtggcatgaccccaaatgcgccaactctcctcttcacccatccatcggagtttttgaagaacaatgtattccgtgcagtcctgctgcttgacggcgttctcggccgagacagcaactcctggtatttgcggcttgaccttgcctgttgactggcgacttgtgatgcggaggacaacctggcgcacgccggaatcgggaagctcgggaatttgagtagcgcggtcggagaccacacgcataccagtgaaccaggttgacggggagcggatgtacttatccagagaccaggttactttctcgcctttgcggcgggcttcgatgcgaccaataaggttatttgtgaggccggagcatcctatgttgcgcagagaatcgaaactcctgtgcaaacagatctagttagtaatcgatgccaagagccatatagggacgaagaatgctgacttagcgagtgcagagtacatccgatggtgcatttcgcgggctactagccgattttccttcaatcgtagcgggagccttctaccatccgtctagctgtagaccacgagcctagagctagttagctagacttcaataatgcaaagcagacacaaaggaacgatgcgagacccaccctaggaagttttggaaccatgacttcagccacagccattcataatgtaagcgctctttcggttgttgaaagatggacggcatatcccgccacaatggctttatgaaggttcccggtagcagtccaatatcctggggcaaatcggctcgtgacatgccctgccctcttactctcatactgggttgtgcgggctgctttaccgacaaagtttgtggcatgcctcgcatttcgcggttgcgttgggaagaaagtgagaactgtcggcattgcgaggaagcgactgacggatacgacgagaggatacgctacgcgttcgagctgctgagagcagcggagcgttcgaaatagaggacgccattgcaagactgggttctgagacgactggatgttcgaacttgtgaaatgttgctgcgatt

SEQ ID NO: 7690 - DNA, 1127 bp, Emericella nidulans
atccccaccagcgcagtgcaccctcagcccggcctttcactcgctcgatccattgcaaaatggcctggtcgatcgtattccatttttattgccgtttggtctggtcgatcgtcgactgaaaatgtcacagtggtaaacgaatccttttcttctcctgctcccttctcgttgtcgtccttgtcctcagcagtttctgtcgagcaactggtctcttgagcgagaaaactctggagtacgcttgactcccattctgctagaattttgaagaaggcaatgctatcagttgtcgacggcgcggctatctcccgatagtcgttctccagacaatcgctcaagatgttcccactcgagggccgcagtctctccatctttgttgtgaccttggtttttctattactctcattcatctctgtcgctctacgatgtttcgtccggctgagattagtaagagcctttggctgggatgactccctgatggttctggcaatggtatgcggctcccccagccctctcaatccacgggcaatggccgggcgtgcagctaatacagccctaggcgttgaatatcctgttcgcattgtgcggaatgatcggtgctcgctggggcttgggtcacagaatggtagatttcgctcgctcgcctgatcctgaacgtgagctcgagactgctctttttgtatgtgtctacctgctatggttacccggtctggccaacagacgcacttgctgacgcctcgaacagtggtggtggctcggccaaacaagctatgtgatcacatgcgtggttgccaaaatatccatcgctttggcacttctccgccttacagtgactaaagtccacaaatatatcctatggggcgttatcgcggtttctgtcatcgtcggtgtcgtattctggttcatgcttatgctacagtgtaagcctgtggattatttctggcatcggctcactaccaccggaacttgtataaacaccgatcatatcctcaatatcgcatatgtgtacagtgtgactgcgaccatctgcgatttcattttgggacttctgccgattgcgctggtttggaaatagcacatgcatcagacaacaaaagccgcgcttgctggtatcctgagcatgggctgcg

SEQ ID NO: 7691 - DNA, 998 bp, Emericella nidulans
ccgacgacgggagtcccgtcacaattcccactcgtcggaagcaccgctcccgcggtgatggactccaccaaactgtcgcgctcggcgcatcactcccagacctccctgctcatcgagtacttcgagggcgggaagggttctgggggttctggcggtgcgatagtctcccgtccgagtgtccgcgttcgagtcactccctcgtccaggaagaagtctaaggagccgagcgtccacatcaccgactcctctggtaatcggaggccatcgtattcgcgacggatttcccttggatctccgtcaaagtcaaagtcgggtcgtgaaatattaggcgatgacctgagctattcttcttccgcagacgaaaatcagagtcccggccccgtggagatcgaactcctaaatcgcgaccaaggcagtgagctctctacactgtcccgcgaccgcaggtatttgccaacgtcggatatctcgtctatgcctgcggatagcatgctcgaagccccatcgtctggtgcacaacagcaacgtaccgaaagcccagagctggaggaaccggagtcgaaagactatctcaaaacgccgagtcgtcaaagaagccgcagtctgagtacggagagaatcgctcaacgtgctgcggagaaggtcagcaattactcccgggacgcttccagtaaacgccgagcgggtaaaaaccgaggaatcgccaccgactaccaggaagttgaggccaagtctccccgacatcgaggctataccaaggacgacgacatggcaagtcccgagtctagcatgctcagcgcttccgctgtttcttcacatcgtcgctcaggggaccaatattccttccgctccaatacatctaaatcgtctttgaacaacccaaagctcctcgaaacggttgaagatgcaattcgaagactgatcttgccggagttgaaggaactcaaaaaagaccagaaggttatgactaacacgtccaagtttgagcgtgatataag

SEQ ID NO: 7692 - DNA, 1989 bp, Emericella nidulans
gaaggggcagtgagcgagcaggcatatccctcgaatcagcaatccgaccagttcttctcgcataggaaggtcgttcacccttctcaaggctccaagccttccgatactgggttctcgtagaacgcctgagactgtgacccggcggcgctgcagcaaggattggccgatcatcctcggggcagatgtgaagggcctgaacagtttccaaaagagtggcggcaatcggggtcttttgcgaggtttcgcccactagactttctatttcttgcagatttggaccttggtgatctctattctgagaccgtttgcgctctaaccgctctgcaccatccgtgtagccttggccattgtcaatttgcttggataacatagaccgctttcgagtgagggaactatttgaattttggcgttcagggctcaatgtggaaaattcgcctgatctgcgcttgatatgttccgatttactctcgagaaacgacttaaactctttcggagccagctccggatgcaggcgggcaggaacccaaaatagtcgcgaggtatcgttttcatcggcagagggtgagggggctatcgagggaacggggaaattgaaacttggaagatcgggatcgccggtcgcagtaacatccattgacatccgccgaatgcagccaggttattcagttcttgcgccaccgctgccgggtcagattcataatcaatgtcgttgaggggaaaggaagtggtggcagtatcggtggcccctggcgatgtcgggctatcatctgaggacttcgttctaaccatcgaaggatgagagtggccattagaaagtcggggatgaccgcgatcggaatcgtctggcacccgtaatgattgtgaaggttgttcacctgtccggttctggggaacgatcgatatggcttcgctcaacggagatgagatgtagctgagacgtctggattcccgtttatcgtaatcatcatcgtacatgtgtccaatagcctcggtgacatgatgactcggatcgctaatcgacagctgaggcacatggcctcgccgcgccgtataccctccaccagcttcaggggagctcgctgtagtctataatgcaagcgcaacaatgattagagaggttccatgaacgagaaatttcgatactaaagcataagatgtcgtcgtttgcccttgaactgaggggtagattgccctgacttctaacaaagcgggaaggcagaaggcgatgtttcagacaaatggctgctgattcaaaaagacgacgcggggctcaaggcaaccctgtttggtgacggacaagaatacgaagaatgacatacctgcataggacccagaatatccagggcgtattgacaattccccccggaaatcaggagaccaggagggtgaccgggttaccgtctggtggcgaggaggtttcaaaacccccacggccgaaaaacagaaaaagatgttgatgggggcccatgatttatcgattctgcggtacacccctcaggaaagaggctcccctccccaggttttgaccgtaaagggaggaccctgtatactactctctcatcccataaaccggcatatacccttgagacctgtgacatttttaatacttctctacgctcccttatatcattcttatcctctatattacaagcctacacattaccttctatatatttatatactcattgatttcttattcactcacctctattactagatacttcatcatatcacttcatacttatctgatcattaacgctcattctcttcctcctccctactcacgtaactcctctatttcgatctctcctcatcctgtagaccatctatatcataacatgacatctctctactatattttccattacctttatcctctatactatcgtcacttttcccaacattctatctttgtttacaactcatctcttatatctcttttacttatcgtctccctgaccacatatctcctcctcatcttaatctcta

SEQ ID NO: 7693 - DNA, 483 bp, Emericella nidulans
agagcttttgctgtctttccatgaagagatggctctgcaacagaaacggagtgtgcagacactggcgttggcagcatgccaggtgtctgtctctcatcaacctcatctcttagcagttcaccctgactgacacatctcgtgccccggcggcggcagacaatgcacgtactatcatttgtcgaggcgaaaatacatttcacctttcggcgtctacattcctgacagctgtgtgtccctttgcggacctttcgaaacttggctgtgggttcgtccgagaggccgttcatgtcggatacgggagtcgcagctaacagattgtttccccagaacgtgccctcagtcgacggacagattcacggcacagtgcatacaaggtcaattatttgtgtaactagcctcgaataaagatgacgaacaggattgccgcggttacgaacagctgtctgagattagcttgctgacaaatccgtgtgtctggtggag

SEQ ID NO: 7694 - DNA, 920 bp, Emericella nidulans
ggaccgccttatgggaaacttcgcctagctggcggatacggcagaaggcaatcactcgcgcgccacggttaataagttgacagaagagccgtgcggcttcggcaacgctatcgccacgtgcagatgtgggatcaccagggtctttgaacggcgtgttccagcaaagaaactccttccggccgcagggagaaccgtcaaaatcaatcagttgcacatcgtcgacgccgaagattgcccgcatatgttcttctgggttagcaaccgttgctgagcaggatataaatcggacatgccggtttccgacagcagcacatatcccgcgcaggcgacgcatgatgagcgcaacatgagatccgaatagtccgttgtagacgtgaagttcgtcgacgaccacaaatttgagattctggaggaaagtccgccacgagctctcctgcggaaggattgtaatgtgcagcatatccgggttcgtgaagatgatgcgcgcttcatcacgaataagattacgattcgccatgggcgtgtcgcatcgaatgtttccaccatcgttccctgtaaactgttcagatactgcagcagctcctgcatactgcgtttctggtcctgcgcaagggccttcgtaggaaatatgtacatgcccctgctgtccgagtcctgctcgagttcgtgcagcattggaacctggtaaatcagcgactttccggagctggtcgatgttgagacaatgacatttttcccgtcgtggagatgatttattgcctccgcttgatgcgaatagaaccgcgttatgcccttcgtgttgtatagagcattgacaagatcctgcgagagcgcaaatcttaaatccccataaatagccggctgggcatcgaatgccctatgtccatcaggtacaatctgccctgtataccagtccagac

SEQ ID NO: 7695 - DNA, 512 bp, Emericella nidulans
agctacttggtgtcgtagattttgatggcgacgaagaggaggattcataatggcggatctaagtcagttggtttgattttcatcgttttgcggattatatgtgccatgtatattcaagtaagattacgagcgctgcattttggatgacttgcttcctgggccgaagtgctaatgaggtcctcggtcggcaatatgaattatcttgttaatcaagctctcgttcacttcgatagatgctgggggtggcatgaatattccgggcttttgggaaacggtaaaatttatactataggtagcgctttcccccattacacatcttttctctcatacactggattactctgtagaaatcagctgccattaatcgtagaattagacgtcaaatattccatatatgcacaacagcagacctgagcgtctgctttcactaatgctcaaagtcctctggtccgaaagaattgggaagtagctgcgacgcatgatcagcatatgtaaattgttcaaactaacag

SEQ ID NO: 7696 - DNA, 1350 bp, Emericella nidulans
tcactactatggggacccagcttaggatcatcgtcattttacgtactctgagtgcatcataaccgagttgatggaccggatactccacactttgcacggatgatttggaatgcaggctgcaaatcgtgattaactcattcatcaaccagagagcgatagagattaaagagcgcggccagagttggttctgtgatcgctagaagcgaacaaacgacgagatcagacccagattcccacctcgatggaaacaagcgaaagctaggaagacgatcagggccccgacgattggtttatcgtgaaggaatcgtacccaagcgcggcagcacctcaaagctggaggctgggggtagaggccgaatccagcaaggagttcctcatatcgcggcaatcccggtcgctttcaacgctgttcagcacctaccgctccattcaggctgctttcaagtcgctgagcaagtgtacagttatgctgttgggtcataagatgctatccctcgactacgatctctcgggttcaggagtgcgaactgtgcccaggatccttgatcgatccatgggttaatgatcggctggttccgagtccactatggcggccgccgtcaccttttgcgctggagacgctagggccgggctccacaggcgatccatcccagagtcacactaggttcgctcgctgacgaaccgacgattagcgttgccggaagaaagagttcccagccggataagatgcagattcagctgcgcccgagtcttcttaggttgagctgcgatataccgagaaagcgaacttgtgccgtgccagacattactagacgcacggccactgaaccgcactttcctagcactagatggtctaaggctgcgtcaagtggtaccattctggccttcttgaggccccttgcatactccggagggtatttcagatgcttgattggcaggcccacatcctttgttttttcagaatctaagcagcagcagcagcagcttgcatcatgcccacggtctttgtcggcaatgcggcacgcgttcttgatagatagacctacatcatgcgcatatacgtataaagtacggggaccttacgtctaatgtgataccgccagagaggtgggtgaattggctttggtgcatccctctggcgatcccgtcgtggcaggtgtaataggggtattgcacggaaatcgagatacggtgcctctggctcgggtggggggcaccgcactggctcaaacttcccatttggagcttctagacggtctagtcgcctttgccgtgagccatgcaatctgtccatgcaatgcctgccgttatgacagtccagagctcactgtcttggcattgcgcttgttt

SEQ ID NO: 7697 - DNA, 99 bp, Emericella nidulans
atatcaagctctcaatgaaagcgcgctcgttagatgatttagcagatcttcatcaactactgcggcaggaggattggcgccgacatctcttttgtcgat

SEQ ID NO: 7698 - DNA, 519 bp, Emericella nidulans
tgcggtctgaaatgtggctgcgacgaccttcgacgagatcttcctcggcagtgcggatctctgcctcatagacactgaaaggaaccgggtcttcacgacgtacaacaaggtggacctcgtcaatatctacttcgacatcgtgcaccgtacatcccaagacagggacatcgggagccttgattgtgccgcggacctgaacaatgcagcccgtcttcagatgctcagcccattgaatcatggcaatagacttggcgccgggttcctcgtgcagaacaccctggaaagtcgacaattgttgccgaaagaccaggaaaaccagctttgcactcatacgacggataatatgcagtcttgcctggaagaacacctgctgaccgaccatatccgccgagatggtgtcaaagtcgagccgtttctctcgctttcgagtcgacgactggagcagcggaagttcgccatcccgtgcccgcatctctggagactcctcccggaaggcctggtcgatctcttctttgtccc

SEQ ID NO: 7699 - DNA, 158 bp, Emericella nidulans
  unsure (1)..(158): unsure at all n locations
ctatcgataacaggtcaaaaatatgtatatctgcgttctaacaacggatgtcaatgacccagnttgtagctagtcagtaaagatccagcaccagtgatagtatttcaaggatagtatcttattngagactattcctggacgtaagatatagagataaa

SEQ ID NO: 7700 - DNA, 947 bp, Emericella nidulans
tcaagcacatcaaagccctccaccaccttaccgaagatgactgccttgccatccaaataatcgagattatcgcccagcgtaacaatgaactggcttgtgacaagacgaagatccggatcatgtggagagggcacagccgccatgctcacggttcccttttcgtcgtgtttcaacttcggagggagagcaaggggaacggcttgttttgagggtccttcgagcaaaccccatatagatgaaccgccattgctatctggagaatcgggcccgatcggatcgccggtctgaaaagagaagtttttctggacgctgtagaagggcgagaaattgtaatatttgaccttgcagagcttcaggaagctagtgtcattgaagacagacagcttagtttctcgttcagccactcaacatggtacaatacatgaacaacaaccccggaaaagacgcagaaatatacaggggtacttacttctcacatgctttaggcgactcgtcgaccaagaggtcgatgacaatgtcacccaaagacgtttcgagtaggacgctcatcgcatctgccggcaccagggaggatcgacgccccgtcgaacgaacagatgtgacaagaaccgatacgcgagcttgggtaagtgacaaaagtccagagaactagctagaaagatggggttggcagtagccttcacaatcggattattttttctctgcaaggagcaaagaaaaaaggtcccccggacaagatccaatgcggagccgccgtcatcattccgcccgccgcccgggcgcgctcggtcttggtcttgcgcgccgatcatgaacgagtcaacgacagacaacagccaccgcagctgcggcaacatccaacaacttctagcttccaccttgctcctgtcactgccgggttgaactgctgcagctcccggtgcatcatcacagtctaatgctgctca

SEQ ID NO: 7701 - DNA, 1590 bp, Emericella nidulans
cgagaggtatgaaaagataacacttggaaggtatcaggacactaccataggtgaacgcgaccaggaatgcaccgtcgatatcgttcacccactctcggccatcctccggccggagtgggacctctccttgagctctggtattgctgctgaaggtgtcgtggcgattgaggagcgtgtttcaatataccagactatgaggggcggttgtcaaattggtgcgtgaaatagcggccatcgtcctagcttccttggaaagatctgacgtgaatgcagttatcatgttattggaccccactcctgaagcattaaaagctacatggtctgaaagacacagtgccctgaagaagccttacattcctccccctaacgcggcggtcgaagtcgtgagtctgtacgatagcctggtcccgcgcttcactccggacttcgctacgaccagcatcaccgactttcatggcgcccagctgaaggaaatctacgagaccttattttctaccttgacctgcctacggcgaagttttagggctgcaagccagatcccagctaccgatcagctgtcccgtgcacacctgccatttttgcacctcttttctatcgtcgtttccgatactcagggtttgctccatattcttgacgctgtgcagcgagagattgtccagttcacagcgtctcaaaatgctcagctcgacgatatcctcgcaaaacgcactttcatagcaaagctccttgcgcagactcccccccagagtcgggaccttatcaaggggctcagagaacttcttcaaaccccgtgacatccgagagtccccccatgaagggggcaatattccggcttgccccccagctttttaaacctctttcttatccccttaaaatgtctctgactcccccccctgggctctcctccctcttttctggtcacccctcctttttctttttcccacgcgcctccctacgttaccactctcatctacctctctttcccactctttttcccgcttccctccatccttcctccttccttctactgccctctttcttctcctcctccctctctctatcttcttatttcattctgcctcccctcatccttccttcctccctctctcactctcttctctcccttcacccttcctacctctctccttcgtctatcttactcttctcccctcttctactccccgtacccttattcgctcacctgctctttttccccttttacccactttctctcacctactctttacctcctctccctatatctcctatttattctctcctttctcttgctttgccacccctcctacctcccttctcaccattctttttcccgatccctctctcgttgtctccctagtccctttctgctcctctctcccctatcttcttctctgtcccgccatcttcatacccatcgtcatcccaccctttcttcactttcttccactctgcatcctccatgcttctccaccctctttcgtctcattaatcactttcttccttttctatttactctccgcaatttccttctgtctcctctcttctatctgctctccctatctatcttgccttctttctgcctttacttcc

SEQ ID NO: 7702 - DNA, 1471 bp, Emericella nidulans
tttaggtagcgccatgccgttgatccgcccacggtaataacgtcttttgtggtgaagtagacaatcacacattccgaagacaaggagctctgcgtggtgtgggaggctgagtagcagacgcgtgttgatagggagcttcagcgcgcaagcaggactatggataccaagtttaaaggtctgggcggtgattattttctcgtatacctctaccaagactacgtgctccgtcttttctatatcgccatcttcggagtaaaagctcaaaggttatgagtaactcaggttaaccctgcatttggcctctatcgctaaatgccgatgacggcaaaaagaggcactttccctgcgtaggctcgtgcaatggtgactgggccaacgctgtagggtaaacaggtgatgggtttcattttgtgagggatggaaattagaatcatggattgaatgaagtagcaactatgggtgatgcaatggtaataccttggcaaatttggaaaaaaaaaaaaaaaagaaaaagaaaaagggggttcacgtatatgagactccagcatagagaagtgaataatgtgtgaagtatagaacaacatcctatcagcgaccacttagtcgctagatgccctggacctgcaaaccattatactttagctcttcagcgagttcttctagtactatctaaaaagatacacaattggtcatagactccgaacccaatcgctctgcacgccctccaaagatgtgcacgggatgaatgatgcacgtttatgccaggcctcagcatcgaagaactctcatgagcttcgtactctgccgctgacgccccctccccatatagtcgtttactgctttggccggatcgccttcggtttctcaacccagtcaaagttgcccaattgctttatcatccagcaatcgcccggctggtctgcgcccctcgacttagacccatcaaacaaggtcccactgaggaaagaatgaagaatccaaagtcgaactcgtacacagactcaatctttgcaatctccttgtcggtcagcgtgacgaagttcccgcaatgctgtccttaatatgcgacactttcctggcattggcattaggaaacacataaagcgccttgtccatgacatatcccaaggcacatggagaaggtcacctttttctttttcgattttttaagggcccggaagacattttgtaccttggagggcgcattaaatccgccctcgtgtgtttttacgctcgaaaccctttttgttgaagtggcttgttaagggtccttggggaagaccattcttttttgggcctgggtgaatctgctaaggttctatgtgtttcaatcctgtcacttaatttggttcttttcttctattttccttggaaaacctcttggtttttttttaaattttcattcattttatgtattgttcttttttaatttttttattattaatagtatttttttcgtatttctctttta

SEQ ID NO: 7703 - DNA, 824 bp, Emericella nidulans
ggctgattcctgtgactggaaagatcggtgctattgcggcgactcgcgcacaacccctcaggctcagacatttattacgacgctttaaaccatgagccacccctttagcaccatatctctacacaaattatatatatttacctctattaccgtcactgcaaatatatacaaccttttcgctcgcaagccctaagcttttagacccttggctcataccttctcgaatacaactacttcatggaccagccctgtagccgcctttcgcacccaattccgcaccgcgacgacggcggctacatagaccccagcaagttaattctcatgctccgaaaacagttcggcgcgtcgaattttcgagtcgacgtatgatacaacctcaccatcccctcctcagttcgctcctgacgtgcaatttttttcctctctgcagttgcgtcgagaccagtacattgtttggtatgtgggctacggcgacaccgactcttgcaacttaacggaggtgtgtgtttgttctcttattcgagaacctgcaactttgactaacaggtttctccagctggaggcgcagatcgatacatgccgcaggcgatactagtgcacggtaggagtcaaagggatcatggttctagtaatggtgctggcgtttcggcggctcctgagaaggccacttttgcttttatggccattgatattgcgcctgtaaataatcccactttgggtatgagcgatactgaggatttcatatgcccttttttgaccttataccgtttgtgggatcgcagagtgccgtaacgcaacaggaaatcactcgtctgctttacaga

SEQ ID NO: 7704 - DNA, 516 bp, Emericella nidulans
cttaggagtctctttccattatcctgcctttgcaaaagactcaccagcattctaataagtctacctaataatctatcctaattttacctgcaaaatatactttttgacctaatctgcctacttctctttctccactgccatctctgtactctaagccactaggactcctgcctgaattaccacaagaccttccccactgccctcaaggggctcccatccttacctgtgtacctctgagcctaagaccctcagagaccccgcactgcactgagaataccatccaaactccttactttggctgcaggcctcagagatgtggctctgctgacctctccttccccctctcttctcactcccttcctttcttactacacttgagctggactggctgctttctgctccttcaaccccgtaagctggttacttcatcagggccttgggacttgctgttcccactgccaggaacacgccactctctactgatattaccatggctggcttcttcttatttggtgt

SEQ ID NO: 7705 - DNA, 925 bp, Emericella nidulans
gtctacgcggaatcttcttggcgcccaggagctggctcgacctcccaagatcccgagacggtataaagcattttgtctcgggcttggctgagaagcacaccctgctgcattttggagcaagggtatatatcttcgacctgctcaaacgagcgcactccgtaacgacgtagcgtctgtgtctccagtaaagcgagctcttggtaggtcaatcccattaaggggatatcacttagggttggtcgaggtttcaattcaggtagctgggccgcgaggaattgtagagtctccttacaagactccacccacttctgaacgcgttcctggtgattcattgccgcgctgaaagagaagacaaatcgtagttgaccccctacaacaactgcggagacctcaaagagggagaagcgaggagtctcgcggccaaagtcagctgagccgccgccctctcgagtctcaccagccattttctgagccagctggaagagcccatcagtacgctggagatctctgtgttggccgagatagttaaagttgacttccattgggcagtcgtggacatagctagcccccagctgtggaaggacccggcgcgcaaaggccgagcgcccattgtcagaaacctgtcgacggcgatccttgaccctgataactgcatctatagcatctgttgtctgctcaattatgatggggtagagagtcgtgaaccagccaacagtccgggagatgtcaatcgacgtatcccagggctcacgcccatggccttcgttgtaaataacaggcagagagcggtcctggaaggtctgattgaagctgaaaagcatcgcggcaagcagaacgtcgacaagaacagtacagaggctgttgtggcagtcgacctaaagaagcgacgaatgtagcacgtccaaggagaaagacgcgcgtggac

SEQ ID NO: 7706 - DNA, 1871 bp, Emericella nidulans
cataaagatggaaaaagagaaataaaagatgaaaatatgtaagatagagacaaataaaaataaatcaatactagtaaataataaaaagatatagtaaaaagaaacaaattaataatataaataaaaaaataatagtgataataaaaaaagaatgaataaatgatataataaaaagaatagaaaattaagtttataaaaaaatataaataaaaaaaatataataaattaaaataaaatattaaaagttaaagacaaatgaaatgataaaaatataaagtagccaaatatcaaacaaacacaaacaaaaatatatattacaaaaagaatttttcacgcaacaaaattagaacaaaataaatattctcaaaagataccatggacagaaaaggctagcggggcctacgataaggctgggaaaagaacaagggcaaggcgaaaacatggatatttcaaactagattagaacattcacaatctgtcatgtcaggcagacctcctttcattatagcgcctggttccctatccaacgaatataacgacgtttggcttcaacactcatgatcacgacgatttacgaccaccaaaagttctctgatttccttcattctcactcattcgttttcctctgtcagatcaccatctctcactttcatcttctattcgacatcacattctacgcctttaatccgtcgcttcgcttcttttcaaaccgacctgtccagctcaccgggcggtcacttctacctgttctgatttgaaacaacaaaccattctcaaaaaaattctatgataccccagtctccggacactttgatacccttttgctggtctccattaccctcagggttatttagcctgtctggagcatttactgtttactattattacccagcaacggcagttgcatgttgtttctcaatctcgctatgtatccgtctagctagcatatcctaatgggaaaaaaaaacaagcaaacagcacatctgaagtattcctgttcttacacgtgttttctaaaaattcgtaatattctatatgaagagaaggctaatttcttaccctgatcctgatggtcaggggcaccggtgtgccgttggtgttgggattgactcatgcctggcatgttgatcattaatgacgccaatgccaccatgtgatcgaccaagcgggtatatcacttggtgatcgccagggagggcttttatcacagcctcgaaagaagaaaagaaagcaacaattgtcacctctcacaacaagcctgagaatagtatttaccatcctacgcagcctgcgccatggatccgaactcaatcatctcatagcacaggtgtcttagttgcacgagccagccctactccgcacccatctgtccagcttcgatttaccagctcagctaggggcgcccaagtcaccaacttagaatatcggaaattatggattatgcagcaatcgatagatttcggtctgttacgtcaggcccggcctgagtcgggaagcagtgtctacacaatattgtgtagcgatgatggaagggatttagggttgctggagtagcgtacattagtacacgatcagaggtcgctgcggaaagaccgcaccttggtgaatacttccatattcttacatgcgcaaagaagttttcaaacaatttattagtcgaaataattactgcgacccaatctagacgtggctatcatctgtgtgcgcaacagtaggcacaggcgtagttgagtgaagaacaagatgcggcattaagctgctgctaaacagtaaaacgtgtactacgacacaaagtgtgatcgttacctacaatcgagtgttaaaccatcatgggaagggtgtaggtttttaaaaaccccttctaaaaaaaa

SEQ ID NO: 7707 - DNA, 540 bp, Emericella nidulans
cccctacaccgtgacccgtcctctgctcaccactacggtcacccgctgcaaggcttggtatgtcctgcttcatttactctattctcccccgatttccagattttttttccagtttttctagagtttccctggtacgaggacccggctctaacgatgtgacagctccagctccaccccgactactgctccttccagctccgtgcctgtcatccccgcgcccgtcgtccccaccagcagcgtccctgtcatcccttctgctcctaccagcgttgatgccaccggtgttccttccagcaccacccctgctgcccccgccttcactggcggcgctagccgtgctgctgttggtgccggtgccatcgccggtctcttcggtgctgtcgctgcccttctctaagcgtgtcttttgagaggcgtaagagatagagtgggtgagtggacggatggatggatggatgacagatggcaagtggaccgttgatcagacggctcgtgtctggtctggtgctcatcctgagtagtgccggtggttgcggttga

SEQ ID NO: 7708 - DNA, 874 bp, Emericella nidulans
ctgacgagtcgcgtttctggctcagcggattgatggtgattggggcccaggatgagccgttcaaggtcccagtgttaaaatcggtatctgggagaatcccaatagcttccagcccttgctcaatccaggtagaccacggggactctagttgggccaagtaacatgaagcggaccgccagccttattgaagccggacgggtcataagtgacggtggtgttgggaaagcggcctgtcatgttggcaggcgtgacattgacgctcctctggaagtacggaaacacggatgcccatccccaggacccatctccagtgagttccgcccattgatcgtaactgcctctggtcccgctggcgacggtcaatagaagcttgtccctgaaactgcggagaataaccctaccgttggtagaccatataatgtctagctgaggagccaccgagcgtcttcccacgattataacgaagagacctgtcatttgccgactagatagtgcattagcccagtcaggatcgcatttcttgcaggttactcactgtaagaggctgcgcttgaaaattccagtccaccgttgaatattcagttgcatcggtgccgacattggctcctgctgcaaggccagggatgatgctggcaacggtaccgtccagctcatagtatcctccagcctcaatgacggcaacactgagtgaagggtcctcggccaggcgcgcggcaatggccaacccagaggtaccgccgccgacgatcacataatcatacgtggcgttgccaaaccggccctggttgacggttgcattgacagtcgtctgacctgggatttgcgccagagcaggtacgataaaagacgaaacgagtggcagaagcgctgtgtg

SEQ ID NO: 7709 - DNA, 928 bp, Emericella nidulans
cccggcggaggatatactttgaccagacttacatcaagcgtcagagatttgctgctattttctacctggtctcggtaaataccgaccaatgcctcactgttctggaacagcccgttcttcaaactaatgacgatgaactgcattccaggggccgcatggtcgtaaatatagtttgcaatccgagcaacgttggtattgtcgagcgcagcatcgacctcgtccaggacgaagaaaggcgacggctggtatgaatggatggcgaagagaagagccagagcggccatagtcttttcaccgcctgacaggtgctccatgtctcgaaaacgtttgagtggaggcatagcgtgatacttgatgccgtccaggtatggctcgtcggagtcttcgatgtccaggtaactattcgggttagattggaatctcaaacgagttttggtcaaaacctacgcttgtcctcccaaggggtagtttgagctccgggtcaattctctatagataggcccaatctgctcagaaatgtgcgagaaggccttgttgaagagctccgagcgtcgacgcatgacctcttcgaagtcatctttagcctttcgagcacgctttcgtgcttgctcaaagtccttttctgtagctcgaagtttgttctctacgctctcgaggcgctccagtgcacgcgtgttgggagccattttgtcaagctcgctattaagagtacgaactttctccagcagttcttcctcgagtttctcatcggaatcctagtctgtcagatccacttgcccaccccgcatcaaagtcgatgttggaaaaaggctttcctcctttagggtatcgccgagagaatcaaagtccacctcaacgccgtagtcctgcacgctgaagccgccattcgcctgtgtgtcctcgtccacgtccattgcgtcgggatcgg

SEQ ID NO: 7710 - DNA, 498 bp, Emericella nidulans
aagcatatacttcttcccggacgaggcgggcgttcgctccactcgaggcgaatcctcctcctcctcatcttcttcccttatagtatccatcttccgcttcttcgatggcgtctgcgcagcaattcccttgagacttgccatccgggctgcggttggcgttgcggtgctaccgcccgactcggagaggaggtcaaagaggccgagtgcttttccatcccgctgcggtgtcggcccaatagctgtcttcaggggcgaggaggtttgcatatgcgtcgaggggctgaagagccgccgtagcacagacggggaatcgtaaggatcgacatctgccggatgtgtagtctttagtttcgagggtgtctggaagataccggctgcggattttcgtggcgtagatgtcgtctggcaatggctttgactctgttctggtccgtttggcgaggagtgtttgcgcttttttgatcgttcttgggtatcagtgggcttcgaatgcgactt

SEQ ID NO: 7711 - DNA, 707 bp, Emericella nidulans
catgcgcctggcccgtctcagtgattctaggtctaccttcaaagttctccctgcacaatttagtaagtccttaatctgtgatctcaagtaagaatgggcataatggcaaacaaatcaaagaagaagaagtcacacggtccgaaggactttctaggtaagacacaatttcttccgccttgtttgctggatttgggcaatagtcccattctgctaacagaagcagcagcaataacgtcaaaccactccaggtctctgactctgagaaactgcgtaagaataacaccaaggcagcggtgacctcgttccatgttgaagacaccgatcgcgctggcctaccttcgccacgacttcccatatccgaatcttcccagtgccttaagcaacacaagcccactcaagcggactccccgaatgaaaattcaattcgaaggcgtattcgaaccctcacattaggctcgacaaagacgccctccggtctcagacacagctgggaatttaagtcctcctcggcccaaagctcacacatatggtcgaattcctttcgtgactccgtctcaacacaagagagcaactcgccgcaagacagtccagcttcggttttaacgattattcagaatccgaaagaaaagggacgaattgatagaacatccagctcttccagtatcctgaaatacatccggtcaccgactggtatgggctgatactcc

SEQ ID NO: 7712 - DNA, 1242 bp, Emericella nidulans
gcagccatttacgctgcttttcacatatggaacggggacattctgggttggtgcattgctacgagagcctccaaggacggtctccgtattcgtcccgacgtttgcggagtgatttatacccgtctgtgccgattaatgggcgtgttagtaggtcttcaccgacagaaactgggaggccgtttccatctagtccttccggccatgcaacggctgctccattgtctcttcgccagagccaggaaacgcagcagacttggcaagcctgatctggggcatggaaaacagccatactggctctctcagctgaacgctgctcacgctgtccattacacccgtctcctgacatccctttgcgacccgaccgtttctgcggtttcccggcctaccccatggggtgctgtgtacgaaggactgacagaccagacgaagaaggctaaacagattgcaggccaatatctgcaatatttaatcatggattatgctcagagttcactgcgtagcattctgcagcccgaggtgaaggcggcccttctgccagggctatactcggtgcttgatgttatgtcacgctataccatgcgagcgctgagcgcagggctggatatctctggccgcgcaatgttcaaggctctgtatgatgattatatgaagtttggcaagtggaacaaagcctgacctgtatatgacacatatataaataacatatcattgaacttgtaccgccttttgtgctctgtagtcaactctgctaaatcatttacataatccggagaatttctaaaactccgaccagctccaacagggccattgagtcatgtgacagaaggttttctaaattggcagcgcatgatccaccgaaagggacaaagttatcagacgttgtgatcccgaccaccagacccagagacggccagccccttctatcgataccatatctttactcgatcagatcgagtcagcgtcctgaaccagccagcgggcgcgatatgtcccatgccaccatgcccacttggcagccgcctgtcagctgtgactggccacgggctaaaatgcggagaagaccgacccaccggtcgttgataacagtccaaagccaggcgctgttagtcgtcagaatagagcaacgaaaaagcaaaagagatcatgaaaggcgataagaaccacaatgccagggttggcgtggcgatcggctcctggagcgtcctttggacgctctcggaccaattcgcgtggctgcttatc

SEQ ID NO: 7713 - DNA, 791 bp, Emericella nidulans
taagtccacacctccaaggtatctttagtcgttactgacccaagacatatccaagcacatgcgctgtcgcttcaagattcactaaaccaaaacctgcttttgtccgatcggaggccgcaatggcagggtgttccgcaggatcgtgcaggactaaagcacataatcggcatgatagatatatctccacttctgcacttctagcgatactggcagtcgatactccggatcgccgtcacagccaacatcggcgaaagggctgcatatcttggttttgcctgcagaagaaaactcttccgacttgatccaaagcagtgtttttattttgtggagaaaaacaaaccagagccgtggaactgcgcgggttcctcggtaaacgacgtcgagccaaggtcacaccgtgttttgttcctgtttggcccggacagacggctcgtgagcagtggtagtcctagttcttggttctttggctgctctactctgactgctctgctctatgactcaaatattgaggatggtactaactctatcgcggctcattgggcagcacccatcgcgatcccatccaggcagcgggccagtgacgcaattatagtcttcacgacgggcttttgcctcaaccaggctcgttgtagatgtctactatggatagtctgctatgctctcctagctgtctagctacctagagagtggctctacagtggaaaatacgagcgcctccttcctgcctgataggacgttgctgccatagacggtgagcaggctagtcaggtaatccgctcattgaagatgat

SEQ ID NO: 7714 - DNA, 649 bp, Emericella nidulans
tcgcagggattatgagcgattcgccgcatatgcttacagaccgagtctattgcatgcgcatggtttcaattccacttcctaatatcggtaaaggttgatggttgaaacgtgatatccactccgcactacgtgaggacattgtactaggacaggttgccacttcgcagcccttttcttcacccttcacctattcgtagattgaagcaccctacctacttacctctacaatcaagagggccaagctgaaggcaaatgtctcagcaaaaccagcggtgcagtccactttgggtactgcaggagcgtcttgtttcaaattcacaagatcgttcttaacggagcgttgggagagcaaatcgatgtctattgagcgtgcatatccttttcattgccttgctgtgtgaagggtatgcgcgcgaggtaggcctatcgaggaatgaaggcatcagcttctgaagttcgtcttcgctcctttttggtcgtggggctgatgcaagagaacatcttgaacatccagtttttttcgtccgttgtctagttaatttagaagccaacaatttattacatatgagttacctagatattatacttctggttctcaattgtatgttttcaaggctgagcagatttagtactcgggacgtgaaaactg

SEQ ID NO: 7715 - DNA, 752 bp, Emericella nidulans
gcggtagattggatagcacgtgactttgaagacggggggagccgagtctcgcgacctgctccactcgcttgttgaaggtgtcacatcatgtataccaaaccttctagttgtatctgacatggggcagcagcttgggcctttttacacccatgacgtgctagcagacgtgattcatgttttatctgaggaagatagactggtgtatcagcggcagcgggaagaccatttctactggaacaagaagctgcaaccaaccaaggcaggatggagactggaccgatacaagtttctagccatgatcgaatacgcttacgcccgaaatccaagtgcgaaatggtacgtatttatggaagccgacactaccgtgatatggcagaacttggtacagcttctgagccgctacaaatggattgatcctatatacattggatctccgaccccagggaggcccataggaacatggtgggacccggagccaaccttctttgtctacggcggatcaggaattgtgctttctgttactgctatagaacacctgctacgggaggatctagaggggagtgccaaagccgagtcgggccaaacatcgcagcttttgatcaccaagtaccaggacatggtccgagaagactgctgcggggactcggtcctcggctgggttgcagcacagagagacgtgaaaattaaagggctatggccaatgttcaacctcatcctctgcatggcacacctctaggcaaatcttattggtg

SEQ ID NO: 7716 - DNA, 1228 bp, Emericella nidulans
cacgagtaaccaagactttggcttgtcataatacggagcacattcactagcgatgtagcagtgacaccagcgatctatgaggtttcgctattttatcccaattgtcggggacgtcttgacgggagagtccgcaattcaaaacttgggtgggaggtggccctaataggtggcctcgcttgcgatctacacgcaaatgatgagcgacggactcaagttccaccacagctaacaggatgaattcccacggtctagcctcgacatgatttcaaagtgcactgggagttgtatatgtgaaacgaacctaggcatggaaggattcttcgactgcggagctggaacgcgcttttcagtagaagtcatctacgcaagtcaagcttgaatggggagaataattatgaaaggtcgacttcgttggtatcataaaaacaaatgcagaaaaccaccatggtctcagggctgctcgcccgtaatgtgcatgcctacagaagcaagaaatgtttggacaacttttgttcattcatagtagcacgcgtcatacagtccacaaagcaagacaagagtatgtctccctcggggggttggcttgttcttacattggaaaagccttttacttgcccgtagcctcgattacttaccggaccacatttactgggcaagggcgtatgcgcggttgctgccacgctcttcagcaatggagagctacatagtgaatctagcgactagttccaggaatatagatgggttgttgcacttcctttctatacctttgtcacctagctcttgtgtatgagagtatcaatggctttttctcgccacactcctattcagttccttcacagctgtcttctttctctcccatgtcctcttaactatttcaacctcatacctacctttcttctttactctcctctcatttcatccctatattttctttcttttattttcttctcatattcccttctctttctttacatcttatacctcacataatttttacctccccctaccctctatcgatctcatctttatcttttcatctctgtttatctatttttctaatttcatcttatatctactctatctgtctctccctccttttttacacactttctcccttcttctattgccttttcctctttatattttatcctccttctacttctctcctttttatatcctcttctatcttttccccctcttctctttcctatctcatataaccatatac

SEQ ID NO: 7717 - DNA, 183 bp, Emericella nidulans
aaagaattgaacggacaggacggccccagatccacagtcgagtagtcgcaatcgctccccatgcggcgtacagtcgagcctagaaactctccagcagtacacgtagttcaagacgcagctggcgcctgcacaccgtgcacgagcgagttccccttcaagccggagaacgaacgatcacagccg

SEQ ID NO: 7718 - DNA, 110 bp, Emericella nidulans
gacaggcagtatgatcgacatacgtgcgagacaatcggaacgtggagccatgagcgaaatgggggcgcgacagacgcgcgagcctaaggccccgacctgcacgggaatgc

SEQ ID NO: 7719 - DNA, 557 bp, Emericella nidulans
aaaataagggctacatatttaccgtggcctgaggcaatgtccaatgcggtcatgcgagacgagagctcgtcgactggcgggaagctggcgggtatttgtcctagcttctcgactggtggatgtccatctttcgtgcatcagcatccacattgcagtgaggaagtgatcgagtcaatattctgtaggacttcgtgctccacatcgacaacctggaaaccgttggtttggctgcgataaaagtcagtggtgcgtgcttcgcgcagacgaccgtgcagatgattgatgatctgagttgccaattgaatatagctcaaggcccggtgtgcctggtagagctgtaactgatgccagcccagtagcaggatggtctgggcagtgctgatgtccatgtctttgacagctagcgcgcaaagttgggagatagaccactcggccagcgtgacctttccgccagcagcgacgggcggttcgattcgggtacgtgggtgaccaaagttgccattgcttcagaaaggagaatggctagcaaggcctggtcatagactccgtccttgatg

SEQ ID NO: 7720 - DNA, 220 bp, Emericella nidulans
  unsure (1)..(220): unsure at all n locations
tgtccaggaagctctggatatgtgtgtaagcgacctgggtatggagtatgttgagctctacctcactggtaccgtagggtctcgtccgaactccaagaggaagggccgctatgcctgcanagggactggcgtatactacccgaggtccatgagtggtacactcccctggacgattgggacttcgtcaagacctggtatcgcaagatatccctctagctta

SEQ ID NO: 7721 - DNA, 834 bp, Emericella nidulans
tttcgaggcaggctcattcacgtgataaaagggacgttcgcgcttggagacacgaataatggggagctatccaccgctggtgaccagaaagttcatggctgtacgctgagcgaacatgtatgtcgatcacactctgagacaacttcctagacgagtgcataggcaggatcgcgtgcatggacgcccgagcgaccacccttacaggaagactgaggatgccactgtccgttaataatgcgctaaacttgctttgccgcgtgcaataatgaattacgcaactctcagtgcgcgtcgcaagtgtaatttgtcaaggtatggccataatattgtcagaaggttattgcggcccatgcaaaggctgaccagctgcgtcttaacccactatatgcctccaaaggtgaacgcacatatgcggccaaaacctccacaaaaccaatcttcttgagccgtagaagtgagccatccgaaagggccctgggctgagactgggctaggtagaccgttggcgaggatgaagactctctgccacaacaggggggggccattctgcggttaattccattgggctcaaagagatcaaagggtcgcccagtattccttgcgtttagatccccccggtaatcttggtccacccctacatggtcccctgggggaaaaaagcgtgtctaattccttgattgtaaatgctcttatgccatctagggtaaatgtaaataggtttatccggacccacatatcctagtttctagaaatgtgtatccttttgcgatagttgtgttccctctcctcacaaacgtgtgtatttacctccttctatactatttctatttctcc

SEQ ID NO: 7722 - DNA, 217 bp, Emericella nidulans
ttttttatattaagatttaacagctttgtacctaggtctagattatcttaatatttaaaatttaattacctaacctaccttactttaaaagtaaactatatatattttatatatagcttttatttattagatttttattttgatctacttagcttactaaagttaatacctataattatatataatattaattactctgataataacagtaagatat

SEQ ID NO: 7723 - DNA, 493 bp, Emericella nidulans
tccggaagttgaccaacaaacagccgagtcgaatgcgcgctttctgaggcccacccctcgttggattacagcccttaccacggtcccgggcacagacattgtcctcagcggcactcgggacggctggatccgcgcgtggaagatttcagacgacaagagaacgatccaacctctaggccccgttggcgcgggcacataccgctcaacaaacgcacccgataccccctccaaacaactagagcagagccttgcgtctgccaatccatcccacagacagagtctcaccaacataaactttgaaccagagtctgagccgctcgtaaagggtgtcgtcaacggcattgctgtattcgagcgtcgggcagaaaccgcgaacgcgggacaagtcccctctgaatcaaaatcaaaaccgtcaaaaacaagtccggaagcgcgcggtctctgtatcgctgttgcaattggaaaagagcacagattcgggcgttggaaatgt

SEQ ID NO: 7724 - DNA, 699 bp, Emericella nidulans
atcatccgcctggtaacgctcttcccttttcttcagacagacgacaaaacctaccgcattgcctggaccgatttatggatgtaatgctccctttctttttctccatttttatttcagcgcttcaaccgacctttcgtcaagaatatacgtgggctaactgagtcaaccagcaacgtcgaggcaaattttatcatcatctgcgcctgtctgccgtttatgcgccactttctgcgccgctacgctcccaagctcatcggcgagggctcctccgcgggccgttacttcaaaagctacaacggcggggcgagcacaacccgatcgtggcgacgaagacccgagcatacagtgcttcaagacgagattgagctcgcggagcatggcagtgttcctgataatgaatctggggtccggatcatgaaggaggtacagtggaatgtgaccgaagagcgacgcgaggggtcgccggccccggacgagatgcattttcaggaggagagagtcaagcatgtgctgccagggatgtgagcggatgtgaatatgtctagatgaggattttactcggtttcgtctgtttagcttgagtggttgagcaatggactattccgttcattgacactcttcataactaatatcctggcatagataaaaaaaaagatctccatgaataaattataactataatgcaatgcggggcgttca

SEQ ID NO: 7725 - DNA, 718 bp, Emericella nidulans
ttttcttttttaaatttttgtttattcttttctgttttttttttttgcctgtcgtcgtagatctctggaatcgcattcagaaccagtggcttaacccatcactcgggcacaatcgcttgttaaattacaacacagcccctcctggcaccctaccgttacctctcaagtttcatcagcttttatagtctgttctgccttggttctcatttcatcaagtttaaggcttatcaacttcgaagagctgtcaaagtcgagagccaagtcaggagccaagagcccgaggttgataaatatcacactttttcgatcagttttcacttaccagtttcattgctaactcctggcagcgagcagttctgctataggtagccacagccataccgctgctgaacccagaggcttttccgtttattcctgcgcatgctcgcggcgatcaccatgttttaagttcgggcccaggaagtcatacagaaggaaaaagccaagggcggcttcgaatattggtctaagtctaatgatgaggtgagtcacctacaaggcgggatcctgctcatattctggccattatatttttctgacattcaattccagactcgtggcagtaaccatgagaaatccgcctcactgccactatgacggcaggcagaacgggttttcccaaaaatggtgtctccgatgataatacaagcaaagggacagttaccatgggcttagagga

SEQ ID NO: 7726 - DNA, 1170 bp, Emericella nidulans
acgagaaatgcatccttcctactttctcggttttgcaaattgggagtcggcatagggctcggggtctgctggcgtccaccgtaatactccgcttctttgagcaaatttcttgtatgtcaaaccgtcgcatgagtagtcacggtgcgctaacaatacaagcccatgccccgtcgaatgactcgcaaaggcatcttctagccgggtccgtgtatataagctcccacgtcgactgtgctgtgtctggtggccttgcggaagcctcgttctgggtctttgtaatgcaagatatacaatttgcgctagcttcccagaacccattgcgcctcgagctgagcgcatttgacgagaggctacaaatgatgtggactcaacaagaatcccagaccgatcgcgattgggctcaccgtgcggtatggctgttggcgggtgccattaactactgctatggcgtgcacgaccctcagggaagtgcagcggaaaggactttcttgaagcatagaatcaatgcctgggaagcgcggaaacctgacgggttccggccgttgcatttctctctcgccgacccaagaatagggaggccctaccctgttatctggttcaccaaatcactatatggtaggttcttaggcggctactctgagctgtgctgattttagttagcaagcgccgcgcagcatatctgcatggcaaaggttctgataaaggagtacgagcttcgcaatttgtatgtgggctcgaattcaggccagaaagctcgcattgaggttcgtataatccctacctttagtctcgaggcgtcctcaacacccaaggaatgaccatgctgattaatccaggatgatgtggctaaatacctagggatcctctttggcattgccctctccagcgacggtgacccgtctgcccgtgttatggcgtgccacgcattatgcgcatgtaagagacttgattttactattttcgaagacactgacaaggcctaggtagctcctgggtccgtgaacccctagcacggagatgtcttcttgatttgcttcgaaaaacagaggcagaaaacggatggccgtgggcatttatgtcagaacggtcccccaggagtggcgcatcgctgcaagatgataaagcatttccgaattatctttttaaacgccttaaacatcgcagggcctt

SEQ ID NO: 7727 - DNA, 1428 bp, Emericella nidulans
  unsure (1)..(1428): unsure at all n locations
ttggtttcagtgggcactggcgatctaggcataaggctgatgtcgatcccgcatggatataagagatcatttacgcgctgatgaagcgtttcgacaccttggaatagagtcacaacgaagctgacagaagatacatctggagtcaagagttcagagtcagaagtctaggctagaaccaggaggtcccacgtccaatccagcccgtcagcggcggaaggatgcttcagctgtgtcacgtcagaccaagtgctggagcgcagaagcggggcggcaagataaacacaaggaaagtaatgattgtgggttttttaaaaaaaggtggaaatcgaggtagaagcagagacagaccaaagatcacaatcagatgcaaggaaaggaaggagcggcaaaagcgtgagttatatccaaggagagaacgagtgtgcccactgtgatggatggaactaaaaaggcagcaccttttagtagcgggcgggttccagcttttggggtccacggccatcttaaggttctaacaatctcttcatgtcagatgggcggtctggtagctggtccacaacggagggagtccataatcgggactcgggactcgtcttgcaatgtagaccaaggcggcatagagagctggggctaaaagcaagcacaataatttctgcagagcaagctatctatgatcttggtgcgtcacctaaaaagcagttctttggctagcctgcgatctgacgaccagctttgccagctatgccagcaaataatatttgcttcccgcccccccagtccaggtttagctgccgatccttcttggtcactggttcattatgcaatcggcgttctcgaaacgccgtctttagtcacaacctacaaagtctcctgtctagtctcctgtgcagtctcatgtctaaggggctccatcctttaggcgtacttcagctccgccatctgcgaatgaagacttgcttgacttgcttggacataaaatgtttttgtttccaacatcctggatccttcgtcttgcgaagaaaacgaggtgggcgctgtttcgtaagcccagtctgacacgagaccgggctgaatgtggttgccatcccgcggcagcggcgacggatagactcgcagtacagatcggaaagcggcgcgccggaatcaccgaccgaccgatgcgcttcataatttcataacttatgcttatgtccgccatccgggcttaaagtccgtcatcacatcttgatttccttccagtgcggtgtccctcaagacggtttatcatcatttttagggctcggtggactcttaagcaatctcatgatcccccctcggagtgacaagagctcatgcactcaacgctagcagaaaatcataacaaacttaacgccaaatcgtgccaagcgctgactgacttaccgtggacgttctcttcncacgtaaccc

SEQ ID NO: 7728 - DNA, 567 bp, Emericella nidulans
acacagaatggtacaccagtgcccctaccatgcccctacttaggacgcccaccattacgggggcagccaaagcttcgaagacgctggctgcctcaattgatcccaagccacccaacccaacagcaacctactacaacgctgagggggtgccccagcagcccatgccggccccttacgtgccagccggaggactcgggacgaacggaaccctcccccggtacatggtcaacagcgactgggactttgagtccatcgccctaggagtctaccaggaatatatagagctagacctcttccacgatgggcttgctaggttctcggacgcggactttgaggatgctggattgggtccagagatgcgctcccttatcgagttcatggccaaccaggaggtcggccacgccaccctgctcagcaacatgctcggtgaggccgcgcccaagcagtgcgtctacaactatccgtaccggtcagtccgcgaatgggtcgactttatgcaacgggtcacccgattcggagagtctggtgtctggggttttctgtctcatctcgactcccgcgaggtct

SEQ ID NO: 7729 - DNA, 1262 bp, Emericella nidulans
gtgacaatcagtcccccgcaggttaagcgtcgcagatcccgacaaggataatacgaggccttgagcacgggtgcttgtgtgaatgtgccgctgagttaggccagtttggattactcaatgaccagatgataaggtcatggtccgtctcggcgggattggaagttctccatcaagactcccagaagatttgctcgcgggtaagtgttctggccgattggtgttggatatgggattctgcaacatgatgccaagggagtgtcgtaacgatgctcatgttgggtttgtctaagcagtattttacaagcttaatagcaacaaaaaaaacacaggggaagtgagacgaaggaagaagaccaagaatgaaccagttgaccgctcagagatgtattgccatcgattaaaataagacaagcacgttttatttccagcagcatactctcagtaaaacagtgattttccaaacaagaagacatcgtccaaggttgagagttgaggaaacaggcttgaaaataaatttagcccagaaggtcatccagccccgagctacccgtctttgccccttgctgtggttgttgctgggatactggtgacgacaagctgggcgaaggcgtcccccagatacctgcacttgccttttccttggccatgcttgccaggttaggccctttgctggcgttggctgcggacttctgaattccagcattcgcactggctgcggaccaaagtgacccgaatgcatcaccagaggcctttgaggctgtaggcttgctacctttggatgcagcggtcggaccagttgcagatgaaaaagacgaagtggacggcatagatggccggtggcctaaaggagcagacggcgtttgctgggtggcaacggaagtgaaataattgggggtcgccgcctgatagccggtaggtcttggctgctgagctatctttgagttctgcgttgggagaacaggagaagaaacaccactcgacgtcggtgtcggcgtcatcgaggtgaagccgacgatgccattcaagtttgacccttgtgttccggacactggtcgaggagcggcaaattgagtggtggaagtggtgctgacggttgaagcgggtggagggatgctgaatgtattggatgacgagggtgctgagggggcggactggaaatcgtcaaagtcatcgtcatcagccgggttagggtcaagcatgttgagcccattgttgcctcagggctgctttccggcggcaacggaggatgcggttgaggcagg

SEQ ID NO: 7730 - DNA, 1135 bp, Emericella nidulans
aaacgtcccatccatatatactccatactactcgatcagggccctgcgctggctccgccaaagacgatcaaacctgcgccagagacgtccaaagacttctttcgcaacatgcgggacctgcagaattgcatggccgacttctctgatctgcacgactcggcagtttccgctcttgctccaatgacaaacttctccaacgaaaaactgtcttccgctgtttttctctcgtgcacagtcctaacagccgtactatttctgactgcacatcttattccctggaggtatatcatgcttattggcggcaatgccgcactcttatcgaagcatcccaacattcaagaattccttcagggtctcgccgctgaacttggcagcgaagagttgacccaggtaccctctggcaaagcaccagccccgcatatgcccttcatgaaactgttagatgacatatcactggactcataccccgaggaacgtgaggtggagatattcgagatccaataccgttcactagccccttacgccgagcaggactgggaaacgtttcttttcagcgcggtaccatacgatcccttatccccctctcgcatcgcaggcgatcgggccaaggggtgccgattcttcgaagacgtccagcccccagccggttgggcgtggaagagcaagaaatgggagctagatctcgactgccgggaatgggttgttgagcgtatgatcacaggcgttggctttgaagtgccagggagcccttccgaaagcggtgccggctctgatgagattggtggttgggtttgggaccttccatcggcgtcatcccttaggagcgacgatgatgtagcgtctgcccttggatatgggacccttggtcagattggggagaaaaagaaaggcaagaagaagggcaaggaaagggctacccaggactacgaggagaaggggagtcctgggtccaatgttatgggtgagtggaggcgaagacgctgggtgcggatcgtccaacgcatcagtatgccagcagaaaaggagaaggccaagagccgtggtaacaatgcctgattgtggataaccacagatggactattcttatttcttgctgatagcaactcagacatgcagctgtaccgaagcaggaaaa

SEQ ID NO: 7731 - DNA, 112 bp, Emericella nidulans
ccttcgtgttgcttttgagacagggtctggctatgtcactcaggctggagtgcagtgcattatcgcaactcgttgcaaccctccacatcccgcgcccaagtgatcctcccac

SEQ ID NO: 7732 - DNA, 633 bp, Emericella nidulans
atcatcaacagttggggctttgtcaaaaaagtccgtcgggtacagattctggctccaaacttgaccgcgaatcaggaagtcctcgaaaagccatctatcgtcgccttggctggggaaatcggttccttcgataagagtaaagtcggtgaaattgcgggttagggtgttgaggaatgtggcaatctgctgccatggtactataacctcgactctcttcatactagttggtgtccgggccaggctccaaaggaaggccagtgaagcatggaatgacgggtaaacgttcttgttgccagtttgatccagcatgattgacaacgtctgaaatgtgaaacaagcggcgtaaaagaccacaggcgagatagtgtccgagttcctagaagccaggaagtcggcctctatggtcttgagatctcccacaggcgtccagaatcggtgggagcaaaatagatatcatccatagactttgactgggcagcatttgtgaggaactcgcgcggtagaagtgcattgggcgctgcatattccagcactgcggcgaaattgcaggacgagatgtagacaccctgagctttgaaggtaggccccagtcgaccgatatatagttgcagaattgataagaagtcaagcatg

SEQ ID NO: 7733 - DNA, 947 bp, Emericella nidulans
gatgacctgcgggtaattgtcccagataaatgtccagacaacaaagtcggcgccgtccaggtaagtaccagcggccagaccagccagaatcagcacggcggtagggaaagcattgaacttgtaccgcaatcttccaccgcaagccagttcagtgccctcgactacctgccccggaagaactacataaagcaccagctgcagcaggtaatagcccagcacccagaggaaaactttggtatcataaagcgcacgaattccaccctcaggccagccgacttcctccttcaatttatccagcgtcaacgtcgaggggtgcagcagggatggcgcaggacagccggagacttcgttgcacaggaacgtgaagccgtacaggaggacggggaggccaaaggtgatagcaaaagcgccgtatctatagcaattagtgactgacaaacgcgcgaattaagggcatacgaacgggccaaagaactcgtagcctcgcttctctggaaccggctgtacaggaacaggagttttgtcctttttagacgtcattttggcgtagcactgccgttgagaaggcaatgatcgattaattggcaaagtttgggatggagcgtggtatttatgtcgacattgggctgacctcaagaacaccttataccggaacaacacgagccgagtagggaagatccaaggagactggaattattgagaatgagcacaggctgcagtaatgcttcggcggccgcgggtcgaaggctacccagacccacactgaaggaagctcactaggccttgagccttctccacatcgctcctcagtcctcaatccgccaacgtttcatcttccaacttccattcttctgtattctacgcagcgtcgggctcttgttttccgtcttctattctttatcgccattcttacgctctctaccatttcattgcgtctatttctatta

SEQ ID NO: 7734 - DNA, 540 bp, Emericella nidulans
acaatccttttattttttagtcctgtcagacttttttgatggtaggtaggtcacttttggtttgaatttattcttagggcataccccttagcctggtatatgctttttattcctatggcatggtgtttcttgagtgacaatttaatacatgaaatgctcagtgacatctctctactctggctggaatgaactctaatatcttccagtgttgcataacttggggtatcctcagcctaaagcacatgatctttgtttggtctcatgaagtcttatcttgtgcatgtttatgtcagacctagccaagcgcccatatgaatcctcatgcagaattctggaaccaactttctatagctctctcttctcaagttctttcacaaattctagctgcttcagcacgccagaactctaatctttgcctcctcaggtcaataatatcactgctgtgcttaggtcccatctttatgatctgtggcaagaaagtgcctaggaaaaaaacttgggcaattatgggactcatcttgtggtttccttttctgaagg

SEQ ID NO: 7735 - DNA, 565 bp, Emericella nidulans
cagacatgatgcgcttgtacatctggttgacgaggtcgaagtcggcgtcggaggcgttcttgttccggtagacttcatactgcatggacgtcttcgtaggcgagatgggcacgaaacgctgagtgaagaagaagttgggactatacaatggaagcgtcagtactcagcagatcaaagggtctataggcttttgggggggagggtgttggaaggggctggaaggggttagaagggatcaaaacgtacgtcacattcatactggcgttcgggaagtagtaagttgccgcaacctgcaaacccgcggcaacctgctcgggcttcgagtgcgcgtcgtgtatgatactgccgtccttggtgtcgaccgagtaggtcgacaggtccgcgacggcggggatgtccgggtgcgtcgtcgcgcagtggtagcactcgttgtagttatccgccagatcttccagttgaagtcgccgccttgctcccaggtgtggtcgaacacgtagtcgtcccagttgatataatccatgcgcggctgctggtcgatcccgtcgaagtcgtcctcccacgcgat

SEQ ID NO: 7736 - DNA, 814 bp, Emericella nidulans
cactgtggcgagtcggccataccggtaccctgctcaacttccagcattccatttcacagttccaccataagatacgcgatggaaattcaagctttaccgtagcacggatcaaggggcaagtgggccagtgattaccatagagaaagactgtacagccttgagagcccaccagctcaattgggagacgttggcatcgtagtgtctcgatctagaataaatcaaggtaaagctggatattgtcagctaataggataacggagtcattgcagagtattcaatgtagtatagcgttaagcgaaaacttcagctgaaggacctggccttcaaagagaaataattgtctatggcgtcaggatgcaggggaaagaacatgtcaggaccaaagcaggtttgcgagggctaaccattcgattcctagttttgtgtcgtctaggtcaataatccatactatgagtaaccccttggctgcgtggagttcatatgtgcacctttctgattgattctagtactcggaaaagcgtgacgctaccgagagggaagaacgctgttctcagagaaaaggtatgggctgcatcacattccatcttgttgcttaacaaataccatcagcaacacaagtccaagaatcgaccagcacccagaatgaaaaatggcataccagattgtgggtaggccattcgtactcaagagaaaacgattaaagctgcaaagccgatgcttgttactcacggggagctccactgcaaagctcacaagggatgagccctattcaagtgctctcacctcttaactgcattcttaatccgaagccaac

SEQ ID NO: 7737 - DNA, 1253 bp, Emericella nidulans
gagagaaagagaagaaggaagaggatgaagggaaagagcagaagagtagttagagacagaacgggatcaaataagaaacaaagtagggatagagagaaaatacactgggaagtaaaagaatggaggtggtcagactagaatgaatagagaaagaacaaaagagaacaatataggtaaaatttaaagaagggaggataaaaaagacaaaaacgggaaaatgagaaagtatagcactgtgaatagaaaaagagacatgacgaataagccatatactagaccaaagttaaaaaattgaagagagatagatcaaaataatgaagtaggagacaaatgagatattggaaagacttaggataataaaaatgataagaatatacaatcggaaagagctaacagaagaaaaaagatagaaaaaaaattaaaagtcaaagcaccgagtaataaaaacgtggcaagaacactgcggtagaaattgaaccaatacttggtatatatctcaaacatatctaaaagctagcaataggcgagcactgcagtgagtaaatgtgcatattcctgttcaaagcaaaaagccgggcaccgtaccttacacccggaacgacgacttccatacaaatcccggctgcctagttggtgccggcaaaagactggcatgccataaatcgagggaagccttggaagccgatcctgagctccccagttccgggcgggccaccgacaatctcctttgtacgcgctttgagctcatccacgtcccacgcggcgaagacgatcttgttcctgagaaattcggcttcggcggaggcagtccagaccaggaagtcggcagggagggagactgcgagagattagtgacttgaacgcaaacagggtcagttcgacttactgtcatcgtaggcgtagggcagtttgattttctctcccagcttggccgacatggccgtctcgaggaatccgggatgcacattgtgaagacgcacatgcgggttctcggcggcaaacgcctctaggatcttgacggcggccatcttgctgcttacgtaggcgcccattccggggaacggcgggaagaggatgccggccgtggtgagattgatgaaagtgactggcttgtcctcgtcggcgctgacggtcctgtttgccaggacgaccgcctgggccgtcgccagcgtgccgactacggtcgttttgtagccgtcgagaaacgtcgcagggtccgcttccaccaagggaacgacgggggcaagactgcc

SEQ ID NO: 7738 - DNA, 471 bp, Emericella nidulans
ggtttcctgtctggtgcctctcgtattttgaattacagaggacgactaggctgacactgccacttcctgacgtgataaatctgctccatccttacttatctggctgtcccctgcatctcaggtaccaacatgtccgttgcaatgcatcgacccagcgtatctactccttgctctaccgaaaaacatgatcaagccggaaccaacgaggacgaaaaaccaggctccacggttctaccggcaatatattgatgagaacgactcactcagtgcggcacccagtccggtatctagcttgcttccaccccacacttagaacgccgtccttaccatccagtcgcaatgaggcaaaggatgccactggtcgagctcaaccgcgacgttccttggatatagcctccaaagcactgggcatcaagagtttgacctcaacagcacagatgctgtgaccagaccacggcgccgcttttagat

SEQ ID NO: 7739 - DNA, 886 bp, Emericella nidulans
tgggaaagaatttgcatttgatgttctctctcccgtacgttgaaattcgtccatcttgttacagaactgcccggaacccaggatccagcgagcggtccaggcccaaaaattcaactacctgaccgagatggtcgattccccagaatccttccttctcgcctctggagtttgtgcattcgaaccagggaagaccaaaggcgccggagtcaagagcctgctgggtgttagcgcccaggagcgtcttgatttctggcccgttcgcctgtaaacggttagttgagagaaaagcgtagtaaggagataagttaaattcaccgcttccatgatggcttttgtctgcgacgatcctagtattttctcaaaaattggtacaaacacctcgggctgcgttgccttgccgtcccccttcacccagaaatcccgccatactgcctcagtagcagggatcaacttattaggagattgctgagagatggctgtaagggcacgttgcacggtgactgtattgggcgggaaaccctccggcgatgtttctgctatcgggatggagaagaaccgagcccagcggatacgctcttgattaatccatttatccttgtctgcaggcacaggttagctgacgtgctactgcagcatgggaccgtcatactcttaatcctaatgggtggagtattcccagtggccttcagtatcccgcccaggagaacgggcacgtaggtgatatcgcatttgctgaacgtacgggagtcctatgcaatcgtcaaccggtctattatgatgcaatggcatgcatggaagtacataaaggaggaatgctcacccgtaagatcttgaatgcaatccacgcaaaaggactgacaatgtcatagtacagagttagctttgg

SEQ ID NO: 7740 - DNA, 709 bp, Emericella nidulans
atagcactgttgactcgctggaggttgagcgaggtctcaggttgaattttagtggtcggtttgtgcagcagctcctggagttctaaaggggaagagaaagagaagaattccctctaaacatggagagattgtgggtggcacgacccgttgcgagaaatgtgccccatacgccagaactcaaatgctcctttttccaaaaacacagccgccaggaatgagatgatgagatccaagttcggcgctgcctgcccttggaatgctggacggaccccacctggaaaccatgatgccaccactttgttatcattcaccaatcactgcgggtccccaacaactgacgaaagcgggaatttgaatctctcagtggctgatgccacgctacgcaggatcgaaagtgtgtgtgaccgggtaggttgatttgcatcgatgtgcctgactagctcccacagattcaccacatccttgtctcgtaaagtgcggggagtgcacgagcttttttggtcttgtcctctagccattctgctgccaccgtgcttgtaacctgacgggaccgagtgccaaacgtgcatgcacgccgaaggattttgaatcgctcgccgaacgctcgagcgcctcggtaccggcgcctagcgcggtgtggcaatggggacgttgttgataaggccatcgttgtggagactgagctgagataaagtagacgacgctaacg

SEQ ID NO: 7741 - DNA, 541 bp, Emericella nidulans
ttgccagcaaaactacccgaactagggtccacggggcttctgcattcatagtttcttgccgacatcgaagtgcttttcatctagagaggcggaattcgggtagaaacgaattgataaaaagcaaatagatgagccatatatgtaactactgagtctctactttttcttacttcctctcactgtttgcgtacactgttttgcatttcctttcgtcacaatatgacgcggcaaatcccgctcctagcgctatcgtggcttgaattgattttcttcagctgctactacggcggactagcgggactgggataccattccctctggaggattgcacttcgccgaaggaatgtggcacccgctatcaagtctgttctgcagactgggcgctttgcggatggaacgcccctaacgcgccggtatactaacttggaatttttggataagaaattggttcctgcggtaatcttctacgacggattgttgactggagcatgcccactttatcgcttgttactggtggacatcattcgaccatgcaagcgat

SEQ ID NO: 7742 - DNA, 1090 bp, Emericella nidulans
tgatgcatgcggacgtaccttactccgtggtatgcttgttcaactgcggctttccattcgtcttccgtcattccttacctgtcaatcagactcgacgaggtgactccgccttgcgtcctacgcctcttgagcgtgatttactgcggtcgaatggctcgtgttcgagattccagccttgcctctcgggccgatcttggtcgaattctcgaactattggcgatttggcgatataacctttcaggggtcccgccacagcttgatcgttggattatgattcgcaaagttctcctagagattctgcaagcccagtctctggctgtggcccgctgcagtccacttaaggctcagccaacttccagctcagcaaaccgtcggaatggtcgcggttctagcttatgcggagttgcctgcaactctgttgcaaatattgggaggaatgtacagagtacgaagtatgagcagatgaaactttttctcttttcttatcttttctttcttttttctctttcttttttctctttcttttttctctttcttatatctcttgctttgaatatactgtcattttcggctttgctatcaatacctcagcagtgacctgcatccacaccattggacactattcgacgtcgacacggctgcgaaactcagctgcacctgcacgcctgtgtctgcagtaaataaaaacggggcttgagggtattagaccaagacctagtcacacagcgtcctagagaggtaggaggtaccaggtcttggggacagccatatcgagctaagaattggcctaacgtaaatatttctgggctgtgctttgacagttaactttttttccagtcggagcttgtttcatgctccctagtacttcttcccaggggcatggctatttttcttagccggtaacatgcgggcatagtcggtaatcctgtaccactatccagagcagcgtacatcaatgagatcctcgtgtttcttcgactgcattgaccggcatgcgcctcctggctcatgctgagccgagtcacccgagtgcattgtttgtactcttagtccaggaataagaacaacaatatttctctgcaggatcaca

SEQ ID NO: 7743 - DNA, 818 bp, Emericella nidulans
cgacaaaaccggcttgcatcgaggaaccagaagatggcacggtcactcgcatgggacgcttctatcaggctgtcctcaacttctctaccgtcactcgttacttgatctatatcgctccccttgctgctcttctcgccatcccgatcattgttggcgcaacagccgctgaagacgctaagatcggtggtgtctcacttccttggttcttttgttgggtcgaggttgtctgggtatcgctttgggtgtgcaagctggtcgccaaagtcatcccgtttgtcttccagttcgtttgcggaatcgtcagtgctggaacgcggaagtatgcccttattctgcggaatctggagattcccattacgatggtgctgtggatgatcgtgtcgctcgttactttccttccaatcatggtctacaatccgagaaacaagcgagaaggcgatactgagacgaagagctgggagaagtctgtgaaaaacgtcctctttgctttcctagtttgcgctttgatcttccttggtgagaagaccctcgtccagcttatttctatcagctatcaccgcaaacagttcgatgcaaggatcaaagagtccaagcgcaatatcaatcttatcggtattctttatgatgcttctcgcagcatgttccctatgtactgcaaagagtttcgagaggacgatgcgattatctcggactccattcttctgggaggacccgaaactggcaggcctggccattcacggtcaaactaaactgctcccctgcggttcatccggggggttcaacagaacgtcggccgcattggaggcaaaatcaccggc

SEQ ID NO: 7744 - DNA, 515 bp, Emericella nidulans
accagagtgtattctcgtggagggaagggaacaacgataccacccaggggcgcgaaggcagaacctgctcaacctcctctatcatatcgcggaagatcaagcaagaaaagacggctacattcaccgaggcgtcacttgcaacagctgcggactatgcctattcaagggatccgttaccggtgcgccaactgcatcgattacgacctctgtgagacatgtgaggcgatgcaagtacatatcaagacacatctgttctacaaagtccggataccggcgcccttcctaggaaatcctcggcagtcccagcccgtctggtatcccggaaaaccttcgatgcttccgcgcactctacctcgctcactagcaaaacgtttgatgaaggaaaccagctttgaggggactgaattagaagctctttgggatcagtttcgctgtctggcgaaccgtgaatgggctgaggatccgaacaaactctacatggctatcgatcggaaaaccttcgatcgctgcttcgt

SEQ ID NO: 7745 - DNA, 559 bp, Emericella nidulans
gtcaatcaaatattattaacaaatcgatcacccacacctaattcaggctacttttggtcggatcaagtcgacgacgagacagctgccaaggaatgggcgctcaagattattgtcaaccggctccgggccaaagatggctcagatagtgacgacgatttccgtgcccacgcagagcctgtttatgatactctgaataagcttattgtgaactcaggcgagttgtcaaaaaagaaggacactccggctacccagaagtcaagattgcggcttctggccgccaattcattgctaaagctatgcagctcacatgctctgtgtgagcagctgctcactccgcaagatttcaattccatagctcttgtagcgcaggatccacttccagaagtaagaagcgggtttatcaaccaactgaagaagaagcttgtacaggatacccggctgggcgcacggtggtatgtcataccgtacttgcttgcattcgaacctcaagttggtttgaaggatagcactttgacatggctgcggtctcgggctgcattcttctcccaacagacgaatg

SEQ ID NO: 7746 - DNA, 1686 bp, Emericella nidulans
aagcgctcttcaactgcgcgcttcacaggctgcggggaagatttgtgagagttgggtggtgtggtcgatgaagcatggttggaagcaggaatcgcaggatttggacttggactcgagtctccaatgagcttttcgatcgccgcaatttgcttgccacagttagatttctttagatgcaccagcaacggtttgatgcgatccacaagcgcagccgctccacgccactgagatgaccaagaaccttttctgcagggtcattagagaacactttcttggataataggagatagagcaacttacgaaacacataattcccgtattgatcagccattaactcaatgagctgggtttcatggccctccgtctttgctgtcagcctcgtgatgatgtcttggcgttgggcctcatttccaaactcaatgcttttctcgacaacattgctggcgaatttgtgcttcgaataccagagaagcttttgcttgaccatctcaatcatgaacgaccgatcctcttcctcgccagattgaattatatgttgaatcacatagttgccatactgatcttcaataagccttggagcacaggcacgaatctcagcaagtatgaatctgcgatcaacatcttcacaaaattcaagcattctctggataacgcggcacccgtaagagtgagtcgattgcctctccacctggcccctgaaggagtcgaccaagccttttgtatactgagtgggaacgtattcgaagactttctgtatcacatggttcccatgctggctctcaacacactcgaggacttggggctgaatctctctcactaaccaggcttgctggtcggtaagaacgtgttccaaagcctatacgctgtcagactagagcgacacacgggcgtcggaagtagaagtaccttttgttccacgcggcagccatacggggatagggatgacttaacaaccttcgacctcatatcctccgtcatcatctttttctgtgtctggttgccatgttcgtacagtttctgggcgacgtagttaccgaagatgtcctgggccagttgcaggaagttgggcaagatctcgcggaacacacggtccttctcatcgctgttggccgtctcgattttttgctgcaggaatcgagaaccgtactgatcaccgctgaattctacaatgtgggcatatatgtcctaaacaggccgtcaataaaagacgagtaaacggggcatcaaacttaccttaagctcaaatttcttatttttgccggcaagcctgaatctgcagggacagacccatgattcttgggagaaccctgctcacaggggagacgggtgtgagaactgccatttaagtgcgcacaggtagatgcttgcaagcggccagaatgatagcatatctagcgggaggaactgggcttcctgcaactatggaccctgttgggggatcaccgttttgtacgaatttccttgaccctgaagtttttttgggcttttggaaccatcctttaaaccccggtgacccaggaggcgtttaaagtccttaaggaggcccctggcaaattctttttttttggggggtctttcccccccgggggtggaaaccaccccggggtggtttctcggagagggtttggttaccccctcgcgaaaaaggggggggggggtttttttttggggggcccggggcccccg

SEQ ID NO: 7747 - DNA, 967 bp, Emericella nidulans
gagctggaggggagaaatgtcgagtagagacactcgcgttggagagtgggtcgtgtacggctcacgcgtcgtgttaatttgaccattctgggactagctcgagggttcgtgtccaactaatggtattggtagatggcatccaaggtctcgagattggcaaggaacattcgattttatcaatactagtagtatacactgctatcattacagtaaggaaatatttgggcgtctgcgcaagtaatctgtcctccaaagcgaacgccggtaaaatacaatggacaagatactgtaaaagagatcaagtactccaatccatacaaatgaaagcgaaagagagatgaaagacggcaagaccgcaacgcctgactccagccagttctatacaatttgggtataatcgcgccgatgggacggggcgtcgaagaaatttcggacaaggcatgtgcagaagcaaaggtaatatatagggcaacctgcgaaactcgactgtggctgaaggatcagaggcttgtgacgcgttttgaatgggtagttttgggtctctgcttgatcaccatctcgagctctttgagcatgtgagtgttagcgtccattcggtctcgtgcagcagcttgtttagctcggtcttcttttactcgcgcgatacgctcttctcgggtcaaagaagctcgcttgttatttcgcggaagggcaacagcttcgagaacctcttcaacgtcgtcgatgctatagttaatacctgaaacaggcctgctttcgccgttcaacgccctcagcgcgtcagatggactgccttctactgcagtagtaccgcctagactgggcgtgggcgaaaccgggaaaagtccactgggtggtcgcgaacgagaagcaacagagtccctgtccaggctgttcgtgaggctggctttgccggattcccattcttggagcaagcccctgatgtcacttccgattgattcgtact

SEQ ID NO: 7748 - DNA, 773 bp, Emericella nidulans
ttctactcgaggactaggtcgcattatagatcttcctacatgatcttacctataactgcaccatcagcgtgactggcgaaggcgtataacgactagtccacgaccttgcatagagtagttaacttcgtaaaggccagcatctaggccatggcccatactgctaagaagaagaaacaactcctatatgtcgactgcaaccatatcatgcttgctagtctctaggacacttccgttcgaactatcggtagaatcctggaaaggaacgggcgcgctatactcctatatggcggaacgctactatgtcatggaaacgatctgcgggatcaactcacggatgcgccccggctgtatgaggcttccttcaacaaaagcgtcaattcttatgagcaaaacactccctttggagaaaacaaggagcctaatttcaacctgtcattcccttgcggggcaaaaacctgtaaagggggggttttacatgggcgggcccccctttgacccgcatataaaggggtaaaaacctctgtccacccccccttcaagaatttccggttaaggccttattttgtgggaaaacagggggttttgcttttgagggccgcccccatagcctgggagatgcccatttatttcccactattccccggggtgatataccacttcgtccaaaaaagggggcaaacataaaatggtgggggaaaaaaccccgggaaagttttttttctgattataaaaggagggggttcgccacccgaaaaaactctccaaatttaatt

SEQ ID NO: 7749 - DNA, 1174 bp, Emericella nidulans
  unsure (1)..(1174): unsure at all n locations
attgagccatggtatatcccatctcggtctgtcggggtacagaataagaatagatagggatcaggctaggtcggcgctcctctgttgctaccgtcttcagtctctcctttgttagcctattgcttttgctttttcttttccttttctcatttctttttcgggttttccattttcttttttctggtcgcagagtggctcgtggctgaacgagtacgctgcgatccgagtgcgccgggcgatggaccaaagcggctagcgcgcgcaccctggattgctgtgggatcggactgacagtcactccagctccgatccaacttgcagcaatcctgagcgagcgggtcccgtttcagtcagtgcgtggctggaataacgagcactgggtggactgggtggtgtacgaagtggttgactgtcaaccttcgtcgactctgtacggagtcgtccacccagttacacacaatttagtcttctcacagtgatattttagatatcacactttctgtctgttgatccttcgaatcacgagctgtacctgttgcaaattccagattcctcctgcacatccgcgtatcagctaaacccagagtacgttgccaggatgcagcgagccatcgaatatcgattttgagatactccgggtcctaagtttgggattggcggcgccgaatgcgaccccaaataggctaggccagaagactgcatcgcctaccgctctcaggaatagcatcgaaacagtctttctcaggttcgcgcagccctgcaaagatttggccatcggacgaaccatagtgctcgggtcaaaacatcctggagcttggctcctccgcgagatagtagcgacatctcgctcgtcccgtccggtttccggagttattgatgtgcaagctcgaatccatgaatttgaaacccggtgactctcaattgcggcgagtttccgccaactaggggatttttctcatgacaaattgcgggcaacgactgctatgattgggataccatgggccatgggtcattgtatgtataacccacttacatgaagaatccgttnttggccaacacaatggctttagtttccaagtgggggcgcccgaagacctcgctttgaatgcggagaaaacagcttttttcaaccccggtttgttttgcccgtgaccttgattgaccccggtagaaa

SEQ ID NO: 7750 - DNA, 1661 bp, Emericella nidulans
gttgtgatctagagtgcatgacttaatgcccatccaaccctcattcactgatatgctacttctgttccgctaccgctggtggcatgctacacgaggcactccttacccgtactagttcctgtcgtcgggctttacgtctggcctcttcagctttttgacgttttaaatcttggatcccttctgctgcaaagtgtacatatcaacacacttcagccccagtcactcccttattatacctactgtccacggtccaccatcacttctgctcccaactcgaccgttccgcgaccgaggctcacctcctgaccaccgtctgcattgaacgatcaatccttcctttgagcctcttggctcagctctgcaattatgaattatatccatcatccataccctttcgctggccaccccagtgtgccaatggagcagcacctcgcttacgatacaaccatggttcatcctaccatgatgcatcacccaatggacggctactactacgcccagcccccttttgacatggtcgactactatcaccagccgatgatggattacgaagaatatgccgaaaacctctcacgaccgaggttgaccaaggaacaagttgagaccttggaggcccagtttcaggcgcaccccaagcccagcagcaacgtcaagcgtcaattggctcaacaaacgcaccttagtctccctcgagttgcagtatgtgatattcaagctggttgaaggctagtttactgactcttgcagaactggttccagaaccgacgggccaaggcgaagcaacagaaacgacaggaggaatatgagcgcatgcaaaaggcaaaagcggaggcagaggaggctgctaagagaaagtctgagtcttcagtgcctgagtcttcagattctcaacgttcagcggaggccaaagacgagaagaagcaagatgacagcaaagcccctacccctaaaccgtcaaagccagcatctgacgaccaaaaacaatccgaagctcctgctgagtcgaatcaccagcagacccgcagtgaatctaatcgcgtagctagccttgcgtctctgcagagggccatggacgccgccgctcagtaccaaggtggtcagggcacgacaagcatgggcgggtccggatcagtgtccccaaccacatcgctgccgaatgacgcagactcggccgtttggagttcagtaaactcaacaaacggagagctctctgttcccggtttagagaactcgcagtctttctctgattaccgttcaactagcgacgcgggtgctttgttcaattcaatggagtttgccctggcagcagatgcggctaacgcgccttggggttcgtgtgatgtggtttgcgactcgttagtagatttggtataagagtcttggctaaccttttcatcttgtaattcgtccgacttcctgtcggttagaaaacgtaaggggcttgtttttttttttgtcaatccttctattctatcttgttagtccttatgttcatttatataattttttgtatattgtataatttggtttgaattcttctttataattttaaatttgctaatctgttttttatatggatatatgtgtttatatcttattattgtgatatctttgatttataatatttgttttcatgtttaattaatcttaaacctattatt

SEQ ID NO: 7751 - DNA, 643 bp, Emericella nidulans
gataaaatgttcctgcttgtattatatagtctctttcttttccctgattcctgtgttattcttgagctgacattttgattaatgaatgaatacccactccatcacagcttcattggtataatttgaattccgtttgttctgtattcccaacgagtaagctgtgtgttgaatctgtacttcaacttttgggactaagtttagatacatataactcaacactcaagtctagaattcttcgcctgcaggtatatgtctaagacaaagtaagacgtgtctggacgcagccttagagtggtactctatatcagtccaatgtagggtcgtagatagccagaaagataaagaaagcacctggagttacatcttgtgttcagctgttcctttcaggatcatgttttgtgctgtgagacattgtaacttctagagtattcatttgtttctaggttgctgttatattctgttcctgcatcaacacgcatagaaatcagggtctatgagaggcacacactaagctaacttcatctgtcttggagacctgaggacagcacatgagaagtatagacctataagcagtcagttaccttgtaggttatcgaaccagctgcctgtaaaaagactgtgatatgcagagtatgtatcctgt

SEQ ID NO: 7752 - DNA, 1446 bp, Emericella nidulans
  unsure (1)..(1446): unsure at all n locations
gattttttatacttactcgggggaattcgtaacagcggctcacatataatgtcattcgttcttgcgcaacagcgcggctggaaaccaagcgggctcactccggtggtaactggccctttcggcgccctccgcgacggtgtgacgggcaacaacctggaggccaagaagcccacctccgaattcttcatgtgggagcacttcaccaccaagccctattttcactcaccggagtcaccactcaagaaaatcggcgagatcttcacgccctggccatcgtggatggtcgtggcttcgacttcagtatttcctacacccgagacagacgagaggctgaaacagctatttggcttgctggatgagggtatcaaggagttcaggagcgagctgggcagggttataggtttgctgggcacgggggagctgggatgcacgtatggagaggaagatgcgggcgagtggatcaaggatgtgaggttcgtggagggggtcaggggggttgacgagagtgttgtgaagggagttgtggatgtgctgaaggttgcgggagtgattgacgaggggttggaggatggcgaggctttgaagagggtggtcgggatccgaaggtgagtcttcttgttgagaaagctgatattcgagaaaagcggctatcgagctgggtaaaatatcccgtcacctggacaacactggcacattccctctacatgcactgtatgttctagcccagcactcgagggatagtctagtgcgttgactggattcgttgccgattcatgtacatctggttttcacagtgcggacactgagcaccaatcacgtattcagtaactactctcgagatagccatgtaatcaccattctgttacacgcgttccatcccaatcagacataaacatagtatatattatagatatatacacatacaactcatgactatcgctggtccaggtctttcatggccgtcacagcatcatcttcgtgcacttgaatttccatatcatccccttcaatactcccaagagaccaatagcctccagtgcccattttccacaataacaaacataagggcgtggcctcgacccgtttcgtagcttggcccggcattccgctgaacattccaactaacaagcaatataggagggtcttatttccgatgatgctgagctgttctccatgagtacctggcattctggaatgcagatcagtaataaaccacttagtgtgcaccttacgacggatattcatcagtaagagatcaagtgctgtatctcaagctggaactgtaagtctgacaggtcccggcccgtccccctcaagccaacctaagaatgctttactaacagaactcattaatctgaagaatgacgcgcatcaaaacaaacccgcncggcatgcactaatcgaggactttatgtttataaagactggttgaactagccacgatgc

SEQ ID NO: 7753 - DNA, 921 bp, Emericella nidulans
gagcggtccgcccaccaagagggatacctacccggagaggcagcggaagaagttggaagcatacctccagaaattgattcgattcttgatcttcaagcctgatagtaaccgtttgtgcaagttcctggagctctctgcgctaggcgtccgccttgcagctgagggcagctatcacggcaaagaagggtacttgatgattcaatcttcaaaaggacttgactttcgaagagcctttaaccccgggatgatgaaacgacgacattcgcccaaatggttccttgtcagacacagctatgttgtctgcgtcgactcacccgaagagatgaatatttacgatgtgttcttggttgatccattcttcaaacttcaaactcaaaaggtcagcttgcggcatcagaaagcgaaggaactcgcgaagtctgctacagaatcagcgcggcatccacagcaccatacgctaagacttgagaattctgagcggaaacttaggctgctggctagaaatgagcgtcagcttcaccaatttgaagattctattcgatttatggttagcaataccccgtggtcaaaaccaaaccgtttcgatagcttcgctccagtccgccagcactgtttcgctcagtggttagtggatggacgtgatcatatgtgggtcgtatccagagcgataaaccaggccaaggatgtgatatatatacatgactggtggctgagccctgagttgtatatgcggcgaccagcggcgatcagccagaaatggcgacttgatcgtcttcttcagcgcaaggcccgtgagggtgtgaaggttttagtcatcatgtaccgcaacatcaactcagccattccaatagactcggaatataacaagttctctctacttgacttgcacccaaacatattcgttccccgatgttcccatca

SEQ ID NO: 7754 - DNA, 131 bp, Emericella nidulans
tccaacagcggagtaccgtatccgctctcagccccgttatacacactcagtccgtgacgccccatcacaatgagcacgcagacggttccatgtgaagcggaacgatgtaaataagtgacgtaggatgccag

SEQ ID NO: 7755 - DNA, 676 bp, Emericella nidulans
accggtgcgtagtggtgctgctgcatatagaaatcctgttgaggagccggtattgagtacggcggagtcggcaccatctgcgagcgataagggaagaacggatgggatggatcactcgtaacctccattcccacatgttccagctcgtcaattggggcgcggaagctttgcttctgcgtcagctctggacggggccggacatatttgagcgcctcgaccgctgacggcggcgccagcactcctcgcgtcacgtcctccacgctatagtaagaaacaaggtgatgtgtcacgccagaaacggtaacgctcatcgtcttcttcaccaaccccatctccttgaaaccatacgaatccaccagcgagccgaccagcgccctctcgatttccgactgatgcgtcctctctgctccataaccactggctgttggtgacggagagtagctgcccccgttgctatcctgtcgcgcgtacggttccccgggcctccctgacgtgagggggcgccgggtggttttcttcatcgcccgtttcttttcacccgggggaaacggcttctccagctcgcggtagacgaggaagttacccagaatgcggctggggctccacgttacgccgtccgtccatcgcttgatcccggatgaattctcctcgtaaataaagacggccccgctgcgaa

SEQ ID NO: 7756 - DNA, 679 bp, Emericella nidulans
atccatttattatcgtcgatgtatgctgatgaaatcatgtcttgaaatgaagtgtcccccgttttttcgttcacccactggatacccttgggtgagaagattgaaaaccccgatgatgacccttgaaactcatcagcccgaatacttgacatgctccagcagatcagcacttaccaatataccgcgtctcaccgcaattatttgtgaccaaagaacacatcatatccgacaacccttctacttcattctccgactctttctgcgactctggtgaggtagccgccgttcgggggctagaatgggagtccactctgggtgtcgaatgccgtgatgtgctagccggctgagacggttgtccattaagtggcagactgaatctagttgggctattggtagcattatagccaccggctgaaagagatctgtcagcaagtcgtttttccaatgtcccaaggtccgtctttccatcatcttcagagagtagaccggaaagacgaagcagagactccatgcgacctaaacggttctcgaggccttcaatatatttggcgctacgacacgaatgcaattagcggttgaacactttgggacaaaaccaagagaacgtaccccttaggcgggttgcgctttttctcaacctgagtaaagacacagtctgttttgtaattgatacagtggg

SEQ ID NO: 7757 - DNA, 633 bp, Emericella nidulans
aggatggtgcagttatatccgcgtgttcaggaagccattcacgcttaggttgtctgtcgcaatgaggttgttggtacttgaaatttggaacgatgatggtaatcataatatggaggtgtcaatataattcactaatgggatgaggtatcccctctcatttttctaaacacagcccattagccctgaatcagcccaaatcactaagcttcgtttatctcagaaccctagataacttatcttttgagaaattaataaactatcatagcagaacaaacccaacagcaacaccaaaaagccccagcacaacacctctagaaacaccaaccacgccagaagcagtaccttcaaacatcttcgcatcaacatcctcatcccctccatgcttctgctgtgcatcaacacccgtaggaacagggtcgttcgaagacgcaacgcgcaccgatgatgtagatgcactatcggactgggctgcatgggcagcactcatctgggatggagtcggcaggatcgcaaccgcgatttgcgtgccatgcatggcgccggacatgttcatatgtgtgttgttttcttcatcctcctcatcgccatgaactggcgtggcagtctccgcgcaggaacactcggtgcgtgtct

SEQ ID NO: 7758 - DNA, 699 bp, Emericella nidulans
ggtcgcagtttcgtgactctgatggtgatgacgatgatgatctagatactgccgttcagtctacgatccgaagccttttcggttagaaggcgacgccaaatcggggatgtctagcgtggggtccgagattcagaatcggaaacggggaggctctctgcgcagctggcaggatttcatcttcggaagcgccacgaacagccgtaagactagccgcgccagcagtatcatatccgagcttggggaagacgaagggggtggctctcgacaagtaccgaccgggaacgtacctaaccgacggaagccgctagatgaacaactgtttcagcagcctattgaaggacagccggcagacaacgccagcacgcactcgcggaaatcttcgcgatcaacctcgtcctggacgatgaagttgttcgcgggtaaccagaaccgggatgagagccctatggataggaaccgtgggagaacttcttcgacgaacagagagaggaataggggtcctccaccacctgtcactaaacatggtatgacggctgttgcggcgctcaggaggataaacagtaatacaagcattcaaggggctcagggaaggcccaatggttcagggacggcacccaggtctggccagtttggccgaagacaaccggcttcaagcatctcgcagggcacagcggccgatgcttcggcgatgaaccccac

SEQ ID NO: 7759 - DNA, 1138 bp, Emericella nidulans
agcaacccatttcttattggatatgattagctgacggtggttttcaaacttcggttctgaatgtttcttggaggggatatcgggtagaggcagctaaacgaatgactataccccattcagagttgtcgtagatacgtattacggagtagcgctgcatccctacttggccaacacaactcatccgccatacattttctttggccttcagcttggaccaacattccctgttgttaattcagaacagtgttattatctttgttctttactttacttcttgttgacggtctgagacgttgggccttacgcttgactcctattatctgaccctgatagcgctcactggcgccttcgttgtccccagacttccggtcaacttatcactcccgcaagttgcagtgattcctcgtccatgcgcgaaccactagtcggctgattatagagcgagtttcccgtgcacacgaattaagaaaatcgaaatatcgatcaggacacgaacaaggcggaaaggagggggaaatagtttcacagttcagtccgccacactgtcagcggttatagattctctacacgttcggatacatttctgcgtcccctatcagatcgcaaagaaatttgctcacaatggctggcactagaaactatgactttctggtaagtgttgctagatgagttattacaacgtcacccgcgctgagactaatttgccacagatcaaattgctgttgataggagactctggtgttggaaagtcgtgctgccttctgcgcttcagtgaggattcgttcacaccatcgtttatcacgacgattggtatcgacttcaagattcggactattgaattagatggtaaacgggtaaagcttcagatatgggacacagctgggcaggagcgatttagaacaatcaccacggcttattacaggggtgcgatgggtattcttcttgtttacgatgtcaccgacgagcgttcattccagagtaaaataaccccatcttacgttctcccatacaccggtcgctaacccaagtcacatcacagacatcagaacatggttctcgaacgtcgaacaacatgctagcgagggtgtcacaagaccttattgggacaaatggactgggagagagagactgtacacgg

SEQ ID NO: 7760 - DNA, 813 bp, Emericella nidulans
ccctatctaccggcacgtgtggaaagcccctgaaatgacctctgaaccgtcagaggaagctatatccagcttcatcagcttcaccaatacctcccgagaccaagccatcagctttctcaaagtccgtaccttgcatataacgattcttgcgtttgtctgaccgtaatattcctaggcaaatgacctcgattcgaataaagccatcaatgcctattttgaggatcctaccggcccgcatatacaggtacatccggcagcgagtcccggctgaaaccaagcttaccaggatgtggttaggtttcaagctatcacgatgacacaggcccctcgggtatttgctcagttgctctactgatggaggactggacttagtgctgacggctttagcgtaccaagtcgagcgttccgatgccgcggcgcctgctcccatccctccgtcgcgccctccgtccacatcgaacatgagagatgcggctcacgcagtcgagctgccgcctccaccggcaccgtcacaagacacgaagggtatggttctttaaaagttggcttgcatttgctgaccggaacgcgacttcagggaatggactgtcgttggcggagcaggaggagcgccaactgcaacaggcagtagcaatgtcgctaaaccagaacctcgggcagcaagagaccggtgtcaccactacgggtcagcacttcggccgggcgacgcgagaccattatgagcaagatgactgggcgttgaccctcttcaactccagcgcccgcgagattgtcatcagcccggatccgagtggaccgcaagagacaaccagc

SEQ ID NO: 7761 - DNA, 1190 bp, Emericella nidulans
tgcgcattacagagtagtattccctgaccgagattccgcactagtccacttgagccttagggctttttgccgtctcatccaggctgggccagctgtgttgtcggggggcgtgactcccaagtccttttatcctttccctcccattctcatcccacctccttacaatcttttcctcaataccttcatcgctgttattatcgccttgacggattccatcgaggtgatagtcgctcgttaaagacttcctttgctcccttgcctacctcgcgcttaggccccgaatcagaccctcgttaaatctctccgcttcttcgccacccgcatttctcctagagtgatcgtcagcctgggcttatacgacgctcgagttcttcgatcgttgtcatctcgatctatccatcgcaacatcgaatagcccatcatgcgggtcactgctctcccgttctttctctactcgctctctctcgtggctgtggtagcgggtcagagcacacaggtcacagattccatctcggatgtcaccgacgctcttccgacacccacccagacctctgctacagacaccgattctgacaccgaaaccactacctctgaatcttccagtacgacgacgacagagccaacaacaacgtcgagttcaacaagctcgtccgatgatgaaaccagctctggcactactacatcatcctcgtctacctcaacgtcggatcccacaaccacaacgacgagcgacactgataccacgaccacttcatcaagcactgatccggatcccacaaccactagcacgagctcttcagatgatgacagctcgacgacacgcactccgaccgtgaccaccatcacaacaacccagactattgatggaacgccagttcctaccacatacactagcacaaacagtgaagccagtgaatctacggaatcccccggcttgagcgggtcttctggcgattccgactctggcctggactccaaccagaagaaaataatcatcggtgtcgtcgttggtgttggtggtgccatcctgattggtgctattggggtggttgcttggaggatacgtgcccggaggcgggctgctgcggatgacgacgctaccgaccttatgagcggcactgccgtcggctctggtgtccgtgagaaagccccaagccccttttggggcacttcctcaggtctacgctcgt

SEQ ID NO: 7762 - DNA, 884 bp, Emericella nidulans
gtagcatcttgcctgtccatcatctgaatgtggcatggggctcaactttccatatttgagcctacctgttcagcagtcatgaaaaatacggcaaaatacgatacacagaaagaggataatccttaagatggttcctaacacggcgcggatgaattccaggtgaagtaaatcccaactaacgcctaagcaaatcgccatgaagatcatgagtatcactgtagagtagatcaagagcaaaaaacaatgagcaaataacatcaaccagcattagacgcaacatctgtaacgcttatcgggaatcaggctcaacgacaaggtatcaacctccatcagatagaggcaaaggtcacggaatgtcaactccgggaaaacagcagaccaaagaagcaacgaggccaatgcaaggatgatcatgggaatagagtacaaagagctgaggcactgaccccaaagcaagcggatttcggttgtgaaacgcaaggacttcacgtccagtgatcccataagcctaacccagtttataccgtcctctgacggtataaacagccggtactgaccatcacttcgttcaacagggacaccaaataagcgaaagaccaccatccgatatgttcaatgaaataaagcaacagggagacttcccatgcaactcaaagcaattagcgacaatgtaaccgaacatacgccattcccaacctctttagattgatataaaaccggaaataaataattagttctctgcaaaggtcaggcggcagtccctttctgcctcttgcctcctacccgagggctagccttgactttggcacccccggaagcggcgccgttaacctctccgccggcctcctcaccctccattttgacggtactagcccgtcgacgct

SEQ ID NO: 7763 - DNA, 1266 bp, Emericella nidulans
  unsure (1)..(1266): unsure at all n locations
aatgtggtgttgcttcgtttgcattcagcacctaagtcaaaatgcaaggatttggggtatatacagactatcgtacatcatcgcgagaaagcacaaactactacttcgcacaagcagtgtaaattgcaaacacatgtctcccgcactcaacgctctgtcgcatgtcaacactccggtcaccaactattccacgataagcaggcataatctggagtcgcgcgagctctttgtcatcaagggatacggtttccggagacacattgatatgcgctggtttagaaagattgcttctcttgccagtcccaagttggaagtgctcatttccgccccaccagaccacatcgagacctgcgtcgtcggccccctccagagaagacgcggaacgatttagacgcgtttggttgtcgagaacagctgcgacatgtgttgtaccgacagagatatcattcaagcggattggcaatagcctctgtgtggcttcgtcgtattcaactagcccgctgagagccttcaatagagtgggatggtcctgcaagtgagtccatttgccatttccgagagcaccccagattccccgtccacaggtccagatatcagatatgaccttacttggtgatttggaaccttgaccttggccatcttggtgtacgtccacggtaaagaagctgtttgcgcctccggccgcaacgccagttgccctaggagagcgtgagctgtcgcggtaaagactctccataagtataggagtgggcgtgtccaagaaaggagaattcgggtcatatcccaaccccagttgcccaaacgagttgtcgtcatacgccaaaacgttgccattctttgtaagcaacaatgagttgtaatcgcctgcgcgattgggcgaccttacgccgtatgcgtcttgactgtgaggagctcatggccctgtggctatctgccagtaaccggggcacccatttccaaggaggtatttcagcaccgacgggaaaactttcctgctgttggaaagctttccacccctttaggtttttttttccctttgacggtgtaaggaagtagctattccagaaaggccatttctccctttccggttgttttgaaggggggaatttcttggagccccgcgggaaaaaataaatttagagggggggaaccttgttttcgcatcaacttttaggccccccttataacactttaaaccgttacctcaacaaattttcgggggttttttttcccatataagtgcgtagggggganaccccgaggttt

SEQ ID NO: 7764 - DNA, 568 bp, Emericella nidulans
gcaggcatggacggggcttggaaggacttcaaagtgcagtcgtctgattgattagatatacgcagtgctgtatatgggtcttggccatctagtacgatcaacaagccaagagtgactctactctctactctttacaggtctatcgatagcagtcaatctatgcatcgacaagagttcaatttgacttcccgatttcgactcagagaatcctaggcccatgccaggacttataaatgcctatccatgattgcatgaagtcctttctccaaacacctcaaagaccattgcttgtgagcgtcagtttacctttttgactatgtcgggtcctcaggctggatcatagcgctattccatattcagcttggcgtagaatggtttacgctagcccactccggctagacggcctgaacgccgggatatttccacgtgacggcattcttttcaacttcaagccctacaagcgcgccctacccctaagccctcattgctgatcctggaagcatcatcgtcatgtcagcgccaactcctcgcgtcatggtcgatgccagtgcatcaggaccctccgttg

SEQ ID NO: 7765 - DNA, 469 bp, Emericella nidulans
actcctcgatcggatcggaaaacgtgcagtactgagcattatcgcatagctcacttggggatgatacagctcctctataattgtatatgtaagcaggtattcctgatgatcaggtcgcatccagttgaaccagctcctggtcgaagctggatcctggatcgaaatcgggcacgaacttctccaaaaggatggcagtatcgtcttcgaaggaatctgtgctcaagaccgtcgcaactgacacctgatcaacaatttcggtcgctttgaagagatcttcatcatagaaagcggacgagtcggagaactcgtcctcatcgttcccattatttttcgcgccggagccatctgccttctcaaccggtgtcggatggtctgccccatctagagcaatcagaatattgtcaaactcttcatcctcgaagctcaaatcgtcattctcagattcggtggccgtgtcggtctcaatatg

SEQ ID NO: 7766 - DNA, 977 bp, Emericella nidulans
taaatacgatgaatggccatgcgtagacggcagcatcaatcctcatcctttgtcaacgcaccgcgactccgccgaatccgttcatccagactgtcctcctgcagctgccgatgcagacccgacatgaactgaccccggtctgaccgccgcttgtcatcttcctcacgctgcttctcttcaagggccgtgacttcggcaacgcgttgccgtcgcgtagcttccatgtcctgagcgttcgcctgcatctcggcgagtcggcgcttgcgctgttcttccagctcttgagcgtgctggtccgcgtttgcgtctgcgttcccgtttctgctatgtgaccctcggtctcgatttcgatctcgcccgaaggcatcggtgtccctgtctcttgacgaacgggcatctcgccgactgctgcggctgtttctgtctctccggtagtcctggtcttggtctcgatctcgtctatcgtctcggcgacggtccggtcgaggggaggcggatctgcgcgctgctcgatcgtaccgctcgtcgcgatcatggtcccggcggctcgaatgataaactctctccaccctattctctcgctccccatcgcggtcccgatgacttctgcgatcgtgttctcgatccctatgccggcgatcgtccttttccacccgcggagatcttgacctcgacctggagcggcgccgatgccgatgactccgatgtgaatcattcccactatcccgtctgtgcctgtgacctctttctctttccctctcttgatgtctctccctcccttgttcccgttcgcgccgtctgaccgattccttaaccatagcctcatacgccgcttgctctcgcttcctgatctcaagcaatggatccgccatgaccttggccatcgtatcgcgcgtattgtgcacgacgggcggaagccagcgtgcgcctggccatcgccgcccccttctccaacttcttactctcatcattcttta

SEQ ID NO: 7767 - DNA, 1143 bp, Emericella nidulans
  unsure (1)..(1143): unsure at all n locations
ttctcctttttcttcatctggagattccagacgatagtccatgggagaagtgctagcaagaagtcctgaagcccagagtacgctggaaatgtcaggttcgccgtaagataagaaaaaggcatccaaacttacctccaacgaatagcgaataattcgtgaacacataatccggccaacacttcgatacaatgctcgggtcccaattcgatctcgggtccttgcatttcacgaaaacaaacagtgctgcaagaaggttcgcgatgttcattgtgatgatgatgaaccaaagcaaccagttcatccatttctgaatcacgatccggagcagagtcacagcgaacgatgtcttccccaaagcgcaggcaagaatagcaagcgtctgactgatgctgctgtatcgtgccacgccgatgaggttctgtggttccatagagacatactgaatgtgtcgacccagtccgatatctgctgctgcatgacagactgcagcgtagccgatgagacaggcctaggcgagaagaagaagctggtcagtatgaaacaatagtcgaatcataagtacgtacaacggcaacggcagcaatcacgtcgtcccatccaaagatccgcttcagatgaagtcgaacacagaggcgaagacccaaaaacagcatagccatccccgtcatcaaccacattacggccttaactgttgggctctgggtctctgccaggaactcggctgatggctgcggttgttgattagccattgtgaatcagattaagagtgatgttcccttgtgaatgagcgttagagcagcacttaccgagacatgctttatatagcgagagagcttaagcaataggggaggaggcagaattgatagacgacagatcatagttccaagccaagtattgttcgtaaatgtgatcaattaggtgcttattgtctttcttcacggggataccagagttacgggacgccatcactatacagctattggccaggtaggaaagccaggtgtgctgagccagacaggcatgcatgcgacatagcggatggacgagtcagaacgccaaactagggccggcacatncgctagcactagcccaatngacagctgtcagactaacggctcagcatagtcgtttcagatgctcaga

SEQ ID NO: 7768 - DNA, 810 bp, Emericella nidulans
aggaacaagacatgttagtctagtcttatcgtggctatagtggtaggaattgtccgctgggtgacttacatggtggtggcctagctcgagtggtgcggggaaaccggagatgggagtgatgatgcaggagataaagagtacgacggccagtcccgttcgcaaagagtctattgtacagaggatggacgaagaaagcggctgagagaaaagtcggaaaagagcgaagaggctgaatgaggttgttggcagtctgatatgatacaacgacgcggggagctgatgagatcacgagcctctcggagtgaggtgaaggtgaagatatataaagagaaggtacaggatagagagacacagggagacgctgaggtaagagtaagggaagatacgatagaaagggagagaagcgcagggtatctgaaacgcaaagggttgagtaagagtaagagtcgagttgcggttcctggtcagcgggcggaggagaaagtcaccgctcaggcagccaacatgcgtcattatacaagttcgagaatctcaccacacggaacacttccgatctcattaagccatcttattcacgatatcccagccaattttaattaaatatctgttgcacagttcgttgatccttaacggatgcgccacgtatatatctagatccgtggacaccgcaactcttgtcgcaacgtccattactgcaactatgtcggcgaattcaagaaacgacttgttcagcacggctcaaaatatgaacaatcatactagcctattgccgatgagcgtctcggagcatctccttgcttagaaccgacg

SEQ ID NO: 7769 - DNA, 477 bp, Emericella nidulans
gagtggcaccggctgcggcacttgtggcggcaactacagaaatatcgcgttgtgtgacggtgacggggctctcgctgagcaggtaatgtatgtattgacggcagcattcgatggacatagatgataggagagactgcaacgaaggaggtttgtaggactctagactgctgcttgttatgttctctggagccatgctccccgaagcttcgtcttcggcggttgtcgttggtgtattcgcggccacagtcgcctcagaggattcttctgaagcgatattatctccaggagatggggtgacaagaccggaggtgggagagtgagcgtcttgggtagcagtgaattcgacaggtggtacgggctggctgtgaacaaggattttttccttctcaatggcctcgaggaccttctcctcaaatcccttgacgagtctttttcggcgccaaggctcgacggctatttgaaagatcaggaagagga

SEQ ID NO: 7770 - DNA, 916 bp, Emericella nidulans
  unsure (1)..(916): unsure at all n locations
gatggctttcaagaagcaggatacgacaaaaatctgaagattccagcttggcgttggcgggagtgtgcgcttacgattgcaggaaagatgagacgggggacccgatatcaatcgatttggaaaaagagatcgacctagtcagcttccatgtcgtcgtcgaggtcgatggcgtcgggattagctggggcggcgacggggccttgacctgcagggggagcacgattaccgccttcagggccggtactagcagcgacaaagccgataggcgcacgggcttgtcgttccaaggcagccatggcatctgtggtttcggtgtccatttctctctccgctgcggctgtggcttcttcgccttccggagcccgttgttggctgcgggcgatggcttgcgaggcgatgaagttgacgtcggtgctatggcggtttagttagccttgcgtgggatatctcaatgtaattatttaggtatacatacttgtattgagcttgaacacttctcttgatccgcagcatttccttaaatgtatcttcgtttccatgttggacttcaaaggcctcccatttctgccagaagggcgcattggtgcggggatcgcagaactgagatgcatgtccgtagatggcacgagcacggtcaatctcgcccagtctcctttccatctcagcgaatttaaggcacatttctttagcctcatggtcgggcagagcggcaattgcgcgctcataaattggccgcgtagatggtaatccgaagttggaagctgatttagtaatgtagaactcgaacatctcaaaccgatcttcgtcagacactgcccgagtggcgcgttcatagattcgcatggcgtgccgagccagaccccgctcttcttccaggtaccatacatcangtagagagtctggcgaactttgaggg

SEQ ID NO: 7771 - DNA, 667 bp, Emericella nidulans
gggcgccagaaaccccgattgacgaatttttagctgggtataccaggctgctcgggtcataaatagatataaccatcacgtggacgcaattgaacaacgcaaacagatgcacaaaacagacgagtgagagaggcaaagccctaagcgcgggatggctaatgcgtgagcgaacgaacatgaagtgccctaagctcactaccctatgtcgagtgacgaaaacactgatgccagctgcaataccgaatcggacgacacacagtgagatgcgctctacgtacaccgcgcactgcagcgactgcgtaagggatctggtggcagaggagaacagcatcggtgagcggtttagcttcgacaacgacttgatgatagttgtgcgcaccaacagggacctcgcacgaggaagagagctcaaaggcctgaataggctccaaacaaaaacgtcgggatgtgaccatcgacaaaggtccgtccgcggcagcttaaaacatgaagctaaatggggaggtgaacccgcagacgacaatttcaggcagttccctgacgttcacagcgttaatggacaccggcattacaaacccgacccttgtggtagaacgtgcctatctactgactttgattggggggccgagttactaaaagaagtgctaccctataacgcgatggaaac

SEQ ID NO: 7772 - DNA, 136 bp, Emericella nidulans
tgcgtagtatgaggacccaccatggacacgcatagatcgacaattgcaattaggtgcgtacctaccccatatgaccagatagaccaagacgtcctcgccggccaacatatactgggctggcatcgatcctcatcgc

SEQ ID NO: 7773 - DNA, 556 bp, Emericella nidulans
atgccctttctctgagctgcagcgttcatctcctccaaggcaacctggtatatcttcggatccggctttctcagaccagtatgcgcggatgaaatgaagaagtcgaacattgtctcacggccgatcgtatctttgttgaattcatgatcgtcagggaagataaccgtattcgacaaagctcccataatgaacttgccagactccttcagcttcttcaacgccggccacatggacttatcaggcgttcttgataccctcatcatctcccagaatagccattctgcgtctatctcaggcaacggtgggttcgcctctaagactttgctgggatcttttttttgaagatcctcgttgaatagcttccataactttgggtcccgcaggtccttgttaaacccagcaaagaagtcggcgtccattttgatgtctcccgctccaatttatgccaactaccgtgaggggaggtgcgggagatgctgaaatttaccatccggggggtatattatgagcaatttcataatccaagatagcttgaaatggtgatacgactaaatag

SEQ ID NO: 7774 - DNA, 1204 bp, Emericella nidulans
tcctactttcgcatcaacgcctcatcctcgacaaccacaacttcaacacaagccccatcctcaaccccagtcgccaacaacaccgacaccaccgccgattcccaatcaaccatcccctccttatctggtaatgatggcgagacggcctcgacgctggcgccaaagtcggcatcggcgtcggcgtaggcctgggcgtgcccgccctcgccctcgccggtctcgcagccttctacttccgccgtcgcgctaagatccaggcgcagcagttacagatgcagcaggcgcaacagtatccaccgggggttggagcggcgggacagtatggcgggcaacccagtcagccagtctccgaactgagtggtcctgcaccgtataaaccgcctactaatgctcagtatagagcaccgagtgagattgaggcgtcgaatgtgggtgctggtgtgcagtcgaggtttcaggagttatctgggaactgatgaacaatctctgttgatgatgggtataccctcggaaaagattagcaagattgacggctcacaacagtctcaagcctccccacgcaacaatcgagattgcatatttccgtcaatacgggtctctgtcgatgatgtatagagccacgttttgtttccaatttctcggcttacatttctttccatttatcgtcgcgctagtccggcgtttcccgagtgccttgacaagtagaataccctgtcggggcgctagtagatagaaaatcatttaaaaacagcgtgcacgctatatccattccaaatctctatggcattcccaggaggtagtatatgtaaagaaaatcgaccatcattaattacaaagaagtccgcctgcatatgcatattgcatgcgtctgcgatgtcaagaacatgcatgaatgtgagaggggtaagtgggtattggtctcagcgtccaagatttcgagtacaaatcagagacagaagccactcgatacggatcaatcttaaaaggagaaaaaaaaaaaccagaagcagaaaccggaaccggaacggatatgggaacgtgagggaatacatccgaatagttgaaagaaaatggtatgcatagatgagattatatgtatgtccggtcatcatatgtcagtcagttaagtcagttagccaccccgttctgttaactccggagccaacccaggtaaggagataagagatgaaatggaaatacaggc

SEQ ID NO: 7775 - DNA, 756 bp, Emericella nidulans
  unsure (1)..(756): unsure at all n locations
aaagactatctattatgaagtcaaactgcttggtcttcgtacagggccaacaccgaacgatgctagcgggctatccagcggattcgcggcgcaaccgtaccctacctggcgatctccgggctgggagagaggcagccttgctgtcttctcggacgacggatgccgtttcacaaatgattcgtttggtgggaaggacttcacggatccttttagagtgggggaaaccgtgggtcttgggatgacttttgagctggagaccccagtctcacagcctactcaaaaactgagcgtcaacattttttttactcggaatggccagcacgcgggcggatgggatctgcatgaggaggttgacgaagaagccggtagcgttgagggcctggggggtgaagtcgatttatacggggccattgggttattcgggggagttgattttgagatatgttatcatccagggggttggctctaccgtccgcagtgagcagctcgggtgaacgccatattactgacaacgaagacaaatattgatcctcgggtgcggtgcaagtatagaccgtcaccggcgcaatgtaaaacaccgatacaaatgaacggcgcgcgctacatgtttagacagacagaatgcgtacctcgaagcttgctatgcttttggngcgagaaggttatgcaatgtacctactgcagtttgcaatattgaagatagccgagactgttcagcctttgactgccactacagaaggatcacagcagcaaact

SEQ ID NO: 7776 - DNA, 628 bp, Emericella nidulans
tttattcaatctactcttatttttatccgtacgttactgttatttgtttttatttatatttttatttttattttttttatatatatttttattgttatctttcgtatgcgttccggtttgtggttttatgcctttttcttttttgctaaacatactgagggtagagatgtggcatctctattcctcatgtccatcatcctgccctctgtaggcgggacctctgctcttgcacacccggtcatcgcaaaggagctcgccaaggccgacttatatgatatgcaaaagccgatccaccggcagtgcacgaatgtatataagaccaaagacggacggtggtttcatttacacggatctatgaacgcgggtccaactatgcggatggtcggggttccagaacaggaagtctcccacgatgaggcacaaaagatatacatggagcgagttgctcagtgggattccgaggagattgaccgtgttgcgaacgaggagtacagacaagctggcgtgatctgtaacacgccagaggagttctttgcgtcggaacatgtatgatcaaccatccatgtcttttcccgtcgttgcttttcgttgcacgtttgctgagcacttcaccgtgttcagggccaga

SEQ ID NO: 7777 - DNA, 1370 bp, Emericella nidulans
aaggcgcggaagactgccatggccgggatatagaagacgggcatctgctgcttgagcgggtcgacgtcgacgtggatgatctttgccgagtctgagggactgcactgagtcgggatccaggggacgtcacagtctgcgacgaggataaagtccgctgtcttgatggcttcgtggatcccgaaccgcatccccagggatgctggatggtcagcaggaaaacacatatcactaccacccgtatctagcacccgaatgcctttgtatgtgtctgcaagcttgacaagctgctccactccccgcgcagtacgccccgagtatccaacaatgaccaacggctccttcgcagatgcaagttcctgcgcaataagctccaccccctcagcagggagcgccggcggcgcaacacctctccacccgtacggactaacagcatatggctcgatttcctcctccatgacctctcgtgcaccaacaagatacaccggaccctgtgggtcacttgtcgcgaactttaaagcacgatgcaccatctgcttgatattttttccagagcggatatccgcgctgtagcggcaatactgcgatacgatctgtttttggtcaggcacatcctggatccagtggatgtattctgttcgggagccccgcatctcgccttcaatcgtgaacggggagaggccagcgaagatcagaacgggtgcgcgcccgcacgaggcattgtggattgcagcaccgaggccctgagtaccaacgtcgacatgcacgatgacgcattgcggctttcccgttaaccgtgcatagccatccgccatggagagggccaccatctattcgctgttgtgttagtaaggtcatcaattgctgcaggggaggaagatggccgcgatgtgagtggaagtacctcgttaggacaggtgacaatcttcggaaattcatttggcttctccttctggcccttcaccatggcctcgaggatggatgggtgatcggagccaaggttaacgaagcaatgggtgacgccagcctaaacaattgcatgattaatacttcttggggtacagtattcgtagttaagcgtacctcccagagcgcctcgaagaaggcaaacgaagctgtgtagaccctaatgtagtgtcagctcagtctgttgaactccagttggggggactaaatatccgtacattgtaatacagttggggtcaataccagagtgaatgtggaggaaaaagccgagtgtctcgggcgagcgagacacgctttatagaggaaccacgaacaccaatatcggcaacatctccgaccccaagagcagacaaggaccgaagaagggcccgtttaacagaaagcttgagggctcgcaccaattccgc

SEQ ID NO: 7778 - DNA, 659 bp, Emericella nidulans
gcgctacctggagatcgaggcaacgtggtccgaataaccaatgacgaacaacttctaggaaaacggacagaagaatacgattcagatgaaaatctcggcggaagttcaccaataaataaagggtcgtattaagacgatcaagacggcggcagtagggccatgcctctgatagaagcgaagatggcgagcagacaaaccttgcaagctctggaccgggagtggcagccttgtggaaaagacgaagaggtggtgcgtggaccgtgattgatacgttgatcgaggcttgacctggcttgaccttcacgaacggggctatcaccgccggtctgagacagtgattatgcaccgaggcatggctggcgtgaccgtaaaataaactacccgcgcctctccggttacctccacctgagcagagggcttagtacgtctcacgacagaggcagccgccgttcgcgagggtctatcgataggcatactactaccccgtaatccgtactactgcctgccaaactcttgagggcctgacagtccttgggcgtggaacaaagacaccaaccgggacgatatctgaatctgtgacccgactgaatagctgcagttaggggtccaatacctagctcatcccacttttcgcagtgacaaataaaagtcggcagagg

SEQ ID NO: 7779 - DNA, 535 bp, Emericella nidulans
gtcctttcttccatttccgtgggttttcaaaacagcagaatctaccaaaagacggactgtcgaaccaattgagtgattcgtctaccgttcttctgtctctgtccgtcgtcaccggcgcggagacctgttgcgggtgcttggtgtacgttagcttgccggaatggcagcccccacacctcagctcccgacccggttcccctgctggtgtcgggccatatattcatggggaggagaggcgaaaagcgatctggggtttatagagggtgacttgattgaatgcctgaatgcgggggacggacaatggtggatgggccgcttacgaagggaccggcgtatggtgggactgtttccgtccaatttcgttcaacttctaggagaggattttgtaccagttactcgggcgactagtcctatgctcccagcagctgcctccccaatcacaaacccaacgtccgctcccaagaagcaaaagacagttttcagaaagccgttccaggcccataaggaagctcttgcgccgtctggctctggaggt

SEQ ID NO: 7780 - DNA, 625 bp, Emericella nidulans
tttattttagggaactgagcaatagtagcgagagaagtactgctaggacgcccgtctgccttgtatttcccgtgaataaacgccgtctacattttgcactaagtgagtactagtacaaagcccattatacacatctcttcaccctgattactccatgctgcggcggtaaattcaagtcagtaaaccaaactgcctttggccgtttaccaccgtactcagccggcagctcgatgtgatagtgtctcagtatatgtgcaaccaacattttcaactcaacagacacgagaaaccgtccagggcacgcgtgcttcgcgtgcccgaaagccaggaaattctctcccgtggcggcgaattgtttcccgcctggaacggcatggcggaaagggatgaatttgttcgggttgggatagatatctgggtcagtctgggcggctcgtgcgagcagtgccactgttgcgccccgaggaagcgtgattccatccggcgtctgtaggctatccaccatgacctttcgcggcatggtttggctcacaagggtgttggtccttagagattcgcgcaaaacactgtcaagtttggccatctgcctcgcctcgttttggaccagcgctggctttcgcataac

SEQ ID NO: 7781 - DNA, 512 bp, Emericella nidulans
ggatatggtatagatctcttaatgataatgcaaagcaatgatgtcttacacgaacggcctttttgtaccgatggataccagccagaatctgatagaggaatggcgatagagcatatcgctagatgattcatgcgcagtgagaggtatttacaactggtggagcaaaatttcaaagccgtacctggcagacgctggcttgatgggggcagctcttgattgctcgctttagctcacctggctgaaatctctatgcccggtttgcgtagtatgaccctttgcaccctgttgtccgacgagtatagcaccacagtcgttacaatggaggcggaatgcagccacatcagtataataattcctctcctgtaaaagcttgcaaacggccaacgctttctcgagcgccagtgaatctgatgcattgaacacggtagtgtcaaattccggcgggacattctctccaggcgacaaagtaatggtgtcataatgaatgccagaatagaccaagaaacatcgtc

SEQ ID NO: 7782 - DNA, 510 bp, Emericella nidulans
gaacaagatggattctggctctggatgtagttgggttgcgagatcacgatctctatgcgtgagaacgtcgtgagaatgtcgccaattattcacggggcgaagtgagcgttgttgcggttccgagacactgacacacccaagcccttagctgtcccagatccgtggggtctacagagtgggatcccatgtttcggctgcctcccggctgtactcttgcgtacgcagatttaccccattttacccaatctacccgtccacacagaggccgttgatcggactcctgctcttgtccgtctatcttggccctcggcgcttggcaggtgcctagacgtgaggtcagaatcctattaccttggcctggtcgtatcccttgttgctggtactgtgttttggctgtgcgcctgtgagcgcatgattctcatttcggggtgtaaacggtccagcactgggtggccctggatcagcgcctgatgggtcgacgggcttgagcctgggaggactcgatatgac

SEQ ID NO: 7783 - DNA, 542 bp, Emericella nidulans
tgacgtcgacgactgacgacgactggtgatcctaaggcatcatcaccttgtaagaattgcctggaagcgagaaaactctttacaagataacgtcaagaacaggaatgcagtgtaataaacaatttgccacgctgggatccttggtccgtggttcttgtggctttgcacgttggttggttaggcgtgcaagggcacccggtattccgagggccccaggcgggtgagacaatggcggcagaatacttcgagtattagcctcaattggttaagcggtgggcagcatgtaagacatctcagctagactttactcagagcaggctagcagccattcatattaaaaatagtatctccactgttgattcattttctgctgcgactagaggaagggcctgctatttatctctatctcaggcacgagggtccaggggccgaactgaacgatccctctctcgaacttcttttcaggattcatttcagccctgttctgggctctctgggcggcctattttcagcgcagcccgtaatttgggctgagaagtcta

SEQ ID NO: 7784 - DNA, 1074 bp, Emericella nidulans
cgtttccaggcccggatccaaaagccgcgacgggcgatctgaatcccggtcgcaagcacaagacaacgggcctgccaggaatgtaagaagaagaagctcaaggtacctgctcctgccacctgctatactcttgcagcaacggtccgattaaccgtatgtggtgctagtgtcggggcgacccgccctgtcagaattgcgtggcaaacaatatagagtgtctcgtcaatgaactggccgaccagcgccgcaagctaccgcagaaacgcaagctcgagagtctcgagcaggcaaatgatatcttgacccgtctactgaaggccattcgcaacagcgagaataaaaaaatcgtccagcttatgaacctgatccgcagtaacccgacactgccggaactgcaggagtacctcaccgagaactttacacggtcggagattgagaagtcgcctgagctgagcaaggtccagcagcatctagagcgtgaagctaatgtggttgagcagggtgaagctgtgcccaggccgccccgacgggtgctggacgttcgacgtcttgctgataaccccgtttatcgcgttccagcaaagccgtggaccacagtcaccgacgatgatgacctcgtttcgcacctgatttctctgtattttacgtggaccaacccgtttctatgttggattgataaggatgtgtttattggtgagatgcaaaagggcgacctccgcagccggtactgcacgccattcctggtgaatgcgatcctatctgaggctagtgtatgtcgagcgccagttaatgtagatcggtgtttgcttagaggtagctaattggtcttcccagttcacttccgactacgcggaggtccacgcatttccaacgacccaatgtcctaagtggatcagttttacgtaaattcgcgccgatgtcttgaggaggaggaaaccgttggtactgtttgtatgcggccattaaaggcctattgctctgttgttgaagttggacccttagcttctctcacacggttaatctagttaactgcatgtgttttttgttggaaagaccgtctttttggtttctcta

SEQ ID NO: 7785 - DNA, 383 bp, Emericella nidulans
gttagccagcaagataggcgctttcataggtatcgtatattccaaatctctcagctatcgcatatgcccatatgtacacacttgctttaaacacaaaggccttcgagattctgcggtcccatccctccgtagtccacctcgacccagatgtggctgtgggaccagaactgacttcaagctcacgcgcacgtctatgaaagtagtaggtgggtttcccttgtcagatacgctcggccccaccacccgaaatgacatcttgttgccggacggggaaccgaggtatggacgagaagtaggcaaactaggatagggtgaggagcgcaagtatgtaaatcgctagttctcagccgctggcatattctcattcaggtcagggctaggga

SEQ ID NO: 7786 - DNA, 766 bp, Emericella nidulans
agtacgccctatgggcatcgaattcatccatgccaacgtacgcacgcaaggctggaacaaggcaagtcagcctttctgaatgtgaagagcacagccttctatgatgccaatcccagtttggagatttttctactttttggatgcttcgtggatgttttgtaaactcgaggtcacctttgaacctcatctcgctgttcttaccttgcctggttagctccattgctctataatgggcggtttggctaagagaaaaggccacgaacaacagcagtctagtcagagaaggacgatagatcatatattagacacaagctacaaggacaaagtacgatatatcccagcatcaaacaccgactccgccctctatcagcagaagccacgtatttttactgcttcttctcccccgtcaccaacttgacggcctccgcgatcatctgcgtcacggctgccagctgctccggcgtcaccggctcctcacgcacagtccatccgacctctgatggcaaccgctcattttcaaaccagtactccacgaagtcacggttcaccgtgccggcctcgatatcgccaaaggccaggatcgggaaaccggtctccgtgtagctcgtctgctcggttttctctgtgtacgtgtaggcagggttgaatgctttgctgtgcagctgccgtgcgatcttgctatttgcaagcatggcggcggtcactgtagggtgcgtccagtatgcgcgtgtttgggcgaatacgttgggattaaagacgtggttgt

SEQ ID NO: 7787 - DNA, 703 bp, Emericella nidulans
  unsure (1)..(703): unsure at all n locations
cgaccgctcctattctgaattggactgtcacagcagaagatcctgtcggtcggtcatggggcattttccctttgaccacaagaaagacatcgatgctatgctacgtgtctattagagaggaagagagagaagggagaagagacgaaagaagtttgtgatccgctctgggttgcataaaagtccaggtaagcttctccaacacctacctctctcacctttgcatgatgaaacacaccttttctttcaataatttctggtacctcttatgtcagggtctcagtcctcgtgattgagcccaatgatctaaatggacttctgataccatctcgatttgcaaccatcactcagccgctgttgtcaaaaacagagctaactaataaataggtcatggaacacactctttagataatgcccattttatatcatcctcggtctggattgcgactcggggctcgactttttatctcatatagcatacgtagtcttcaatgaaattcttcctcattacctctttgaagcttgtttcgtgttcagacttatactgaaccactagggttgtcgggtaggatactggacagcctggacttgaccaggctcctgcttgtcaatatacgctaccagcctgccagaatttcaatctangtgtcgggtagctgctgtgatattctngcctttatcccagctcaatggttaccacataccg

SEQ ID NO: 7788 - DNA, 566 bp, Emericella nidulans
gcgggtccttccgtccactttgctcctgcctgctgagacgtgacggtgggcgatgcgggggatgagtgacgcggctgagccgggattcctcgtgcggaggccaagttgcttgcaattgaagacgtctccctcttgggcaaacgagggttctcgatcagctttggaggctgttgtgtgtctgtcttcgacgctccagattcagcggcggtctggttgttaaccccggcggtagaagagggcgggttttcatgctggaagcgaaggatatgggcgagctttttatgatgttgttctagaagatgaagcgttcgtagagcctatccacggacgtgagcaggttaccgcccaatcaacagagagggagcagaaccaaggcagggagatacctcacgatccctactactctgcgcaacagttgcaaactcaccagctgccagatcgtgctcttcgctagcggccacaggattagatttgcgagtctcaaggccgcgttccgggcgtgggtgtgggctacggaaactgtcaggatacgtggttataggtgacagattacacaatgttacata

SEQ ID NO: 7789 - DNA, 729 bp, Emericella nidulans
aaggcgcccatttccgattggcaatgcgccgttttcccagtctgttgccggggcaggggatgtgtaccagaggtggcgggatgccgagaggtccggggaggcgaaggtcggtcgtgaagagagaaggggtgcgaggagcggtatgtgatgtaatttcattgtggacagtcgcgctgagcagtagctatactgtgtatagtctgagaacctgacgatagctatgttattcaattcaatgtcatggagagaatgctttgaggatgcacattggcgacctttgatatatatttatatacaaatttcgtcaacctcgggcataacacaaaacatctgccccctcccgccgctgtaggtcatcacgtcgggtattaggataataaataaggaactgcatgtatcactcctcgtcttaagctttgcacgtactcattttgcctgaatgctgcggggaaggtcgagttagggctgaagccattggtggacaaacccggggtatgcagatcatgtccagcatggccaggacatgaataacgcgagtgacattgatataaaagtggattctcaaatggctaaattgcctaggagtcgtaaaagtctccgttgctcgatggaggctatgccagtgccaaccacaaatcgcatcaaaaaattctaaggggtatagccaattgccacgaagccgaaacgtcataaaacagggtctgttcccttggtgatatattggtcagg

SEQ ID NO: 7790 - DNA, 702 bp, Emericella nidulans
cagccctaaatactgacttcttgcccttgacgcacgagcaaggagatacataagcaatgtgcaaattccacagaatctgcatatctgaatctttctgctctggtgtggacagccacagtgctcatagtccccatttctgcctcctgaattgatgggagaatcctgcgacatggaaaacacatagcaaaataggacatttcttgcacgggagcgatctgagcgcatgtagattatgtggcgaagttttgtgagatacctgcgcctctcttgggtctaggagcaggaacagcaaggtgggatcatattatggtgagcagtcgtctacccaatgtaattccatgcagtgagatgctgtggtttaggctaattccgtttagggcttgcagtgcccagtgttgctctatcgccctaccgttccactgcagggagtcggcatcgctcatgagtatgaggacgttgacgttgtcaataatttatttattcattgattaatggcttcctagcaatgcactactgttcaagactgcaaaccgttctctccttgtggctcgttcgacgagttcaggccacgacgtgggaaaaaaaaaatttatatatacagtactaggttatcgtttttcaagccccagccagcagtcaatgaagaggatcccaattacttcaaattagatttagagtgaagaggttattgacgctatatgg

SEQ ID NO: 7791 - DNA, 1275 bp, Emericella nidulans
gtaacggccgccagtgtgctcttagagtaagaagaaataggcatctaagccacatttctgaacgaattcggagctggaagtacggaatatcgggctgatccacttgaacaggcctgggggtgatggctcggtacgctctctatcggggaccaggtatgttcgaggttggctgaggaaatgagctcaattagccatacagccatacgagtgggaccggaaggaacacttactagatgcgagtgagtttccctttaagaaccaggaacaagaggaattcgacagcgaaaatgatgagagcggcggctaaagatgctatgaacgtcttgagcgagatgccttctctctcttgccctttgccgcctgcgtgctccaacgccgagcctaagtcattggccatcccttcttgcctcttgcaagagacccaattcccttgacgtgtacgaaaaaaagcttggtaataggccgaagagtacctggtgatccgcggctaaagcatccggacagatgaaagtacggagatttaaccgattaaagtgttgctattgaacgcgcattccgacacgaagctgaaccaaggtctggggaatagggagtgactccgacaatatcaagctattgtttcgagtgaaatgaggaaggtgattaaggaaagggagaggtgaagtgaaccaccatcggtgagtttggttgagcgattggagagaataaaaaggtttggaaagcagagaatgaagaaccttaagaaaaacgtccacggagcccactgccacataaattaatgttgcagataaaggcatcatccatccttatgaaatggtccgtagggcagatagggccgttatttcggggaagcgtaaatcgaaaggcttagtgcctgacataagcgcttgttgaaacttggcggccaaccccaagggggccctcttcccttggctggcttaattgctttacagcccctaaaggatttcactaatgccaaaacccttacagaactagtgggcttcaactaaaaaacttcttcctttcaccgctgggtcatataaaagtgctatcatttccccacaaagaactttatttcccctcccaaaaaggactttctggtaaggaatttccctagaccccattcttgggaaacaaaccttcgaggaggctaacttatgtaagtaaactcactctttctctcggtaactcctcacgctatttttggtcctcaatttatataaaccaccttatacacatataacataataataaattattctgcatatttcaatc

SEQ ID NO: 7792 - DNA, 755 bp, Emericella nidulans
gctggaatttatgtctatataagcatcgtcccgaacaacttcttcggagcgcatactacctccgagatagcactacctagatatgacgcaggcaggatggtaatgtgatctagtttcattgctttctcatgatgtctgttgaccatataaactggttaatctataacgttgtgatcgcactcttgtttatgttgtcgggatgaagctccttcactcccaagcttcgctagctgtctctcggaacttgagagcaggtataggtttgtccacgcctgtacttgagaatgagatcaactaaacctacaaataggaagtcgttatattgatgctcactcatatgcatcattactgcctcgacatccaccacagcagttaccccaccgaagccttaccaccaaggcgtctataaatccgactaccgcaaccccatcatcgacaaccactactgccaccaaccagcaagatgtccaatcctccctatcaacgcaaatacgcctcctcatgcgccgaattccataccccgttgccataatcacctccaccgaccccaatccatctccaccaccaacacattcatcacccacagtcaaaacctctcagttcacctcccgcttccgaggcatgacagtctcctctttcaacactgtaaccctaacgccgcaccctgtgatctcgtttaacgtgcgtcgaccctctgaaacactgcatgcgcttatatcattcggtcgatttcttgacatttgcttgaacggacc

SEQ ID NO: 7793 - DNA, 528 bp, Emericella nidulans
aattcagtcctgatgtctgcctaacagattctaagcggtggttgaatagtcaggcgttgtaccaccacagcagcaggaacggttctaggtaacagcagtatggaaattttgtactgcgttataccatacggagtataatctgcgcgagagaacgctacatagtctgtgtagaacagaatagtgaataaataaacctgtcatcgttcccaatgtaatatacacgagaccgaaaatacacgtatgccatttgacaaagcccctactaacccagagcgcaattttgaatttagtggcagatcaaaaataacaacgcatcaacgccagtccaataataccttgacaaacgaaatgataaaacccgttatgtgcgatttgttctccttcgagtggtgatctttgttttcaaatcgaagaaaaaggagatcaatcaaaacatgagcatggaaacccggtaacataatgtagaccgtcactggcaggaagagcgaataagagttcgagacaagatgggaagctaaaaacatgttt

SEQ ID NO: 7794 - DNA, 591 bp, Emericella nidulans
ctcgccaaaatctacgcaactccctgacgatgctagagagatttctttcgctcaagggaaaacatgcgaggcaatcctctttccatcagcatcgaatcgtggtggcaacacagtaaataacccgttgacgtccctaggctcgaaatccaaacctcttgcagcctccgtcaaaacatccaaaccgtaattctccttgatccaatgcgcaaccatgtccatgcccgctaccgcaccgcttcccgtccagatatttccatctactatccagttcttggctttggtccacttgacagccggatacctctgttttatccaattaaactcaatcttattcaccgtcgcagccttcccgtcaagcaccccagtctgtgcaacgacagccgcacctgtgcagtttgtgaataagagctttccgccggcgacatggcgtcgaatgaactccttgtagctctctgggatattggagcgaatgggactatctcctccaattaagagaatgtcgagctcgggggcatcgttgattgtagttgtcgggacgagagtaaccccaccggtgagggccaccggatccagagtctcgccgatatggtg

SEQ ID NO: 7795 - DNA, 678 bp, Emericella nidulans
tctgtccacagcttcgtgtacgaggcttcgataccagtattttggcactgtgcaaggcgaatctcgctagcgttctattcgtgtttcatcctatcgtacattaatgatacatagcgtcgttccttgattgtcaatctactattcttgtttatgctactccaatagtgatgattgtaagttaagggcagccactaggggcctagaagaagcgagagtcgattgttttaacaccggtcccgcgctcacggcaggagcgaaccaggtacgtgaggcagtgcctacttttccattcaaatccgaattgcgaacttctagttggtaaggaatccaaatcgacaccaatggcccaattgaccgtggccgagaacctgaaccaatcaggaaatgcaaacctattattgaattgaacgatcaataatactttcagtgtaacccatagcaacaagattagtaacgagtgatcttaaaactggcggcaattgatgagaggggagctggcagcggtgatcattgcccggattacttagcctgctgctaccagaaccttattctatgatactatatattgattggccagattccaccgataaaaaggcttgtttccagaagcgatgacagccgcgtcgcgaactaaatcgcaaagtataatccaacagccaaccacaagcgagtagatat

SEQ ID NO: 7796 - DNA, 416 bp, Emericella nidulans
cactgggattactgctcatacccatgcataatccacttggactttgttatagaagatggcaaagatcacatggccgagttcataaacaaattccttgataaacgcgggccggtgctcagcgacgacgtccacgaggtccttggactgcgagtgttgcgactagtctgcttgattggaaccagctgggtcactgtcctcattggtgctgagagctcgatctaacgtcctattcgcctccggggtcgaggtcaaaacgctagaatccatcacagggtgtgataacacatgcgatgaggcgtggctatcagcagcttggcatgcacttgtcgtgccgactcgtttcgcactgtacggtacagtcgaaccatatgtctatgacattacttgccaaaattgggacccgcctggtacgacga

SEQ ID NO: 7797 - DNA, 612 bp, Emericella nidulans
attctgaattgcttcctgattgggtcggctccagcattccgtatcattgtcatagcgtatttcgtgaaagcgtattgtcgttgtctccaactcgcttcaaaattgagataggagccagagctagctggaatgacagtctgagttttttaggcagctatcgtccatattctgatcagggatcatagcaagttcgtcaagcgatagccaaatatggcattcatatggttttaggtcagatattcgccaagggttaaccaaaccgctccaacaccgatggtataggagatttcgcttttgatgtaagcgccactcgagatggaacgagcacagctcagtcctcatgtcctcatgtctcactcatcaacagacctggtcctcatctctttttggcttctccagcccagatgcgagtctctctggcaccgtcatgcgcgacgcggaacactattttatgagtagatatccagctttcaatggagtgccacttacactgtctctcagtctcatcaagaccttgcaagaactccaccccgtctccaagagcgcccttggggttatgcgcgtggtcggcgatctcagcagcacgcttcttgaaagtctgatcagtgcggg

SEQ ID NO: 7798 - DNA, 819 bp, Emericella nidulans
tttcgttcttggactcgatgacgagcttccgttctatatctggcgacgagatcgccccaattactgcttcatgtgaataactgactctcgcgtaggaggactagtggctgactggcatagactccttaccatcccataggagagtatctaaaatctggcctgcactggtaggcagcgaactcactttttattagtcgcgcgagatcatggactgctagctagtaaagcagatacgccagctccacgcattgttagttcagcccacagggagaggcgcgctattcatcactgggccgtacgattgctctgttagtgagagcttgcacgggtacagtcctatgatgtaggccgcgttaagtaattatactggcgtaaaacgatccatagctgattaggtgaagacctcctctacatgcaccttaggaactttttgccaaagtttcttcccatccgagccagaaaggtcaaggtttatcaaaaccccgccgtttccgggattgctgaatatgatgagtttttaaaccctatctttcggccttcagggcttatcggtttgaagggcgagctgattgcttattgttttaccggatttttaacaaaaagccaccctctttacgcggggggtacctcaattaaatcccaattttccggcaggtgttttataaggcttggaccaaaactgatggcaacccgaattatgaattttgtaaaaccttcgcgaaaactgggtaatttttttaaaggggtttgagcgtatcctggaaaaacgtataaaatttttggtttggcgctcaaaggaattccttaaatgtgggtttt

SEQ ID NO: 7799 - DNA, 844 bp, Emericella nidulans
aatactctaggtgggaggggtagttgaatgtcggccggggagaaggaattgttcaacgtccaggattaatctataaacgtcgatacagaccaaagctacttgataatcatcctctccttcactcgagtcttcttgctcaaggaccgcactccagctgacattcattctatcttgagattaataagccataaacgataatgcagcttgtccacctgcttgccgctgggctcatccctgcgcttgtgtcggccctgctccgtcgtgacgttgactgcctctttgctacaacccctgctaacggtgctacatgccagagctttgcaagcaattgggggctgtccgtaagcgagttccaggaactgaaccctggcaccacctgccctgatatagacacaagcaaggcatactgcgtcgtcggcactgtcactgcagatgccccaggcaccacgcttactacaacgacatccacctcaacaactaccactcctacgaatacgacaaccactacccagcctccgaccgcggccaatccgactgtgcctaccccaaccatgcctggtattgtagacaactgcgacagcttctataaggtctcatcgggcgaccagtgcgacaatatctctcagaggcatagcatcaccacggctcagctccggagctggaatagcgagatcaacaccggtatgtccacttcatacttcccttcatctcttctagtcaatcatagtcatacaataactctaacaccttatgtactaaaaagactgtacaaacctctggcttgactactacatctgtatccatgttcccggcgcaaccaccacttctttaacaacaacaacaa

SEQ ID NO: 7800 - DNA, 926 bp, Emericella nidulans
gctttgtaagcgcaaagttcaggagcataccatcgtccgccattttgagactttagttaaaattatgaagaaaatggccgtggatgacggctgtgttccgtgttcaattaggacgttaaacagagatgcaatgcgggagggaaattttctcgggccgatgtttcaccgaaccctcgatgtatgccctatttcttattcgggaggagtcgggcagttgctttgacagattacttggcttatggatatttgcttgaacaacaagccttagtaatgtcctccatctgatgtagtcgtgaaatttgcgtgagctgatatgtaaacagatattgtacaagctttcgcgcttcggctgggtatatatatctaggttctgggtatgacagatataatcccttcgatctacttatagcctattttagaggcctcaatatcagattgtcaatcaaccggactggaaccttgccatccccaagcccgcaatcctctcctacgttcgtcttctcaagtggcgccatcttgatggctccgctgaggatcgctccttttgaaggatcaacgacctcaagctcgtcgagcgtatccgagtcagcaagtgagacgtagtcaactttgaacagcgcgcgctcggtctcggacagagattgctgctccgttaacaactgttgggttatactgtttgcagtatccaagatgtcggcccggctgagcttgccagactgatatgcactttctgccgctctcaatgcgttgtagagaactagtccaaccttccgtcgcctaatgcccaggtatacattccgcgagctcatagctagcccatcatcttcgcgcattgtgggacctatccggacctcggtatcaatgtggaagtccttgaccatgcgcttaatgacgacagtctgctgaacgtccttctgcccgaaata

SEQ ID NO: 7801 - DNA, 163 bp, Emericella nidulans
tagctggtcttcatgtcctgatcattgcgatctgccacttccgtgtcggcttgctgtatgccgggactattacgtacacttgtcagtattaagaccttgttcatagctttaagaaaggtagcaacgctgactatgtgaccattatagggagtgaatctgattt

SEQ ID NO: 7802 - DNA, 1106 bp, Emericella nidulans
aatgtagtcaaaagccttctgggaaaggggaatggtgctggtggtgaaggaaggcccaaggaaaacggttgcgtaggagaaagaaatggaggtagatgctttgaaggacatttccttcatgtctactgtgttttgtttccttaagaagatttgttctttgatcagtaaagcttgcataggcaacatactaagtgcagcggtggatgtatatcggatagcgcgggatgatgtaacaatgaggttgagcggaccagctagctcaaaaaccaatgattaggtagcctgcatgggcaaagcttgaattcgccttattttcgaccgctgggattagacccgtagcgtgtaatgatgtaagataatgcttgtgatgctatttatcttccaaccatctgcgtacaccttcattccaagctatatcctctccaaacaaaaatagcgattcacaaacacacagaccgcaaccatgccatcgcaggaagaggtcgtcaaaaaattccagcgcatcggcatcgtcggctccggcaacatggggtccatgatggcgttcgctttctcagagatcgggctggacgtctccatctgggacgtgaaatacgacaacgtgcagcagctgctcgaatctgccaagaacacaaactacaagggaaagatcgagggttttaaggatgtctcaaagttcacgcagagccttgagggaaaggccgagaggaagatctttctgtttagtatcacacacaggcgatcctgcggatagtgtgctagatatgataaagaaggacttgaaaaaaggggatattattcttgatggcggcaatgagaattatcggcgcaccgaggcgagacagaagatatgcgagaagatcggtgtcagttggattggactcggtgtgagcggtgggtatcagtctgcgcgtcggggaccgagtctgtcgcctggtggtgataaggaagcattggaccttgttatgccgctactagagctgtatgccggtaaggatgcgaagagtggacagccctgtgtaacgagaattgggccgaaggggtcaggacactttgtgaagatggtgcataacggcattgagggggggatgttgagtacactggcc

SEQ ID NO: 7803 - DNA, 535 bp, Emericella nidulans
ttcggagtaatgcaatgaaatggacgcagagaccgctcattgagacaggcctggggatgcctgtcatacatacaataacggcactggaatcattggctgggagaccgacagcacagtctgcggggttggagtagatattgacgaagaatgaggaaatgcgattgctgaacgaagcggatcaccaccctactctgactgaagctcgacgtctccagggcctgcttcgaggagcggctatttgcattggcgcccgcggttcaggacgactgccattacttatccttaggcgctgaagagaagaaccttggtttgaaagcggtccgacagggaaagaacttttgagagcaatgcgacactttttgtgaacccgggtcatgctatgcagtgtgcatctttgatcctttcggtccccgtctagtaaagttcaagtggacagggtagattcagctgcaacgttcttgggtagcggtgctccaggttcgcttcacctttcaagctcgcgagtttccagtattgatatagaatctggggaata

SEQ ID NO: 7804 - DNA, 1394 bp, Emericella nidulans
ttggtgcccttataatgggctatctcgcacgcagagggtcacgcggtgtgcttaaacaacaccaatatatctcccggcagtggtcaagtcacggtctccagccactgaaggtgactaccgtcataatcaaatccgacctataatactgatctcgacgtatcgagagcgcatctcagtgggttactatttgcgcctgtcctcttgagtttcaaacattcgatgcattgcaacttgatcgtcagcgcgattgcgtgcacgtttcatcgagaaatcaagccgtaccaaccgtacgagctttggaccagagttgcgagctggatgacaagtggatttacatggtcacgcactttgttgataacagcaagagtcggcccaggtgcctcgtcatgcaggccgatgctacaatcagtagcaaaaagacgaattgccccgcacctcataaaaaagagcgacataaagatgtctttgcacctgctgtgacccggatggtgttcaaaaaaggccgcttaactgtacctcctcagcgtgctttcgagatttgcggtcttctatcggcttcgacggccgaatccccaaccgcagcatcccacacgatcatcacaactgggccatctgagtcaggtaacagctaccatgaaaggatattgggcgagatagtttcatataaagagacaaatctccctattgtgcggcttgaaaggggctgggatgctgtccgtgagctctttcgcgaagagcatcgcgaagagcagcttgcgttgacagagtacagggacttcatgtggtaaagtccaggctgcgatggagaatcatagggtataatctatttctctgtctatagagagtgttggaaaaccagccactcttggatatcttcatataacacagtacaaagcctggctggatgacttcgtattaccatataacataatagtttggacgtcctatacccagggcgggctaagccaagtatgacggattggcttcccatcttacctgcaaatcctagcccggccgttcgccagtgacagcaaccagctgcttcaaagagaatctggtggttactgcaacggtcaggggcgctcgctgctccggtggtttatttactgctcaggggttctcttgaatgctcggcagttgcctcagaaagagacatgaagtaccaaaatccaagacgagtcccttattcatattagtgttaaaggcttgcaaggctgcaaccttcagagttgcagaatgcgagcggaaggcatgtgcaggactatcgtgagtgtggtggtacagggttgttactctacttgcatccgctttagagaacacgttatcccgacttggactaagtatatccactattgggggtcggacagcttcatttagtggtcagatgttctaac

SEQ ID NO: 7805 - DNA, 1460 bp, Emericella nidulans
actgttcaacaagagtccaagtaggatcaacaccaccccggcaaagttgtctcagcgcctcgttgtcacaactacaccctcccttatcgcgtttcgaacacacgcttactcactgccatgaagggagccgactcgatcacggatttgaaagtccccaggcgagtttcttctccaaacgacgttgaacatgtctggccgcaggacggaacttgattgtgcatgggatacggcgaatatggtctcggcatggggttatgtattatggaaatctcggtttagcgttatgatttgtatgtaatcgcttagatgcagtgcactaagctaatgaattgatgatcatgatatcgagttgtccctttactacaatttactttctttccattccggctttctcttttcgacaaatgctttcagaccctccttgatattctcgccagcagtcagcttcttctcccagttctcaacaagcaggcgtgtcccttcctcggcactaactccctcccatcccatcttgaccccttgccggctcacaatcacggcgtcaggactattgcccgcgatctgcagcgcaacctcaacagccctcttaacaactttctctgcactaacaacctcattcacaaagccccacttctccgcctcactcgcctctaccctacgcccagtaagcaccatttccattgcccgctgctttccaaccgtcctcacaatccgtggcaacgccccggcccaagcgactaccccgcgctgcacctccggaaacccaaaaaatgccttctcggatgcaatcactcatccgtgttccgtgatcatttcacaccctccgcctagacataacccattcacagcagcaatgattggcttcttcccgttccggcgcgaaagccccccgaaaccgctggagggcataggactgcgcggctttgaagattgcgtgctagcattccattctgctccgaatcatatataacgccttagcaatatccccgcgaaatcaatgttcagagagtaagaatatagaatgtacctttcaaatcagccccagcacaaaacgctctcccttcaccagttataatcccaactcgaagtgacggctcctcgtccatccactcccagattgcgtgaagctcattgtggccggttgaattgatgcagttgaggtctttaggtcgggagagcgtaacgaggaggattgtaggtgcgggaaaagttagggtgctgtgggttgagttggttgggttgggcttttattaggccaaagtactactgcttctattaaacaagcagttcctccaactttgatgagttggcaacaattctatacccctacgttgtctttcctaaggaagtctatatttaggtgatcgagttccctagtccactattttcccccatttcttattttgtttcaacgcttgtaatccttttttatataccatttcttatagttcctttgactt

SEQ ID NO: 7806 - DNA, 1214 bp, Emericella nidulans
gaatcgtacatcttctctcctcttcaggctcggctaccaggaattcgtcttggctagaaatagatctacaaattctaggagcagacaccatatggtaggcaagcgacagtattggacaaggccgaggtgtgctgaaattgcagtgggtaaatgaattcgtacatcctgaatatcacccgaaaactaatatcatatatcaattaaaggctagcagagggtactagtggcagcgcgatatcccccaaaacgacgagagatgcaatgagggcgagattaatctaacaaagccggtgggccttgaggattctgggcaaaagctccgtacgtccttcatagtcgccaggaaatgtttacaaaactacgctattctatccccaagtcgcagcatgcctgccacgaccccgcggccgaagggagcgtacagtataatggggcctagtaatctgcagtgcaacggttacgcctcgcatccctgacaaaagcatacgaatcaaggtacaggagcaagggcagtgcatcgctaacaagggccgcaggatctagactgcctagccgacacatcactcaatagtcgcccgtaaccgcgatgcggatagccaaggcctccccatctttttgccagggcctccatctgagaccccagctggtgcttcgcttgtcgttctgggcgttttccagcctagaaggatcggccaatgactggggactgggccttcatcccggtacagtactcgaccccatggtgccaactaaagctaatatgcacatggattagggctgaggcaatagtatgagcacctacctgcggcattttgggcgttcaagcccaccattagttaacttattcgctcgcgtagtgagtaatagtggcttccagctagcctgaaaccaaggctggatcaatcctgaaagtgggccgtcacttattggacctcatcctccgccatgcctatccaggcctcgcgcgtccagtcgccttggtattgggattttcgagcacggccctgacgcccggccagtcgccataacaagattggaggcggggttctgggcctgggcctaatctgtttcagctgtgtgctcgcttgctggtagagtattatgatgtgccgcacagcagatttttcccctcgtccgtctagaggtctgactgtctaggaatccattggccgggtacctttgggatcctgttagcacgatgaaactggcggccc

SEQ ID NO: 7807 - DNA, 797 bp, Emericella nidulans
ccgccgcgggcggcgtccccggagtcaaggacctaatttgaggtgcatgtgcttgtagatcagtcaggttgaatgagggagcggacatacatctccatcctgttgatcatcaaaccgacggcgagcagcaacgggtggaggggaaactccctcttcctcttcttcatctgcagacgagttagtcctccgcggggcacgattgaaagaaattttgaacttaccccacttggatggcggcatggtggttatactgcgatgtgagagcgaaaaatgagcagggtatttcttggaactcgtttgcgtagcgaagtggaagtgcgcagggaagatcagtggcggacacaagacactcgtctgaagtgggcaaaagtcctttcttttgcccgcatccctaatgaatgagcttggtggggcttgtgacaagtcacgtgtcgagcgcccgatgttggaaatcctcaggtttggttgcatgagacatgcgggctacagacaatattgaagttttgaaaatcaaactacaatactatatttggagacttatttgatttcagaaacttttcattaggccactgtatatgtaactggctggtagattcgtcatcataactgtcctttcccggtcactcgttgatacagctaggttatgctgctcaattgggtgagcagcacactaaacttgagtcgtgccagttcaggaatttaacccaataattccctgatgttgcaggtttgactggggaagtttgttttcatagcggcatttacaggttaacagacttgcggaagttctggccggc

SEQ ID NO: 7808 - DNA, 665 bp, Emericella nidulans
tcgaatattttctgtttcgtgttcccgcatggtctcctctttcgtcgaatcctatacatcgggagtttttttttaaccgtaaaggggttaatacttcttgcagttcttggaaaggtaacctatcatgatgaaaagtcagtatagcggagaaagttcactcgtcgatcgcacctccagcggccgtactagagctttctggagatatctgtatagaatgagtgtaatacagttgcagcccattgcaagctatagaagatactccatgtggagaagactggggcatcttgatgggccccgttagtgaggtccatatggcccataattgtcgtgcggtagcagtagcgccgcggttagtcctggtttgagccctaggtccacaagcggtggccccgcttaggaccagtatagactttcattgagcttatctgaatggcaagtccagagagttgaacggacacgaattaacactggaagagcaaagacgagaactgatgaaaacctagaatcaaccaaggaagacgttggaatgatatcacgtgaaaagtctggtgacacagccgcacaccgacaaattccccctatacatgattcaaggactctgtcacctaatcgacagttaacttcgtgcatcaacagagaaagttgtgctcattgaatatatggga

SEQ ID NO: 7809 - DNA, 1042 bp, Emericella nidulans
gttaagatccccaacctagggcccacggatacacccaagctgctctgctggatagactgttttttgcctggtcgcgttccacagccattcgctctatcaccggtctgataaaacggaaaagctctcacggatgaacctaaaggatgcattcttcgcctctagggcgagcgaccagtatctactactggctacgagagagatgagagtctcgaacatttctcggctattggctagataatctgacgagggatcattcaagctgaatggcgtatcggcccctgtttccgaacaggcagttcaagacactcaggctaggtgtatccctgctggtgagagattagcctgttcacttgcagaacacattgtctatcctttgacgtcgtactattgcggatcaaccaatgtgttctctcagcgatggtatatctaccttttcaggccccctatctcgtaaagtttgtccaacatggggttttcgggaaataatgtattggttgtgtttatgatgacttgcagctccgtgctacctccagctctcgactgctcgtcgacaatacctaattacccggcttccgtgatgccaattcgcagatcaagtttcattgcctggttttcattctaagtggtggtcttcattgttgggcagctcactatgcagcaggtcatctaggatgacaagggggttcagccaacacgaataaatcgccttttctgacccccgcacactgttagtatagacagacacctcttcctacaagcatcgagattaatttgaacatccagagcctccgactgtatggttactctaacacaacggtcagctggtgtgacatcgtttaggtagatggtcttctgttttgcatgatggggcgaatccgatatacggtgctaacgcggttaggccttcgttgctggctacaaccatctcgatcacattcgatgcataaaatagaagctggaaattaaaagcgctatactgattcaatcgaatctcagccgtacgatccttatttcatgctacccaatcaccaacacagctgag

SEQ ID NO: 7810 - DNA, 1119 bp, Emericella nidulans
ttgaataactcataatcgataatcattccttacgatcttccattcgaggttattggttcatcgtgacttcttcattcttcaggctatagctagccgttcgtgcgcggtttcaagcgaggtggaatgcttaccatgaatatcgtagatttcgcggcgagtgtagaacgacttcatatttacctattttatccatccaggatggattcgataaatttaggtaattaacgtgagtaacatacaaatttggtttaagcgctgactagatctgctggcagcgggctgattgcttcatcgtgcagggccggcgccaacctcggcgcctatttcaggaatcttcagggcagcggcgactttcacttcccaacaaaagcgcttacacaaaccaaggcgctctgacttgcaacttcgtataacccagcacatgctttaagggtgtttcatcacggcgcgtacgcgatccatagcgctctgtctctgatgattcggacggatctacaggtcagtcagtcgcctgcgagtctaaaggagttatgttccaatgacagcagcatggctgtagccgccgtggaccttcacgatgatgtcttactcctattctgttgccagtcttctggcaaccctcatgtactattatctggatttccacttgtctcatcttccactctgcctcgacaacctagaatgacatacgagacgtactaatgactcaacggaacgagctcctcagtagctcaagaattagggtatgtgcagtctttgatccgtgtccctcttatctgtacggtctggtgggtatgaatgttgaaaagctaactgggcatcactaaaaggctaccgcaccatgttaccatatgcctctcaatgggtacttacagcagcccttgtcctcgtatatctcacgcaaagcacgtacacgacgaccgtatccctacttgatctactgccgagatgtgcttcaagatgccttgaggatttcataagcaccgaatatccgaggggcgcttgttctgaggggtgtgacttgaattatctatgcacgacagaaacaaccagcggctatacactgggagaggcgggcttgcgatgcagtctttccgagtgctccagcaggaagcttta

SEQ ID NO: 7811 - DNA, 186 bp, Emericella nidulans
ctttaaccacgccgctacggatgtacagattcactctcaacgcaaattgcaacgcacgacatgagcagagacattgtgcccgggaatgagagtattcatgatgatggatgcgagcagaaagacctacgttcagtgcggtaggaatgagccacacatgaagcaaacgtcaacagtcagccaccgtgc

SEQ ID NO: 7812 - DNA, 689 bp, Emericella nidulans
aatgttctttttgcactcagagctccacctttgagaactggcactgttttgaaagagtttttcagtccgggttcgcccggcactgacaacaccagtctgagcaggaaacagtgcacagttcttacgaatcccaaaaacaaatatgctacttcttacctgacaggcgttaagaatcgaacacagttgatacataaggctttgccaaagagccggacagcatttgtcaagttataatgttttgaacggtttgcgttgaaaaaccgggtagctacttctattctagccagtcaaaaacgaacgtcatctggtcccgtagcttagtcggttaaagcgtcaagcttataactttctcaagagggagtcttggcgatcgcgagttcgatcctcgccgggaccagttcttttttgcacttttattttccgtctagtttttcgcgtatgacaaagatcctctattaagcgaaactaccactcattcatcttctaccaaagttcccggcatatccggtcctgataaacgtcattaaacaacgaggcttaaagcctacctgccttataaggggttaataaaagtggggacgacggatcaggcaaaatggcacacgagagagcgacgatcatgctcatggttctcaatatgcagtggaccctgaacaaatgtatgccgtctacagcagagtaccattatt

SEQ ID NO: 7813 - DNA, 952 bp, Emericella nidulans
cttctccttgcccggaatgtaggcctcctcttcttcattgcgcttgaactcctttgcgttggcccacttgtcggtcttggtaccctcattgggagcacggacgggcttagcggcaaggtcctcacgggcagccttctcagcaaggtactcggcgaaagacttggacttgtcggcgggctcctcagactcctcagcaggggtctggggctcgttctcatcggccttggcaatgttgtcggcggccttctcgtcgtcccaagtcttctcaccatcctggttgccccagccttggttcacctgcttgcgggtgtcgctataatcatgacaaatcagctgttgactccaagactaaaaactgaattatagtgggagaaaactcacgcctgaccagtgcgggactggcggtcacgacgggcagggcgtccaccacggtcatatcggacattggactccttgccggcctcatcaacaggcttctcacggttgctgcggctgccggcgttgcggtcgcggaaagctaataacgcaatcgaaattagtcgaatgcgaccatatgtaggctcagagatttgtcacataccagcctcattgccagtagcacggggaccacggcgagaagtttgtccctcagggcgagaaggggcttccttgggagcgtcacgcttgccgtgtcggggggcaggcttgtccagagcccttgtgggaggctcaggctctctgttggggtctaactcgggatcatttcctgcaacggcggaacaaatatcatgttagaaccggtactagcgtctagagggaaggaatcgatcacgcgacgacagtcgaatagaccgggactcgtggagtgacgtggggaaggtagaattaccaagaagctcgtacaggttctaaaattggagagaaagttagcttcttaatcagccgacaaatttctcgtctcgctgcgatggaa

SEQ ID NO: 7814 - DNA, 1052 bp, Emericella nidulans
  unsure (1)..(1052): unsure at all n locations
ttctctccccaccgcgacgctggtggcacattacacctatcatcgcattcgggcattcaccacattgacgccaatacagccatccggcaacttcgtcgatcattctcgcgctcaccctcaaaaagctcaagtttctctcttctgacatctcgaaaccactctccgtctaagaacacatcatatgtctcgtcaccattgtcaccgtcgcgaaggtcggcgcaaggcaacttcgtgctcttcccaagctcatctcaacagtcaccgttcgcaataccttatcctcccagcgctaagatttcgcgtcctactatgcgccgcgcgcgcacgtctcctcggagtccagtcaaacgcgcccttaacgtctcaagtgaccagggaaacgcgaagcctctacatgagacccccgttacacctggagtagagaactcctctacaatccccgaaattagcctttcacctgacgatattggtggtggtttcagtacatgctcaaatgagtcaagcatctacgcggagggaacgccaaatccacgtccatcggcgtcccggattgagaaacgacgaagcggtacgtttaactcggctgtcagcccgatgaaacgaagcgacgggatcatgaatctagaccgcgcgtcaaggggaagtccttccgccaaacgacgagtgttcagcagtgatcttcctggagattagatattgatagcgaaacgtacaatacaccgagatccaaacagagagacgactgagaagcgcatatcttctacttactaccacattagcctttgacgttcaacgactatcttcggggaacttgaaggttcaaccagctgtttaccagcattgaangagattaccgctcctattttcccaattggtacaacaccaccaaatttttgccttccccgtttttttttttttatggttgggggcgcccccttcaaaaaaaaaaatatttttttttttttccttcctcgggggggggagaaaaataattaacccccccccccccccccaacacccctttttatataaatttataaaaccctttttaa

SEQ ID NO: 7815 - DNA, 164 bp, Emericella nidulans
  unsure (1)..(164): unsure at all n locations
gacgcttgggatnanttgaantaccaacgcggtagacagtcgaaaggaataaaaatatgatagtatgttccgcagagagagtaagatggacggttctgaggattaagagcaaaaagaacttttagcagagntnatcaagccggtatttatgttacctactcttt

SEQ ID NO: 7816 - DNA, 598 bp, Emericella nidulans
aagataaacctacttgctcacgatgcgtcaaaagaggtacagcatgtcagtatctcgccagcaagcgcgcaggtcgcaaacaaggcagtaaaacaggcagcttcaagtcattctacaatatgaagacagactattccacgtctatcaacaaagatgatgatcggagggagctcatggaggtgtcgacagagctcatgcaatacgctcttcagcaggaccgaagcctcgaagtataccgaagaaatcaatatcaccagcgcacaccaagctatccagagagtataccaagtcttctctcatcaaccggccccggaacctcagctacaagccctcttaccttggggccccctgactacgacggttatcttgcttcgcctatatctctatcgcttctcgatgtgcctgacatggattacttccctggagctgatatgagcgcgaatgtcatggatggttttcctgatcctccgtcattcttcccatctggagaaccgataccaacgctccaagagaatatcttgaagaccagtttcgcggattctcccgttccggcaaattcgctttagttccttctacaccagatgtaacagtgttggga

SEQ ID NO: 7817 - DNA, 924 bp, Emericella nidulans
aggtgccgtgtcggggtctggattactggcgcatgtcggtataatggtctgatttccgagttgaaaatacaaaagcttctagccttcatgattgtccacgttatacccttcagcgttgaattgtagtgttttgctcaacctctttccataattagtggtaaattgtagtctttctgtaacatgttgctgtccatgcacgtttctgctggaaattaggtctttgaacttgccatactaaccttgtcgacgtttacgccgatgtcgttaaaagctgtcatttgaggaagtcttgtccgtctacactgcatacgtcgcttccaaatctggggctcttcgcgcaactgcatcgaccgcaaggaatctggttgagaaggtacgatctcttcgtgcatgttcttaggtgatcttctgtgaatgaaatacgtttcatccatagtcgtaagaataatctttgaaataggcattcaaagtgattagagtatatatatatatttctagatatatacacacaaactcgatatataccagaggctcacaccacattctccctatatcttgatgacctcttgcaccttcctacctttatcgacaaccaatcgaagttgtctcccctcccagccctccggcgacgcagatgccgtagtcgaatacggaatcggtctgaatgctcctgcgcggagagcctcgctgtaaagctcgtaggaagggtaatctagccagtcagtaagcttactccatctgtaacgggagtgaaaaaacatacagccgtcgacaaagcggttaacctgctcctcggtcattccgataccttttgtggctcgcagtgtccgttcctgttcctgccgccactcgtagacgaaatggttgtcttgggcgtcgctgtgagaagtcaaaattagtatttttcatggatgtgggcatagt

SEQ ID NO: 7818 - DNA, 240 bp, Emericella nidulans
  unsure (1)..(240): unsure at all n locations
gatatttaaaagatttagtagataaagaatacaacgaataactaatttgacatccagtcagcaatgaccataatagattcctggatgacaagaacatgagcttgtatgaaatatactcatagtcnnnnnnnnnnnnnnnnnnnnnnnnnnnnnnnnnnnnnnnnnnnnnnnnnnnnnnnnnnnnnnnnnnnnnnnnnnnnnnnnnnnnnnnnnnnnnnnnnnnnnnnnnnnnnnnnnnnn

SEQ ID NO: 7819 - DNA, 1018 bp, Emericella nidulans
gccacgctagccgatgatcagacgaccaccggcacccgggcccctctgagagcttcagctcacgaccactcgtcgtccgcgaaagcatatagaatacgcgttgctgaagatcgatgcgttcgtagttgcgccgcttaatgccgggacctgcttacgccgactggtatatctggtcaatcctgcagctcagccgatagttagggctagattacatcacttcctagtgatccgactgcgtggaaccgatcgaaagctacaacaaagcccagtcaggtcgcggctgacccagaatggatcatcgataaatataggctgactcaaatcaggtttcggcggtcataaggccgtctatcaccaatgtccatttctggacgagtgtgtgtagacggctaccgctggagttcctggaggccttcaggaactctcgttgcgccacaatcacattccacccaccatctcagtcacatccgacccctcaggtactgcctgcaaaatggtgtgacgtcgctatccagctcattggaactcagtcacgatttcatgttcctatcaggattcctctcaaactcgagtaaaaaaaaccccgacctattgccctaccagcgaaagacaaagccgtaacctcgtggaagtcacccgtctgggtgcggaaattcagaagttgcgctcacataccacacatctattgccctagtgtgagacttctgagatggacacaagagaatatagagctttgattgagttacctaacaatccaaccgggaactcgactaggcaactacatatgctacacagcatcggcaaaagtagcttaagtcccgatacccagactaaaaaaaatacatttagcatcttattcctcttggtgcttgcttttgctgtgcattgttttgagttcttcctcggccttcttgtgctcttcgtcttcacctttccagtatatcttaagaaaatggtcaagtagtcgcctcaggcatgaatatacttcttgttagctgtttcatggacagaatatccg

SEQ ID NO: 7820 - DNA, 899 bp, Emericella nidulans
gggcccacgcaacgaagcttgtgttgcatttattgacggttaatgctgatcttggagtaaccttcgtcgtagttcttatctgggtgcaatgtcaattcgtccacagcttctgacaactaacactgtcgctcgcatcagttgtaaatattggggtaccaacacagtacacgtacatcggcccaattgcagtgatctcactgtgccctcttgcaccggctataccatacatgccaagtgccaacacgaatgcttccacactcttggaggggattgaacgagacacgtgcggctagtccacattcttggaaaatcttctcgtttggcattggaaccattcccttgccgtatatgagttttccgatgactggcaggcggaaaaatcggattccccaaagaaaaaccgaaaaccttggggtaaaccattttaggctcatggccccaaagaattgctcccaaccaaaaacagagccctggattccgggatatacctatgttttgcccgcctgtatagcattactatgggccccctcacgccagaggtgcgaaaccctcattactctatgaacccccccgtttccccctgagtttcttaaggccattcttggagacactctcccctgccggattcttccgaattttacagcagaaaccagcgcgattaaaattgcccccgacgactcccacaggtagatttcaaaccccttgttttttttcactccctaaaacgccggggcctttcttatttttatggattccgcaggacaattaggccctaaaaggttgggcaatttttatggtttacggcacccttatggaaccctctcttacaaaattatagtgccctggtatttctttaggagttttttccaaaccggacccgtttttcggttttccctcca

SEQ ID NO: 7821 - DNA, 471 bp, Emericella nidulans
tttagagcaattccatttttttctctgcataggaagttgtggaacctgatcctgaactcggcaatgattaatggcagcctgagatctccttgagagtcaataaagagtttgtgctactgataccgtccgccgatataggtgactgcaacactgctttctcgaaactgtctccattccatccactctcaatactctcgctatttaatctgtcattctgcccgcaactgctcacgtaggcctgcggtgtcccctacagatacattcaagaaactgtacttaggtatattattcccgtggtttatttacccgtcattctatcggcaagcttttgctcgcttcaggatacccttggtatagtccaattcatggaacattaagtgccttaccacgcggttctgtccatttaattattctggtcgttctggatttgcttatatttccccaactgatctgaaaggagcggagtaagta

SEQ ID NO: 7822 - DNA, 540 bp, Emericella nidulans
aacaacaattcattcgattcgaagaatggattttgagaagaaaacaatgccatccatgcatcaaaaaagacaagttgccgtaaaaaagaaatctacctagtatgctacctagtctatctaacgcaacccagatatacaaatcatcatcataaagctggctattacgtgtctctcactccgagcctgaacctagcgagtatcaggccaagcccagaaccaaggcctatagtccagttccacctcttccatatatcatatgtaaattttccagcatgagttacatataatagatgattccagtccagctgcctgttgctgctgctaccgctcctccttgaatccagaccagaccgcaatgccattaatcaatagatgggaaatactcgcgggatcgcaagaaagaggaaacagaaaaaaaaaagaaaagaaaagacaaaaaagaaaagaaactaagcaatagataaaacagatgatattttatacgccctcgccttaaccgacaatcttgagagaaatgcagcacagagagagacaggaata

SEQ ID NO: 7823 - DNA, 1048 bp, Emericella nidulans
ttgattacgaaaaccatggggacgtagacgagggttatggcgtaagaagcctggaggagcggtgacagtggttagtaggtgtgcatttgggtggccctgttgtgaggatgcttgaaaaccttctggaacttgatcatatcgctctttgagacgtcccacgcgtggtagcctccaccgtaattgccaactgtttgttcttagcaatctctctcgagaagggagagtctgggagcaaatacgtataatcatattcgcgcagaaaccaacgaagagcatctatcgcagacattgaatcagcacattccacggaacactacgaccggagcgtattacccatccaaaaatcgtggtatcttccaacaatgacagtcagctttactataacagaaactagaatattggcaatgttgaactcacagtcctcaaactccaaggccttccgcagccgtaccttgacgaggaagcgcagagccacaatgactgacgtgacgacaaggcaaatgacctgcgtcgcaaggttgaccgtatgaatgacatcctctggattctggaggtcagacacctcaccaggaggagccgggatagctggttctgacatctccttgtggtgaactcagcttccagaacctggacattcagacaaagcccgtaagcctgacggcaagaagggagcgatcgatcagggaatgaggcgctggcccagcgggtatgaatctacgtgcctagacaggacaaagcgagaatggtaaaacccagccaagttagaaaggatgaaggaaccgatggaaaggaagcgaagcccaaaaagcactcgctcgctcgctccctacataatcctgatcctgaatcgagacaggcccccgatggagaatccctatcgtcgacctcagtgctcaaaccatgaatcgatcgacatccgctgctgagcccagggagcgatgctgcgatagccggggaatcggaccggccaaagccaaccggtatgctcttgtctatcacagacaaccaggcacacaacggtaagtggctcatttcgaggagcatgcga

SEQ ID NO: 7824 - DNA, 607 bp, Emericella nidulans
ctaacacattgatgaacaaggagcgaggcgatgcgtacttatctgaaatcattgttgatgcgctgtaggagctatgtgctccttcttagtgaaagctccagggctagcagttattcgatggaagaagtgcaaaacgaagggaaagaccgcagaattgtgacggtcgttcagagctgtaacaaaacacggtgagggtttggaatggggacgcgggttgtacaacaagggcggcggtgaaaggaatggagcggctgaagatcctgcagccttaagaatgaaacaggacggcgttgatgaagttcgaagactggtgaatgctcggagggacagatcgatctcgatggtggtcgattcggactctcggaggctggctgcggctggccagttctcttgctgcgtctgcgtgcggtggggtttgctggcgctggttctggacgcgtaagtggcccaagcgaacgagagcggcaagtatatggagtagcagctcaacaagattggtactctactctgtagtatctgccctgtatgaggtggagaagagtgcagaatcaaagctagagacaaaaagacaactaaacgagggaactagggccgaagggctggaagg

SEQ ID NO: 7825 - DNA, 881 bp, Emericella nidulans
ccccattccctgacccaggtccctttaatgcgggcaaaaggggcggcttgcgtcaacaacgaagaagggcggaccctgggcgaaaatgtgatgtggctcccagtatcacaaaaacttacccgctcgaaacataaagagagaaactcgccatgccaaacgcgtacggtgcgtcaccatccgtgcaggtcgggcagttgacgctttacaacatgggaacctagattgaccagtgccataactaataggtgcacaccggtcgggagggggttttagtatttgggggtgttcacacttagtccgcactggcaggacacacgtggatccaggacattggtccgaagtggtggtcggcctattaaatggccgggaggaatggttattgaatgaattggtggggaatacacggaaatgaaaggtgtggcaatacggcggtcctaatggctgggaccctttaaaggggcggggagggggcggattatcaaaaggtaccgccccgtccagggatgtaaaaaatggggctacacctgtggggggaaaccctcctgagtataagaaacagacgttttcccgaagggaaatgtgccttttttttaaacagccgttccaaaaaagacgcctctttttttgagggggggttttttttacaccaaagattaaatggggtggggcgttccaatggtgggggaaaacaccttttttaccgggcttttttttttttttgtccccgcgactaaataaatttgcccttaaaaaaaaaaggggggggcaccattgaggcatacccccaaaaaataattttttttctcccccaaccattgtctaaccccttgggttgtttttttcccaacaataaaaaaatatttttgggggtaacccgtcta

SEQ ID NO: 7826 - DNA, 599 bp, Emericella nidulans
gcatcttctatccgatacaaacgtggacttgaaagcttttcgtaggtactcggagtctccaaagccacccacaaggatgattctctgttcagtgtcactgaagagcccaaagtagcgccttgggctaaaaagccaataaactgagggttagtagcaaaggctcacattgatcatgtccttcccagcctcggtgtttgcatcgtcgatttgctttcttaccagctggatgatttgatccacaacaggatcaaaaaccgtgcgaagatcatcgctgttgaaaaatatgttgttcgtatcatcgggttactagttaaaatgagagagctcaccttgagattatgaccatgcgctcatcctcatcgaaatacttggggtctgggtcatctaaggtcatgttcaggggcagttcatggacgtcctgctcatcagatactccaaagtctctcttcagggtctcgaacctcctcatgaattcacttccggggcccttgcgcttcattggtagtttgtcaaaagcttcgccaaacctctctgacatgagcttatagaagttacgatctattgctgtcgaacacatttgcctcctgtgcatagttagc

SEQ ID NO: 7827 - DNA, 1622 bp, Emericella nidulans
ggtgaagcccatctcgatgtgaacctcgaccagtgggcgcaagacacgagggaggtctgtaccaggctttgcgataaggcgggttctcccctaagcaaagcaagctttgatgcaggcactaggacttttcaagattgggtcttccagcggacttggagttcacccttgagcatcaacaaggcacgcaagtttggctggactggccacctggactcatttgattcctttgtggacgctttcaaaagattcaaggaacttggacagattccctgaagtactcagaggagtaagcttgtaactaattgtccgctttgatccctagcaaaacctgtgacttgatttcagacttaatatctgtacacgaggactaccattcgactgatatctagctggttcttctctggccatacaatttattctcggtgtgtcctttatcacagtttctaggccttagaacacacttcccggtaagctcgagtcaataattacccaactatcagtcggactcaaccgtttctctaattggacgttcgattgaatggtcgcactatttggttgccgcaacatagttaccttccatttcttacaccatcatccatcatttaggggccactgttcgcatcccccacatctccacattatccagacttcgcgaaaccaaagttaacttccagtggatagggtggcaattcagactcaggtgatcacggcctctaataaatttaaaagccgcgtgatgcttgtctgagatgaggcaaatctgtgctgaagtcactgtcaacatgagttctgtcaatattgaccaggctccacaggttcgttttgtcttggatcccgtggcaactcagtgctaacaacatcacagggcacaaaactgtgggtaagatacatggtgactcgtttagagagtacggagttgatgtctcgcgtccatatagttacttcatcttggatatgtggaagcatacaaggggttctttcccatctgtgtaaatggtcccttccccatattctgatcattgtttatactctttcttatttttataatctaaatgcttcttttttactatatatatttttttctttatctctctttgattctctttgttctttactttccttcatcttctacatggtatcattctcttttttcattttcctctctcactctttcttctttatttcttttctatatcttatctttatcactatttatgatttctttctatctctctttatcttatttttcttttctttttgattatcatttcttgacttttttcatcttcttttttttatatttatttttttcatctctttattttccttttatttctcttaaaacttctcctgtattttatattattctttttttcattacattttattcttaacttcttatttcattcttatctcttcttccatcaattatcattatttcttcactctcatcttttatttttttattctttctactttacttttatatattctctatcgttgattttttctatttttctactctttcattataactcttatttacccttctaaatgtttattaatttctccctatgtcttcgcttcttctattatcatattctattctctctatttcatcc

SEQ ID NO: 7828 - DNA, 1043 bp, Emericella nidulans
gctccacgtgtgtgcccttcccgcaactggcgattcgttgctgttgatattccgtacgttgtaaccatcacgcatcgcgatacaatcaagcgcttaatgcgcccacataatactgaaatggatctttccatcgcgtgtgcgttatactttgcagcgcgcggccaaggcacagcaattgacagccagcgccccgatgccagacctttccagtacaaaacacctgcccgcgtcctcctttctggcctgggtgcggatgagctattcgctggttattcaaggcacggaatcgccttttctcgcaatggttaccggggtctcattaacgagattgaactcgatgtcagtcgcctaggaaagcgaaatctcggccgcgataaccgggtaattgcacattggggacgcgaagctcgatttccttacttggatgaagattttgttgcttgggtagttcgaacaccagtttgggagaaatgcggcttcggagtcccaggagctccaatagatgccggtattgactctgagaagaaaaccctccgccttctagcgctcaaattgggcctggaaaacgtctcgcgtgagaagaagcgggccatccaattcggttcccggacagcaaagatggaaaaaggcaaaactaaaggaacagatgccttggactgaataccagttacaattaccttacctcttatacaccgcaacacatacatctcctatcaaccacatagaaaacagcgatgatgacaaaacatggatcagatacttctgagaccctctctcgaaccttcatctcgtccattcggtttcgtgcgcagcaaatcctatttagttcattctttcccgccaccgatggagagtgcaaccgcctgccgcaaggcagaaagctggttactttcgtcgaaacaggggaaggggttcgaaatggtgagaatcgcgtcggagcggagatattgggactcggagatataaggagatttacggttctatgaggtacatcgaaaaaggcaagtctgagctgttcttgacattgcaaacttcaacataga

SEQ ID NO: 7829 - DNA, 1238 bp, Emericella nidulans
  unsure (1)..(1238): unsure at all n locations
gaggactgtgtcgggtatcgacgatgaggacgaggatgatggtttcacttcccacactccttcttgctctcctacttccttcccacaccgtcctatcaacggcactattcccacccccagcccgaagccctctggtttcgtgaccgccagccgcccttaccctacgcactggcgccgccgtaacctttgaacgctagggctcagccaacaggagtagtctggattacgtattcagggaatacaggtccagttgctccggtccatctcttgacggtattcagcatcatttagatttgtttcctttcgccatatattctttgaagttaccttctcttcttctcgtagaatctcagattctgcgctttgacctatgcttttctctatttctctgtacgtatgttaagctgaaaagcaaccattcacgcatgacgaccgccaacttacacctgtcatttgaaacacatacaagcagtaaacataaagtccgtagcacacattccagtactgtatcgtttactatttcgagtgatatatctaagacatttctatgacatagagtagtactatgcgtatactcaatcccaaccagttctgcatctagtaactcagcataagcgattgtgtcctacatcaggggtatcacggcatatcataaacaacaactaacctatatatatgcactacagtcaagcagaaatacccactctagacaacacctccaataccttcccgcacaattctttctttcattctctcccactcgagccacgtcatgccctgcacgaggcagtcggccatatcgtcaagtttggcaatgtcaataccagtctcaactggacttgcattcgcacgtgtaccgcaccctgagctagagtctgaatccgatgatctggccttcgtccttagtctcggtttcggcgtcttcttccacttcgacatgtaagcgtctatccagagttggacggtggggccgtgaccattcaagaaaatgcctcgttccagccatgacccgacgaggtcgatttttagtttcttgccttggcgactgtcacttgtattcttcttcttcattntgcttttgtcagagccagctgcagctgcngaacggacgccgcagccataaggagaagatgtaggaggcgcccataacctccctaccctgccgggtcgatggaaaatattcttggagctccctatgctgttcagattgggtttgacctgagtttggttcaatccta

SEQ ID NO: 7830 - DNA, 640 bp, Emericella nidulans
cgttcatgtactgtgggcgttgtgcgggaatgtgtcactggggaaagtttattaagccgaatcaagcgtggcggtaggattctgtgaatcagagactcgagctcagagtggtatgactgtactcaagtgtcatccggggaatcaagtggttggacgtgggggaattagtgtagtagtaactctaccaaaacggaattacgaactgacaattttcgagtagcttgggcccttgagtaagtcaggctctgatggccgtgccgttcactcccgtttctccactgcatcgggggttcaactggtgttttgccactcactctccgcctcatcaccacgaccgactacctgccgtactctcatatgcgaactgcgcgcacctgcattctcgacagtcaagggacaataacgggcgccggctggcttcgaaatgcgcgtgcttacgaaatgatagattgtccctgtgttgacaccgagttcctctacaatttcgacctgctggagcggccccgcagcctatatttcttcaccttcagccgttggtcgatgtacatattcgatcccaactcagcctcgcgcgtcaagctcataggctgattgcatgcataagagctgcttccgtgggtctacctgtgaacgctgagag

SEQ ID NO: 7831 - DNA, 277 bp, Emericella nidulans
gccgggcggacacgcacgagggccggacaccggcgagggggaaaggtcgacggaggagagagacggaccagaggcgtcgacggagcaggggaaagggggaggcggggacgaggccgggacagaagggcgggggcgggcgatacgcagaatacaacggaccagccgggggaagggcacgggggcccgcccagcggcagggtgataagggcggagccgaagcgcgcccagaagggcggaacggccgcagggggagggaccgaggacgggcagcgcccaa

SEQ ID NO: 7832 - DNA, 764 bp, Emericella nidulans
ggtcaggtacgttatctccgggtcggagtcgcggttgaaaagatctagcttgaagggatcaagccgcacgcttaggccgagtggtacgctaagtcctgagtcgagggtgaatgtcaacgcgtccggcttggggttcgtgatgtgcgcgccgtagacaggaagcgaggtatcttcgacaaggcgctgggctatggcaggaatggcgacgaggaagctattcgtgcctgttagtctcaacaattaactgccatgcgaatacggttgaactggaacatacaagaccggcagaaaaatggcgaggaagatagtgccggcgagaaggtaacagcaccagaatcgtgcaaaatgccttttcagacgctgtcgtttgccgagtttccctttcacgaggctgccaccgcttgcaagggcttcgacgtgctcgatttctgcgcccttgcccttgacgacggaactatttgccttagccgcagcctcagcggcttgtttctgggcctgtcgcgccttgtaggcgtctcctacggccataatgctgggccctggggaagggtgagaggatggcttgatccggtgatgccacttcaagctgcaaaggaaaggggcaggggagggatgctcgtagtggggtaatatggggttgctcggccctggcagatgggttagttataatccggggtaggttactgactatacttatctagctccacttcctccaatgccgatctagtatctacttaatcaatacttagcatcaacatggacga

SEQ ID NO: 7833 - DNA, 687 bp, Emericella nidulans
cgtgttggctatatctcttcggaggcgtattgatgttcttcagaccgctcatttgtatagtccatttcatctcagcccattgcccccatccgtcactaaccgattcgctgttccaggcttgcaatgggaaatgtacgtccaacaaccctattccagaaccagacgtttcgcgatcacagttaacacaacatcaaacagatcctcttcctaatcggactaaccctaatcatcggcctcgaaaaaaccatcgccttcttttcccgccgccaaaaactcaaaggcaccgccgcattcactctcgggattcttctcatacttttccggtggccgctgactggctttttgattgagctctacggtctattcatcctcttcggtgatttcctcgtcacgattggccaattcgcggcaaatatacccgttgtcgggccggttatccagcgggtcctagagacgctggcggggggtaggaggaacgcggagttgccagtttagtgtgctggtaaccggattcatgattcttgtttggttatgcaggggtttggcttaagtgggatgagcgtgttgagaattcaaggagacggaaattaagtaatgcctacttacgaagttgtgaaggcctgagtggtgctcttcgataatgtctatattactatgataacgaattaatatatctataatgacctt

SEQ ID NO: 7834 - DNA, 554 bp, Emericella nidulans
attggagggtaagttcccttgttttacgtgtgacgacatccgctgattgctcattgcgcagacgatgaaggttatctgtaaagaccgccagaaaacgacggctcctgaaggacgtgcgctaaactcggtcgccggggatatcaacaagcttctcagccccaaatcctacgagcagttgcagaagcttgaagagcaggtcaggataaagctggattcaaacgagcctatcgatacggattattgggaggagctcttacgcagcctcactgtgtggaaggctcgcgcaaagctgaagagggtctatcaagatgtcatagctgagcgagttcgggcactacgtcggcaacagcgcgaggaagctgagtcagtccgtacgaagctggcgccactggcgcccgtggcccggcagggcacagcgaaaatcaacgaggaagagtttcgtgatctggatcctgacccattgcttcagattcgtccagaggacaaggtatacgaagtgatagatgaggaggccttcctcgatcaggtggtaagttacaaatatcccttccacg

SEQ ID NO: 7835 - DNA, 526 bp, Emericella nidulans
gtacccggggatccccaaaagatcaccctaagctcagctagcatggatttaattaagtgggcgctggagggtacattcggtgccattgaagaaattggcaccgacgaggatgcagagaaggaggatcaacaaagcgaaagtgaagagaaacaacgcatgaaagaggaggctgatgaggaaatacccatggagaagcctcaagcatacctggttatgggctgcgttgtaatcagataccacccccggactcgcgaggtcgagcttcagtgggaagggaacatgatgaatgacgggattgccgatgcagtcatggccgtcctacttactgtggagagcagcccagcatccgtgaaacgtatgtccccgcgcaactcatacttgacttctttatccatattgattgttccctgctaacaaaatctaccaccagaatccgccaagcacaataaacaccaccaccaccaccatcacgatgaaaccgacaccctcaaattccttaatccgcacgctgctcaagatgcagaag

SEQ ID NO: 7836 - DNA, 935 bp, Emericella nidulans
gtctgcaggtcttctcgggtccaagcatcgaaagcgccgccgggcaggaagccaatcacgatacgtcagtgcgcttatagatcggtagctagactgggcacaaatgttcactatcgatctgtcgcttccctttggtggctattctttgtcccctatcagtggaaggggagtatagccaataattcactcctactcaggggcaaaatggtctggggaaggcacgtgcagtccattaccgcaaagcgggaactgatggtgattatgcctcaggccgaaagtaactttagataatgcgatccatggatcgcgactggcgatgtttacgatcgatctgctaactcgaaaccatcagcaaagttcatgtcattgtacaataataatgacgagattaaggtcgcatgctaaatctgactgcatgaaagagacgctagagtcgaccacatggtctgataagccggagattcatagctgctcatagctgcgaccccgcacacagtgggtgtgttttgaagcctggctgtccaaggtttatgatactgcgcaacatgaacgtaacaataatattggtcaaccgtgacagacatgggccagaaacatgttttgcgctcgccagacggcaggtctgacgtcagattacccacggctttgttgagaatgctctgcgtaaagtggtccgggcgcggagtcttcattaaccaccgtctcatgcaagagctcaacgctgattatatgcgaagagtatgaaatcctctccatagccacctttcttttaaagccttgaaggccctttgtggactgcatgtaacaaaggcctcaagcgtgtgcaagacgaacgggcggatcagcccagcctatgtcctcggacgaatgcccagagcagtcagctgtgggggaggatgcgcctcatgtcgaccgtgcgtctcaaggatgagggg

SEQ ID NO: 7837 - DNA, 963 bp, Emericella nidulans
cggaagaggaccgaaaccaactgaccccactcatgcccgggttcagagccaaccgctgtgaacccggggcaattccctccctacacccgggaaggctacatggaatcggtgctgtgtccgtgtccgggactcgctcgatgaagaagagaggttgagactgcggtgggtgtgcagaatcgaggccgatgtggcggcggaggcgggcgcgttcgttctctagctcatctatctgtatttcagatgaatatgaggatgaggatgaaatgtcacggtctgatggagtgatctcgacgatattcacgtcgattgtggtttttgggtgtttcgtgacagagtgagcatgcgatacttgtagtggtggtgcggggtcagagagagagatgcttggcgccattggattcagaattagcgacattcacaaaagacgaggaagtagtcgatgaaaggcctagtgctcgagtgaattgcgattcccatcatatatatattagaaaaaagagccagtcttaaattgcaaatcatcattgactgcctggatgcagcccaactcgaatcctctcctgcttgcaccaataatgccatgcgatgttgcatacacatgaaacgtctaggccaaatacagttacgtcgatgcccgattctcctggttaaagggcttgactgcgcgatttatgggctgaacatagagagctgaagccaaggcacagaccgcattttatttcttcatcagccgcagggttgagatggaggacctgggtggagtgctaccaagttcctcgctgggcagtctatatagccagctcagaccttgctccagtactgagccctcacgagggagggaccgcatccactgcaatgagcagagtacaaaaatatacagaaaatatacaaaataatatgcagaaaaagtacagggaatgacacctattgtgttacatgaatcgaaaggtgcctcgattatga

SEQ ID NO: 7838 - DNA, 1139 bp, Emericella nidulans
  unsure (1)..(1139): unsure at all n locations
catgggccagaaagcttcggcaccgacacggttcgacaaccggttaacgggatctcccagcttgtccaacgcgtgccatgctttatcaaagcccttttttgatgtcccttttgttctctcccagaacgagggagccattgtgggggtcggtgcggctcccgctgcgaggacgatgggtaggcgaataccgacggttcggacggatcaatgacggcggaggcagctgagcgttccagctatataagcacaatgctgggcctggaagaaatcggaaatgccggaaacggcaagccttccaacagtggtggaaatgcgccagaagaatgtaagacggcgagcccgcgcaaatatttgctgccgcagccaaagaatgcgcacctggcgttggaatgtaccgcgagcaagcaatccgcaatcaccaagtcggccggccgtgagtgggagattctttctctgttcgggctgttctggatcgctggagcctatttaccgagacagaccctggactgcggaaagatcagacgagtggcaacagaagaggagggaaccgcggacagcacgcaagctagcaaggctgggatttgggaaagaacaaccagggaagatcaaccaaggaacaggctcgcggcttaccactcttagcaccggcgcccggaactcgcggtagcagggtttccagggtgagtcaaggtgaaccagggtataaagtagcgtataagtagtgtataagcagggtatagcataagcaggatagattcagaggatgttcccaatgaggtgtgaggcggccagacatacactgcaatagacatgaggatgagcgtgccgngtctatcgagagacagccgtagatagaatatccgacataaggaagagagagatagagaacaacgactgggtcgagcgatagccatagtcggctgacgcgtatgctgaagaagcatgcatagccttcttacatatcaagtggtgagggtgacaaacagtgccggccaggcggttggcaactgggtcaacgggaaataggtgtggtgtgctgtttttttaccctttttagtgggtttttttttttaccgaataaaagaatatggaattaataacatttttctttttgttttctttgtctctcccccccccgc

SEQ ID NO: 7839 - DNA, 421 bp, Emericella nidulans
cataatccgtccgtccaattagcaaggctacgtcagtctagtcactttagtgccatcagatagcaaggtcagacgccctctcaaagccactgcttattcccataatgcgacaggaacgcccccgcatagcccctatccacatgcgctcgttcaatgacatctagtaggaaacccaccgactccgccggcgagatcggccccttaaaagccggcgcatacgtcgcaaactgctggaacatcttcccggccgcggctagctgctcgggcgtcgcatcatcatagttacccgtgtcgaccaagcccggcgagagagccaggaacagaatcccgtccttgccggactgcgcgctgaactttgcaacagcagggttcatggcggccttgctgatacctgaaggggcttcaacggggatattggact

SEQ ID NO: 7840 - DNA, 944 bp, Emericella nidulans
  unsure (1)..(944): unsure at all n locations
atgggagtttactcgcgaatatctactgaagagacaatcgaacaattctagctggtcaagtcacttgagaacagcttcgcactctgccctgatgcattggaacggcaaataattcccgctctgctgaggtcgtccccttcgagtcttgaatggaactgtatcttcactcgtttccgttcttgtctattgtctataggaaatctcggctaaagagtaggggtccttctgagatatggacaagactccttgatcaacttgacactcctcaacttttccggtaccgtctctatttctcacggcgggctgcagactagcaggtcttgaacctcgctcaattattcctcaactcaggtgtatcgaactctcgcttctagctgcctgcacacccactggatcgtgtgtctaagccgcttagaccggaaatggcaacaactggatctcgatcttgaaatttcgtatatctggcgaaaggcgggtctttctgtgctggacggaacttctgcgtcggacgctaggatggactttctgggtccttcgaatctggcgtcatggggtgtttgcggccttcaaggatattccgcacatgtatcacgatgctcgcagaatccggttctctggtggatgtgatgattatgaagccatactgtcctgaaagtgtggcccttttctcttgaaggagtagtttcacaggcgcaaatcatctccctctccccctcctctcttcatcgaacccatattccccgtgagaatcgccataatcaccttcaccaacatgcgatgaatcatcccgaaccagattttcttgactaggcgcagccgtaacccccacgggcagtgagcgcgcccttgcgcgtnccggagaccgttccctcttcggctccgtcctgtttgttcacagtgtcgagcgttcattagttgtaacagatccgatcctggactgcttg

SEQ ID NO: 7841 - DNA, 893 bp, Emericella nidulans
aggtatagctatgaaccacgtcgctggctcactcaagctctatttagcgcagtaccgcgagatttcttcgttttctcaattcggatcagatcttgatgctgccacgaagcaaactctcatacggtgtgagcatctgacagagctcttaaagcaaaagcagtacgctccaatggctgtgaatgagatggtgcccttgctatatgctggaatcaatggtcttatcgacagaataccaattggccaaatccaaagctgggaagctgacgtcctcgcccatttcaaaagctatgaacctgaggtgctcgcccaaatcgaaaaggatggcaaactaagccatgacctagaagctcgaatcaaggaaataattatagcattcaatgcagccttcctatgagctacggggagcccacaatcagctgttctattgcgtacttattgtactttctctctcctattgtattattcgcacaagctttgactgattacgccattaatatgacaatccacactataacctggtccctctttgcccactagctgggcaacggatgtccagatttagtatgctatcctgggaactttctgaacctatgttacggagtattgcccttttacagtatctaggagttatcaacctctttaagtgatcaaacctcttacacggaagtatgcactgatgagatgacaacatataatgcaggttttcgttagtacatagtagcatagctaactctactctacatgccactgactcgagcgtttctgtacactgacatgtccctagtatcgtaataattgcagcggccttcgttgcctacataatgtacagacgcgcgagttaaaataaacgtgaagtccataggacaacctatgctggacctaaatccttacta

SEQ ID NO: 7842 - DNA, 467 bp, Emericella nidulans
acctctcccctaagcatcaagcaacttcttgctatccaagtagtcaataatctgcttgacagcctcctgaatcggtagatccacattcttcacatgaacctccgggttttcaggcgcctcatacggactgctaatacccgtgaactccttgatgattccctcacgggccttcttgtacaaccccttgggatctctcttctcagcaacctcaatcggcacatcaacgaatacctcgacaaatggcaaaccagtgctatcattcggcgtagggacctcgtgcagtttccgcgcggtatcacggtcagcccggaaaggagagatgaaactcgtgatggcgattgaggaactgtcagcgaagagcttcgcgacttctgcaatgcgccggatgttctcattgcgatcagcgtcggagaaaccgagatctttgttcaggccgaagcgcacgttgtcgccgtcgaggcgtaggc

SEQ ID NO: 7843 - DNA, 1352 bp, Emericella nidulans
tattcctaataggggaccagaaaattgcgtaaacataaagataatagagcttttttttgctggttcgcaaaccaggagcataatcttatatccatttcactcacttcactcatttcactccgaccgatccgtgcctccattccccacctaagctattgaagatcttcccgtcatcttgccaatactgtagatgccgcggtatgctgagaaacactgagagggggccacacccccatattatactacattgggttaatgaagtcggtttgaatgtggaattaaataaattgcaccctatggtacgctgaagtctatctcttgttaggcttacgctgcgtcatcgtcatcacagtttatattgttccaggtcgctgggcttcagagcaaagcctttcgttgaacagaccggtctgcaatatcatgcgcgaacctgttagccttgagcagtgcgcatacgcaaccagacgaagattgcggcgatcgatattcggcgttgcaacaaatacccatcgggatttgatgggttgcacggagcctctcctgttcatactacgggtcctcacgcaaagacttcaatcaaattgtaggttgaaaaccaacgggggggcttaaagcactggctgtatggtgcctttggcgacaataggtaggatgtaccgcagcatcccaagtaccactataggcattatatgaccttaagaaacgtgcagaatttgtatcgcaacccgttttacatataactcgtgccttgagcgatcgacagtatttactcgtcgacagcaccggatatagtctttattccttttgacccatgcttgcaactgcacgtagtcatatttcctgcgtccatagcacaagtcaagttttagtcgggcctttacacttgtaaacgagggtcgtttgtttaaaggccacggtgaaaattctctgggcatgcccctgttggaagggttaaagcgaatcgaaacttatgggttttccgtctggctattggggggggagtaaccagaagactcaaccaattttaaggatttgggttttatttggtggatgacaaataaaaaaatacctcttcgggaaatggcaaattaaaccattttttatatgccctgttgtgttaaatagcgtattaaaggaaggcatttttctgtattgccttaattataaaagcgcttgggccttataatgaacgcaaaatctttttcttttagttatgttttattgtgtaccaatgaataattaaatattttatattttttaatttttatttatttttttatttattaatttattttttatatttgttcgttttttttgtgtgtgtctaatgaatgtacccctccctcccccct

SEQ ID NO: 7844 - DNA, 521 bp, Emericella nidulans
ttctttcatgtcgaaggccgacagcaggctacgcgcaagggaatacagcccacttgataactatgcaaggaaactgacctacttgccttatccattccccgcgcactaaagaacccagtagtgattccgaaacatcctagcgcattgagaattcgcaatagctgagtgagcacgaaaaaagaaccgctagagacatatgcaagacgtgttgtgcgagcaaaaaccgctaagaaaaggaaagacaacttcgtccgtacttcgtctaatgactatcccttccgagcgcgccgcttcgtcacattctgagatctggtcctgatttttgacgccggctcatcgtcctctgcgggagtttcggccccagagcctgaaccactctgtgactcgacctcaacttcgttccgttcctgctcatcatcctctttcgtaactattacaccgtcagaggcgccatcgcttgtagatgtcgagaagcggtgttcggtctctgcctcgccatccgacggttcagacacaggccc

SEQ ID NO: 7845 - DNA, 1493 bp, Emericella nidulans
  unsure (1)..(1493): unsure at all n locations
agcatagaacgatcggttatccgacgtatgtctttatcaataatatcatcatcgctacctgatatgcgcctgacatcggggagctgttcgatggtggttccaggcttgcggtttgatagaggctcaagagaatgcagccttagtgtttgatcagcatgaacagtcatagcgaacgacatccctggtgtatagtgaatcgcgatgattgcctcaaattccggcgcacgttcctggtcaccggtaacctctcctcccctattgcagtcccaaacgcgtaacctgccatactctcctccaaccagacatagtccgccttcggcaacaaaggaagctgcttcggcactttcgagaacaggaattatcctccgagttttgaaagttcgcatatcccacacaatgacagttttgtctcggccagcggacaatagagcattctccgttaacgaatatgataggctgcgtacaacagaaacatgcgagtcgagagatgcaatggacttctttttattcaaatcccagacgcgcactttaccctcctcactaccggaggcaagccggaatgcaccgttggagttggaggcagaatctaggtccatcatctcgttgtcatcatcatcgcctgccatcccagtcttccgtttcggtttttttttcgaggacagttttccgtcgtgctccgccgtgggtggttggaagaagcataaggctgagatcacaccaccatggccgtgaaagctatgcgtgatgtagccacctcggatatcccagactttgattgagccatctgcagctccagtcgctagtaacgtaccggtggagtcggtggcggttgtcacaactggcgctgtgtgaggctttagactccgaacgagcttcgtttcaagggtaggagttgtatcttcgtattgggagagggagtatatgcgcattgacatggatcgggaacaaaggataacgtgcgaagccgagggagtaactgatatcctcgttagtgcactattcttggacaggtctcagaatggaggaacgtactggccaagctagtgataacttctccatcctacaacttgaattagcacatgaatagacactcaaaatgagaccaagccatactccgtcaagcgtagcgagctggttgccagtctcaaggtcgacgacgagcgcatcttcgttgacacaagcaaccagtaggcggccgctggcatcgagcgcggtgcttcccccggtatagataggacgaagcgttcgagacgcctcgaagggtcgtcttaacaacggctttggacatagctggagagttacaattaggtctggagcttgtgtgaagtttttagcgcgccatgacctgaatcaaaagatcgttaacaagtatagtcagatcagttcgtctaggctcgttgtcggaactttcgacacttttttgaagcgtttgctctgttgggtgnttggaagtgtcaacaacgcccacagatggatcacttagtcagggcata

SEQ ID NO: 7846 - DNA, 861 bp, Emericella nidulans
cgaagtaggtggcaagagtcatcaagactagacgatggctgtcagcgacagcttgggactatactattgttgagttgacacttacaggcagcatcgtggatccagagtgacctttggaggagaccaatattgtatagcatcaccagtccattgatagcctggtatatcagaaagtaatgccacggctgagcattaaagtctggatagtagaacaaaacaattcccataatttgctgcgcagggatgatagcaatcccagtgcagatggcaatccaggcgaacatattcgcaattccacaggcgtagctcttgtaccgggtcagtatgcaaaagtcaggaaatctggatagagaactataccatcacccgtctcgcccgtctgggagctaaaatggaagtccagtgatactgtccaccggccgtgggatatacactcgccaactctcccaatgaaagcacacaggctccaaccagaatgaacatagcaatgagcccataggtgagagtcaccggccctccttgaacagtcgctagagctacagtggctgcaacgccggcccagctgtcgcagataatccaactggcagaaatcgtttgcaaaggagtcatccgtcggctgccctcagttcgcagcgtcaccccttcgatgcgggactgctcgatcgcagtctcttcctgaaatgactcttctacaggttttcattaaattcagtcagatgaagaactgttagcgccatggcctcttgactcacctatcttaatatccatactcgattccatagttggggtatcttcggggcgttcaggttgctgaatagacagttctatgggtgatggaaaggaagcaaactagcttgttat

SEQ ID NO: 7847 - DNA, 1181 bp, Emericella nidulans
accccgtatgcgctcaagcgaaatgccatcgtcgatctcctgcgcatcgatagcatcgacacaatacacgggcaattcgccccagtcctttcgcagtgcggccattgcatcacctagacaatttctacgagaactctgagtttcaccctggaactgactccacttttggtccgaggtaggggggtatggggagagattcaggccttgatccaggaggcgtatattcttccatggcgcaaaaacccccagttcctgcacaaacaaaggggccgatcctgaattcagctccattgcggaatacatgcctgttgcgcgcattatatgcgatccagccgattgcagagcggccgacttcatcctcttaggggggatacaccagagctggaggaatcgaataattagcttgtcattatcattgaagctggtaaaggcctcgtttgacaccttccgaaccacctgcgagatgccagcaccctcaagagcgaacgcctgtgccgatgggcccacgcaagccatcacggtcggcgagcggataaccctgctctgtcgtatcaatcgttgcgccttttgaatgaatgtcaccattggatgatgcgacttcacgctatttgcagtaacagaaccaacgagaaatgactggtgctcgcggacccaagtcgtgactcttgtaagcatggtggcgacggaggtgggaaagatgacatattgaaaggtgaacaaagagcttcgatcattgtctatcagaaaaggaaactggcggcatgagcgatggacaacataacggatcacatcattgatttggtcgggctcaatctccagcgcttcgcaggccagctcgtccagggtcatttgcagttgcttttctggatgggccaccacctcgtagatattatcgaatcgaattgagttggcccggtacagtgcctggacctgcgcgtcaaactcattcaacttctcaagaaggcgcgcgcctgcctcgcgtggtactcctccttcaattgtcgactgaatctcgcccaacagctcggctgtggtatctggaaagtacgggtgcagacgcctgacagacttggggcttacgaatcccctcaccacaaagtcgacatctatagtgtcaggcaatcgccatttccctctgtgggtgtagaattgatgttgtgtgttgatggatcgaacgtaga

SEQ ID NO: 7848 - DNA, 161 bp, Emericella nidulans
cagacgtgacgcacttgaactgactaatgactactcccgtcggagcacgctgcctccgaatctcgtcagaccgtgcaacccactctgtactagttcaccaggctgtaggcttcgcggacagcttgcggggcctatgttccgtacgggatccagagatccgg

SEQ ID NO: 7849 - DNA, 885 bp, Emericella nidulans
gctctggtcgcaccgtcaccagggaacctctgccccatcgataatattcagaaactttcccgacgtatcttcgcgcgtggcactgtcaatctgtcgacggcctcgcattagtctcaagtctcgatttaacttctagataacagaagctagatatctcaagtatgttctgacactcaccgcagccaaggtcttcgtaatcgcctcctcgaccgtattcggcgcctccttgaggcccattttctgcgcgcctttgttgcccatctcagtctggactaagctgcacatggcctccaatcagccctgggttccagcaatgcaatatacaatgccacagaaggaaatagggacgtaccccggatgaatcgcaaacgcaatcagccattcttccgacgcatggattgccctacacaggtgacagtcagctcacctcagccgaacacttttcttcttccgttccagagcggaaaacacaggtagtgggcactaacaccgtaaccatatttactcctgccttgctaatcgcatacggtgcgactctatgcgtaccgtacacttcacacccgccaatcgagccggcggccgagctcacactcacccacttcactctccttccattattagaaccgacctcaagaaaccccctgagtgcctggaaaagtctcagggtccccagtgcattcacatcaaagacgttctttacatcctcgacatctacagatgccggtgtgcctgcgggatacgcaacgcctgcgttggcgatcacgaggtccaggtgcgttattccagcagtcttgagggaggaaacgaggtcagcatagtgcgatgcggtggtagattcaagtgtgaagagtaaaagacggctgccctgggctgagcccggcttta

SEQ ID NO: 7850 - DNA, 734 bp, Emericella nidulans
atgcagcatataccgtggtcgcagctccttgctgtctcgtcttcactttgaaatcgcgccagcctctgcatttccgagcatcctgtcaagagcttctatggtaccgatcagcaatcgaacgccagcagagcaccatgttatttgcgatgcgtactcaatgcagcaagatcttcatccatattatcaagtccacctgagatggaagtactaatgatgacaccggggtgcagactaaacgccagaagccccctagatcctagtttctccgccaacgagacagccatcagcatattagcagtcttggactgtccgtacgcaagccatttgttatagatctctccttcctatactatctgttagcatctatttgctccattgtgctcggaatagcaggcttcttacctgaaaattataatccgcccacctgattggacttaatctatgcccatcactactaacattaacaacccgcggtgtgtccgacttcagaatctttccaatgatcagattcgtgaggaggaagtgtccgagatgtgttgtcctatattggctcttgacgccctctaacttgtgtcctatacttttttctctaatttcctgcatagtttcctatgtacttaacttcttcgtcattttactttatcttgatatcttctccatctttatttttcctctatctctttattcctctttccttttttcttctccacatctcacctaactctctatttaca

SEQ ID NO: 7851 - DNA, 901 bp, Emericella nidulans
aataacatatgtgcaattctccagtgtaccaagataagtcatccactcatgctcaaacataaagaagacaccttcgacgtccacgagtgaaaatccactccggatagtgctccttcccaagcaaaggattatccctgagtcgtatgaatcgaactcccagaatttttcttgtaagacccactagtgaggccgagcgctacctctaaatgggaaacataggtttgctgctatagtttcaatgtcaagcctgagcctgggcccaccattgcagccgctccaagccttagtagaacgtcaagctcaaggcactatctcaggcctcttcaggcacagcattccgtctgtgcgatacgctagagtcttcgtgtccgctagatttggtttgaaatgcttgcattctcaaattctcctttcgtcccactcattttgctgcttaccctcttcaggtctccctctagcttctccaaatgctcaggaaccgacaacacgccgcaacgacgcgctttcaacaaacccaccccgctgtccccttgctgtccgttggacgcaacccgtaatacagcagctgcgtcgtatatcagggcgcaggcttattcttcagagcctgaagtggaggtggaggtctcatagatctgagacagtgcatcattggtgacaatataaaggtggaatcagaacgtagagtgcgtttttgtggtttttgaagccgttttggaaaactggctgtatcgaatccatgtttgcccactgtggctgtggaaacctgaaagtggcgagatagaaatgctgaacatgtcaaaaaggaggggaacagggctaaatcagaacgggagaaacggttctagattctgccaggctggggactttattaatcctacttagtgggattcagaaaaatcat

SEQ ID NO: 7852 - DNA, 523 bp, Emericella nidulans
gaatgtaaatcttgcgattgcttgcaggtatccctctgatacggcgtccttgtccgacatcatctctaagaaagaacgaccttctaagactcctcttctagtgcaatcgctaccattacaccaatgcagaaccccacaggcgggtttggaggcggtcatggccaaatatcgcattgtgcatcaagttatgccgcagtgctctctttagctatggttgggggcgaagaggcattcaacctcatcgatcgccaagcgatgtaagttactttctctttcttgggggacactctaacaaagaagcaggtggaaatggctgggaaagctcaagcagccagatggcggcatcacagtttgtgagggtggagaagaagacgtgcggtaagtctagctcatgtaatttttctttcctgcattgactaaatgcatattagaggcgcctactgccgaatggtgattatctcgcttctcaacttgccacttactttgccccggagccaaagcacgagagtatgggttggagacg

SEQ ID NO: 7853 - DNA, 906 bp, Emericella nidulans
ctagtaacggccgccagtgaaaggtttctatctccgcggtctgagaggccattgtaatgagaaagaatcaaaagactactgaaggctggcaagacgctaagctttgaatccccacttagagcgaaagcttttctaacttgcatgctgtcagcttatcagatgtttgacacgatcaatagaaagcgaccttacataattgcgtctataaatgtcgatcacaggtgatggagcctaggcctacggcgtactcgtactgcctccaactaagaatatcttcaacagatgaatacctatatcacagcactatgtacattacaagataggtatatactcggatcataagctctccgtgaaccgactccctcgacttccatcaaaactaggatgacttcgtccgagcgcatccggacgttttggtatcgcgatggggccagacggtggcatagggaaaggcatgggtactgaccgcgcactggcctcagcccaagtcgccgcatttgtcgaaccagatgtcggcatacgtgccggcgacggtcgcatcacaggaacgccctactacggggcttcgcgcgtatagctagtatcaagcggaatgctgaatggatttgacggcggcagttgcgatggcgaaaaggccgatcgagggatgataggcggtatagtgtcactgatttcggactccgttggcgacaggcttccattgccatcatcgaaccccggctgcgcaaccagattggagtttgcgttcggagattttttggaaaccacactcgctactaggggtcgtgctcacgaaactcttttcaccagtggaaacttgagactgtcgccagggttttataagtgccggagcgaatattgccggccgaatattgagcccttaattgaatacgtgatgccatcttg

SEQ ID NO: 7854 - DNA, 1149 bp, Emericella nidulans
ccgccgtctgaccgaagttgatcacctgcttgtctagaagaatgaatttgcttcccttgaagaaggtagcacatccatcaacacccttggcgtcctcctcctgcatgcccatagcccttcctcggggccaaaacacacccttataatcactgtaggccaattgctccctgaaaaactcattgtagcttccttggtcaatctcctgcagacagataatatccgggtcatgagctctgagctcattaaggatggtctctcgtctgaattcccaagacaggacgcgggacggagcatagccgtagtgtgattgggtcgcagaggaatcgcaaagtgtgttgtaggagagtacggaaaccttgtctggagaagtagctgcggtctcatcgagaacgagccagtctcgtgcgggaggaggaacatgcacttcttatacagattagcgtggtttgatgtgactcaaagtgatgatactgacctggcatctcttctttaagatacctaatcagggctttggtgccctctttcatgatcagagacttcagaacgtcctccaatgggttaccctcaattcccagaatctccagtcggtaaagatatcccatctcgtagggaagggtgcgaatattgttatcgaacagaagaaggtgcctcaagttagtgagcatgccgatttcttctggaagctcggtaagatcgttggcagataaatccaagtgggtgagcttccgcagttgcccaatctgcggaggcagtactttcaatttgttgtgactgagataaagcttctccaagaaggcgtacttgaacagtgacggtgccagagcccgcagtccttggccgccgaaatccagcgcatgccagccctgccgtgaggcgggctttgtcttcgtgatcccattcttctgattgacaccattttcttgagccttcggctggctgggtgcgatttggatgcccttggtctgctgagctccggcacgagcatagtagtggggtgagctggcctgtctggacttggcagcgagctgaagctgctgttgccaatgttcgttcatagacttgtaaagttcttccgcaatattggtgtgtgttcccgtcttaatgttgctaggcgtgaagcgtgtgtgaccgactcaaaaccctccttga

SEQ ID NO: 7855 - DNA, 1791 bp, Emericella nidulans
ttggcacaactatgttcgcacgaccatatgtctcatcgatctgtaatcaacctgcagcggttcggatcctaagacaacctcaaagccactatctccatgcgtcaccgccattaagtctcccacgacgaaaggatttcttctcctccaatgcatttttggcccagaagcacggcgacaccgccgaaggctcggaagagtctcagaaacagcggagaagaggcacaagatcaccagctgcaccgacatcgctgcgcagggtgtcggtagaagcacagaggtcgagggacagttttaagtccaaggctcaacttagggaggctgggctgttgcagacaaaggttcggcttttcacgggttccgactggcatcgctgacattcgaaccacaagacagtcactgcgtacgctgtagccgaacagtttaacattcgcaaagcgagagagattctgcaggaaaaaggttacgagcccgacccccttggaaccggtctataccctcaggttgttcacgtccaaattccgcttgattctattcgccgagtaagcaatcctagcgcggagggtctttctccggaagaaattggcgatatattcgttttcccttctggtacggtcgtgtcatgggcgcttccagaagggtttacatcattcttagcgactaggacgttactccctgcggcagagggagcgcatgttgatagcctggagactgaagatcttgagtatgttgaggatgctcagcgtgataacagtagcattcatggagacaccatcgtcttgggaaccaaacccagtgatgccgcgtggcgccacaatcttcaggtcatcagtctgtggatactgttctaaccaaggtcgccttctcttctgggctcgctcgcagcacaaaactggcggttttagaaacattgctgtccaactacttcgagtcgacgcgaactatcccaacactcatgtcgcaaggatctcgcttaccctatactcgagacttcattctccgaaagactggacagctactgagcgtccgcgcccaattgaacctctactcggagttgaccgactcactccccgacatcttctgggacagtcgacatgagcttgggctggaaggatattacgagcaggttggtagggcattggatgtgggaattcgcatcaagctactgaatgagaaaatggactatgcgcaagagattgccagtgttctccgagagaggctgagtgagaccatggactgcgtttggaatggatcatcattcttctaatcgccgtcgaggttgggtttgaggttttgaggttgtggaaggagcgagcccatgaacaagcctccgcagctgaacaggtccagaaggcttaacacgacctcttcacctaatatgagttggctctttccaacgcatgtactctacttgttactataccccactcatgttctgaatacagcgacttgaaatacatcatcaatgatcaatgtatagattgtgtatacttcgcgctaaactcgataaggcgctatcagctgcagccaccatgtgacatcgctgagtcatgggcacgtgtactgcttgtagtctacaaccaccctttgatgcagttttgggtcatcttctcgtcaatcgaggcttctgtatagactgtgctaacttgcgcggactttgctacattcaccctcaacaagatatcacttggccaaacagtacctggatagagctgcggccaaccactcctttgtaataccactgcatgagctcaacatgagctcatatcaggtttcctcgggccatgccagggc

SEQ ID NO: 7856 - DNA, 980 bp, Emericella nidulans
cccttcttcccactccaagaccgaaactttccctcaagctcacaagccgtccacagaatttcactccagtagcgtttctccacatccgcaccaaaattctcaatgacattttccggaattgtccaggcgcgcgtgtagctaccgtcatcggcaaaggcggggttgacctcgtgaggctcgaaaacagttgccgggtcaaacttagggaagttggcgtggatgaagaaggggcggggtgtttcggttcccgagcttttggcagctgcaagatcggctaacgagttctgctccttgtggagggcgtagtcttcagctggatcgaactgaaccatcgcggagcctgcaagaccccctgcgctactgtggcccattgctacaatgccctcagtgacatgatagtagggctcgccaacggctatagcggctgcgacaaaggtttctttgtcaccttcgccagctgcgccttgggaaagaagcgggtagtagtatttggggccccagaggttgtagtaggcgctgaggaggagggttttggtatgggttttcttggagatgaggatctcaccagactcggtggattgacggggactagttcctggttttggggctggctgggatgcgatttcgtagtaatatgacgagacagtggaggcccagaaatcaggccatgtcaccataccccttgacttgaatggctcgtttgtgaacagggattccggcttgaggagcggaaatgcgtcggcgtccagaaataaaaattcctcgaaggaagaaaagagcatggcgaagagcttgagctggtacttttcgatctccatgaccttaggtgcggcgtcgaatatgtgtgaaagcacaacgcattgcgcattcaagagggaagcaccacatcaaaacgaagattcgtttcttcgtcgtggccagaaaacttcgaccggagctttaccccttcgctgagattcgagtgaatgactagtccggag

SEQ ID NO: 7857 - DNA, 1183 bp, Emericella nidulans
  unsure (1)..(1183): unsure at all n locations
ccccggtggttatatacctccccagaggaggggggataatagtattttttgttggaggaaactagaagaccattgtgtatgttttgatatggcccagaaatccaaattgagtttaaaaggtttttgttaaatcaaagggtccttttaagcaaattttaggaggtgaaaggcatattccgaaataccccgttgttaaaaaactttaatcaaatggctgtgaaggcggtttcaactcgaagagattctgctcaaactccctcacttgattcagtcatatcgaccaatctgcgtcggtcactttcctcttgggcaataagcatcgtgcttgaacactttcgggcgttgttcttcagaacgggtagggtctaatacaaccggtcaatcgctctgttcaattctgtcttgagccttcccaagcgcttcacctcagcttggagccgttgaatctctcgagactctgcaagagcacggagatcgttctcaattttcaagcgcgttatctctcgcttgagctcgatggaatcgtcggcgccgggctttgtttcccccaacaatatacgagattgctggggtgctcggcttccttgagatgaccgcttcgagggcatgtttccctttgtcttcgcattagagtgccctttatgctggggttctgactcttgaacagctggccgacgtcgcttctgatctggcgggaggatatgctcttgcgtaatgttggagtcaaaccgctgcgacggctctactttctcacccggttgcagcatagcccaccctatcatacggcgcctgcgggttggaacgaccacttctagcggggccagctcagggacgtctccagacataggttgtgccatgcctgcagtcaaccagcgtagacgatatgctttgagctgtgaaaaaggtgggttatcgaggtatgaaccaaactaatggtcctcacgaattgtatcgaacgatgcaacgcggctatggagaggcaaatgcggaagccgaccggctcagaaaacgtgagtttggttgcaatgagaccgccacagtgacggggatatttttggctntgccctgttaagcctaacgcgcaggcagcaaggcagattcccaattgatcgcgctctcattcgagatgcctcgaaggcagactccatgcactgacgtgctggtacgcttgttctcacccctg

SEQ ID NO: 7858 - DNA, 635 bp, Emericella nidulans
cgcccgttcaaatgcttgtgtcatgacatgacgattcagtttttgccgaccatggtcggtcggttttttttatcttatctgatcaacccgcctttcctcttttggacgcccacgccctccacccccccaacagactgagcaatgataccagcgcactggaaacctctcaggatgaatggaagaaaaattctatttctctttactaagagctctgtaatatgccaatgaaggcgtctctcgcgggccccgcggcagacacggctctaacgtaaatggcaaatgctgcactccatgcgccggttctgatcaccgaaaaacggcgagagatgattcctcccgccacttcaagctggagtgaagggctatactgtgtcatttgattcttctggaattggaggtatccgagtggccctactttagtgcttatcgcggtgttgactattgccaggtgtcaggtgcgagtatgtaagcaaagtaagcaaatatttggattatgcacggcctgtccttttgcaggggtatctgtaacacgggaaagatatatatggcaaattgatgcttcagagatttacccaatggggtttcgtggacacagttgtatatactctgtcagatggagttttggtggtgcaaga

SEQ ID NO: 7859 - DNA, 914 bp, Emericella nidulans
ctatggcaaacctcgcgtctgtgctattaagacaaggtcaatggcggcaggctgaagaactacacctacgagtggttgagacaagaaaaaaaggcctgggcgaggtagaccctcctacgctaaatagcatggtggacttagcttccatatacaagcatcaaggacgccttgctgaagctaaggagcttgaacggcaaatagaggatgctcgtatatggcaactggagcaggactcggacacagattcggaaacatctatcatttcatctatcatgtcggaagcctattctcatgatagcacgacctcctcggggtcactctacgagacccaacgtgctgtccccgaaagagtagcacgagcattatttgaggaaatggaacttcaagcttattacagaagagccattgagaaatttgggaaagcgcattttacaagaaaccatgaccatatcctaagaaggcttttcaaggatctcagattggaagccaaaaatcctcatcatcgacgggcacttcgctttgccaattggctttcgcttaatagagtgaccgagttaatatgcgagctctgtgatccaaacccagatcttcagcagctccgaaccactcagctattactcacgcagaaggaagatcgtcagttcattctgaatcgacatctaagatcactagccaacaagttagacaacacctgaatttccgaactgcatgacccaggcatgacggtgactgaggcggtggtcatgtccgacttcgagacaaaaaaggattctaaacatcatgggagatgacagagagcgcagagagggccgagaggatgaaaaagaccaggaagatgaaggagatgtagaccagggcccggatggctccagccagtaggatatggaaatattcttcatggggtgggaaagccc

SEQ ID NO: 7860 - DNA, 718 bp, Emericella nidulans
ttgctttcatttttccatcatgcgtgatataccatagttgcgccttgtaaccatttcgcctgagcctttccatgcaagtcgtaagtgtatcaaatataccaaagaaatcggaaccgaaatcgaagggaaacaatgcttttcaacttttcacatagcaacacccgctgcgccgtcggacacgttatcggagaggttgatgagaagttgggcgagacaccgcttcgttgctgcgtcgtcgcggaggaccgaggaaaaggtggcgtcacgtaaaggctcaggcagacattggcgcaaggcctcgcgagcacggctattatcgctcagcctatcagggttagaaagcagttcatattacgaagcggattgaacataccgaaggaagcagcgcacaacatgcttgagaagtctcacggtctgctgctcaaccaactgagtaaccatgttgctcagaactgttcccaccgcgtagaacctctcataggtcgcgcaaatgtacgctaggccgatgtcatccagcagtatcttttgaacaatgaagatggccactgttttgctcagctcggagccggtttccatgatccgaagacagagcggaattatttcagtcgtgaggaggaagttgatgacgtctgaagagtcgtttttaacaagcgcaccgattactcctagcgaagtaagacggaggtactcgaacggccgggccttcgaggttgtatca

SEQ ID NO: 7861 - DNA, 1293 bp, Emericella nidulans
gctactgtcgttggcagaaaagacaggaaaggtggcgggaagtcatcgaagcccgagaaaccacgctatgtctcgtaccatgataaacagattatggcagacggaatcagcagtcttcctgataagaaaatgcaggaggcactcaagatcattcagagtaacgttccggctcttaaggtatgatatttcccgcaagcaaactggtctcgcatatcatgaactgactgtttttggaagggtacacaagagactgaaattgagctcgacattgatgaacttcccaatgatgttctttggatgctgctcaagttcgtgaagaaaaacgcacctcatgtagttgaggagggacgaggcctcctcgccagttgcccccaatgctgcaccacccaaaccgaagaagaacaagcccatgagcaagtacgaacaggaagctcagattaatatgctcgaaagcaacctctcacgcttccaagggggtgggcacggtcgctctcccgaaccagttccttcactcgaggccaatgatagcagtggtgactctgaggatgattctgaagaaagcgaagaagagtaaaccttcgatggccagtcgcacaacctgcgttgcataatcaattcgctcgcactttttgtcctccctctttctctgaatctcatcttgacggattgatcggtcttcgccctaaaagccacatggtgccagccggctaagctcgactctccatacgtttttcatctgccttacctttttttacgactccggatctgattcacatatcgcgcgttgaaatttcttgtacataagcgttcactttttcagcgcgtcggggggggtatgctcggactcatttgtccttttctttgattcaaatcacggtacttccatgcagaatggtgtttggcaggggtcctttcttacctgcgggttgtctcattgcaatcaatatccattgcgtctttgcggaaggcgtggtggttcttcggatcagcttgggaatccttttttgcttgctttcttcagcggttaaagcaagctctgaaacatgtatgattatacgaaagaacgtggcgatgtaggcaagaaaataaagcttgtatttttatgtggcctgccaaagtagatataaagcgtagactagagactcgttgacctcggcacctgaggcatggcaagttcaccgccgtccaccgattcaaatcaagcctacaataactcggcattttagccactgaacccaaaccgctggcacgaagcgacaactactaaaatgatcccaccgtgtatcttcgcaa

SEQ ID NO: 7862 - DNA, 870 bp, Emericella nidulans
tccacctcagtctcacgtggttttagtagtcttcgcggaatatgtcaaggcacaccccgccgacagataccttgggcaaggagtctgatcggacaagggctaccacgccacaggatgcttccggggtgggtaactttgtggacagtttctgggctacgctgactgagatattgtgatcagctcttcaacaccctgcaagggcatgtcgatgaaattcgcaaccttcttcaatgcggtatttgtatccgaccactctacgagccctttactatcgcctgcggacacacgttttgctatggcgtcggtctaccctttccgcaatgcgtcgtattatgcgctaatatcgtgtctagtgcctgacctcatggtttgccgaaggaagaacaataaaacttgccctgattgtcgagctccggtgaaatcacagcccgcgccagcatatttggtgagctttgtctagtgttcggctgtcttcagctctgtcctaacatgtcccaggttcgtgcagttgttcaattattcacgagtcgtgcagagctcttggataaaggggaaacgacagaacagcacagagcccatcaaaacgaggaagcagaaaggcttgaggcggataagaaaaatcgagatccgaaagaggggggtctttttcggggtatattcaatcagacacggcagcgacctgcccagcccatctacgaccttgaagatggtgttgttcgttgtccatactgtgcacatgaactagaggctgacgattgcctgaattgtggataccgcaatgatgactcactgtccgatgtcagaagtgattcggagaactcggaaatgacagatgcccatacgcagaaatagatgatgacggttttgggg

SEQ ID NO: 7863 - DNA, 1263 bp, Emericella nidulans
tattctccgaacctcgttggcttggcgcagtctggctggcaatctcgtccatttgaatctcgggcgcagtggcggagaccatctttttcgaggtcacccaatatcagagtgccctctatgcaagcgatcaagaacaaatatccaaaatggtctaacacagcgggatgaacaacgcgagtcgaagagcagtttgatatatttcgatgactccgcgctgtttgcttgctttgctggaaatttatgcctcaggctccacaaggttacaatagtcaatgcctgacctttccctcttatcctctcgtctctttgtaattttcattcctttttacgaaacccaatattttacccttgtgttggtcccattgccctcaccgtagctgatgggagacgtcaagttggagataattgatgccagcgccgagctgctctagttaggtcgataacgcctccaccagcttcgactcgatgcatacgaacggaaggactggacgaatcaggctgctcctccttaccatgaagggaataacacccagttgaacgcgtcccacatatctcttatgggtcagcaatccaactgctcagcatgtatacgatccagtgggttgttgcgtcacggagggaactacgagcccaaaaagactggccagagcatggttcggcattcggccaatgttcccacagcagagaattgcaaacaaatggacttaagttcgtgcccgaggtcagatctgttgacgacgaattggaggagtcccatcggctgatactccgtaatccgtcgatacatacttccccgcttcctacggatatgccgaggcctagataggtcccaccacctctaggactatagaatggccacggatgggagcctggcgacagtcaatctactcgatttcctcttgatatctcatcctaggtcccggtctacaaataaacgatggctgcagaaatacctcgtaagctctgggaacatcctaaccctagggctactgcgatgtgggcattcaaggagagtttagagaaagagaagaacgtcagccttccggtaagctggaccgatacttactggatggccaatgacttatattcctagacttattatgacctctacacctggtctgtgacgaaccgcgctgcgttctgggactttagctggagatatttccccatcattcacgaaggctcctatactaatgtcgtggatgaatctgctcgcatcgatagcattcccagctggttcgaagttgcccgcaaaaattccgc

SEQ ID NO: 7864 - DNA, 482 bp, Emericella nidulans
aaagtaaagtacgtatccatccttagacacgctttccagttcgtcctaaacctgtcttgtaataggtcaaagggccgtccgatactcaatgccaataataaaattattgagtttaagcgccggcgctcgagacagaggtcttactggggagccacattataggtaacgaccacataggtagtttttaagagcacaggatcgaatcagttgtgcggtagtttatggcacctcggttcccgccgtgagatcgatgtcaagcgagcctcatatgccagacagttgcgatgtctgacaactcgacaagcggtgctcctacttcttgcgcaggcataggtttggtttggggggcgtgttgacagatgattgaggcagcctagggctgtggagtcatcgtcgacttaggcctggattggggctggctcaggacattcgctactgaactgtacaagatcatccgacctgctgtaactctttggctgagg

SEQ ID NO: 7865 - DNA, 925 bp, Emericella nidulans
  unsure (1)..(925): unsure at all n locations
aagagacacaggttctcaaacatgaattcaagaatatgcgactgggggagatacgtgagcaacgcttccgatgggccgacgtacggtccgatgatagcgtcaacgcccgccactattcatattagctcgcgcattctcatcatctgattgggtgacgtactcgcagcaacgacattcgcgtgagtgagtggaacgccctttggcgggccagtagagccagatgtgtacataatgcagcacaggtcttccggagccgggggcacggggtcgtaatgattttcctctcccagcttccgcaagtcctcgaagctcaaaatgttgagatggctgaactcggtcttcaaccggtccatatcctcctgtttgagttcctcgtcggaattccaaataacatgtttgatagatttcgctcggtccaaaacattcgtgagagatttgatgagggtgggatccaggaaaatagcatcgctttcggtctgcacaatagaatgcgccaatccctcctcgccaagggtatcgtacgcggtaacgacagtcagggactgggatgcggaacctatttagcaaccagtcagacctgcgcggtacgttttacctttactgaagttggggaatctcgaatacgaaccgtgagacatcgccagccagtttgcgctgcaaaacccaacgtcagctttcacgccaagctccacaacaattacacatacctcgttgcgccatagaggtgaaccttatcgcccttgttcagaccaatttttcgcaaccccttaccgagctcgagcgccagcgtctcatactcgataaaactttngtaagagtagggccccttctaaagtacgtncactgcttgtcaaccttctgctcgactccatcaataaccttcttgaccttcttggtctcgatgtgggtcttgatgagcccacgg

SEQ ID NO: 7866 - DNA, 832 bp, Emericella nidulans
caatccatgctcgaggcgcggggaagaataagtgccagcaataacccgtagaccgacgacgaagaaccactgtccctagggatcggtgtgacgagtcaaagctgcgttgacgatcaatccgccgcggaatatgagcaatcgtcaggagtcattcctcgctaacagacaccatcaagtgactgcacagctttaagcctaagccgagggggcttgctcgtcgcccgcgtcagagtgcggcaagacagataggagaagactccctgaggttctcggcgaacttgcggtcgtgcctgagcggggcggtgatcgcttccggccttcggaagtgttttccactgcccctacattccggtcggaagggaaatgatccgcaatcctcctcccgatagatttctgcttcttgggttgaatcatgtcctttgttcctctcaaatgttatagaagtatttactttgaatcgctcagctcatattctgagaggtgtatatcatgtgatcaaacaaggtgctactacgctgactaaggaggttatcagtggccgacgccacaaaagttaacgacgcacgggaattgaagctattcacaacacacaacaacgcatataatgatcaaaatagctatttcttacataaagcagctaatcatattatggcttttggaatggcatgcaaaatatgttggcgaagcgcgttcggcgcgctcagagttgcatccccagtaacacctcaactacattcattgctcatttctgaactgaatcaaatcccgaccgttcgtatagagggggcttcatttgagtctccagcaccttggacattattctgttatcttt

SEQ ID NO: 7867 - DNA, 1026 bp, Emericella nidulans
attgtttcaaagtagaaatactctaaggtatggcaagctggcctatatcaaaagtcctatgatcgcatttacattgatccgtgatgctgcctaggcctgaaacgcaccgccaccgccaccgccacaatgtctgcagcagcctcataatacgtatcatgtgacatcataacttctagtagcttccgtataaatgctctttactaattatgcattgatctaagggtttacgatctcaaaccctaacccaatcgggacgatcccacacaactttgaacgcagcgccgcccgctgccagccagcctgtctagtcggccctcggacttcagaccgcgattgagcttcttcccacccaaagattcttgacgattatccgcgacgtcacgaaccaccttagcccaacatgcctcgcgaagtttccgacatcaagcagttcatcgagcttgctcgccgcaaggatgcgtcctgtacgtttacccacccgatacctgaagctggaattggtctggagctcgagtccgacaaccgtcaccgcgagccgacccgaccttgcctgcgaactgagaaatgataaggatgaggaagagaacatggactaatgaaaatggctctttagctgcccgcatcaagcgcaaccgcaagacccagcagatcaagttcaaggtccgctgcagccgcttcgtctacacccttgttctgaaggactccgacaaggccgacaagctcaagcagagcctgcctcctggtgcgtcttgtctctattcgtatctgccgcttcggagatttccatccaattcatcgaagccacaaaatgaagttggatggacggaattcgcggctcaattgaagaagatatactaatgtatttttggtctacagctcttaaggttgtcgacgtcaccaagggcgacaagaagaaggctctgtaagcgccttcatctcattcacggataaacggaagagggagtcttgagcatggtttactcgtcaactgcttgaggatcgcggcatgggacaatgcatttgtgg

SEQ ID NO: 7868 - DNA, 149 bp, Emericella nidulans
ggagagtgcgacacacacccgggttaagccgcgagtcggcgatgaggatgccacgggaaccgatagaccgacgacgcggcttgctgcgctgccggccgttgctgacctcgtggagggcatcccagtcactgcagaggagcgcgtccaga

SEQ ID NO: 7869 - DNA, 280 bp, Emericella nidulans
gatcttcagggcgaaaggagctatgcgcacgcgctggagaagctgctagaggaaggcagaaccaagagtatcggagtcagcaattccggtgtaatagatatcgaagagatcacagtatatgcgaaggttcggacgccagacgtgaacccaattgaggtatgcttccaggcattctcggcgcccgaggatgctaacctcgcatctacacagctcgaaacctggtcccaagacccgtctaatcgccgatgtaatgcaagacgcgtggaatcattgtcgaggc

SEQ ID NO: 7870 - DNA, 745 bp, Emericella nidulans
gcttttatttgtgttcctcccttctctggaaaaattagagtccaactggtctctggatccaatgtacatctggcacctgttgcctcaggctgatatgggaaaggtagaatcgtcgcgctcgccctcgccttttgtcctgcggaacttgacccatctgaaagtcaactccgagaccccctgcggcaactcctctgaaatactaccccttcttcagatgccttcactgacccacttttttggcagcaattgggggcccatcaggtgggatggtggagttgcgggagttgatattcaggcaaagggtctacgaagcggcaaaacgacttcgtcgataacgcacctcgagctccgttactgcaacgtcgatatgcagagtctgcgaaccattctcagatcctgtcgcatggtcaaaacattcatcttccatcgtgattgggacccccgggttcatgtgaagctttctggggcttcactctccaaggcacttcgcccacttcgaaaaacactggaaaatatcgctttacatttcgagccggggctctacatccatcaggaaggcgagatacatccgctggatttctctcaattctctgtactcgccaatataaacgttgccgctggttacctcattcacgatcccggaggattttcgatagttattgagtttttcaaagacgtccggttcgaaagacgaacaggaaccgataaatgttcctcttcacgatccctaagtgagtgtttatcg

SEQ ID NO: 7871 - DNA, 1140 bp, Emericella nidulans
ccttagtggattcatcgagcgcctcagttatactccaagcaaagaactcatcgagtatgcgcagggtctactgtcgacagggtacctgggggaggcgtttatgtacgtcattgagtgggtttggaggtgagacactcattcttgtccatattatgtgatattagatggttgattgcagggtagatagacatgtagatagatagatagattataagcgataactaccgctgatatgcggtaggtgctggggtcatatatgtatgtacaatgagtgaatgagtgaaaccaagaggttgagcttggctggcatgtacctcaatctacatgcctggtttgctgtggccactaggtcgtgacaagttgattgcatgattgactggaaatggaaggtgatgttcctgcgctggcagtcgttatagaagccattgggatttatgttgaattgttgtctctcccttgctcccttcactcatctattctaaccagtaatgacttttagctgccatatgcgtgctcatttttgtagctagcttagtggacgtaggataaacaaaacaggatgagttatttttgatagtgatagcatgtagggctacgcaaattcgcagacaactgtcttgccatgtttcttccctatcgatactgcatacatggatcatatttcgatgcgccatccatgcacgcgccccatagcagcattgagttatcaacgatgtcgatgcttgatttttgacattgaatagcaggataagtccaaacgaagcgttgattccagaatgtctgaaaagtaccctgctatgctgccactagattgtaaaaccgcaagatctaatcttaggtaaagaaaataagtacaagaattgaagggtcagatcagccacgaacaagcaaaagcatgtactgcgctctacggatatgctcgctcttagtttaaggaatatggacctgtatccttgccaaacgctacaacctatactggccttctcccccactcttgtcatctatatcttccatcttatatcattcattccctttactctttctatttctataatctcttaacttactccctaacttcttatcttccatttctcttacacactacctttcatctttctattatactcatttttcttctct

SEQ ID NO: 7872 - DNA, 946 bp, Emericella nidulans
tgctctcagatcacggtcagcgccgatggacttcggtcctcggcgaggatgaattggttcaacaggagacggattgtgcggaatgtgagcgtactccagaggaagaagtttgcggcgttgtagaacaagaggtattgccgcgtcaggccggacgagctggccggtttggattttgatttcgatgaggacggcattttggcaaccttgtgggaatgaaaaagcaaaatggtcgagaagatggatagacgtggtaagagctgggaattggcgagcaagctgatgtgaggttttgatgagcgggcaattgttgaggacgaaactccgacacgtgggctgggcctcggcttggcgtgaattgttgggttgcgcagaaaggcagatgcagggatctagtatgctaggaaaagaaatcttagattgctattaatattaaagatcgtagatgtactcaaatgaagaatattgcttaatatgaatagttcaaatagtagcagaatgttagtatactcttttctatactcttgtctgcgtatgaatctgattggatcggcgtgcaatcccagggcccttgcctgctctagagagtcatacacgcgttgctccaggcggttattgaacgccagctttatggaagaatccacgcattctccttgtatagccggattgtagctcaatacaatctatatccccagtatcgacatttctcattgcattctctgctctatgaatgaacgttttcccgtcactgttcacaggggcttaataagacttggcctggggatgcctgggtgtactccataaggagttgactaaaatctactgaagatctcagtcacgcgtgatctgagagcgaagcttgtggctgatgtaccaggggtataggtgtggctgctaataatcctaccgcctgcctatccttagacacctgtaaacagtatcccttggg

SEQ ID NO: 7873 - DNA, 154 bp, Emericella nidulans
gtctacacattcggatttcagcgggatcgcatgcgcacgatgtacctgtatctagtgtctcagttggagaccagtgcttcacggatgactgctaaccatgctattctcgctgctcatgcggagtacctaggtggtcatcgtgattattaacgcc

SEQ ID NO: 7874 - DNA, 138 bp, Emericella nidulans
tccttgttagctcagaatgatgcacattgcttgtcgccttctcacttactatgtgcgggagttcggacttgtgatcacatcgagttattgcgtcatggctggttgttgacttagcgcgccgacatgaaggtcgatatg

SEQ ID NO: 7875 - DNA, 910 bp, Emericella nidulans
  unsure (1)..(910): unsure at all n locations
ctaaccgcaggaatgatgccaatctcagttgtgtcaactaattatctcgaacatgcaatcatggtagctagttcctgcctgaaagcgatctacgctcccaatacccgcggggtgcatgattacttgagctacagcgtccgatattgcccacacgatcggttgacgacagtcccagtcgatgcacaagatgtagctcagtgacccacagttgcatgacacgttttttaccctagcttaatgaaatagccaaataccgaactccaggtcattttagtgtattttgccttcctagcattccttcatcactgttttgcttgcttagtgaagtccgttctggttcgttttttcaattttatctaagtggttatgttcgttttcttatattcgggggtaacgcacgtatttaattggtctttatatcccttataatgtttgtctccgcataatgtcttctttttgggttttttatatgtctgctcctctgtcagtttaaaaaaatttttctctattttatgttgtcgtaacttttagtcttttaatttccattcgttttccttgtaatttcttgacggttattttactaccttccttttacgatcctgttccctttttctttgtgaggggggntgttttatatttatctctatagttttatatggggtgtgttttttaattttgtttgtgaaaacccgttaaaccgctgggtttttcgaatttgttgggcaccgtgaaccttttttttgtcacctttaagatttcccggggtttgggcccattttagggcttcctctcaaaaatgtgtttttgaacttcaaaagttgttcgcaaacccttggttttttgtcgtttctcaaaaaataataatttttttctcctcacatctggntatgcgctggtggtataatattta

SEQ ID NO: 7876 - DNA, 684 bp, Emericella nidulans
tcaccgtcctgcaccgagtctgcacgtttaggatccgttggatggagtcgatgccggtgcaggagctcagcgctgttcatgaaatcctgattgaccgcagccttgggcgcccccaagacggtttctagaaatcgatcacgtttttcgactcgcttttcgcctcgcttttcatctctagggcaagtattcgtcgaatttgttagttgaggccgagacgagcttatccccgagtctggggtcgggtgggcagccggctgatcgaccaacaacatctgactctgcgtgcttgctggggctgaagctctagctcgctcgccgtaagacgaatccaccgtgcttggctgctgccataggaagccatcttcgtacgaacacttgctgggcgttttgctcttaatgcaccggccgcaggtcgggtactcgcggtcacatttcagtttccgactgcggcactgcgcgcatgcgatcgtccgccgccgtctctttcggacgcgttgttctggagtctgggtgtccgccatctggcgatctgctaatcctctggatactgaactggacagtctctgtcggggttttgagtgagcagatccggagacgcgcggcttacgtgtcggggcggccctcttggccattttgggaaaataatcccgcccgcccgacgtactcagccatgtcccgtactga

SEQ ID NO: 7877 - DNA, 1287 bp, Emericella nidulans
ggaagaaataataagcaagtgacagaaagtaaaaagagggaggataacgaagtagagatatataaattcaaacaataataatagaggataaatgagagagaatagtggaagaagtgggggagaggaaaataaatgaaatacaagggggtgggagaaaaacgagatgggacaaaggcaaaagaaattagaaaagaactgtagggaaacagacttaagaaggtgatataaaaatacaggaagaacatcgtttaaacgaatgggggtcgtaaaaaaaaacagtatgcggagaaggatacaaaaaatggacattaaaacttaagagataaaaggcaaagagctttacaaggggtcaacaggtgcaatgagaatcattctcctcaatggaggtgtcgcggaagggattatgctgctatgggagctactggcagcaaacggctccaaagacgcatggaattcggggatcgcttatatcgcgatctggatcggttgaggatgttatgtgatgaggtcaagaagcgtgagagggaaaagttgaaggatgcagagatgcttcgaaatatcgttgataccgtctacttcccgattttccccctactgtggccgatcttcgaaaaggcgcaagtgtaagcagccctgctctttcatctcggtcgctgctaacttcttctagactagatagcaagggcttcttcaggcgaggacttctcgcaatacgcaccaagttggagcaacgatactatccatctgtgtcgtccttctcggctcacttagccagcattttcacctcagagattggagtccagccagctggcgataccgcggagcttcagatgcaaattagtgggcgggctcctgaacttagtctggagcagcgtgaaaagagaaagttggcgaagcggattatcaaagccattcaaccagcactggaagacgctatccgtaaagagagcgaattgactcgccaacctttcgagcaggagctcaaggatttggatgtaatgcttggggatgtctcttccgggagaggttctgagatcgattctgcagagcgcccaggggaggaggcttttgagaaatctgagcttccgaatggagataccgacagtacgaatatggatcccaattctacggccaagatgaagtctacagaggaggttttagagagcacggaaacaaatacccatggggcagaaccttccaaacacaatggatctcaggccgctcaggcggctgctgcggatttatccccggtggacaagaagaagtcagaagcttccactacacagc

SEQ ID NO: 7878 - DNA, 882 bp, Emericella nidulans
  unsure (1)..(882): unsure at all n locations
tttgtttcttatctggcgcttgtggtctgggcagccacccttttatatcgctaaacatgatgccagtgatatgcgctttctgtcatctgaacgcacttttagctagggggtcatcctaaccagagatcacacacggtgatagggccaactacacgcattcaagcaataatgcctttctttaagtgtcaacataagaggataaaccctcgtcgttttataaaatatcagaggacgaaaagtgcgaggggacgccaccaaccgctgcacccttttgagcgtccaagaatgccttcaactcagctggtgtaaataaccccctcccgagtggaccagctccagaaacgggcgatagaatacactttgggagagacccccctgggggtttcttcaggggtgtgcaaggacttaacgaggcctccatcatccctaatggttttcgcccttcgggggggccccctcatgggtgttcccacaaatactccctgggccgcgaacacccccttttggggaggctttgacccccattttcgggataaaaagatttggcccccccggcacccccaattttagaaaaactttccccgtggtagaactttttgaacaatatttctttttcccccgggtacacccctcacaagggcttatatttgggggaaaccttcccaaaaaattaaggtttcccgggggtcgcgcttttttctttgaaggggcttcgtttataacttgtgtcccgacggccacgggggccaaaaaacaaagccggggtttggggtcttttaaccccgggggcctattgtaccaaacttgttgggaacccctttagcggtccaccattgtttgaacctcgctctcccccccggggggngcttttattatttctct

SEQ ID NO: 7879 - DNA, 645 bp, Emericella nidulans
cccttgttacaatcaactccttgcaggactgctcgatgcagacgagacagctgtcgtttgttgttcttggtaacctagtttcatctccacatctctccctcttacctcctcatgcatgaaagacgtggtactgactgatgcgtagttcaatgacaatgctcccgggcttttactgctcttcttccctcccctcctacaccgtatcaacggcctgcgaggttttccacaggggcgatataactgatttgccgagtcttcgggaatcaagcgtgacctggacaaccacaaccacgacgtacagtgccgaggagacgccagagttcacgggctggtcacaggttgcgccgttgttgctgttccacaagcctactgatgttgcgcggggtggggatgacgatgcaggggcaaatgatgtggttgatagcgctggcgagacgaatgcggctgccccggggtacggcagggagagcttctggggcgtcggggtcaaagttgcagccagtgcagtgggctcaatgcttgcgggggcggcgtttatattgctcagatagggctggaggttatgcggtacagctccagaggcatcgtctcctctatatcttctttttcatactctggtcccaggcaaatcacgaacccgaagat

SEQ ID NO: 7880 - DNA, 542 bp, Emericella nidulans
ctgctggcaagtccttctaaaccacaagatctgggcccttaccaacggcgatatacgtcttattatggaagctttgcggcgcaagagcgtaagggactggcagtggaagacgcccctccgtccagccgggatgaaactccacgaaaaggcgtcggctgtcgggctcaaaaaaggaggtgagtatcctcccttgcttatgagcgcctataagcaaaaccaaacgagatcttaagcggatgttgagattctgacaatttcagacccgttctatagcccccgcgtcttgtgtatgatccgccacgcccgccgaagaacacgcgcgaggctacttatcgacaggcaatccaataatacgtacctgagattggaccttctccccacggagatcctatatctgattgcaaaccgcctgtcgtcctccgatgttgtcgcaacccaggaggcaatggggttgtatttcggtgatgcgtattggcgctcgaggatcccagtaacttcttccatgaagtaaagggtttgagggacagacgctggactgggag

SEQ ID NO: 7881 - DNA, 736 bp, Emericella nidulans
cacaaaaattaaccgagagagagagagaagagaaaaattatgggtatctcgtaaacgtagcgaatacacttacaatacatacaagcgcgcgtgttggcgcctctctagactatacccatacccggcctacccaaaatgccggtaccaccagtccttcttccatgaccccccaaaccggtgattgacacaagcaagcggactagaaaagccccccgcaccactatgccgctgcccattcccccacgcattcaccggcagcacgcagattccgcccatcgactttcccacggccgcctcttgcgcatccacacagaggggctcgctgatcctgtggaagggggcccatgtgacacgtcttgagagctgtccggacgcttgggagaagaggtcgccgatcccttcgtctgctcggacggacgccgcgagcaacgggtgcgttgtcgggagagcgtccgagagagcgtccagaatggcatccgtgaagacgccggggccggtgacttcaagaatcgccttctcgtcgtaccgtggcccaacgaaagggaagctctgctggttgcgctggcgggtgtgtgagagaacgcggatgattacttcacggagcagcgggctgaatcgtcgcggggcgaagaaggtatactgaatcagcccgtaagttcgaatccagtgccaatcgcgcatcagttgcagcgatgcgtgcggctcgtcaatctcaatcccgacggccagagagata

SEQ ID NO: 7882 - DNA, 493 bp, Emericella nidulans
ttccccgtcatagcagaccctgatgcatcaaactcaatcatgaactgcaggcttagcactccctgccgatcaccgcgtatgcttactttgttcgctgtagccatggcacgggctgccttttggatatacgcgaacgaaagtcttgccttagacgcgatcccatggaggacggcgggctgatgaggaatgtctctgtgaccgtgggagcgagcttagttctcgttgcacgtggtcgggctccgtcgtttgtcataactttgcggtgtgtatcgtgcgtcgtaccctttcggccttcgtcttgttcaattgaaaattcaactgtcgattcgctaaatgggcctcctgcgccggagagggtaaagtatggttcctgtttgtcggacgcactgattttcagaatgctggggttcgtggcaccgagttctgtgattgcattgtgcagccaggcagagcgcatgatgatttcataacgataccatcgcgttggaaggga

SEQ ID NO: 7883 - DNA, 600 bp, Emericella nidulans
ttggccgctgcgagcttttcggccttgaggcgctcttcttcgtcggtcatagtgctagcaatgaaattagggagttcgtgaggggaaagagtgagtttgtgctgtacaggtaagtagggcgggaggacagctttccccgtgtctcgcacggtccacctggttatacatgagacgatcagcgatgtcccgcctgcaactacacgagatatacgtagactttattgcaaaaaattgttgatcggagcccttttagcgtttgaaatactggcaaagtagatagacatttgcaaaggtcgttacctaatcgtgactctgaacgcaagtcgcccaccttataatcccccacatgttctgcgccctcaagtccctacagtgaagacgaagctgcagaggatgatcagttactcagcccagcattatttgaactacatatctccccattgtttgcgtacgatgacctggcatttctcaacctgaccactgctgaaggaatcaatttgataaagaattacaggaagaagtgaagttaaccgaccaagtagacctatagaagcaagcgccattatggaaacattatccgaccaggacagtggcctgtcg

SEQ ID NO: 7884 - DNA, 1337 bp, Emericella nidulans
catgttctcgttctcgctcccttgctcccggttttcgcttccgtctctttggttacttcctatcatagtcaccatcgatagtggacgccattcaaccagaccctctcgtgccgtacctaccctaccctatgggcctctattctccgtcattaccgttgttgtctgtgaggtagctgttggctgagggttgttcttgggctcctgtcggaacttgttgccgggctctgcctgccataatcatggcttcgacaccatcaaagagctccaggagctcgaaggaggcttatagcgaagtggcaattgggccgtacacgagactggatcatattggaaaaggcagctttgccactgtataccgtggtgttcagacggtgagtgtcaatgttggtatccatctctttgcatgatgacttgcacttgcctccgacggagaaactggtcagtgttaacgtgtgatagatatcctagaaatcacgaacgtttgtcgctataaagtcggtaaacctgggaaagctcaacagaaagctcaaagacaacctagcgatggagattgatatcctcaaataccttctccacccgcacatcgtcgcactgctcgactgtcttgagacaaattcacacattcatttgataatggaatactgtgctttaggcgatttgtcacagttcatcaaacgaagggacagtctcaaagaccatagctatacccggcatatgatatcaaagtatccgaacgtctctggtggagccttaaacgaggtgatcgtccgtcatttcctgaagcagctggcaagcgccctaaggttccttcgtgataagaaccttattcaccgcgatatcaagcctcaaaatcttttgctctgcccggcgccaaaacccgcgccaacgcagtcagaagccgagccacagatagtcccgctcaaaggcagtgaaacgtcgtttacgccggcggtgggcttagaaacgctgccattgctcaagttagctgatttcggtttcgcacgatccctccctgccacgtctctcgcagagacattatgtggttctcctttatatatggcccctgagattctacggtacgagaagtatgatgccaaggcggacttatggtccgttggcactgtgctatacgaaatggtcgtgggaaaaccgccatttagggcaacaaatcatgttgaattgcttcgaaagatcgagactgcaagagaccgaatcaagtttccagaagagaatcctgcctcagatgatattaaggcactagtccgtggccttctaaaattcaatccggtggtgcgaatgacatttgcagatttctttgagaatgacattattacggg

SEQ ID NO: 7885 - DNA, 843 bp, Emericella nidulans
  unsure (1)..(843): unsure at all n locations
tttggatatcatcatcatgagtcagttactatggcatctaagtcgtttatttgaagacgtggccatcgacgttggggagctccttgccgtcgacaacaacaggggtgtcccaggcccagatgtcctcaacatacttgcgatcagcctcgttggtgtggtcgagcttgatgaactcgtagctctcgtagtcaggagcgacatcgaaggcgggaagagcctcttggccacggaccaagaagacacctcggttgacacaagcgtagttctctccgtagacaccctggcaaccaaagaggtacttgcgggaagcctcaagacgagcgtggaaaccacctacatattcatttagaaactgtacgaagacacgtccaaagcaggataatacttaccgatcaggttgttggccatgaaggtgagcttgagctcgttgtcatacttgtagttcactttccagagtgagtactcctcgggcttatagttctgccagaaccagggcatagcaacagagcgggtatcctcgttggagtatgtgcgcttccagtcatcaaggatgagagtgggcttgccaagagcctcaagggggtgcttaggcttangagcaggcttgtcctcctcagcagcaggagcggcggcagcaggagcagcctccttcttgggcttctcctccttcttgggaggagtggacttgatggcctcgtcaatgaaaacagggttctcaacaacggccttgaaagccggctgatcaatgatggtctggtaccaccgggtacggcggggtagtcaacgcggaccttttggaatgacggtagcaaaggcccggtgagaaaaaaacgggaaaagatc

SEQ ID NO: 7886 - DNA, 1145 bp, Emericella nidulans
cacggctcttatcgataagataaagcagtatcattcttccgttccgtgattgtgtcgcaaaaaaaagtcttccatggcgaataatccgttcgaaggcatagaaaaaggttttcctgtcattgtctgtaacatcggtctcatatatatcgtggctacgataggtcttaaacgattttttaccccaaatttggggcgatatcttctcacgttaacgcgcccttactccaccaagatggccatctcagaaaccgtccccgccatatcgaacggcgtagcgcaaatcgcacctgagaaggcggagccagtaactagaaaaaaactccacgggcgagcattctatgagagcataggatcaccgaaatatatcgttgcgcctatggttgaccggtccgaattcgtaggtgtagctccccttggtccctgcgcgctaaaagtctaactaatgtttactactcccaggcatggcgcatgctcacccgttcctttatgacacccgaagagtctaagtccgttctcgcatacagtcctatgtatcatgcgcgtctctttgaggaacatgctggctatcgcgcaaaggccttccacccgactcgcgcttggggcgacaccaaatgcaaaggcgacgactctccatacctcgacggaaacccagcgattgaccggccgctatttgtgcagttctgcgccaatgatcctgatgacttttttaacgccgcgcgccatgtggcaccttattgcgacgccgttgatttgaacctgggttgtccgcaaggcattgcaaggcgaggccactatggcgctttcctgcaggaggactgggacttaatctacaaattgatcaacaagcttcatatggaactcgaagcccctgttacggcgaagtttagaatccaagaatcgaaggagaagactttggagtatgccaagatgatactctccgctggcgcaagactaatcaccctccatggacggacaagagagcaaaagggtcataataccgggctggctgattggagctatattaggtatttacgagataacctgcccccggacactgttatctttgcgaatgggacaacctgaacacgacgatttggccgctgctcgaggaaccggcgcagatggtgtgatgagcgcgaagaaac

SEQ ID NO: 7887 - DNA, 1030 bp, Emericella nidulans
tcgatatcagtcagacaacaagactccaggccttgatttcgtttgcgtactcccaggagaagggagtctacgtgagtgtctactaccattcgaccagttcatatccattcccagggcgcactgaagaggtcaatggtcgcgggatggatgggactgcttgagaggctgcttgcctttcctttccctttctctcttccttctcttgcttctcttgcttgtgttccttcttttattatctattcctttacccctcatccccgcgccgagatatcagcttctacagtaatcgaaccataaatatgtgcacactgagatgactgagccctggctgaattttcagatgcatgattcttcctgactgggtggagtatagagtcaaccctaaggttgaagcaagcaggattatgcatcccaatcaccctatcgttctatccatccaatttcggctctaatatctacctccatgaacattcatatctctgatctctggagctgcgagggtggattcctcatcaaatgcgagccctttcaacaggggcgtctacagttcgtccaaggtaacatactagaaaaaaacctgaaacatgtcacgcgttcatagttcgagctgtagttgaaagcatgctctttccaatagtcgatagtctcgcacagtatccaaaagtgaggtgagtagcatcgatggtggttgatggccatggcatggtgtggttgagaacaaggcgttgattacaaatcatgacccagcaacagatcacatgctcctttgggcagtcgctgacaaattcccttcagctgccatctcgtttctgttccccacacgagctctgcccttcagctagaactctgccctcaacagcgcactgatatatcgcatcggcaaatggagacagagttctacaacagcgtgaattgggccctcacgactgatcccactgatgccttgttcccctgggacgtcggcgtggatgcggatatcctccgcagtcaacgcaggcagacgccggacctggaggcggagggtgggggg

SEQ ID NO: 7888 - DNA, 160 bp, Emericella nidulans
  unsure (1)..(160): unsure at all n locations
cagcaggtgcacgatcgcttgntatcgtaattatattgctggactacccttatagtactcgtaacgaattgtgagcacttcacatgctnctttaagagctcangcaattataaacgtgtgagatgactcgcttgcccgcanaaatgtcaacaacgcgata

SEQ ID NO: 7889 - DNA, 897 bp, Emericella nidulans
atagtaaattcgcacttcacagtatatgtattttaccactttagaagggcataagccgtcccgaggtagttctgagtggggggcgctgatagctagggaatctagtaggtgcccagcctatcatgcatgttgctattaacagagcttagagagccctctgctcacaattcgacttgaccctcgtgtgctaacagctccaactctagtaggattcgtgactcgcctccattaccgtacattcctacccagaactcgactgcagaaccctcagaactggagaatccagtttcaccatttccaatacacaacgctgggcctataatctgaccagcatatagtgagtcaaacagcatagtaagccagcgtccatgaggcataagttaggactccagcttggtggggtataagagcaatcggttcatagatactggctaagtaggtttctgtagggtctgaaatagcgtgcaggtttcatttcgagtcagcacgtgttttttgaattgctctatacatcggtatttagagcttgaaaatcgttgtttctattataagtgtccggcaagcatagaagcatagcagcacctggccatccaatcaatggtttccaacaagaagcttcacgtagcgctctaacctagtggtgttattgacaatgaggagcgcagaaaattgcagacactagtatcaacacctttcacatggacactcatgtcccaaaagatcactgggaatccctggttggaccagaagtgaaagtgggaaatggcgtgccagtcaagcgctaccatgttagaaagctcctgtcaacggctggaatatagggagactttttgccagaagtgtggaccgcggcgactctgctctcgcacaatattgcgaagaaagaagatgaagagt

SEQ ID NO: 7890 - DNA, 485 bp, Emericella nidulans
gacttgcgcagcaaccttgtcggaatctggctcgcagacttggccaagacaaacgcagccattggatacagctcgttacctttggtcggagctactgggttggctatgaacaaggatacaatgctccttttattgcgtgctagtcttcgtgccctccgcaccccaggcatcagcgaagaactcgccatgcaaacagtccgcaacaccatgttcctcggccgctgctgcgcccaaaatggccttgaactggacgataccgaagacaaaacagaaggcgactccgatgaaagtgacagtgacgatgacgaaggcgatgccgccaacgcgagacccagagcggccgcagccgaaagaaacatgctgtgcgcttcatcttcgagcaggcctcctccatcctccgtcgcgagttcgttacaaccaaggctccttctttggttccaagactgccgctataggtcttattgccgctctgtgccgtcaccttg

SEQ ID NO: 7891 - DNA, 136 bp, Emericella nidulans
  unsure (1)..(136): unsure at all n locations
acggagaggctttagtaagaaaatgaattagggtatcatggagaagatgtctggcgaggatccaaggtgacgaagntgngcaggagcggtgaaggtggcagntgcagtcgtactccgagtgtggattccagaagcg

SEQ ID NO: 7892 - DNA, 333 bp, Emericella nidulans
  unsure (1)..(333): unsure at all n locations
ccataaccttggtgtcctgtgaagcgtcgcgctggagcgcgcgcagtcngactcgagtgacagcatnttctatgttngatgtgganggagggcgacaaggagggatggcgacaggtgcagcgcgatcggcangttagacctggtacgctaccgnngtcagccctcagtgcagttntncatcagtcgcggaactgagccaatccttgacggggctctgtcattgcgatagcttgaaacntaacccnacnctggtcagnttggtttcagntgggantcgctgctggacgtangtgtactctgngggccgcgtaggattgttaaaatagggattga

SEQ ID NO: 7893 - DNA, 582 bp, Emericella nidulans
ccgcaacgggatcgcggtgcatttctttaccagatgattggtgaggctgtcgatgcggcctttgggaaacttctcgccacatgccttgcacgtatgctgatagcgattactggcatcttcaagcttttgacctcgaataaagaactcgaggatgagttggttgggtttgcgacccatgacgagatcgcgtggcagaatatatgaaggcggcgcgaaagaattcgagaccactcacggcctggaacttatgaagtagaactcggacagtatttgtatagacgtagatttatcgctccgcagactcaacccagtaaatcgaatatcgtaaagcagtgacgcacacaagaacagatggtggatggcaaaaaaagtgcgggcggtgcggtattggagaggcaaaggccgccaccaaattggcgaacgttaaaaggcagggaatcagcaatgcagtagacaatgatagctaggactgatggcaataatagccaacagacgatacacagcttgtgaagtcgaagggggatgaagattgacgcagcgttggctggcaggcagaatcggaagtggtgggcagaatgtgac

SEQ ID NO: 7894 - DNA, 1119 bp, Emericella nidulans
tctcaagcggctgatacaagtctgctatggcatatcagccttgctcaagtgtcttcatcagaaaccgtggccaggataccgatcctctatactgtggaacccaacccgccccgtgatataaatctcttagtgggtacagccgcacatcttcttcgacgtgccttggttgttagaagtattctgtcgaaaaacaaattgtcctgctacatcgagtcctgcctcgtgatgtgttcccaagttgattcccacaagagcaagggctgctgagcttctcaaggggaagaatggtcgagtaagaggtaatccaaatagacgtgcattcttgctcattcctgagaaaggtatcaaaatagataatataaaaagaagccagtgcaaggagataaggcttggtactgcaagggtacctgaaaatcaaccatccgtaacagcatatagtgaggtgcagtgaaaggggatgcccggtgcgtgagaagcaatatatatcatcaagggataggagtcaattcttgtgattgcagtactatattatctctgtgaagacctcaaaaaacgatccaaaggatatagttgactcgtggagaacgacagctcactactcgcccacaggcattgtccgagccgcattctctacataagggggaggcggatctgctgccttcatgaaagcctcctccctgattcgtcggagctccttttgagcattctccaaatgtcgtgctgcatcctgcaactgagaccgcaaagtgctctcgcgggattttgcctgccgcaactggccggtgaggaatccctccgcgttctgcacttcgtcgtacgagtcttgaatcattttgagaaagccaaggttaaacaaatagttgtcgcagagaattccactgatcatatcgatctggacgatgcccattcgcggcagagggcgcacctctgggtcaaggcggatggcctgcgacatcagcagttgtgtctggctgaccttctgctgggcgagagagaggtggttctgctgctggaagtcggcaaggagccctccaaagccgaacatgtccctctcacaggcccgcgagcctggaagatatgagcacggcctcttaatagtgagctgggctctggcaagca

SEQ ID NO: 7895 - DNA, 1155 bp, Emericella nidulans
acatgtcataaggttggccgagctcgccttatatgttgacgatgagctaatgattattacaggccagcatcaatccgggcttgggcgggaatctagcaattgaagggatcgcgcacttcaccagcatcctgctcctctactcaaagcgcacccgatgccgtctttcgaacagctggccggtgcattcgaggagtatcacgcacaccagcgactgcgggccgatgcggtcgtaaacatttctggacgaatcacacaatacaaagcccaggaaacatggctatacaaacttgcagctcaatacgttgttcccttggtcagtgacagtttcaagctagtgcctacgcaaagttctccaacgattgtttccggcttgagtatcttcccttgcctgctctgatgcaggcctcgcccagcagagaatcgaggagtcagagaaccctgagaagatggagccttttcttccttcctgcagtggaggttctggcggctgcggtaggtgttgcgtacagaatgcggtcgaaatagtaggaagcgagctatatgcctatccatggaccctctatcatgcactatttagtcggaggattcgatgcaagccttccagcatcccacttttgtagactttcgaatgttattgccatcacgatgaatagtcacgtcggatctgagatccagctgcaaaaaattagaccacccacgtccagggcctatcaaatcttggtttcacgacacagaatccgtcctcgaacgctcagagaatccactctatcctgaccgtccaatgtccagtcgtttgcatcacagggtgttcggaaggaataccggataagatcgggtcgataatgaattttagcttttaatacatcctcaagaattgtattatagtcacttgacccttcggccgttgtggtctgtgagcaggtggcccacctcgagacaagcgataattactgaaactttacaagttctggccctataaggtagaggtaattcctagtgggcttcgcagtcgcaggaaaatgcccagggcaactggaagtagaaataagcaggccgtatgcgtacagagatattagtatgccgacctcagaatagagcttcttggtagatattctgctatttatctgaagaaaatctggagaagctcacgagcag

SEQ ID NO: 7896 - DNA, 283 bp, Emericella nidulans
  unsure (1)..(283): unsure at all n locations
tagttgtgttcggagtnttatctgntgacggcnaggcanttanggcatngccgtntcgcggattgcgaaacgcttgctgcaagttgcctttctggtcagttgcactgggagacgtcctggtnatggntcttacaagttagtaaacgatcgnaaagntggcactaggttntntttcggcntacttaangcangnactgccgatagtgcaaaggngcggcagagagacagggagntgataagctgcactntgagggttggggagcttgttagtanaagaaatgga

SEQ ID NO: 7897 - DNA, 1510 bp, Emericella nidulans
  unsure (1)..(1510): unsure at all n locations
gctcacacataagcgcaccctgccgcgtttggtttcgttgttccacttttgtagaacagggatagctgtgaggtagtggattgtttcgagtttgcttcagcacgaaacagtttaggcggtgaagagcgagtctcaaccatcggaagctaaacccttttggcgaatcaccagccccgcatcagccacaaaacatgagaatcgcgtccagagcaacgatctactcagccctgagagcatcaacactagactagatcagtcagtctctacgtcggatccagatttgttgtctcactcaccactgcgtagcagacacaaaatgtcaacgccaagtagcaaaacgagagccccgcgcactgtcttcgaagagcagcgcgaggagctggtcagggagattgcgaatgtgagtggcacgaacatcggatgctctctccacggctagtcggctaatcgcacctaaatgtctccagggcatggaagaagtcctagcaaacatcaaccggctgagtcggaacctggacagcgtcattgcggtacgttaccccgtcaattcaacataaaacttgagcaacaatacgtggaaccatcagtcaaggcgcgggctcattatgaaccaggtcggtaacgaattcgggtctgtcgaggcgctctggtcacagtttgagactttcatgggccgatcacaggaggaagtcgaagggaatcttcgacagaaggaagagcaggatgagggtcagagcgaattgcatcagtaatgacggcgacattccgaattgatacgaataatgacttttctattctaattctatacattgctgagtcctcacgttgatgtttaactttatcctcatatccatttctagaaacagtgggtaacagaacagtttcgtcatttgtgttaagtacatgggcagccgcaatgcgccaaaacacctatcccatgcatgataaagtgcggccttcagccgagtcgagttcatggccacatcactaataaaacacataaatcaatcgtcgccaagggtaacagtcagtcgagggcgaaagggaggggtacattgtttgggtcatgaggaaacataaaaaactctgaaggttcgcaacagatgaagaaaagaaataaatggtgtgagaataccaacacctcgacagccatattggcgtgtccaggctggggacaaacaaacgcggataaagtaacaggtcggacatcgctccgatacttttatccaaattcagggacaggaagaaagcaacgggaaaacaacgagaaaacaaggcgagcttgctcaagtgagacgtcaaagcaaccaggctttgtattcgttttaacataatcgaagctgaatttgctgcgccgcgagagagaatctgaagacaggaggctcacagaatcttgcagcttgccttttgatcttcttaccaccgatgggctagncaccaggttttccggaagatgacggtaggccagtgttccaatttttgctcctcgagggacacgacagtgtccact

SEQ ID NO: 7898 - DNA, 232 bp, Emericella nidulans
  unsure (1)..(232): unsure at all n locations
taaattagtgcattatgaatatttctgggngtagtcattagtataatgagcggatacatctactgaggattatgttatgagtgcgcgggtcgcttggcgacgcatagnatatgctgcgggagcgaatcgcacagantgtcccgagcagcttntgtacgctgtgtacacacaacggccagacatacgtgtatcaggtattganttcccacgcccgataaggaaagcgggatga

SEQ ID NO: 7899 - DNA, 677 bp, Emericella nidulans
atcgagtgttattatttatgctcggccatgtctcacggacatgagccagatttagagtacatcaagtggtatgcaaaacagtcatttcacgctttcggcaatagatgcaaaacaatatcccaagaatattatagaaaagggatgagttcctgtcatcatccaggctccttttctagggttgaagaggaattgcgaacgttgagatcatgattttgtcaaacagtataatacaaggactcggacattttcgtccgagtggaacgaaacgaatgtgaagaccccgagtcagttaatttcatggtctcctctattcgttgatctttgcaagaatcctggttgccacgattagacacgattcgccgataacccgagaaaatgaaaacttactcagagtcccggaagaggtggtactcttcctcaccaatcttgagggggctacctccgaactgcagtaagagaaccgtaagcatttattccgcccaatgaaaggaatatatagcatattcccaagaaatcaaaactcattcgattcgatgtgagaagaatcggaacgtacctgaaggaccaagacacggtcaccagcagcaacacccatggggatgcgctggccattgcggtcaacagcaccaggaccgacagcgaggaccttggcctcgttctgctccttgacgctgctc

SEQ ID NO: 7900 - DNA, 1235 bp, Emericella nidulans
  unsure (1)..(1235): unsure at all n locations
ggcgaataaccctactaaagggatctgggcgcacggcaactcttcgtgtctctcctattagacgccacctgcacagcaaagcagcaagtctacggtgaaggtgaaccattccctaggcttgttgtgttcagccgctcagtttctgaccttttcctccagaaggtttggctcatccgtgctcaagaatcaaagaccgaaaaaaagacgccngtatgtctcagatgtttgggttagatctgcgtagagcggcctgtaaccaaagacagacagccagaaattgcgagccagctattactggggttcatggggcgggccttgcggcagcgctgggtaatcaaggcctgctttggcagccagtgtcattgtaagcaattgctgtcgtgatttccttggatagaatgccctgtcctgctaggtttccagcatgctttagagaacgtcctatgcaattatagcagatctattccgtccgcttttcatgctcatctttcttcgttcagggtccggtccatcggtcagcatcagatctctggcttgggagcttgctcagcaatcgaccttttaccaatattcgatattccaatatgttgtccagtggcggccagcagattatctcatctttttgtccgccgtgtgttcttgaccactttcggctgccacgcaaagccctgtagatatgttgatcgagcatacttagagctaacattgtcgaaaattttccaacgaagttggagatcagagtgtaaacaatcatcttgcggctttatgattgcactttcactggccattgttgtgggggacgcactccatctcgtttcgctggccatttctcctaggccctaaagcgtagtgctggagccatatcgtagcgtaggctagctggggaaatgcagaggagtttaatgaagttcggaagatgatgcggacgaaggagtatggtcggtgtcaagatgggtgccttggcggggtgcctgatgtactgtagatacctagagctgaacctcccaggattatcaagtatatacccacagcctcaactcatagcctggctagattttttgttaagattctttgctctttctggtggattattgcttttttatatccatgatggtgtcctggtggattggcgatgggtgagactactttgttgactttagatcgaaactatttataaactatatatatttctgcagggtggtccttcatctcaggcggcaccatacaaacatacc

SEQ ID NO: 7901 - DNA, 644 bp, Emericella nidulans
agagatccggttgatcgtctgccgcactcgggggtctctcggtcgcatcatggtgaaatggcggttagtaggagctctgaactccagacactgggaaagagaaagtatgttccttcaacctcatccaggaggccccatatgcagaatgagagcgccaattgagccaggcgttgaagttcaagagctcgatattatttcagtctgtagatgaggagacaactagggaaggaaacctgagacgagcctgaggatgaagttcccgataaggcagcgatgccaccgtcttagtcagcccctacaagatacacagcagcatgcattggaatactttcatccactacatcttagacctgtttcataggtcccagacaatcagcggggatggtttattacattcgtttcctaaagacgccccgtctgcagaagcagaaggccagctctgtctccgcctccgcactggtctgcatcacaacggatttgggcgatgaattcctctcacaagatgtggatttacttgtgacacttcatcctgcccgccaggagacgaagatcttatgccaggaacgactgcagtggcatgggggcaggcgggaaatccccattgcgctaggtccggttcctgccaacatctctcaacagtccat

SEQ ID NO: 7902 - DNA, 153 bp, Emericella nidulans
  unsure (1)..(153): unsure at all n locations
ggcggcgcgagcgtgaacatgtctgtgattntgcggcctccattagggctcacggacgaacccgagaaagcaatcgcggaggacattgcgcagtcggacgacaaacgggaggcgcccgaaggtgggaagactttttgcgaggagagctgcgga

SEQ ID NO: 7903 - DNA, 189 bp, Emericella nidulans
  unsure (1)..(189): unsure at all n locations
ggagattagcgtancgnccggangcgttatanangcgcgtgttttaggtngnaccatttgnatccgnaagacggatcgttagtgtggacgtcttacgtgngtgtangtgtttccagnttcgatcccatccgactctcagtagctgggtggtgttacattnngctanggggttctagggagtgggtttga

SEQ ID NO: 7904 - DNA, 830 bp, Emericella nidulans
gtgagacttattgaggccgttccactctaaccggcaatatcttattggtggctcggctcctatatcaggtacaggtacaggttcctggttggagtctcagcctacgcgctagcggccgctaccgccgctagcatggttcaataggggatacgctgggtcatggaattaggcgtgcagagattccttggttgatgagacgctgagctgtaagctgactaccgaccctagcggaacatggacggtgactggtttaagaagagacttgcgtttcctatagagtggatctatgatgaagggctgaagggatagctatagctggcgttgaccgtgtgtcccatggcagaagcccccactcgtgtggaagcgaagctgagctttgagcgtcgactataaggctgcatctataaaagccaaagacaacttcatcttactgatcctccttaccagcgacgacagctggaatatgacacgactactagagagcgttttaaacttgcagatgcaaaacctagaatggggaacaacggatcgcgcacatgcagatttccgcagtaagcttttcccagaactccctcatagaggcctctggtaacccagctaggtgacgttgtcacgaccccctcgacgggcatgctcgccgcaatggccagtgccagcctgggagacgacgtcttcgaggaagatgagacgacaaacgagttccagtcgcttatggccgcccaatgtggccttgaagcaggggcgtttgtagtttcgggaacaatggcaaatcagttggccattaggacgctattgacacagccgccatgccgtgttctagttgattccgt

SEQ ID NO: 7905 - DNA, 540 bp, Emericella nidulans
atacgagccgtagggccttcttttaatgtctctaaagatggaaaatatgttccaagaaaggaattatatgccattttgaatattgcgaatatatatccgatttggcatacaaccaaacgatcataaagaaaaaataatatcaaattgacaaccagcagcaaccgcatgaggctatcttggaaacaatagaatatcaagcagaaaaaaaacaaacttcagacccgaaagaaaagaacaagagaaaaggaaaggaagagagaagaaaagaaaagggaaagtagcgaatccaaagcaacatgtgcgcatctcagcctgaccacatattagaccgtcaggtatttgagaatccagccaggagagagactttaaggccaccctagcttttttttttatccatttattatttagttttcctgacttctgtgaggtttgctcagtgtggtggaaggggtcgaggctcacctcagcgatcgagaggttggtccgaatccctataaacgcaaactgtcaactcgacactccagtacggaacccagaatg

SEQ ID NO: 7906 - DNA, 420 bp, Emericella nidulans
acctgcataggctgtgctctgctaaatatcaaggttgatagggcttggatgtagaagacgttacatctcatcttgttcaagccgccacctggtctcaggattaaatacactaagcctaggcattctacctcgcccggccagagcccaacttcgaccagcatgcaggaggacaactcgctgccggcgtgcgagcccagacggcttgcttcaactacgtctgcactcgtccaaccctcttcctcaaaccagggttcgtccggcaagcagccggagagtgctaagctagctactggggacaatcgtaagcttgactctgcctcaaacgagcttttcaaaagtgccgaatggtgagttgagaatgaagaatccatctggtgagctcaacagggcgtaacacccgcggcgagagctttacttggg

SEQ ID NO: 7907 - DNA, 743 bp, Emericella nidulans
cgaccttatacttttgtactaccgtctatttataacactaccctctacaacgcctgcctcctttacttcaaatactgaaatcaattcttcctcccaggatccagctccgcaaccagcctcatcccattctcttccgtcttaccctcctcaccaaagaaccccttaacagccacaccaatcacacctttgaataaaccgcccacaacaacatccctgagctcctcaccagtctgtccaaaatccgggaaagcattgacttccaacaaccacacattgcccgtgtcatcgaccaaaaagtccactccaaagacctcaaacgcattcggcatcgtctggaaatggatcatcatgccgcgcgccgcagcggtgaaaagctcgcctgtgacggcgcagatttgctcgtaaatatcttctttccaggtggcggttagatgtgtatttggaggcgggatggaggggagacaccagaagcggcggacggtttcagactctggcagggatttgtcttgaaagcaagtgttggttaggtggcgggttaggtcggcgattgagtcttcggtctcattgttctgcgaggtaggggagacgtaaggcttcgatgcgaagagggcgagcatctccttaaagacgtacaccttcagagagcctgtcgcgaggacgtaggttcttatgtggaatttgcggttgttgagagaggggagaaggagaggcgggtcgatgtagggttgggcgatgaaatggcg

SEQ ID NO: 7908 - DNA, 177 bp, Emericella nidulans
aaactctacatgtcaacggagccctcgcacgaccagaactcgacacaccagcaaggacaaaggttggcgcacttaacacccgagctttccttacatatgagtgtgtccgcaccgcagatactgagggatacaataacagtcactgtactcgattgacctcagctgcaatccttcata

SEQ ID NO: 7909 - DNA, 863 bp, Emericella nidulans
acagttgttcatctgaccctccggccagctgccccgcaatacgctgcgcccgctccatatccacactccagacgctcgctgccagagcgctgtcggttccgttggcacgcgcaatcacgtcgtcctcgtcggaccacttgagcaccggcagaataggcgcaaacggttcctcctgcacgacgcgcgagctctcgggcgggttgtcgatgatcgttggcgcgatgtagtagccgtcagacgcggtgattgtgccgcccaagacagcgcagagcttctcggactcgatgctggagaagaggtccttggccttcttatactgcatctcgttctgcacagggccgatgaagacgccttcctgcgtgccggcgccgaccttgaagttggagacaaacgcgacaaatttttgcaggaacttgtcgtagatcttttcgtgcacgtagagacgtttgatcatcatgcagatctgcgaggaggtcaggaaggagaggatagcgagctgccgccattgttagctagagactactataggggtggagggatagagttcgggctgagacaacgcggtaagggaagggtcgggcttggctggtcaagcatcttctcaagcaggttgattcgggcaggagacgatgctataagggaaacggtcggggggatacacacgttaggaacgaccttgtcgatatcgacgtcgtcgcagacaatcgcggcgtcgttgccgcccagctcgagagtgacgcgcttgatcgtcttcgacgcgctggccatgaccttcttaccagtagccgtcgagcctgtgaacgagatcttgtcgatcccagggtgctcggtgatcatgggcccaagatcgtctcccccactga

SEQ ID NO: 7910 - DNA, 685 bp, Emericella nidulans
atgatttcgagcagccgcgccaggccgatctaatggaccttataatgagggtaccatgcactctaggcggaataaagatcatagttgttacactgctggaaaaccaaaggcgctaacatagacagactgcaaacgatcggcaatcagagagtggcctggccccgctgactagtgcgtatactcacacacatgaattgggaggctattaccgcctacttagcaggcacaaccacccggtcagacaggtgcatgaatgtataccccaacaggcaggaagaggtggctatgtacgaggcatcatcttctgattgattactgaatagttgggctcggtcggtacagtcgagacccgcgagtattattatcccagccaagggcagacggactgtaacaacataatggggttacaacgcaagaacatattggcaaaggtagacccaaaagggctagcccaataagggcgtttgttgaaccttacatagctcccccccaggcgagataaaatagccgtcaccaacaagggtgccaccccaggggacttttttacaaaagttttgtgggaaaatagaccactttattcctatttgcagaagacacaaaccttttttctagaaactgccccctacaaagccctgggcgctaaaaagaatattttgccaacgttgaaagaaaaaaataaaaaggg

SEQ ID NO: 7911 - DNA, 599 bp, Emericella nidulans
ggggtgtgcccctggtttccgaacggatgtatattatcagtccagagcaataaagttagtttacttgcaatggagaaagaatagaaatttctaatagctaataaactttacgtgatgtttttgtaggactcgaagcacaagtgtatacaattattccatcggcaaaatcattagtaatctcccagagctctggtgatgtagtgagtgcaatacaactccattccctcttatcttagttcttgactctcctttccaccctacttgtaggcttacattcatatctgacagcattgtctcttatatctacgtgctaatcttctccaggttactacaagatacaatcagctccggcacgaaaagaactggatgcccctgaggatggttcttcgagacaagcagaatcttgcactctcttgtcagcagaggctctcactgttgtccttatttgcacgggcttttgacatataactcggaagcgcttactcgaacccaaagccaccggctgtgaaattgcaggcgtcgatgtggcgctccggccccggaaggatcccatttaaccgtcgtatgatggcactcactatggactatgagaagatgtt

SEQ ID NO: 7912 - DNA, 1012 bp, Emericella nidulans
aatcgcgatcttgtttttgaggctagcgagtagcgacagttcgtcttcacgattgatggccgctgtgtatatgcttagtcataattcatatacaaggcacaatatttatgcacagcttatgcttacttctaccgagtatgaggcgttataataagaggaatgtcaatattggatacgcaacatcagaacttcactggtagctgaaatttcagtttatgctctatcactattatgctaatttaccacatgctctcagccttccgcggcgctgacagttatgaagtatatatctgttcttctaaatggcaagagttaaatataccgtgaggcgtcataataaagatcgagtagacaacctgccgaccatgattgagttggtgactgcggaaagaagtaatgtcagcccattattctcccaacttgaacgagcatctccaggaaaggtcacctaccgagtctgcacaatgattgccgttcctatttgttagctcagtaaggcccttccaagggctttccctcagagctttcttgcaacccgctagccttcttgttacctgctggaatgcttccgtccgctcatccgcagtcttgcgtcgcgcaagatcaaagtacaagagtgcgcggagaaagtatcctcgtagccaaacccactccggaccttgatggtagtttctgccttttgatgttgcaaaatcggtggagtcttccgcgttattgtagtctgggcgatagttcagatcagaaggatcgagcgtagccattcctaggggaccagcaagcacagaatcggtaatagcgagcgcacccagcgctttggaaggatcaaacagttctggtgacacaaccatggcgattgggaaattagaccgaagctgggagtcctcgtaaggtttacccgatctgtaaaggtctttgtagatgccccaaccagttacaattccggagtcgatgtcctattgatcgtcatcattcggatccagcggtatataatagccgggctcgaaaattagtt

SEQ ID NO: 7913 - DNA, 1632 bp, Emericella nidulans
  unsure (1)..(1632): unsure at all n locations
cctcattggtgggctgaacagacaccgcagcaaggcgggggagattggtgagtggaactttgactggagtctgttctcagacagttactgccgcccttcacattgcactgttttgggcaaattcgacgatccacatactaacgccctcagggatggtcacgatgcgcctcattttcagctctagatcgctggctgcgtatctcgtactccgggaagcctcgcgtgctccaagtcgacaaaatcatagacaaacactttcgtcaagagtcttcaaactcacgctttactctgtggctacatggttatactgtacataggcggctcctaaaatcttcgatatattatacaaagtgcttctccaattgcaccaataagtcatgaacatcatcaaccggcaacggaatcgcccgtggttttcgcaacgcttcctttcccacgcgttgggtcagcactgcctgcagcttctcggcattatggtcaggtttgctattcatctggcccgtaatatcgacgctgatccggccctccgcaagatccttgggaccgagaatgaagatgaggttgtatttcatctgcttcgcccgctggatctttttgcttagtgtctgactgctcgtatcgacatcgatcaaaaatgtagagtccgtcgctgacagaggctgaggtattccatcggccgcattctgatcaagagccttaaatcctgagatttgcgctgctgcttcatgcgcctgcttcacaacagcgtcgtcctggttcacggttaatatgatgccctgccgcggtgatagccaaaacggccagcggcccgagtattgctcaatgagcagggcatggaagcgctcaagagatccaaaattcgcccggtggatcaagacgggncgttgcccttccaggcgtcgctggattgtagtcttcctctccctctgcaacttggtactccaattcaaagcgccgtggcaggttcatgtccagttgaatagtagacaactgatggtacttgccagcctggtcctgaagctgtatatcgatcttgggcccgtaaaaagcgccgtcaccttcgtttatcgcccagtttttcccggtctggtctagagcttcgcgcagatgagcttccgcactgtcccacagctggagatcgccgatgaaatccttttcgggcctcgtagacagcacgagtcgatagggtcctaatccaaatgtggtcatcaccaggtcgacaaacccaagcgcggatttgatctctcctttaatctgctgcggccgacagaaaatatggccgtcgtcttggtggaatcgtcggacgcgtgtcaggccgctcagcgaaccagaaatctcgtttcggtgaagaggactgaagtcggcgtagcgtataggaagctcgcggtaggagtggttctgtgacttgaacagcaaacagtgtcccgggcagttcatcggtttgagtccgtaggactcattctccccagcctcaccctctgtatctcccattgctcctcgcccacgcacctcatacatgtcatctttgtagttttgccagtgaccagagacctcccagaaaaaatgtttatatattgtcggcgtcaggacttcacggaacccgtactgaagagtctgtgtcgagaaaggaaa

SEQ ID NO: 7914 - DNA, 1114 bp, Emericella nidulans
  unsure (1)..(1114): unsure at all n locations
ggtgcaaggcgcggcagttctgacgtatagtcagcacaatcacttcgtgttggaattttttatagaacttgagagctgcatacacatggactatctttttcggcgcagtttacctgtcgttgccgacaagagcctttccagttgctttaatccgcttctcgccgttctcggtgagtggcaggtctgtgattcccgtgtgccgcccgttcagcgaccattcagtttcgccgtggcggattatgaagcagcggggggccattttgattatgacggaatcagagcgtaaagggagaatgtagaggaaatcgacgtggagggagggttagcaagatgcggaaggagaggggaaatgtatgggtggttcctagtgcagatataatgatggttgcgtcatttatggggacagggtctggtttcttatcagcctgttcctgtccaccgatcatgttatgactttatgaaggatttgtcatcctgttatacagctgtggggattgcagatctggattactgatgaaggacccaagagtccatcacctactataactttgaacaatggcatgattcgacaaccaatggctagagcgcttgccctgtcacgatctgttcaagtctgtaaatcgagattgttcaccgttgcttcaaaatcagcaattactaagcgctgtctcagcaaccccatccaatatcgatctgtatcattatttgcaaccacctacgcaccctccaaagacttgaactccagactccactgtacgatgggacggagccgatctaaaaagtccttgcgagatgtctcccgacttacgggcgctccgctatcccagacaaccattccgtctatagtgctggcaactccagaagaaaaatgggtcacttcgccagacctgacagaatataacttgccatttacagcagaacacatcggtgacacagcgctctacctccttctcaacccgggcttgacctctagtgtactatttcgcgagcaccctctggcgcagaagagacccccctcctacccttgctgctcttgaggcgcaaaaacagcaagagacggaggaggcgtctacggctcggccnacccccaggctcagaatgaaatttccagcgg

SEQ ID NO: 7915 - DNA, 1471 bp, Emericella nidulans
  unsure (1)..(1471): unsure at all n locations
tatatatatatctacagagtcgacggcctgttcaacgttggcactatagacaagcacatttagcgctggccaactcaccagatatgctgcttctgactatgttggatagcccaatccacagcagcccatgcagcacggacatcatccgcagaccgggggacattgtggccaccggaatgagtcaaggatcgtatcagacgctgatcacataggccctgtacaaggacagagagacccaccatcaagctattgtccttccggccggtaatatgcacagtcggaataggaatccggtcccccaacaaggctgggtggaagactcgcggctgagagggatcatcccgcttagagaactccgcgattggggtatagnggggagataaaccccccggttttggcagagtagaaagttggcgcagttgtctcgcatagggctcgggtcagcggatgaagcgacagagatccgtagcaggatacccatccaacagacggatctcgtggtccgtaagattggcaagtatgttgctaccaaaggtgtcattgggagcaaatgcgatcaccgtagagaaaaacacggcccaccgaaagggaggggggtgtccgtcgatctggcgttggagcagatacgaaagggcgaccgagccgccctggctaaagccgattatcccgtcgaacgggccggctgcttgtatcatctcgtcgataaggtcgcaggactcctggatgtcagctggcgcgaagctctcgttgtagcataggaatggccccttcacgaagggccccagtcctgcaatctcgttacttggatgtgaccttgctctgacaagggtacggaccttgggccttttggcattctatctctccttccaggaagacgaactcataactgggatcagcagctgccatgaaggggcccagctgatgctggaggatcgaggcagatgtcccgtatccgtgtaagcaaagtatcttgggcatgatggtagagtcgacacttagaaaaagaatgttaaaggaggacagatttgttgaactttgccttgaaaactatcaagttcttatatagaccgcctagcctagtctagaaaacgaacacattggccttctcctcgccattcgcatcaatagcctcaaaatgtccccgaattgcccgcaccatcccgtcaggtccgcaaaccaagaacccagtgcttgaggatggttccggcagtaagtcctgaatcatctctctcgttatccagcccctaaggcccttccagtccgactttggttgaccagaacgtggtgcactttaattcttctgggtgactgaaggaccagttgctccagctactcccgcaaaggatgtcctcccatgtttcatttccatagaggagggtaatttctccaggccatgcccgcattacctggtatatcggggcaattccggtaccccctgcaatgcatgcgatatgctttcacgtcgggctcg

SEQ ID NO: 7916 - DNA, 123 bp, Emericella nidulans
tgtccatcaccagctcatactgtgtttaccatgaattgggaaaatacggtagatgctgggtactcgacgtaccatcatatcttgaaggcacccaacgcatggcaccttatcataccccgtaag

SEQ ID NO: 7917 - DNA, 110 bp, Emericella nidulans
tgcgctcatgcaaccagcatccgcgtttgagaggcttcgctggatcgtagatcagcgacatcgcggagagagcgatcgcagactgacactaccttctccgtgttctacag

SEQ ID NO: 7918 - DNA, 1380 bp, Emericella nidulans
ctactccccaatgccgttgcgatttcaacagcccaatctgccggtaacggcatacattatcgacatggccaacagagtcgccaggcgcagctggtgagtcgcgcttccttcccaaagctgcgcaggcagagctccaacacgtccattgaagttgggaagcaacctgagttctggctcgagtccatcgcataccagggtatttcgcctctaggaccctcaggatatacagttttccgcaatgtcaaagattttggagcgaagggtatgttgggcgtctagcgtgactttggtcaccctaaccatctgcccgttttgcactgacgattccactaagcgacggagttaccgatgacactgacgcaatcaacgaagctataagcagtggcgggcgctgcggcgagggctgcttttcgagcaccacgacgcccgatcgtctacttccctgcgggcacgtacgtgatctcggcttctatcttcgactactacaataccattatcactggagatcccaccccgctgcctgctctaaaagcctcagctaggttcgagggtggatatttgattgaagggactccgtatttcggtccgacgctgaactggcccgcgactactgtattctggagacagttgcgcaacctcattctagacactacggacgtcgccgcggaaacgcagatcagtggtatccactagccgactgcgcaagcgactagcctacagaatcttgttttcgaactgaatgtcgaggaggggacggagcatcaggggatgttctgtgagagtggttagtccttgcctcccggcggcagctaagaaactagcaaagagatactgactgcaaacctcaaaggttctgctggattcgccggtaatatcgtcttcaatggaggcaaaattgcggcagccctgggaaaccagcagttcaccatgcgcaacctgaccttcaaccacgctaaaactgccatcaaccactcttggaactggggctggacataccaggacctcagcaccaacgactgcgaggttgggattgatatttcgactggcggcagcgacaacaagcgttggctccatcacggtttttgacagcttcttcggaacacacccgggcgcagtcgagtcgccatgccgacatttagcagcatatactgaaacggattgtgaaacgtgcattgcgaagggcccgtggctggtctagggtgttaggacttggttggggctgggccgggacatcctcctgtggccaccattgcgtgcaaagggttgggctgagatgtgacgggagtttaactcagccagacggtttttgttgtttcacgcggggggcccgtggaccgccactcgccaaagttttgttcccttcagcttaaatggtaaagg

SEQ ID NO: 7919 - DNA, 128 bp, Emericella nidulans
agacgacatcatgatttccgcaagcaaacgtacaacctcgctgctaatgtagagttcattgcggcacatctggatgcagcccagcagcttaaggctcatgcatactgtctccattcatagtatccagc

SEQ ID NO: 7920 - DNA, 816 bp, Emericella nidulans
aacccattatggggctcgcaaggcagggccatctgtgccgaacactcgcacgaccgatatgcttaaattcattcagcgcaagccatatacggtctttgcccgcaaagccaagatgtttatcctggcaatggctctctgccatacgtgtctcccggaggaggacgagtctggaaatacaaccttccaagcggcctcgccagacgagctcgctttggtcacggctgctcgagagctagggtatatcgtccatgaccggcaaccgaatacactgactgtcagaacatttcctaacggacaagatcaggagcctgttgatgaagtctacgagattttagatgtgatcgaattttctagcgctcgaaagcgcatgtcagtcgtggtgcggatgcctgaccgacggatttgcctgttctgcaaaggcgccgacagtgtcttaatgaaactcttgaagcgagccgcccttgctcaggaaaaagtcaatgaaattgagcgccgcgcaagcaagcgaaaggctgcagaggctagtgaggtcatcaggcgaaacagcgagcaccacaaccgtaaagatagtggcgtacgcaacagtttcagtcgtccaagtatgtcgcatgtcgctcagcgtttcggcaggcgcgcatcccattgagagacagtatgatgtctgcttcgtgatcggagacgatggcgactctgacaggatgcgacgtcagtatacagcccaggccttcggcagtagacgcaattacacgtcttgattggagttcgtcagacattaaagattgtcaggagcctgtgtgacaacgtgttcaggcgtca

SEQ ID NO: 7921 - DNA, 1527 bp, Emericella nidulans
tagtattttccgttctgctgcgctcacatccttcgcgactataacatcgtgtaaaaggatatgggccacggtatcttcggccaggccgcggacagggatatatttcgttcgatttttgcgggttttggtccaaaaataagcctatgccggtcatctggttagggtacaacagcaattttttcaggcgctgagaatgcctacacagtcaaccagcgcatctgttgcgacatcgtcatagctggccagtttcgcaagcgtcagacgttcgcgccggtccacggacggactggaccgggcctttgaggacggcatggtaagatagcttatcacagaagtcccatgtaatcaagcccagtgttttgttgctttctgtcagcaattgggggtgggagttgggattaaatgagaccaggggaacaaagcgggagagcggctgggagccaatatataagataagaacggaggtataatacaattatagaacaagagtaaatttccaaatgatcaacatgatgaggtgttataaggacagatttcaagcgggtataatggagcaaacaacaagaaaaggggcgctacatccgtagaattagaaacacagcttgttcaaagaatggcgcggctggagactcggagcgttctgcgttgcccggcgttggacaagtggtgccttgttttgtaggctgcaatcctctgctgccggggtcggcgatcgggaaaagtccccttccggcaatcttccgaatcgcagattgttgatcgattacgggttctgtcggcgaagttacgagagcagctcatacagtaaagatgattcaattaaaggtgtgtgtgaattcccgaaattcacatatgcgtactcaactaaccctatatagacgttattgaattgcatcgataactccggcgccgccgtcgtcgaatgcgtgaacgccttgaaaaagaagcggtccgcaacagttggtgcgttacctgatcttctactctttatacacccttaataattttatcctggggatctaggtgaccggattgctatttgctttcagaaacaacgggtcctcgatctgaaggcaccagctagccctgtttttctacaaatcttgccgggttgtcatccatccctttcccgttccgttttttattcaattccagttcttctcatctcttacatcttatctactctttttaccttatcacttatcttgtttctttctctcctccctagcttcctcttttccctccttctcttcttcctcttattcattctttcctttctcccctcttacctttacttctattatatattttccacatttcattcttaaccttttcttctctttctacattcacttcttttccctcatttttcattctccccttctcttattcttccttttctttcccacccctattctctcctatctctattttttcttcatccttcacttttatcttcttccctttcctcatccgtccctctcctcttattttttaccatctttattttctttccatcccttctct

SEQ ID NO: 7922 - DNA, 610 bp, Emericella nidulans
tccataaggtgggccttcttctgcttgagaggagtcttgcggatctgggtgtgagcgagcacacggacgacagtgcagtacttcttaatgcgctcaaggtcgcgggtgatggaggcgccgttctcctcagagtgcttcttggcgtacttggtgaaagccttcttcttgctcttgtaccagatcttgtagaagcgacgcttgacctcgtcgctcaggtgctcagcccaaacggtcgcgagagagcgaagaccacggggagtctcgatgtaaccgacaacaccgacagcaatgagctagtaattgtcagcatataccaagttactacatagaaaattcttcggcacgtacaggaggagtctcaatgacggtggcagcctcaacaatctccttcttgtgcattttggcaccaggacggtcaaggtcacggacaacagtggtcataccggccttgtaacccatggaggccgtcaggtgaacgggcttctcgggtcatccttggcgagctgtcgcaaaagttcagattcgtcgctctactgcagtacaatttttattcaactacctttgacccttcacggttgcaaccgctgcgtgagtggagggagctgacact

SEQ ID NO: 7923 - DNA, 184 bp, Emericella nidulans
gattgccagtatgcaacgttgcactaaacctggtggttacaacatgattgtggcggcgatggataccgccgattatccatgtaccgtcggcttcccgtttgccttctaagagggagagttacgtcgatcttacgacggcagggagacggtgatatacaatgaagacgtcgacgagctgcaccgc

SEQ ID NO: 7924 - DNA, 1103 bp, Emericella nidulans
ctacggtactcggtatttgcgccgatgcaagctttcagtgagcctgggatagtggatggttaaattttattaagtttatttggaatgagcgcgacgcggacatatgaagggttggatactggtatagaatgccgggcgaagttgactgtgatgctgtttcttggaagcaaatcagcgttgccatctcagtgaatgcagggaacaatgcccaatgcgtgtaagcagacgaaaggcatctggacggaggtgccaaggcaggttgaccatagggtggaatgccatgattgagcaagagccctgtctgtgagactcataatatgtgataccttcaacttcgttatacgagttacgcgcaatatcgattcgagatatttgttgtcgtgtattagcaaggatatatataagtcttaggagcaagtgaagaagggccaaggtaggtgatgtaggagcgggttgggatggatatatgttacaaacgtttgtaccaggagcatacggacatgctttgttgaggcggtggaggtggtggtgaactttaccattccccattccgttggtcgtcttcatggagggcggtatttttatataattataaaggcctttctcgtttttaccctattaatgcatgttcttcctcttgtccgcgtacctttttaaatattgaatatggggttcataggacctattattttagagtctccatagtgacctatagactcggggatttcgatgaaagcactttgttagagttcctcttgtgttcaacgcgggcaagaatatgctaatcagtttataaagcgcctctctctgaacagttatcgtacaatgtaaggtctaaaactggatctaccttggaataatcctttaactggtccgtgggtttatctcttctcattaaggtccgggcgtctccctgtgttaaatattcctcttgtccctatgttaaatttttaatgttttgtcttattaaagttctttttttattattatataatagctaattctttatatttcttctcttttcgggccttttctacataaatataacatttgttggtctttttaacgcggttgtctttacttatatttccgcgtagttctat

SEQ ID NO: 7925 - DNA, 1667 bp, Emericella nidulans
agacagacccccaaagcccgccgaaacaggggcgaaggtaaaaggggtttggggtccaatggggaacccccgtggaatctggagggttacggaggggctatggggtgttccggggccggttgtgggggaaggaatagggtcaaaggcccagcgggggtccagggatcttacgcttagggaaagagggattcaagaaactgggggctagatgtgaagccaaatggaggagttaaggttctggtgggatacctactttgatgagggggaaaaggggactggtgtgacggcgaaggtggcttgtcctgggaggtgagatctcttacgttcgggctttcgtccctagaatccttttctcccttcctctttattatccgatgtcggcggttttatgtacaatacagcacatctacggtacaaagacaacatatagctaatataatatcatagataatagtaataatcaagcacaaaagctggattctgcaagatctcaatatctttattccagttttcactgctcttgtcttccatatttacattccacgtccacgtgcatcattagaaccagtaatagcgtagcataggagtagtgcctcagttcctcaacccattatcttccgagccatacagaccaaaacaaacaatgagacgaaactaagaaggggtgaaattgagagcaaaaaaacaaaatcgaaggggcatgaacagagcgggaaaggagcagattatgtatgtgtatgatatgtatatgaagaggtgaaccacgacttgcaagatcgacgaatgcaaggaactgtgtatgaggtgtcggagtccaaagaagatatcaagaaatcgattactaaagctgtaaaacataaaaattaaagtgctcgatctcaaacatgctttcaccgtcaaggtgctcagtggatgtgaataaggtccagatgagaggagaagacgagggaacaaggcatcaattggtaagtgatatacccgaaatcggcggtggtaaaggcgcgaatcgactccggtccatgcaactgagatattcaggataggcggctagggaatggtgggagggaggcctcttcaatcccgcacctgactatctatgctgtttcgtgttcgggcgtccatcatgccaactttgagtaatactgagactgcgtcctcatctcctggtgacttttcgccccggtaaggttccctaattacctagccacgattggctataacatctgcatgcccgtactcttcgcattgatcgctgactacgtgcaccgtggtgagctcctgcaccatggccaccttgtctctcagacctcggagcggagaatcttcctggctctatgcacatggctggctttttttttcccgagaattgtgcaccccccggccattccttttgtttccaatataatttcccgagataccacccgcttccttttttcgggtttccgatctccctaatcttccctctgtgggatgatggtatctttgtgacttggcgtgtcaacctcttttcagcggctaaaccccctttcttttttttggcttctaattaactctcttttttttctattctaccccgttgtttttttatcgaattccaaaccctttttgtaatttttttttccctctctattttttgttgtttctacttattttttctctttacttta

SEQ ID NO: 7926 - DNA, 1527 bp, Emericella nidulans
  unsure (1)..(1527): unsure at all n locations
gaaacaaggagcgaaacgcaaggtaaaacaaaaagagaaagttcttttgatggacagagaagatgtgaatgggacagtaacaaaccagaaggcgtctgcaaagacgatgggcaaggactcgatgatggcatggaagaactcggcgctgttatgatgtttctcagtgaagtacgggattttgccggtcttctcaagttcctggagaatgcccagcgccatgagtgctacaatcccctgaccgttcggtgggtgctcccagatctcgacgccttggttagtttcgccgtctgagccggctgtttgtttgtccgttatgttttgcccgctgaacttgagcgagatggcttcagtctcctgcgagcctgtttctgcgtgcgctttgaggtcgtccagtgtcatgtacccgccgagagactggatgacgttgacaatctcctgcgcgacgcggccctcgtaaaagccctttttgccgttggctgcaagagaccggaacgtctgcgccatggttgggttcttgagaatctctccagggagagggctgcggtagccgtcttgtgcttcggggtctgctttaagcatctcatgtgagttgggagacgctttgcgcaagaggctctcgctttcgtgccactgggtccgttagtattcgtaagcagtgaataccttgtactcacaaagtaagacgcaagctcggagactgcaaacccctcctctgccagctcaatggccggactgagaatctgctcaagggaaagcttgccgctgccgaacttctcgacggtgtctacccatcctgctgctgcgccggggaccgtgacggcgagcgggctatgcatgggaattccacccgcttcatccggcttagcttgcaggtctgctctaatcttctcaagagttgcggcgccggggtaccggccagagccattgagagaatggatctttttggtcgccgcgtcataatagaggcagaacatgtctccgccgattcctgtggatgagggctccgtaacgttcagggccgcggctgcactcgttagctacgagcttacgctacattaggtatgcataccaactgcaaccgctgcatcctgcgttcattagctatcaaatgtactatgaaaggtctagagggcaacatactgcagcatttccaccctgactcaggatcttctgtcctgctgcagccgcgagaggtntgagtacatgntgacaatgccttttgtgctgtgtacctgtactcctccgacttgcgaaaggtgcaagtcgggnngttttgtctggagtaaacggctttcagtttgagtggcatcctgttgaggntgagaagatggtgggtgatttggaaaggaatgatcacaggggaggaagccgttatagcgttttatgagcgaccagctcggctattacccacttctggagacgtgggggcatagttgcgagttgacgccaatggacgtgagagatacttttttcatgtagacacgactagtgtatgccataaccttctatagatcagtatggctaagc

SEQ ID NO: 7927 - DNA, 1027 bp, Emericella nidulans
gtctctctcgcagtcctcatatccttgagtagatcgtactcgcgagggtctccatggatatccgggttattcggcgggtaaacgtgatttacaaacccgtcatgtaacaggcggatgaaattgacgtgcgcttcgtacgactgcgggttaacctgaatgcgggcaaataattcagttgccatccgccgcgcatctggaagcagcgacgagcccgcatagtctctacgtgcgctctccctcggtccgtcagacatggcgatatcaaacgacgatcgtggagttggggtgttatgcgaaatctgattgacattcggatggatggtcgatggcgagagttgactctcgtaggatggggttcgtagattagcggcacgtggccgcggtggttggtgatgttgcatggaggcgagatcagcaagcgtgtccatgcccggcgtcgacggctgccgcgagttctgaaggtctacagttcggtggcgttccgcttccgctcttcccacccatgttaacagcggaacccagcgacgagggcggggaaggctcaggagcccgtgagggaggggcgtagacgtgcgtcgcgagcggtgacgaggccatcacgggccggttcgtagcggcggcgcgaccccttcgtagaggtttaggagctggactgggcgcagggggggtattgccggacgaagaacccgatgcgggcgctgagcgcccagattgtgagttcgcatcttgcggtgaaagaagtgaattgatatccatcatcaaaggttttatcagatgagccggacaaggtaggcacgaggccgacgtaagggagggtcgaaaaaatggaacagtgaagtagattccttatagagcagccgacaatctcctcatcagtgagtccattcctgcctcggttccagactgtccagctccgcgaccggtggatattgactttgttgcttgagcggagatgtctcaaaccagcgcaagccgaaggacgagggtgaaaacgggaaaacaccagagattctgtccaaagaagatc

SEQ ID NO: 7928 - DNA, 171 bp, Emericella nidulans
tcaccatcacgaagctcttgcgccacacgactcgaatacgttgtttcgcatccattatttgctctcctctgaaacaatgatgtggtcgataacggcgtcagctgtcacaatatggtcatgtcgcagctcggcgctttcgacaagttcaactggctctacaagcgtgatatc

SEQ ID NO: 7929 - DNA, 108 bp, Emericella nidulans
tcgactagaccatcctttgttataaaatcggcaccgcttgtaaccatgtagctgccggtcaaatacctatggaccgtggaaaggaatccgtgtgaacggctaaactag

SEQ ID NO: 7930 - DNA, 1469 bp, Emericella nidulans
aaaaaaccattaaaaagtgggacccggggggagccccaaattttgttgttttaaccagtttttcgccccccggtttttagaaccccttttaaaagcccttggaaaattaaggcctttcgggcggaaaaaaattgcaagcagcaaagccgttatgcagaatagcaaaaggctacgggagtggctagcgataccacgacatagatctacgccgcggtgttaacgactgcgccttaatcctctgcggcgagtaggtcttagacattgtagcgacatccaggggtcatgggttcctgcgaacaagctggagcgttccttttgggcgcgcaagcggcgaattcctgccatgccatgggaagcagacaaggacggcagcgatgacaagtacagcgataagacctttttgcggtctcggcaatgtcggagacgttatgaagaacgagtcaataccgtcgctgcctttgcagaaactgagttgcttctttgcgggaacaggtagggtgtcccggtcaaaggtgaatgttcccatggattcgttgatgagctttttgacttcatcaaagggtgtgcggataatattctctacgaactcgctgacttcgtcgaacgtcggtaccgagtcattgagcttgtcgaggccatcgtcgattgaggatggaagctgggcgttttcgaggtcttcgatgaagcttgagagatctaagtcggggacctcgtctccgccaaagacgcttccgacgatatttattccatcgacgaatttgttgaggccatcctcgaacgtctgtgttgcgtcactgatgccttcgccgatagacttgattgtcgagttcaggaagtcgctggcatctttcaggagcccgactccgacgtcgaccgtgccgcgaacagccattgtaatgaggcagagatatgtctggtacatcatcttgatgaagaacacaataagctcctccacgcctgatacgactagtgtgagcatggtcttaagcgcgctgaccgcggtctccacgccagaagctgtgagttcgttgatgccgcgggctgagtagtgaggcatcgaggccatggcgctgcccatggattcgacagaggtacatgcggacaaagcctcgcgtctggcagaatccatgtttgtgttaagactggcaattgcgatcaggactctgacaagcaccaggagtaggaggatggtccatcggttcatccatatttgtgacaggcgtgctcgcaagcccatatatggtgtgatgtcgtctggttgtaacgggacagcgcgccctccctgcggatcatgggccccatagggaggaagaagagggaatatagaacgagctgatcttgagaagatcatgtcgaaatataatccggtataacaccggtgtcgaggaaggaatagtgcgctgatcgagtaaaatgtcgagcgttaaagactgatgaccgcggagggaggaaaataagtatccgggaag

SEQ ID NO: 7931 - DNA, 803 bp, Emericella nidulans
ttttctcgatcctcgcgctcgcagagtctgggggggtccgtgggaagctttggcggctggtttccagcctagacgatgtgaaaaccttcgccgacgcccgaaagatcatcagccaggttgatccagattatgtcgtttggtctgctggtacgtttactacaaattcctgaacgagaaggaaaagcggatgctcattaatgactcatataggagccggcggcaaaggcggcccttcacgtaccattgccgttgacgaagtcgccgccaaagcattcatctccgcttcctatgcgcacccgcgcgtcaagaaattcctcctcgtctcgtggatcgggtcgcgacgcacaaaaccttcctggttcactgacgcagattggagccacagccgtaacgtatttgacaatgtccttcccacctacgcaaaggcaaaactcgaagcagacgagttcttgactgcacatgcggctgtgcgggacagactatctgctgctggaaaagcgagtaggcttgacgcgatttgtctaaggccgggtctgttgaccgatgagccggcgacgggaaaggttacgttggggaagacgaagagcgaggggaaggtctcaagggagaacgtggcgagggttgcggatgcgttactggcgaaggaggggagtaagggctgggttgatttgctagatggtgaggaggagataggggacgcggttgagagggttgtgagagaaggggttgatgatagtcgagggggaggatatcgatgctatggttaggcggtatgccctgggcggttaacgatagtctatacc

SEQ ID NO: 7932 - DNA, 118 bp, Emericella nidulans
gactgagcaccagcattcgcaaaaggagctggagcatgacgttgtcctcacattgcccatacttaactctcgagcgatgaaatctgtagctcacaatgccgagaaggagaccgacagc

SEQ ID NO: 7933 - DNA, 1862 bp, Emericella nidulans
catccttttttaacccaccttttttgggcgagaaaaaatttttaaaaaagcaactcctgaagcagccccggttattaaccatattttttacccataaggccccccccgtagaaggctagaccgcactccccccttattcattacaaaatgggaagcaagatggaatgcgcggtaaaagaagcaatacccgctcccagttttacgcaacaacaggttattgtctcgcttcacgctcgtgctgtcgtcgtagcgccgaagcaaggtcggcggcttgtcggcccaacccgactattgaaaaatatttattagttgcggtacccggttatgtttgtaaaataggagtgagcgtactgcgagcaagaatcgggtcctcggagaggattgcgatggagttggttatgaggattattactgcggagaagagagtcagtccggagctcgacttcagggtaagcgacacgagggatgcggaccgtagacgagtcttccgaggccgaagaaggacattgtgagggtatcgtgggtttcaggattgatgtggttggaaggaaggaggcgagagagaggaggtgaggaagtaaagtgaagctgccagattgagttgactgacggcatacgtacttactggccttccgagaaggctccgctccaactttcttacaatagtcgacaccttgatcgtctgcgcacatcatgtggaggaatgttggtatgttcaattctgtgctttatcatcttcgacaaaactaattcaaggctaggctatctgctgctcctcgcttcgatcccagtgctcgttctctttcatctgtcgatcgctccgtacacaaaagtagaagagtcgttccatatccaagccatccacgacatagagacctatggaatccctacgcacaatgtcaaggacgtattgcaggctgaatatgatcatttcacgttcccgggtgctgtgcctcggacgttcgccggtgcagtcgctctctctggtctctcgtcgccgattatctggttgaagcatgatatcgaccggcagttcgttggtaggtatctttggctgcgtatcctcttgacagactactgaccagtgctacgcactagctcgggcaatcctaggattgttcaatgcatcctcacttctttactttgccagcagtttgcgccgcacggctgggagagccactgctatctggtacctgctgtttcaagccagtcagttccacgttctatactatgcatcgcggaccttatccaatatgttcgcgtttggtatgaccaccttcgctctggcatctctcctcccagaacctgtgagctcagccacgtatcgcaagcgaagcagggttgctctgtacctgatcacaatcgcgggtattgtcttccgcgctgagctggcgctgttcctggcaacgcataccctcttccttcttgcttccggacgcatcagcattcagcgtgagatcattcctgccggcgctctgggccttgtccttggtcaagccatcacactcccaatagactcattcttctggcagcaatatcccctctggccagaattcacagcatttaagttcaatgtagtcgccggccaggcttccgcttggggcacgcatccatggcactactacttcaccaacgcgctgccccgtctcctcctcaaccccctaacctacctcatcggtatccctatatccctgctgcaacctgcaacccgtggcatcgccacatccatcctcatcccatcactcgcctatatcgccatttattccatcctaccacacaaggaatggcgattcattgtctactcaatccatctttacagctgccgccgcgctaggacgtcatatatctggacgcacaggagt

SEQ ID NO: 7934 - DNA, 1536 bp, Emericella nidulans
  unsure (1)..(1536): unsure at all n locations
gacagctgcaggttcgcgcaacagacctagctaaagcgttcgtcctccgcggcgagctcccaccaacgcccttcctaatcaaaacgctaagcggcgacgacgtaaagccgaccctatctgaaacacaacgggttctgtcctttgcctgcatagccaggtacctcgaaacgcgcacgcgcagtgccaaagacaaaaggaaagacttcctcccgcacaggtggtattttgatagccttgcctggtcacaacaaatatgggatctctggcgtgagggataccatagagcggtatatcgctattttactgcgggtgcagtcctatgtcgagcttactatgagccgcttgtctgtgagaagaggccagcgggctttctttcttctctgctctcgatattagaggggaagctgcctcgcagcgctaacagtagagactcatttccggggtggttcaatgaggaggagaagaggtatatatccaagatcccgttgtatgatagccagagatatgaagagtgggaagaagcgttcaagccgctcgaaatgatcttcttgcaggagagcaggaagcactcgatccctttctcatcagaccgagaaaagcgaccagcaccacactcgccagaggcagagaattcagatcgttctctgtgccgcacattcggcacccagtccaagaacctgcactccctcgacaatacccatcatcaaacactctttgcccacctcctccacttcctctacttagtcgacggcgatattcgctacttcatctccttgcccggcgacacgccagccgaaagccttgacgacccaatagcccactctgttccgggtgtgtttctcttcggctcattcacgctcatggatatcaacatccgacggaaagcagagggttcatgcgtggcctacgcaaataccgtcctgccgaaactcactagcgagattatcctctccacaccaaatccccatgcgaaaacgtaccttggtcttccgaacatgcacaactatctcaagaagatctgggacatttccgggatcccaaactgctacgatcagaaccctgtgcgcaagacgcttccactggtgagcttctttgtggagtacatgctgcggcggttctttgggttaaggttctcgaagtggatgtttgatgcaacccctcaagtgaggtgtgccgggtgtccattaatcagttggggggtgcctcacagggtcaccgcccgtcaggagagaacctatgcaggatctgtagaaagtgcaaaccaacggccattgtcggttgaaaaaccccggggacataaacttttctctttggaaagaccccccagcattacttagggttaaaggtcctttctggagggccccattaaacaccccaaaccccccccggggggtgcccgatcccccttccctttagtttggccgcaattgattcccggattttcttggcagaattcctcccccccgaacgttatgtttgggctttttttttttaanattttttatatacaccattatctattctcattcttttttg

SEQ ID NO: 7935 - DNA, 880 bp, Emericella nidulans
cgccatcagcaatgagctttatgtgatgaacgaggaaaccgttgcagccttctgtttgctcagtgttttcaccgctgttgccaaatacggtggtcctgcatacaaggaatgggctgaggctcaggtccagaagcacaaggacatcctcaacgctgcccgtgccgaccacaccaacgctgttaagcagcgcatggagaatgtcaaggagctgtctggtgttgttgacctcaccaagcagctctttgaggtttccaaggtatttaaacagcaacagctctcttgagcggtccctgctcgaggtgaaagcgtggggagattacagctaacatttgataaaggaaaccgccaagctcgaggcccaggcctacgagctcgagcagcgcaccgctcttgctgccgaggccaagcaggttcttgactcgtgggtccgctacgagggccaggtcaagcagcgccagcagcgtgagcttgctgagaccgtcattggcaagatccaaaaggagctccagaaccccaagaccctccagcagatcctcaaccagagcgttgctgacgttgaacgtatgttacaaccccgatagaacgctcacctgagtccagctgacatcttttgacccaggcatcatgtcctccaaggctcagtaaatggagtttgcttggtagccctgctatcgactcatgtacaaattaagacctgtttctgtgctatttagacatcaaaccatgttgggtccaaacctggggggaagaggtacagttaaagacgcctgtggcttcccattatgcttgacgtaaattctacagaataaaagaaaaaaaaaaaaaaaagaccctaggttgttgttctttcatacgtcgatgaaaagaagcctgccagccc

SEQ ID NO: 7936 - DNA, 1244 bp, Emericella nidulans
aattaaaaatttagaaaagtgaaaaaaaggaaagattagtaaaaatatagagaaagaaatataaaaagaaggatgaataagaaagagaaaaagaaatttaattataataatttaaagataaataggtttaataattaaagaaaaaagaaggcaataaaaattgaaataacaataagagcagaaaataaatgtatgaagttaaaaatataaaaaaataagaaagaaaggaaaaaaaaataatatgtaataaaaagaaaaattaaaagtaaaaaaaaaaataaagaaaaaataaataaaaatcaaataaaaaaataataataaatattaaaaaacaacaaacaaatttggtatataaaagaaaataattaataaagagaagagaaggtaagataaagacacttaagctagacaaagagagcgggcacaattttgaggacttttagaaacaacttggtagccggttaaattgccaattacaacgcgcccgttcgattaaggcaggtgtaattggtccctacaattaggctaatcgttgtatggcttgattcggagaaacctaatcagactctgtaactcatcgagattgttctgcatgggcgtgcctgaaaggcaccaacggtactcagcatccaatgcatatgctgcctgtgttgcctttgcgttgcggtttttgatggtgtgggcttcatcgagaatgatgcggtaccagtagacggagaaaatgcccgccttcttatcgttcttggtcactgcgttgtgctcagaagtcagggtaccatatgtagtgatgacaacatcatagtcgtccaaactgtcagttgctttagcccttgcattgccgtggtatacaaggactcggagcctgtgggaaggttcaaccttggttttgatctcggattcccactgtttgatcaatgcgagaggtgcgacgaccagagtggatttgctcaagcctttcgggagatttctcgactcggcactttcttcatcagtatcttcaggttttcggtcgtgatcggacagtgctggttgacgtctcgacccgtctttcggcttctgatttgtgagcatcagggcgatggcttggactgtctttccaagacccatatcgtctgctagaataccacccttcgggagcaagcccttctcctcctttctgggtttcagtgagccgatctcttagcgacattcagtttactcctgcgtggtgagggagcagtgacccctagcctcgacaccccata

SEQ ID NO: 7937 - DNA, 710 bp, Emericella nidulans
tctcagtttcatgtttgttgatgtgccagaacgggttcaaccagtgagcatggtacagatgcgcatagcagcgaaacatttgcttcatgatgccttggcagtctttgtagaaagtacgcgggaagccactcgacttgccgatccagtcttcaccaccagcattggcggcggcatccgcggcggaagcacccgtagcttcactcagagcaaaagtatcgggaacaccagtgactttctccgtagggaacatcacgggatcatggatcttgctgacaatccatttctcaacgcgattgataaatttaggggctgaaatcttggcggcctgcgagtccacaagccaagtgtaggtcagactaaatgtcggtcagtaaacaagagagatgatgattgagtggttccctgaacataccgacccgcggacatggtggggcagctggtctcgttgcaaatagggaggccggtatgactattcacttcttggatgaccttaagcatagcttgtagtagacgattttgttcgacaactgtatgagaagcgagatattagcccaagtctcgcaagggagttgcgacatactcactctgatgggccagccattctcccaattccacattttttgggcaagcgcataaggtcaaaaagttacccttgacattgagcggagcgtacttgtcctgaaagaaatacttaagagcgtcggggtcat

SEQ ID NO: 7938 - DNA, 1537 bp, Emericella nidulans
tttcctgtttcagcatccatggcgacagcgcctgagcagtagaccatgccgttgcatttgatggcctgggagtagatacctggaagaggcttgggggctttcgaggtcagaactggggttttcgaggccatgatgacgatttttcgctacctagtatatgtgaagtgtagatagaaggacgaagaggagaagcggtttttattgtggcaggtggactgttatgcaagggagttggagaccctccagctcgttcccggtgcccctcattagggactcccctcaccaatatgataagcctatcgcctagtcattgttgcaatatggtaataagataataagccaataaacgagccttctcgtatccgcgtagagcgtttaggaagtgattccctactaccctgcgtccccagtaagctactggttctccaactcgtttccacggaagataaaagaggcgggtgaattgtcgaaccctccttgcatcaacacgaaactcaaacctgcttctgagacaacttacttatcttataagtcttccaccatcaatctcgcgatcctagtagtttatgctgtcttgatgcaacctatcgacaagatgtccatctccagcacctcgcctccatatcccctccacccttccgtcaaagaccttttagatcctgagtacgtcgcattctacaacgcccacgtcatcgacaagcaacaagtccatcttcagcccgttgagacctcgcgcacaagcggtattttgattccgggtggcggaccacttgtagatgttggcaagacagtcgatatcaccatcaagcgacgcgctactgaggggccggagatattgctgcgggcattcacgccgattggggaggcgcccgagggaggatggcccgtaatgttgtacttccacggaggcggctgggtgctaggaaacattgacacggagaatgtggtctgcacgaacttgtgtagtaggggaggatgcgtggtcgttacagatgattatcggtatcttggtcctcgcttcccatttgttgttaggttttcaacaactgacggatggttaggaagattgcacctgaaaatcctttggtcatgtgtcggtgcttgatctgttggaaatcctttatcgggcctgcttttcgacggtccgggttaccttaatttcaaattcgctaaaattgcaacagtggttcttaatctgccggaaccttacttttaccttcatcaccctgggctacctttttcttccgttctttatttggccatttgttttactccccttttagtaggcacacctccctctattatttattttcactcactttctaattgttgtctctttatttgtataattggctattcctccatcctctttttcatcctatattcttcacctctttgcttcctcttatcactaatttttcttgttacttttctttttttctacatatatatagtttaatatatgagcctttattgttacacttccactcttatttcttcattcttattttctctctcactctctgtttctgctttc

SEQ ID NO: 7939 - DNA, 644 bp, Emericella nidulans
  unsure (1)..(644): unsure at all n locations
tgcccataatacgactactatagggatcgtaataggcgttgtatgtctcatactgttgcctttctgggagacctcaaaaaagcttgcgcctaaaccgctcctgtccctccatttgctcaagcagcggacggctcttgcaggttgttgcttggcattcttttacttcagtacgtcccagcccatcagctattagcggatgataatcatgcttgctaacagaacctagtggccttttacttctcagtccagccatatctctattcctacttgcaagttgtacagggctacgacgttgccacggctggccgtgtcactcagacctttgcttttacgtcaacgatcgctgcatttggtgtctccatcctgattaagtatacacgccgataccgtgtatatgtaactcttggttgtgttatctacatgactggtttgctgctgatgttgctgtaccgcaaagaaggcagctctcccctacaagttctaggaacgcaggtcattgtgggcatgggaggcgggctccttaatgttcccgtacactcngtgttcaggcgtcggcgagccaccaagaagtagctgccgtcaccgccatgtttcttacgttcatgtaaatgggaggtgcaatcggcgctgctatctcgggagct

SEQ ID NO: 7940 - DNA, 768 bp, Emericella nidulans
ttgcccttggcgcctggtagctggacttcgcagtcggaacactggtaggagatgttgcttcccattgtggctacggctatgacccctggccgaaatctcaattgaaaaggagatctcttggccaggcgagttcaagaagtcaaaagacattttgagccttggacgcgccataacctgctcggttcagaagtgatggtcaccgtctgctgtaatggatacttgttcccaaactccttgctctgattggctcaattaatcgacggctatctgtatgatactgtactatctgggcttatcttgggtgcctcaggctacaaatccctatctgtctctgcgctccgcactttaacactttgacggataaatatttcccatgcatactcccacagcctccgctgggaatgctgcttgaaggctcgactcttcatgggccaaagcagcggtgcgaacaatgatccggcgcctcggcctcgtcgtgcccgcgtagagaggggcaaacggtctcgaaatggtaggtcatgtcgccaatccaggagatactctgcgtctactgtgaacttgacaaaacgtttactaaactcgcaactgacaggatgctctacatgtgtgagcaaaaaggtcaagtgcgacgagattcggcctcaatgtgcgagatgcgttcggctttacctggtgtgcggggtggcctgcaccgaaacccttgctagcttcaagacggcgcgggtatggccctattatacccgcgactgacgtctttgacgccgtcct

SEQ ID NO: 7941 - DNA, 484 bp, Emericella nidulans
  unsure (1)..(484): unsure at all n locations
tagttttaatattatataaaagaaatatactaagtatgctatatttttagagtactataaaataatattactaaaaaaacctaattatagattatacagatgaataatatatattattattatccctcaccctagtcaggcagaactgaatatatttaaatcgttttaaaagaaatttagtaaattattattcctagtttattttaatataaaaaaatttatatcttgatattaatagctctcatatatttttcttagagtaatatttttctttactaaattaagtttaattatataaccttattataantgtgttcttaaatataaatctaactagtaatactgttattctaggctttatttatatagaaaataaaattctagctaattaagcttaaagtttttacgtagtttagatattaagagaaatattttatttaatttaaagattacttagtaatgttttatatggaatatatattaa

SEQ ID NO: 7942 - DNA, 330 bp, Emericella nidulans
aagccactcaacgcttcactgagactgagccaggagatgcagcgaagatgagagacacccacgtctcaactaggaaaacctggatggttgaataccgtactgtattgcactgaaccgtaatatctcgcccaatcacgtgatgctgtccgggccgatgatcggcacatctgtatcgcaggtgtgctttagggcaagcccaggtgattctagctagactattcatcacgaaaccgtgaacacgtatctactgcagcctacaagaaagctctcctgactctgttgaccagcatcaaacggactccgtaaacttcacttaagcttctgcaaata

SEQ ID NO: 7943 - DNA, 710 bp, Emericella nidulans
ggttgtacttagcaccccgaaggggagcgctattacacgccgaagctaccacttgtcgtcaatcatgaatacttctcataaccacaaagatatatcaaccgggtaaagcgcctagaacttcgtcggcacgaaactcttcgaatcatcctcctgttggctaaacgactgcggaaacgcagctattgctgcaacaatcgcaatggcgataaaaatgagagagatcagggaccaaagaagaccccagcagcgtgaggacccgccatagcgctgcgcaaagacacttgcgtctgaggaattcactttgcggaggatgaggtcgtcgcactgcaacaacatcccgttagcggagctaggtagaggtaggacctggggtgaagactcacaatatcccaaacgctatacagcgcggacatgacgccaatgaataactacaaatcaatcattcgtcagcacccacgagtgtaacctctcccgataccacagaaaagggggaaacatacaacaacccacttcagtgcctccccatgcgcaataaaccagcacgcaaccaacagccccaccgccaacaagactgtcacgatcgtcaaaagatccctcctcgcccaccagagtgtgagcagaaagcacacacccagtacaatactagccactttgctggcaatgatattgaaacccgcgaagatccctatagatgagatcgtattatcggc

SEQ ID NO: 7944 - DNA, 1495 bp, Emericella nidulans
ggaatccatctctgctcggcctgatgccgttgatcgagatatggatgatttgtccaaggctgttgaagcaaccaacatattggggaagaagaaccaggaagctgccgggttctccgaagagagccacggaaacgggtctctaaggcgcgaggattcgtttgaagacgaccgcactcacctctcaaactcctcaacaaaaccaaccagttttgattcgaaaagtatggcatcggttactacgtttgcaatggacgaaaaggattccttacgtcccgatgacagtgctagcgtacaagccatagatgaagaagagtcgctgtccggtcatgcatctggtgcaccaaactcactgactgggtcggaatctggggctcggttccgagatggtcaaagacaccgaatacctcttcacaaccctcattctgttttcagtgatggtccgcagcgagcgaacggtggtatcgctactgattctgtcggcaacagctttgttgtttccgactctgaagcttacccaggtcgacccatacatgggtttccatcagaaccggatgagaagctccttgaagctatgaagtctccaaaagaccggcttctaatccttcagctagaagaaaaagttagaagcttcattcaaaactccaagtaggttattagctattctctcaggaggtgattgttactccgtctaacatcttttccaagggaacaatctttggaactgccaccttcgaacgcgttcggtcgacttcttgcccataagttgggtgactactatcatcttacccattttgtggacaataatgtcacatcagttcgactccatcgaactccgttttgtcgactgtgagttcacatacatctgtcctgcttgatcctttctcttcttcccttgactcttatttatccgaggatgatctgaatgccgttctgatggacctagacccacgcccttatctgtgatacatgctgccagtaacagcaccccgccacctacggcgcccgccatgaaaattatgcgccgcacagacggggagaggccttcaacggaggggagtatagctgcgagctcctctgccccctcgaaagctacgtcggaggctggcgatagtggtaacgatgcagaacgcgggggctcatcttctggagcaactcctgctaaggacagaatgtctctttcaagagaagaacgtgaagccaaataccaggaagccagagagcggatttttcgggacttttcagagtctaagactccagaaatgaacggcgaacccaatacatacatgtcgaggtcaagctctacaagtggacggagaaagacgcataggcagaaaacgcctcacgatgacagctttgaggcgcggtctcagttcaatgcgtactacccgggaatgcactataccagtgggtccctgccctacaatatgggcatgcaggatccttcattttctagctgaccttatatggtagggccaggcgttgtacaagcagcatg

SEQ ID NO: 7945 - DNA, 640 bp, Emericella nidulans
caggacagcgcggaaccttgctgcagatagtgcatcgactttctgacacactcttttttttaggtgttatcctgggtagtctcatattagcgcgacttggacggcgttggtggatgttcactatgagtgtcatagacactcataaccgccactatcaccgacaaccctgctcaaattatggctgcccaggttctcaactacgtttacgtaggtataggactttctgtgatccccgtgtcccaagcggagattagcatagatactgcatgacttcgcaaccgatccgccaaaacaaggacgaacagttccagccgaagtacgggtctagttgtcgggacgcaccagcttagtctcacattggaaggcgtggtcatcaatgctgtctgctatggtaccagtgggcttcctgataaccgcgcatggcgcatccctctcggcctattctacgtagtccctaccatcatcgtggcctcaatattcttccttcccgagtctcccaggtggctgattcggcagaatagagtggaggaagcgaaggcgagcctgcagaggctttgcgagggggctttcaaagcggaccaagtcgacaaggaatttagagagctggagtttgcccttgaaatgagggtgagcagggaat

SEQ ID NO: 7946 - DNA, 154 bp, Emericella nidulans
gtctcactgcccgatgaggcgtgtcagcgatccgtccttctcctcatatgggacgtccgcgcagataccgtcactgccgcctatacaggctactcatgagcagatgagaacgctgctgtcgtatctgataccgcaaacacattgttgtatatta

SEQ ID NO: 7947 - DNA, 793 bp, Emericella nidulans
atcaccgccagctgtgtaaatggtgccctgtcagtcgaaatgaatagtgcctggagccttgaaaaaagcatgcgattcatatccaggattgaggaagtattgaatatgattcttagcgggaccctagctcagcaggcgactccagtgcttacgccacaggtattcaacgaggagatgtacacaccatattttgaattttccaaaaccccacgacgcggaccgatcttgttcctattgccgccaggggagggaggggcagaaagctactttaacaatatcgtcaagcacttgcccacgactaatatggtcgtctttaacaattactaccttcactccaagagtctgaacacgtttgaaaagctagctgagatgtatttggggcacatccgtcagatccagccagacgggccttaccatttcatcggatggagttttggaggaacaatcgcgatggaaatatcgcgacagctcgtggggctaggttcaacgattggtcttttaggtatcattgacacgtatttcaacgtgcctggagcaacgcgggcaattggcctcggtgatactgaggtcttggatcccattcatcatatatcccaaccagaaccagccgatttccagtgcctcccagccagcacagactacatcattttattcaaagctactagggtgaacgacaagtttcagtctgaaaaccagaggcgtctgtacgagtactacgagcaaacattgcttaatgatctcgactgttactccctgtgcttaaaccttcatctaatccgcctgaggaggatac

SEQ ID NO: 7948 - DNA, 657 bp, Emericella nidulans
atccgatctttttgcagatttacaattcccagaccacccctttttttgttacaccccaaaagccccttttttctcttggtggagcaacatcctccgctacaccctcttttactcctgcagctgctccttctggcggtctgtttgggggtctgggtacatcaaaacccgcggaaacctcgacgacgaagcctgcagcctcgacagggagcctgtttagcaagcccgctgagacagcgaccacgcaagctccaagcacgtctgcggaagctactacaatcggtactggcgccaagccagcgctgactgcgacatccggacctactacgaccgcaactgcagcaacctccggtacgagtggtaccaccacggccggcggtcctgctctcggcgcatcgaccgctggtccacctccaccggctcaatcacgccttaagaataagacgatggatgaaatcattactcgatgggcgactgacttaaccaagtaccagaaagaattccgggagcaagccgagaaggttgccgagtgggatagaatgatagtcgagaatggcagcagggttcaaaaactgtatggcagtacagtggacgctgaacgtgccacccaggagatcgaacgccagcttgcgtcccgttgagggcagcaagacgaactga

SEQ ID NO: 7949 - DNA, 1004 bp, Emericella nidulans
ctttttgctccggcccgataagataggcgcagacctatctccactatcacgaatataggtcacgaacccgactatcattcaaacagaccacattttatcaactctcccctctgtgctaagatgtcgactacatttacatcaaatcctttgcaacaccaaatgcgctcaatccccaaagacccgcttgcgcaagcaagtacagcgaaccattgtacctgccggtgccgttcggcttgtcgctataaatatagcccagcatgtagagggtgcggagaacaacccaggccgctcctaagcccgctgctgcctctgggtacttgacgcctgccaccaggatagagagcattgtctgcggcgcgttctcgaggaagttgccgtgggcgcgttgtgcgcagttgaatttgtaggctttgggctgttcacaaacgtcatttagtactctctcttggaacacaatctgttttgctataggtatttagtttcttgggctcacgcacgttagctttacattgctcaatgctggcataggcgtgggggtacggcacgccagcggccttgcgaaaagagccgacgaggacaccatggatgaatcccaggacagggattgcgcctagcgaaacggcgatggcatatctataataaagatcgttatatgattagcatggggtggtctcatgaccggggtaagactgagctagctggctagtaatgtttggtaacaccgtggcggacgtacccgtagtttgcggggatggagatctcgaccatcgtgggcaattggtggatggaatttgatagttcacgtcagtagcttaattatgtggatctgaatgcttgagctgcgcgttttctttaagctatggcgtgatagcgttgaagggggaaagatacttatatagctgacgttctcggaagacgggcagttagtccatccggaactaggagagacccgtgttccgaagttgacgttcagtatgccatagttctgttaccgagccggagct

SEQ ID NO: 7950 - DNA, 629 bp, Emericella nidulans
gccgtttcactgtctagactctcgaactgctggggggggggggggctgatggctgcctagagactatggtgttgctttgtactacgatgcctacttcaacctattgttcatgcttaatgtgaagaagccgccggagatcatagctatgctgttcgtgcaccattgggagatactgaacttttgcttcgacacggaccgggctctgttttagataaaaggcatgaccttaaatttcatctcaatataagttgcttatatccaacaaatccgccttcccgcggaattaatacaatgctctgccattgttactacctattaacccattctgagtagacaaactgctcatacaacacctgaaactgcacttaattcatataccgattatctacaccatatccgtgaaacagacactgctgtactcaatgaaaaaactcacctaggccgattcatacgatggctagaccctgtgatcggtcattgatgcccacacgatcaccatcatgaccgcctatttattcgacgttaccgaactgtaggttattaagtgagaaaacaccatgagtgactactgactacgcccataatgccggctgcttatccgtatctttccacacttgttaacatgccaa

SEQ ID NO: 7951 - DNA, 585 bp, Emericella nidulans
ggataagtgcgagtaactgcaaatctgtttgaatgggagaggcggtcttctgcgagttgttggtttcggaaatgagagctcgaatgacattcagcctggtgtggaaatcggtcagtatgaattgtgaccatattggacattatgctcaaaactgtgaccgcaatttacctgtccgtatcctttgccctcatagcagtcttcagatcggccttcaatgtagccagcaacggcggcagtgatgggctcgctgtcgagttccatcgcgcctgatagaggcccaagcgggtcgttgttcgcagaaccttgagcatcgttcctgtgtgtggtggcaataatgaacagaagagatgcagcgtaattgagtccaggccaagtgaaagggaatctgtataattatgtttatgaggcagaatcggcgagcagcggaggtgcagcaaaaggcggagagaagctcatcgggcccgtgcgcaattttgttcttcgctcttattatggccgctccattattgtttctccaaatgctggctgtcttgacctcaacggcaacacacagcttgaggattacattctcattaatcatgtgta

SEQ ID NO: 7952 - DNA, 832 bp, Emericella nidulans
ccatggcgagtaaacatctcaatctaatgcatttctggcctcgtccctatagtctgtttctttgatatatcggacttccgagcaaccagcgcctagtatagaactagtatagagctagtggaagaagtgccgccgcaactccgcagcggccaatccacacttcattcagtctcccttgcctcacacctcgttactcagacacattttccccgtttccgtgccggttgacctctctagtttcgctgatttgacgatacgagcatggttttaaaggaccttctgtggatgctggcataattggcatttatagtgctttctccctctcgagggaattccaccagccaccgctatcgcagcacaaatacatggcttttctcaaacttccggacatctcatatcgtgcttctagagtcttcatgttgtgaacttggcattacgttcagtgacataccatcctttcgaccttcggtgatacctcttggaggcagctcaaccctgaactcacgtaccgactgtacaatataggacacaaatcaacgacaagcaaaccgcccgattttactgttcagtgaatttgtacgcactccttgctggaatttcgatcttgcaaaacccaaagtacaaagtacgcaacagcagcacggcatgacgttctatctttaccgacgccccctacgagtacccaagcatttgaggcagataacctagatccccccaacttcgagtatacttttttttatgagaaacggcagtggccgacaagcgagcaaatcatggcgccatccaccgtcgatgtgcgcccaaatagtgagggggcaaatgagtgttggga

SEQ ID NO: 7953 - DNA, 586 bp, Emericella nidulans
tagccctcggtatggtagaaaccagcgccgacggaactccagcccatcgcgatctccgtctcccccaccccgtcggcgcccgcgatctccttcaacgccgcctcgtcggtagtctacgatctcaatatcaaacgtgcatgcaatcggtaatggttctgggaattggggttttctagttaaacgatgtattttagaatcttcgcgcttactcgtaccagatactactgaagtgcaaatcctatctctattattctattctatcacattgtacttcgaccgtcaaaccttagacgccctccccggcttcccacacgcacctcttacacaagcacatcccgcccaaagcgccagcgcccactccctcctctccttaacattcaactccacatcacagtaatgattcaggatctcctcatccttccgaattccccccttcgccttttccctctcctcgccctgtctcttccaaacaaccctctcctcatccccacgaaccacaaacgcaatctctccgccccactcccatcgaacattcggatcacagctatgattggcaagacaccaaagcggatgcaccgcgcacgtc

SEQ ID NO: 7954 - DNA, 418 bp, Emericella nidulans
tttctcgaaacactccttgagcacgatattgcggcccacggagccatggtggtcctgaagctccttacaggcatgaagctcgacagcttgagagaaggaaggcattgcggtgtgtggacggtgaggtgtagactacagaggtatggaggtatggaggggtaaggactgtacaaagcctaagaaagaattaacggcatagcggggctggtaacagggcttgaagcatagaggccgcatggacactgaatcgatggggtcgcacctggagtatgatctgagagttgggaaataaagcaacagatatgatactgacaataggttgcaaataaataagggtggggggagtcgaaaacagggacctcggagatgacgattcggtaagctaaagcagcgggtgacgacaccggactgatgaggt

SEQ ID NO: 7955 - DNA, 1114 bp, Emericella nidulans
aagctcaccgaaagtctatgcgaagaatgtcctgaaacccttcagcgagagatggttccttgaagcgcttgacaaagtcgcctaaggcgattccgggaagaagggtgcgggattcggggttctttttttgtttattattagtattgagctttgcattgtgctactggtggtgttcaggatagcagaggtagacgcatagtcatgcgctattcaggtatgtgctgcgatgtagggagtggttcggcggtatgaggggcaggatgcagcccagaactcaaatgtcaaagcagcagcatctgctggtgctgacaaatgcacgcatgtgggtatagatagaagagaagtttgactcacaaggcttgtattcgcggcacggaccgcgttattatgtttgcaaagcgccgggggtgcagtaaaataaacacagcgaattggcacattaaattcctttgcgaccccgatccactgcgcccttgtttctacatcggcatttgtgtcatctgcagaacgaatgagaaatgtgtcagcaactaatataggacagcaccggagcaaatttgatatgctggtttgagtggttgtggctatgagtggacgggcagagagggcgattgttttgggaatagtatccgatgcacgctgcgcagtacttgctgcttgatgtcggacaaaatgcaagggttgactattgtatgcatgaactgaataggaatgatggaggacaggtttgagtgtgcgaagagtcgattcacgagtgtccgtcgatgcatacctacaaccacagatttttgggcggcaaggtgctctttggccactttaatgcatttcgctcgctgattgtccgtcagtttcatagattcatttcctgggatctaggaacatacgctcttcagaatgtcctgattcacacgctcataacctagtggcttgagatagtcccaaaagaaggttgatttcccagcacccggactgccacagaatatcacaagctctagaggactagtttttgagaactgcggtaatgctggtgctcaggtcctagtaacaaaataacaattatcccgcgttcgtacatttgtagcctcaccgtcgtgaacatagatttaagtaggat

SEQ ID NO: 7956 - DNA, 864 bp, Emericella nidulans
ttgggagtttgagggcgccgatgtgcagccggacgaggcggtattggcgtgatggcgatatatgctccttgtcccgttggcacgttctcccgtcccttccacggagttatcataggtaaccgcactgctcggggactgttcgtcgccgctcgtgggcgtcttggtgggcatgggttcggtgatagatccgggtcccatatctggaacggcacacgaggatttccgagaaggttcatccaccggatatgaatccccagttatgtccatctgcgggcccggcgtgtctggagaaacgaccggactgatttgattctcgttgtacgcgcttcccactgacgtacgggccgaccttcgaggaccgaagtagtcgtcagcctcgtcaatccgttgctgatacggttcctttgctgggaatgaggcagtgggcttgggatgacttgtcactggtgttggcggcgttactgtcggcacctttggtgtcgcttgggtgtcccggtagcttgccgatggactgtgtgagcgaggcgaaacgtggccgtcaggcccgggtcccaccattaagaagggcttccctttttccagatttgcgagatagtgccaccgcgtgtggttccgtcgaatatggtcgacagtgaacttcaagccatccagaagatctgagacgccttcgaagagcggaagcgcgaagatcgacatgaaacccatctggccagtcgcgagcttgtatacgttgccaagctcaggcggccctccaaagagagcagtctccattccaacttccttctacatctcgccctgattcgcaaattcttcctgcaggatcttggtccacttgtcagccccctccacagacgcgccgcgttc

SEQ ID NO: 7957 - DNA, 891 bp, Emericella nidulans
  unsure (1)..(891): unsure at all n locations
acatggccaggccgttcatgacgttttagttttggagtcgcaaattaggattgcaagcaataatcatcataaaatgggttggattttcaatcgacattggggatgagctccttcgaagccgggacggcctttctcttgtcgaagttgagatctagttgccctggtacatgttaaattactaaattgtgccgacaagcagatcagcgcatactcacaagccgggtctatactagcgttatgtatgaaaaccgtccgcaacaacatgcatatcatcgaatgaatataaatgtctcaaaaacaaaaacaaacaaacaaatcgtagcctatgagcattacagtagaaatagcattataggctggctaagaaggacaagaggggttgtgccgtcgaagagccgccgccccttcagggattttggagcctctcctaagtccaaccagcggtggtgaaactcgcacatccaccatttactttcctcccctcctgtctccccccgactcaggagctcatcttgaattcgcccttaaacctgccctaccgaccttcctctttccattactttgcatcttttggtcttggtcgcttctatcttccacttggctggtgctttccccaccccccgcttctcgactctgccatctcccgaatcagctcctacacctctcctgcttcagcgcgtttggataaagagggaacttcaagacgtgcatctcacacttacagcttcctcgcaagcgcggggactcttgcgttgaatattttgataaattcgtgggtaagacccaaattcacgcccaatccctatcgtcagaaccgtcttcgnctgctaccccagcctttcactggtcgacccgaatccctgtggcattgggttcaagtgtaaatgcgcc

SEQ ID NO: 7958 - DNA, 104 bp, Emericella nidulans
agtccagcagccgtcacagacgtaggaatccgttcagagtagacgagtcggaagagacacctgccctgaacggacgcttcacagcctgacaaaatatttcgccg

SEQ ID NO: 7959 - DNA, 121 bp, Emericella nidulans
atccatctcattctcgcaatgtgcacatgagctctcggcgatcagcaaccctcaaattcacgactgacgccagacgaagcctgcccactactccgcgcgacgcgacgcagtcgagtccgtc

SEQ ID NO: 7960 - DNA, 738 bp, Emericella nidulans
ttcctttgttttacttcgacagtgtcgagtaacatagacatcacccctgggaacaaacacataattagggggcaatggcgccctttcgaggcagttctgttggttgcacattactatggagttccactatgcaagggggcagtgcaaggtatatactgtcaatcgggtcaagtacgtaccatctccaaaggttccggtgacggccactgggccacaggcttgtatttagccagaccatgtctggatttagtgatgactggcttgggcttcttgctcgcagcagaagggcctgactgcgggaacagggcttttctagacaatgccagttcgtgtttttgggcaagaatggctagaggccgcggcggtctccagggcagctgtttctcagcgcggtatttttcagcaatactattcacggcgtgactcttctcaaccttattcctctcagcacgctgtctctcggcactgctcctctctgtacggtttctctcgatccggttgataccaaggcgcgggattttgcgattcctcttggtgcggctctcgaagtggttgctcttcccacgaccccagcgtttgcggcctttcgtggaagctttaggcctaatgggagccatgacgtcgagggttgaatttgctagaacttagacatataatctgaaagagagacgagtcgtagagatatttcaaaaatatcgcttagttggaagtcggtgcgcaactggaatcataacaccg

SEQ ID NO: 7961 - DNA, 612 bp, Emericella nidulans
tgcgcaacgactgcattggacgcctgaatatcggataaactcggacaaattcaaccagcagattggttttagctggagttattggagtcagctatgatctcgcgcgcttcttctgttcttcgtgataaccttataagccgcctgcagtgcatcttcccagtcaagtactacctcgaccaaactcaatccctcaccagttgcacctgtttgttctcagggcttccagacgcccgcacggaaactggctatgaatacacagcataatattaacgttgtgatctccttgatcaagaagatagatatactattgagcggtgtaatcatggctgcaaacaggatgcaatgatcgggcgatgagtttattagagcgccgggcttttcactaaaacaacgttgttcgcgcatgcttatgccatttgattcaaggacaccatatcttgtgcgagtgctgctgcctgaccgtgggaaccatatatgcagagcatccgttttctaacgaacgctattgtaatggcaagatcagcagaagcaagatgacctatttggtatgattattgtggctcattttttacaccgaacgtaagaatccacgatgaaaataatcttgcgcgt

SEQ ID NO: 7962 - DNA, 750 bp, Emericella nidulans
cagccagcctttaccccaagactgctgccaaggacaaattgtcccgtgcaagtcggtttggggcgctggtgggaaagaagtggcggcaggggtggttatacaaagacaggcatgagaagtcttgacttaagaccgcgtaagtccgaaggtatgggtgaaacgatgtctaccgtatggtgatggcgaaatatcgagaaatccttcgaacgggggttgctgcaaggcgattatccaacgcctctaggaagagaacttgattggccgataagcgtggactaaatgtcccagtcacccagtcagaccagtcccaagcaggcgactgttggtattcctttcgctgttctagacacagtcccgagccgtcgtacgagtcgccgcgctgattgggctggcacagtcgctaagagctttgtccccgagttgggtgaagctaaaacccaggtcgggaaagtgttgaggcgagagaggcgtagcaggagaatagatgagattcaagaaacacaatatcgaaaattaatggctttatagttataaccaaaaggatgatggatgatggactgtggtaaattgtgtacagctcgtggagccaagcatgtgacagccaaaaacagggcccgccttccgcctcgatatcagctggagcctgtacggtgggtggtggacctcaaccaagttaccaacgccattccatgattcccatcttatcccacgtctaaccatcgataggtcatgccatacaacctgtcaggt

SEQ ID NO: 7963 - DNA, 885 bp, Emericella nidulans
tcacagttgcgatgaagtcgaatgttgcccgacgatcacagtccgcaggcaacattatggagagcatgcggacacacagtgcaaacctagtggagcaggctgatcttgtaagtcatgagctgattagggtcgctgttctgtggcacgaactctggcacgaaggactggaagaggcgtcacgtctctatttcggtgaccataacgtggatgggatgtttgcaactctcgcaccgcttcatgaaatgcttgataaaggtgctgaaaccctgcgcgaagtatcgtttgcccaagctttcggacgtgacctggctgaggccaagcattactgcatgctctatcgcgagacggaagaaatcggtgacctaaaccaagcgtgggatttgtattacacagtgttccgcaaaatcagccgacagctaccacagttatcaaccctagatctcaaatacgtctcgcccaaactcaaggattgcgtggaccttgatctcgctgttcctggtacctaccaaagtggcaggcccattatccgaatcatcagtttcgatccaatcctacatgttcttcaaacgaagaagcgaccacggaggatgactttgaagggcagtgacggcagctcctacatgtatgtggtgaagggccacgaagatatccgacaagatgagagagtcatgcagttattcggcctggtcaacactcttctcgataacgatagtgaaagcttcaagcggcatctaacggtgcagcgcttcccggccattcctctgtctcagaactctggtatcatcggctgggtcaccaatagtgacaccctccatgctttgataaaagaataccgggaaacgcggcgtattctcctaaacatcgagcataggatcatgttacaga

SEQ ID NO: 7964 - DNA, 766 bp, Emericella nidulans
tcacggatggtgggcaggcggccgctgccggggaggcggaggacgtatctacgattgggggttgcggaagtcagagtggaaggacgcgcgggggcgaaatggcggagatggagaagagtcttgcacagaatgaagctgctgcggaactggagacggaaattaagatgccctcgcacctggccgggcaagttccccttcccaagaggaccaacaagccgaagagacaacaaacacagaagacgtcaaaggtcggccaggtactgggcaagtgcgagcgttgcgggtatatctcaagccagcgaacttgtcatgcttgcactctgctcgagggtttgaataagaacaggcccaaggctgctattgagttggagcttgacgcggaggaagaagagagcagcacgaccctacgcaggcagatggagcaggttcagttggcaggatgagtcgctgaaccaaagtctgctctatcgccgactactagaaatacttcaaaattgctcgggacgtatctctcttgatcaagtctggtcaacctatcctgcaccctaaaagcagaaggcaggcccgccctgaagacgggacccatgccatgcaacctaatgaacgagccacggtatgaaaagcatcccagccttgcgtctagacagcgccaacaccataacatatttgcaataccagttaacctaacccaaaccggtggagcaaaatatactacatataagtacaaacattgtcccccatgacagtctctgaataatgtgtccat

SEQ ID NO: 7965 - DNA, 814 bp, Emericella nidulans
gattgggccactggtgccactgttgacaaccaaaaacaagtgatcgcaattgggtggagatatgtcaacgctcagatattgtattctaattcctgggcagacggccaattcttcccctttctgagctagccggtcagaagcttatcaagcctcagattggttcttggcgcatttacacttgcgcttacacgaggaccggcgtacttttaatgtgacgtgtagatagcggatgacggaagaggctggttgtgatacgaatattacataccgaaaccgcacgcggtaatttgcattcgggagtgctccgcgagacgaaccgtgagattgacaatacagcatagctgtacggagtactctgtactgtgaccaagtgtggaaactgagacaactcttgccctaaaagattgtgccgacccacttcctatctcgcgctttttgcacaaatcacgccagtacctgcagtgagttacaagggtgtccaatctggaaacgtccataaacgagccgtggaagaacctataaagccatacaaaaatccatggaccgtcaagaccttcccggtggggagaagactggctgtcactcagccgtagactgtcacagccagtcacggccagcctcgccgagcaaacgattttcagggtcgaggggtcgaggctcttttcggcggtcggagagccaatgacttatcagccgagacagctcagctccacggccccgtcgggtctcgttctggctggccgctccgtcggaaggaaccaactgtaggactcgctacccgatgatacgccgtagaggcggaggtatgaccgag

SEQ ID NO: 7966 - DNA, 521 bp, Emericella nidulans
tagcgaggcgtgttattagagggagggctgtattaagttgccggtattgttttctagccccaagagcatttgtttagtttgtcttcgtcttatctgctcaagactgtctaccttagcaattcttctttcctcgtttctgtgtcgttatgtcacttcatactttcctgtactttttataccggctaccagcatgagtatggccaattcagaatgcagacctgcgctgcactgtaaagactctggagaccgaactagttacgtgcgaatatcgcacagcacatcaactctcctaacgtcccataatataatacggatctcagccgtacctttgtcccattcaccttgctgcagccgacccactcccatgacggtgccgcaatcaaggttatagattccttcgagtggattctgagtatgtcttgaatcctatccagttgcccataaagtccaatggatattataagcctaatacaccagatattattatataccagataatattattatatatataaaaaaaa

SEQ ID NO: 7967 - DNA, 541 bp, Emericella nidulans
gatgacgtatcttcttgacctgtacctgaggactggccagcaagcatgtgtgcatccagctgggacaccggcggaaagcgggcttctgtttgagcaagtaacaagtcatgtactgtatttctgtgcggctctgggtcagtgttgtccttggaaatcagatgatcttcaacggtatcgtgacggacgacccctgacgtctggggagctgtagtctcggtttctgatcgctcagcttcaggtgaaactaccgtagtgataggagcatggtcgacgtattcaagattgatacggtgtccatcgataacagttccttgcaattccttcatcgcccgcgtggcaccctcattagtggcaaaagtgaggtaaccgaaccctgcatgtttaccgctcctggaatctactgggagattcacaccgaccacgaggcctttagacgagaacacatccctgatcatcgccttggttacattaaacccgacattaccgatgaacaatgattgggacggatgaggttcaggactgggaggctcggaggggttag

SEQ ID NO: 7968 - DNA, 846 bp, Emericella nidulans
atgagagagctaatacggtgaggttcattcggggggaagattacagtgccctactcatagtgaggcccaaggccagctcctgtgcaaaaatatattcattttacacaaactcatgcaagcgtaggcaggaacattaaggccaaatcctgacggcaacagtgataacactgatttcagttacatgactaacacgcgctgataggattaaaaacaacaaaccagtctagcgcctctgaaaagctgagtcttcacaagctaggaacgtgctcagactggggttctgtcgatccacagtgtctagcgttaccgactctttgcgacatgcaagtaggcttagccagtgactattcttaatctgtgggcgcaagaacgggtcttattcacaattcacactcaatacgttctgcacattttgagaggaggaaagcaaaaggttagtgaacagctaaaggttcgactgatgcattttgtgggtgtgtttttactattaggcagcctgtttgactcctttgtgatttgtaggccagatacacttcagtgcctcgtagcgactggcgaccccccaccggtgtaccttgcgctgccttaatgctaatcgaacacgagagtggttgttttccttgtgtgttaccttgctgaggtaccctaactttgattggtagccttagttaatggcttataaaactgccttggccccctaattcttggaataatttttcccggggactattttctttccacattttaaaccttccggttttgcccccctttaggagtcttttactttgaccattgtgtggtgaacaaaaaaatcataaatttgtttatttttttaatatttatttg

SEQ ID NO: 7969 - DNA, 900 bp, Emericella nidulans
tccttctgcttcatctcttgaagatattcgcaaagattttctgcagacaatctccctcctggtttacgtcggctgggatgagtggtcgcgtttcgatacgctattcctatcgcataagggacctgatcaagagctgcatcggaacgatcgacatattcaggaatatgatgttcaaactctatcaaacgctgatttcctaggtccaatgagggaaatctattctttgacaatcgacatctcttctgtcccgtcgaaatcgtagagaatgagaatttgaggctagatggtaactggaaactaccgttgttggagggcagatctgagcactgtggacgtggtggctttgggcaggttaccagagaggtgatcgcagccaggcattatcactcagtccacggcccatccatggtatgttcccctggtgtacgacgagtacggcgatggtcgttgtcactgacctgtatttttgtcctacctagtccgaaaaagtcgttgctcgcaaggtattcaaatccattatagactttgagcgtgagcgctgggtcctaaaagagctccgtaaatgtgaagtccagaatgcacgcatcgtcctccccctcgcaacggttgtcgtcggtggccagtccaacatcctctttccaccggcgcgaatggacctggacaagttcctcgccggtggactggtgtcgccagacgagtgtgggatgatggagctactaactgagctaatgggccttgccggtgcgttgtcacacctacacacatcgctgggcttcaacgtctacggttgccacgcggatctcaagtgcgccaatatcctcatataccctagtcgcgagaacagcgggtcctcgaggatcgggagctggatgatcaccgacttcggactctccataatta

SEQ ID NO: 7970 - DNA, 727 bp, Emericella nidulans
atatcagctgcgtttttggatggaggataaccttctgcctaaggaaatctcgtcccatacggtgtaataatgggctgggcgggctgttcccttaagtgctgtatgggcctgaaggaaaaagtcccagttgcgggcttctgtgatgccgcgatcgaccactgtgccgttgacggggttgttgaagcgatctgcatcctcctggagagttgggtagaagcgcgtgtgatggcgtttgccaacaatgatgatggaaaaacgaggaaggttccttgctgtgtcgggcgcagggtagatattcttgcaggcattcttgaggaggggcagttcctcatcggttacgtggtcatactggccttctgagactccatcacggtagacaataatgttctcggggtatgcggctttgtgattagctgcccagcggcgtagatgtgctttaagcatggagtcaagggcgtcgaccatctccttgcgagcttccttttgaatacgaatctcggcgggccactggccgagagaagaatcgacagatgcgaccatggcggcgacactgggcgcgcctttagcagaaccaggagatgggtgcgtaacatcgataccaataagcattgttttgccctcgccgattatacccaactggctcggtcgtacgacttgattgacgccaccgagcttcagattgaattttaggccgacattagcgaaatattgctcattgggcttgact

SEQ ID NO: 7971 - DNA, 1088 bp, Emericella nidulans
aaaaggattgctcgcctcaagaagggtctggcagagagtcgcaaagggcaaggaagtgacaatagacgatcaatgacaagtgacaatattagcctagctacggacccgacaactgcccttgacgccgagagtaatgaaaatgctgtcgaggactctgaggctgattttgctgttgaagatgaagaagggctccataccgatggtgactggattcctgggcaagacgtccagattgactatccgaaaatactggatatccttgtagggtttgttgacacttcctatggtaagtactcgcttcatacccactgaatgatgattgtttgctcaaatcaggtccagacgaggagatgcaattaactgcattacgctggattgatagcttttttgaaataagccccgaggatatacttcctttcgtcccacgccttctagatcaagtcctcccagcactgtcgagcagttcaacagccgtgaaggagaccgcagcagagtcaatgcgtcgctgttggagtatatcttcagcctgaccctatccgaggatacctcggacgactcgcgacagacctcagcctccaaactaccttctgccataacgaaagagcttgctgagagaaggtcttccactccaactagtaaagccgatatatcgggtgtcgaatccaaaaaagcatcccctcgaaatagcgtctcgtcagctgttccttcccctcccccagagctagattatggcgcggccgttacttctctcacgctccagtttttgagcgaatacgagaccacaagaatagccgctctctcttggctcatcatgctacaccgcaaggcgccgaagaaggttgccgcattcaatgacggaatattcccagcacttcttaagacattgtctgatccatcagagacagttgttacgaaggaccttcaacttctatctcaaatatctaggaacagcgaagacagctatttcaaattatttatggtgaacctgctccagctcttctctactgataggaacctgctggaaaacaacggaaatcttattatccgacaactctgtctaaatctgagtcccgaacgtatatatcgaa

SEQ ID NO: 7972 - DNA, 197 bp, Emericella nidulans
tttatctcaaatctagacatgagtcatgtactaaaccacgactcaaatcatgtatatctgcatcataaggtcagccagctagttctgaagtaaaccaacgtcaagcgtctcgaccatcacgctgatcatccggttagagaggaccgtacgcgagatcacgaacgtcgctataagcgcctgcgcgggtcttgtccccg

SEQ ID NO: 7973 - DNA, 131 bp, Emericella nidulans
caagcaaggcgagctttaccattgatcccctccaccttgaatgatgggccgccggctgtagcgaggacaatctcacgcgatgacgcagctcagtgggagcacgttattgactcctccaaggccgagcaacg

SEQ ID NO: 7974 - DNA, 568 bp, Emericella nidulans
ttcctgaacaatgaatgagaatttgcggcgatccatgggtatttatgtggtatttctggtgcattctgagtggattgtgtagaacattgactggtttccggtggggaagcctggggagcgatcctgattctggaagctacacgatttcattttgatgagaagctccgcataaagtgaagggagacactgaagaaatagtccgagcccgtgggtagaagcagatcataggtggaagaagttggggatgggaggcggagggagactagtggtttgcggggagcaatttgtccggatcaacactcgccagagcttgtccacagaccgatggcttaacgagttactttgtcagatgcagaatagctcgacagcgaaaaacaagacggattattctagctagcgtacacgccctcagcagctggcccgaccggcggctcctggatctcgacagcaagataatgctggacgagggacggaagcgttgaggccacgaggattgacctcatcatctaggtacacaatatgaaacagagaaagcatatatcctgatatccaggcaagacaaaccaaa

SEQ ID NO: 7975 - DNA, 841 bp, Emericella nidulans
gccaaatactttcctcccttcacgaggccattttacgagagctgtacgatgtgatgatgattgctatgagccaaacctcgtccaatcggaccggttatgttcgtcttagaaaaccatatccagcttgaccctgattattccgaggatgctggtgacattgaacgcttccaatcatatgtccgggaaggcctggcagaaaaggccacggagaagtaccaaaacattctgggacaagaggttcccgttgagccagaggaatgggagttggatcatgtcatccggctttgcgacgctatcacgaaacactcagaaaaaatccgcaaacgctatcgaaagaacccagagatcatggggtatgtgtttcgctcccaatgcaaaggcttcacgctaacatacttatcagagtcaatccctacgagatattactagcaaatacccttgtaatatttgcagaggacattcaccaattgttggtccgaattattgaatcggaaaagacgaggcaggaagagctcgacatgaacgatgcttttcacctttacaaacaactttgtgctgtgcgtcagctgttcatgaacgcacttcccgagtatgtcccattataacatgacttgaaaatctgactgacatttgatagcgcctcattcccattccacatcgaaaatgtgctcgaagacttcgtgtggagatggatacgtcttactgaccagaaggtcatggaatgggtcgagcaagcactgcgacaagacagcttcacggttcctgagggtaactcgacatctccggagtccaggcatagtgtatctgtgattgatatatttcgctcgttcatcaagtcata

SEQ ID NO: 7976 - DNA, 103 bp, Emericella nidulans
attaatggtacaggtgcttcagattcagcgtcattaatatattcggtgttaaatcgaatggggcgcatagacaaactctctgtcctccacacgctcatctttc

SEQ ID NO: 7977 - DNA, 749 bp, Emericella nidulans
  unsure (1)..(749): unsure at all n locations
ttagcgttcctgagtcaactcctacagggtcatccgacgctgtggctagttcgacgcccactctgcttcccccggacctgacaagtatccttattccctcttccagtagcggcgcaacttccgttccagtcattcctcaggttcccacctcaagtgttgcggccacccccactccgtcggtaggcatctctgttccttcaagctcctccgtttccgtgcagccggcccctaccacaactagcacggctagctcggaagactccaccactacggtcgggacaacaactaccaccaccgttgaggctgagcctaccgattgggtgccgaccagcattatcatcgagcctagccccactgaaactgagacgtccagcgaagagaccacaaccgttgcccctacacagctaccgggatccatctccccagctggaggtgtccctgatgctcctgaagggtctactctgatccagctgggtttcacccgggagctccgctactcgtttgtcgcgacccactctctgtcttcctcgcaaatcttcttgtacattccccagggtttgatgtatgcgctggaggaagctagtagcgacatcgctatgtttgccatttcaccctatgacagcgaagccactactggttacattgctactgttgcccaagcctacattcccacggagaaagtgacgtcctcagaaaactgcttcacaaccctatntctcgactctacgaccaagctaagtgatccgtaa

SEQ ID NO: 7978 - DNA, 1179 bp, Emericella nidulans
ttgccgacttcgctgccaaccttgtaaaggaacgatccttcctttctgctttccgccgatccgacattggcgaggtctccttctttgagcgacataaccctcactctaagcttttcactctctgcctgatctatgctgagaagaagaacgacatcgatatggactcaattccccagatcctccgtgactaccgctaccacatctactcagatgatatccccgacgtgcgcgtcccgaacgccacttatgctgcccacgagaagctcggattcgacccagagaagggtggtgttgttgttactcgtcctgacagccacattgcttgcactgtgcagctggccgagggtagcggcacagtggatgctctcaacgcctacttcggttccttctccacgaagcccttgggccaggagcaagctagccgtctgtagccagctcggcgtcgagaaaccagctgtatcatgtaaatattctttgatggttgtgttgagtacttatgactagcattattagcgttctttgtatataccagaattcaaaattcttgaaggtcaaggtaccgtaactcaattaacgacatgccgtagttaataattgtagatgggtgctgtgtcctgtgctctctgaaaggccgcagtacagagtacaacctgaacgggcccggccgaaaagcttcatctttgccccgctcggaacttcaaccaccattttcaccacttaactaacatcaccaacttctgagaaacagcctattccataaaatgctttccctcattctcacggcagagctcacagggtaagtcaaagtccaagccatcagaaaatctgataatgttgcaaccagttggtttgcattaaaaagcgtttttcgaccttggtccatggcgtttgtttcctcgcaccgtcaaccaaccactaataagaaacagcgtcacagacttgcgccctcaagataccgaggaggcgccttattactatactttcaaggtgcaatgcacctcctgtcgcgaaacgcaccccaactgggtgagcttcaaccgctttgtacgtcaccatcgctttagaaagcctcccccccccctccaaaactgttcatatcaaaagtgttaacagagtacccaggaacaacatgagattcctggaagtcgcggcgaggcaaacttcgtctggaaatgcaag

SEQ ID NO: 7979 - DNA, 1114 bp, Emericella nidulans
acagctcagagaattcttcgtggtccataccaagaaacagaccgagagacagttcaaacgatgaatggagtgaaaaatcaagaccaagacgctggaccagcttatcagacaaatcaagggagagttcgagggacagatcaagcaatggattccaaactttccaccgcagacctggacgccgtagcatgtccaaaatgaggaatgtgggccggctggggatcccttccgaccattatagtgacagtgaaagtgagactgaggaaatcacaattacacctcacctgctcccttatgatccatcaccaggtatagacagcctgtttgctcggctcgaccaggcacgagacgaatgctgcgcgatgttccgctccaatgaggacgaggatagtagcgccgcagtctcgggtctgggactcattgtgacccgtatgatggaatcagtcctaaaaggccactcaacatgcaaggaaatgcctgatctaaatatcggcgaggtatacgcgacgtatacgaatgctctggtaagtatcactgcctcaatcaaccaactaaccccaatcaagccaaggctttttaaagctcggtaccatctcagctgacttctggatattgcttttcagcaactcgaagcccgaaaccacccaagcaagaacctcctcctggacatcaacctccttcgcgaagaactcgagacgatcatagcaaatatcgtcgaacagctcaagctcatcaccggcctccgagacgatagctcaggtcaagcggcagatgaaggcctgctcttcattgataccgagaatataaacttcgaactcctattcacctcttcctcgccttctccttctccttccacattaaacggcaccgcctcgaacaacgaagatatcgcccaaatcgacctcccgtcccgagccatcctccaagcgatccacgccgagctacatgaacaagaagaagttttcacagaattgattaagcgagcaaacatcctcgagcgccagatcgtgcagcgcgtcgatatcatccaagaagaccacgggaaagcaattctagttttcacgatcgtctcggtgttattccgccactgagttgtctcgagcacctgggataacac

SEQ ID NO: 7980 - DNA, 963 bp, Emericella nidulans
  unsure (1)..(963): unsure at all n locations
ctaaatctcaatactcgtcttccactgaccaatgtagcttgtttacattcgtgatcctgggtctatgcatggaacctggttgaacagggagaaaatcccatttgacaaggatatccctctatcagacggtgatgagttgacctttggtgtagaggttgtccgagcgtgcggtaggtattagttatctcatatccacagaagctcactgacacctttcagatacattcccacctctcagagttcgttgcgagtgtcggtggctagaggctccgtacgtccctgatctgtgggcttgcggacactcactaactctcaggatagaaaggaaactgtacaaaaaacccaacaccaagctgctaccaatactttctctgtccctgacgatgatcttgatgatgtcgagtatctcggtgactctccgataggcggtcagaatgccatcgaccttactacagaccaaacatccgattcaaacgcttcaagtgcctggtcggattgggaagacaatcattctgtggctgaggtcccgtcccccatgacatctcccgcaaagaatgttgagtcaaaagccggtcagcctgtcgacacttcaatgacgctcaagcaagacatgccgcaaaaggttaagcccagcattgagaaagttgtgaactctgagcagcctctagcgactccaagaacgacaccgccctcaatttatcatgactcggaagacctcggcggcgacgaccaatatcatgatgagtattttgctcacagtttggaggaagaccccaacgttgggcccgaaaactggagtattggggccgaagcgggagaggacgaaaacgaggagcagaatgagcaggaccaggggcaggaggaagaggtttaggaaaaagaagagggaggggaanaanaaaaaccagccatgcagaatagcactccccccgccggatgagcttgtgggaatgacgccttgct

SEQ ID NO: 7981 - DNA, 569 bp, Emericella nidulans
  unsure (1)..(569): unsure at all n locations
catctctacttggcactattccactataaaaatgagacaaagcaccaaactgtttatatatagacaantttatctgataccgaatcaacttgcatttattaatgtgccacagtgcgtctagatggccaacctactaacaagtgcatttcttggcgggcatattaactggatatagataccaccggttgctcaaagtgaagagaattccactccgcaatgaccaatcggatttgaaacagacaggaactatatgtatgtggaaggttttggttcatggcacggagtagttactgacagatttgttggagaccaagttacgaagctaacagtatcgttgtgtacaaactaatgagcgcgtcaccctaaagggtaagcacgtcattgaacgatccatcgcctctttggcagggctatctagatgaacttctgatacgattgtaccaaagctgtctagcttattatgaggctcattagcagaaggccaaatatatagtacctgaaggcagcacaaacacttctcttaaacccatccagcttgtaggacgaggaatactttaaggcccaaggtc

SEQ ID NO: 7982 - DNA, 949 bp, Emericella nidulans
tcctaatgctttggtcccaggtctagtcgtgaaatatcaagaatgacatgctggtctgcggcgtaaagatagttccttccccatacagaagccaacatcgaaccgcatgtaccatcagctaacatgctccacggaagctccatcagacttccccataatccgagcctccttcgcccttctctgaatttcttcatcctcacgccgaacatacttaagcggacgcttagccgcgattgcgtccgagtcccggtgacaagcagcggtggattggacctgtagtacgagtctacatcttccagggtacggtttgctggacttcgttagtactgtgcaacaaggcccaaatatatcatgccaagtatggacaccagctgtagtgtgtggtctggtgtgagagttctgaaagcacgaacctgtttccgggtagaggaagtatataaccggcaagaaaactgcattcagcacggtccccacaatccaaaaacgccagcagatattctgaattccgattggtgttatctcgacaatggcgaagttggttatcctttcgcgaggcagagtggtaactttccaactgcagggtaattagggctagtgtgaacaacgtaccaatttgtcgccgtcgcaacagccgcccccttcgtcctcatgggcaatgagttgatccagtcggatacaaccagggtacccctagcattccaattccaaaggcaacatggtaaaaaaagaaggcaaccgaagcagaaccgtatgcttaatctgtatctgtatcggtttcgcgaagcggagcaagatggtaatgacgagaaagcatacaaactgtccagttccaaagagaagcatgagcctcggcggccgaagcattcgatcatcgttactgcgatgcaggagaatatgaagtaggaagttgcgttgcaggctctcaggaggcgggctgtagagttagtca

SEQ ID NO: 7983 - DNA, 108 bp, Emericella nidulans
tatgcccgacataacgctcaggtatagtcggattacggtagcatgcgtcaagagtatgtagcggtttgagacgatgtacaagtaaccaatagagcaatccactgcacg

SEQ ID NO: 7984 - DNA, 139 bp, Emericella nidulans
tagagaactacttcccagatccaccccggataccgctttatctcgtcctgaacccaaacccggcgaagccaaacgtgtcagtcgatttggtcatcatcccttctgctcacgaagcctcattcctctttgggcattcgtc

SEQ ID NO: 7985 - DNA, 143 bp, Emericella nidulans
gaatgcttttatattatcgttaaattattagacgagactaagataatagtattattattagtaatatatcgtaggcaagcctgctagtatggatacatagtggacaatctcatgatattagacaggttaattcaggtatattt

SEQ ID NO: 7986 - DNA, 651 bp, Emericella nidulans
tacactcaagacagccattccgcgatttcttgtgcgctcgtcggggcattgcgagtacgcgtattcgtctctggcaggaactgcgaggcaaatatcgtggatgtaaaaccctggcgcctagatcgacaggtgaattctcctccactatattttagcagctaagaataccaggcactcactggactgaacggaaaacgagtgccctgtaaaggcggacgaatgggagagagaaaaatgcgcgtatgcacggaccagccgatgggcccgccgagccctaactccaccggctatacaagataggtgtatactctgggccactgaaggctcagccggggcccaagttttataagatataaaggccaggtttgagagccctctcgaggaaaatagaaaagacaacacacttatcatggctaaactcgagccctacgtcgacgattactatctctgggagtacattccctcccttcctgcatctatcatcttcgtgctgctctttctcgccgcaacgctcttccactgctggaaagcatggaaatcacgagctcgattctgtatacctttctgcattggaggaatatgtacgttctaaccgctactcgggcttgcttcgggtcctcactaacaccagtcccctgtagttgaagtgat

SEQ ID NO: 7987 - DNA, 629 bp, Emericella nidulans
ccaaacaggctggagtggggaggaggaggccgacgaggaggaggtgcctgttttaagcaagatgaagcaagtggttggggcagggacgtgttaatacgagaaaacggtaagccagcagtttatttttatagcgaggatttgcagcaaatacgacaggaagtcaggaacaggagagaagagaagcggagggagctggtgaattattatagaagaagacgaaggagcaaaaggttattcttattggcctccgtctaggggagctggagtggaggggggtagagatcagagaggaataaaataatcgaagaaaatcgaatgagattaatttcaagatgctggaaacagaaagggagagaaaaagcaaactgaacttgggacttgggactttggaagagcactggacacgccacggaacgccagtcagagactcactgcgttcgacaggagtccaaggagtccgagaaatgcgagagttgcctgattgggctgcatctttttactttcctgtattattattatcgtcgggacatgactggccctctaggcatggctgcgaggagtgcagaacgtgggaagagcctcttgaaccccagaatcagatccaatcccaaaccagtactcaagaaagt

SEQ ID NO: 7988 - DNA, 902 bp, Emericella nidulans
tccggtcagtaactcaactgcgcttagatacggaaaacgtactcatgttgctaccggtcacaggtagttcggggggaaacaggaagagtacggtggtcaatgatatatacgcgagagatgctacaccaggtatacagagttagcgactcatgggtctaatataagaaagggaaagggggggatattgttaatttaccaggttaaccatccagccgagagcctgtgcataaacaaacgctctctcggggatcatttgcctgccccttaagcaatttatcgcaatcgggataccatatgcaacgtcaagcatgacgaccgatgaagaagtaatggcattaaacgcactataaggtgttattgctagcaagatgtaccagtcaaagcacttaccttgatgagccgaggaaaatgcaaccgaatacaatcacacagaacattgtcaggtacaatccattaaggggcacctggagtttggggtgaactctgctaaagaaaggtgaagccggcagtcctccatctctgtttttggccgttagtgcgacgccagcgattctgtcgaaaactcttggctcacctcgcaaacgcatataccatgcggctgcttgtcgtcatgatcgtggtggccgcaaaaacagtgcaaaccagcggaaacctgcaagatctcgttagcatcaaccttgaacttcataggggtcgaatgatgaactcacataagaagacagatcgatcccgcgttgctattagtagcatcatggaaaatctgcaacagaggtgtcgcagcagactcgatgaccaggttgatatctcctgcaacaaaaagcagcacaatgagaaagatcaggccggtggtgataccgatacagacgcatccaatcatgattctgggcccgagaactgtggac

SEQ ID NO: 7989 - DNA, 828 bp, Emericella nidulans
cggtggtgcatatgcatggggatcttctatgtagaactctgtgaagggtattttgattaagattgcagtatagaattccaggttacgaagtatgtatgctaacgttgagttcctgagaagtgaatcaactctttcactcacaaagttgaggttcgtagcgaagggttactagtattgttcgtcggccgtgaatataagtcgtttccgctgatatatatttgtcttaacaacgcattccactcaaatccgaaacttcattcaacataccacaatagtataaatgcattcatcgtccagggtataaagtaattaacatatctcataatacatgaaaaaggaaaatgtaaaaggaaaaggtaaaagaaatgaaaaggggactaaacagaataatcgcgcacttggtaactcggtttccgtaacttgtttaccaccggcggcggttcgtcaaccgggtacggcggtgccggtcgccccgccgcactcacaggcgcagttgtcgcatgcgctggatgcagccccagactctggttcggcattggcattggattccctcccaactcagccgtatcggggtacgggattggtgtctttggcggaacaggcggcgggcccgtgtgttcgaaactgagacgaggtggtgagtacgcttgtgatgaaggacggctcggttcgttggagctgagatggagatcgctgcctgaggtgcggcctgggggtgggcgaatggcgtcttggggtgtggggtgcataggaagtttgtcgtcgttcggctggtacggagtaaagtctccgggaagttcagcagggagttcgaaggtgtttgcggga

SEQ ID NO: 7990 - DNA, 199 bp, Emericella nidulans
gcatgtcggtattcccattctgcctgtgctgacggactcgccataattttatcatgaccttcgagcagtcgatcgatataggccggatcgacatgtacggtaataggttgtgtcgtgaaacacgcatataaatagtcaaatggagtgaagagacatcggcaaggaccttgctcgttcgagtggtacgctcgtcccaaga

SEQ ID NO: 7991 - DNA, 1124 bp, Emericella nidulans
accgttttctgcattgctttctgacttgggtgcttttgaggcagtattccaagcacctacaaggcttttattcatgctatttgattcctggaactgtgagtcggagcaaaagagacatatttctcctggggatctccatacttgtacgggctgttcctccaaccctccaaaatcaccatctatcgaatcattctcatcgtctcctaatacgtcggtcttgatgacttccaccactcgttcaatgctatcttcgagtatccgctttggttttcggttcaggctcgaattggaacgctttatagaatcgtaaatcgcggttaccgacaagcggaactgagcattttctgcctgatcatcaacaattttgcgaacgacttggtagacctgcaggatgagaaggcattagacggtttattgctgtccaaaggctatctgacattgtagcacctctttatcaaggccctgccttaaagttggtctgcctccgcgacgcatctcctgcaagataagctgcttattgaccgaggctgtttgaataaccacctactttttgggattttcaataatttcgagacggataaatgattgaccgggaaaccgacactaaccaaacgtcatccatccgccgatatcttatcagcttggctgggcttggtcatcgtgcctgaggtagcgctggaagacaagtctcaaggcaacaacatgcggtgacaatggggaatacgaacagctctcacaagatatcttctaagataggggatttcttgacccttttgcttcgattcatttaccgcgagaccaccgagtgtaatatacatgcttgacctcttccccgttcggccttgccgggatccagttcaagtagctaacttcttcattgatagagcgatcttgtatgaaaacccactgataaccttcaaagttaaaagcgctaccgtttacgaacggagccgcaatggaagatgcctgccgaagaccaagcaaccttcttgctggtgcagagtccaaagcttttttggagaccgtccagtgccacttgacaccctttcagtgaattcccctccaagggtttttgctggaccggcacggctcatactattagaaggggcttagggaaaattttg

SEQ ID NO: 7992 - DNA, 110 bp, Emericella nidulans
gcaacaggttgagcaatgccgtgcgagagtttgatctgaacgccaatgagcactgggaaaactatcgtcaggtgttggagcattggaagtgcataatgttctatgagagt

SEQ ID NO: 7993 - DNA, 137 bp, Emericella nidulans
cgcagcaagagtatcgacaggcatgacaaggagcgcgacccggccccagagctctgaaggtcccaccaaggctgcggtcgctgacgcgccagacagccctggtcttgcataggcccatgccgtcagtcagaattccg

SEQ ID NO: 7994 - DNA, 1055 bp, Emericella nidulans
atgctccggttccttcctcctggcgcatcacatatggaatctgtacatcacgctactgagcgctatcatcgatcttggcccagaagaaggaaagaaagtaattggacagaaggaatggaaggacatctcgacgcaagttcgcgatggaggcatctgggaaagggttgtgcagatcggctatcaagggcgggaggggtcaatagatgcagaggtcgtatataacctgtgagtgacactttcaaacgtgctatactatgcactaacaagctgatctactcaggggcactcttcttttgaaccattctccttcccaaattatcaatcagcaacgactcgaaacctacctctcctcttacgggcaaccgaatctcgatattgaagagcacctgaactcgcccacgagctctcaacaacaccgcattcgtaacggaggcacagatacaccaaaagaccttgctgcacgagttcggctgatcgagctgtttaccctccatgttctcccaagaaacgaagagtgggactatgccgaggaatttatcaatttgagcgaggttctcgatgaggagcgtaaggaagtcttcatgcagacgctggaaggactcaaagaagagaaagaacaaggcaaactacgtgctgcagcactacagcgcgaaaaggaagccgaattagagagacaagcacaggaagcagatcgtcaaagagcagaggaggctgttgccgcagaaagagccgctcaacaaaagaatcacaagatgaatggtagtggggtggattacgggattgagaaaacccatccaaatgggagcatccgaggcaaaaagggcgagagggtaggcagcagcaaagccggatcgtcatcacggacggcgctgtcaccccccagctcgaagaacctcaaaaagccggagaagcctgagactcgggcgagacaatcacgagcgctggccgcagggtccaaaatctcgtgcagtacttgggcaagtcaatatccaagaaccctctttcgttcttgaggttgctgctgttcctcttgggtattatttttgccttgaata

SEQ ID NO: 7995 - DNA, 668 bp, Emericella nidulans
aggaaggccagtcgtcgacttagccacgccaattcctgcgccgtcgccggcggagaagtacatgaagtagtcatactcagcatcggtgtcagcgatacctgacccggtaatagagtttgcggggcctgggcgtcggcgacgagccacggatggcgcccaggctgcccggttggtggaccatggaatgcccgagaagttaaggatggctggatgcttggtccaggtcaggagatccggcgatgagaacgcgtcgaagaaggtttgttcctcgtaggctgctgagtaagtaggataaatccagtactggtcgttgaagatgcgtgcttcagggtctgcgtaccaaccggggaagacggggtttcctgcgagggcgctggtggcctcactgactagggggtcttgctccaaggccgacacgaaggaagcgagcagcagcaaagatagaatgcgacccattttggagacgatcccaatctgtatccgtatcgaatctgacgatgaggcgagaatgggaacaggaaagaacttcgagcgacggtagagacatcgaggtctggtgggaggggtcaaagctggggttgcaacgcttggacgtcgatcaacaccaacatccattcattctcctctatcctccctgcctatagagccatcgagtttactatttttca

SEQ ID NO: 7996 - DNA, 143 bp, Emericella nidulans
gatctctagtaacgaccgccagtggccagtagatagacataagtcattctaagaaggcagactctatcactacgaccggtcgtacagtccagctgacgcctttgttaagcccgcgatctcccgttccgttctaccaaccagcg

SEQ ID NO: 7997 - DNA, 1244 bp, Emericella nidulans
tccgggccatgatggctgaattgacagacgcaaccagagacactcaatctccgagtgaatcaacgcttgccacaaggtgctctgacctgcatctaccagagttaaggtccacacagtgctgttgaccagtgctgttaaccagtgcttccaggctggcctctggagagcggagagctccagcactagtcctcttcgagcaagccggggtgagacacctcataattcagaccttacagcctgacaattcaggctctaaggccgcaaggtatgagcctgccaccggccgctgaagcccctcgagtctcaaactcgagcgccccacacaggcgtttagactgaataagagaagaatttcgccagctcaacatcagcttccgcttcttccctcttctcaaacgtactagattgacttccctgtcttctatctcaattcctatcaaaatgacttctgagcagacgtaagtgcatgaatatatttttaccccttgcagcacagtttcccaacttttctcttctttgtttgctgttgctgcccctccttgaaccaaccaagctaacttctcaccgtagtttcattgccatcaagcccgatggtgtccaggtacggcattgagcaatcattgtcctatatccgacattatgagacgaatcatactgctgtctttgagcaaaaccatgaactgacgttctcaccagcgtggactcgttggccccatcatctctcgcttcgagaaccgtgggtgcgtataccttccaacattgctcagtcgcgatactggaccgttacaagcttcaagctcgctgctatgaagctcacctccccctctcgctctctccttgagcagcactacagtgaccttaaggagaagcctttcttccccggcctcgttacctgtgagtttccacgcctcaagtaattgacgcttgtgatcgcaatcttataccagaatagacatgctcagcggccctatcgtcgccatggtctgggagggtaaggacgtcgtcaagaccggccgcaccatcctcggtgccaccaacccccttgcctacgcccccggcaccatccgtggtgacttcgctatcgacgtcggccgcaacgtctgccacggctccgacagtgtcgagagcgccaagaaggagatcggtctctggttcacccccgaggagatccagaactacaagctgaacgctttcggctggatctatgagaaggaataaattccctcagagttcatctctaggaa

SEQ ID NO: 7998 - DNA, 126 bp, Emericella nidulans
ctccgagaaaatggactctacagatgataatccacgggctaatttctttacttagtatggcgtcaataccttttctggaagttccgggcctgaatgtctgatcacaatctacagcgttgtgcccta

SEQ ID NO: 7999 - DNA, 704 bp, Emericella nidulans
gtgatgataccgaagatcttctcgacatgggatccggatgcggagatgctggagatgcagggaagtcaatagagaaattgccacttgaaggtcggcctaaatggctgtgccgatgaagaaggtcctctaacttgcgaatcctgctttctgagcctcgtaatttctcctctagcttgagcttctcatctctcaagcttcgaactatttcgtcgctatggagtaagagcgagctgcggcttagatcaaaaatactgccttgtttaaatgcttttgctctgcgccgttgcacgcgcgtaggagcatcgagctctttaaaagcttgggccaactcctgcgcagcgttggctgtaccaggattcgatctcaggtcttcaatgtatgtttcaatgtcctttctggtcacgattggccaatcaaactcatgtcctcgtaggttgacctcgattcccggagtggtggtgtctgtaacagaaaggaaatcttccatattctttacccacttctttcttcgacgctgttcctcgtcttgaaagattgacagttcctctgccagggtcaacgaatcactcttcatcttctcattaaactcgtgccgcttacggactcaatcaaaacagatccatataccaagggcatgtggaagacggagtacagcagatcgaaggcgtcgctctggaaagtaaggttggcgatatgtgcttgta

SEQ ID NO: 8000 - DNA, 728 bp, Emericella nidulans
cttcgtagggaattccggctttctttagggcttgagcgagggtgaggccgaccatacccgcgccgaggataatcacggggagagtgggtgaggtgcgtgtcatggtgataggctatctggtttagctgtctggaattggtggaggacgggaaaatagtatatcttcctgctatttgaatgtattcactacctttcgtttaatattatccctctttatcgccagatatcgatccaacgaagtcctatccaacttgccatggtcagatgcttatcccatgatccaaaatttcatatccgtcggctcggagtatcagaggtagccaagctaactgcatgacattgcaggctcggactaacgtaaacacagtctctcgggcgcggacaatcagggcaacgttaagttagctgaagagccgactgtcagcccgacaaataccgatacatctaacaccggcgtaacagtcaaattcccgaacctcgagggtgataaatatagctcgagtgatatcaaatacattgactgataatatagccgccgaatgttcacccatcgcacttcctgcttcagattttttttatcctaaacactctacgttgcatctaagcaaagccacagtacgaatgcacaccgttcccttggaagattcaattaactaagaatcaattagaaaatggcccaactctacgactggctcgttgaaacccggccaacgcggaagccgttgaga

SEQ ID NO: 8001 - DNA, 943 bp, Emericella nidulans
gaaatggtaaaaagacttaccctgatactgcggtcaagacttccagttaccaagtgcacatcatcaaactgaagacatgacacaggtccagtatgtcccacgaggcttcgatggacttgcccgctacgcagatcccacaatcggaccatgccatctgctgtaccgcaagcgagggccgcatcaaagcactgcacggctccgacaaagtccgcagaagcatccggtagacgtccagacgggcgccactgtgattcgtttccaagtgaagacgcttgcgcactgcccaaaggacatccagagtctgtacgcagcgtccttttaccaagtcccagtgtcgcagtgtcttgtcggcagaacctgacactagtgtatttcctttaaagtgcagcgctgtgacctctccaacatgtgcatcaagagagtatacatggcagtcttctaagctggttgaataagcaaccgacacggcatcgtcgtcctcgtccttattaacgcggttgtctctatgcgtagtgcgagcacgactcaaatcccaaagcttgactgtcgcatccatagagccagtcgcaacaacattgtcctcgatttggaggcaccggactgaggcgttgtgcccttccaagaatccggtacaacggccgatatttaggtcccaaactcgaacagtgtcgtctaacgccgctgtgatcatggtcccgaacggatagtcgagatcgagagccgtaacgacgtcggtgtgcgcctggaactccttgatttctgagccaggggcgaaatgctcgtgaagaactggcatagaccgtttccctgtgaccgttagctgttgctctcaatgcgggagagcagtcatacgtattgatcggtgtttcaagcttcgtggtgaaggccgtttctggtatattgattccgacatgaacgacgcatccattgccggatcttccga

SEQ ID NO: 8002 - DNA, 519 bp, Emericella nidulans
gatggaattccaccaccccggacaatcggccagttccgggtgcagggttgtattgttcaccaatctcaatccacgcatcccggactggccctcgcatcggatattgcctgttgggatcacttgcagacactgcgcatacacgcacagggccctcaaagccatgctcctggacgtcggccgtgcgatcgaagaatgactccgaccggcggaagtagggcagaaggccctggtatccccatcgctggtctctgacagttctcgcccagagatcgtagtcggccgagtctcctcgactccagccgccgaagttgatcgtagtcccacccccgagggccttcccagcgtggacggagtgaattctgttcccggtgtttggctggggggtagtggaatatttccagtcgatgtcggagcccagtagagagaagagtggtgggtaagtcttgacgttcgggttgttcgaagggtcgacgcctgcttcaagtagcagcacgttcaaggaagggtcgtgctgcttga

SEQ ID NO: 8003 - DNA, 1035 bp, Emericella nidulans
gagtctaaagttctagccaactgccaaaccagatgtatcttttttcacttcatgcaaaaggacccgccactcaccgcacgactgtaaggggttaaaggcgtgcttgggtcttaacttggtagaatatactttatcttacatctgccccttgaccacagtcagctaagcagttacaatcaggcaaggatctttgggctcctccttcccacagcggtaggatctgcaactgataaatggagggcagatagtagaaaacatgcgtataacggttgaagggttccatagccagggctaaaacaccagtcgcattaatccccattcagcgcccgcttaccgatggaaccagcacatctagtctcatggtatacggcaaccgcatttagcactcaaaggaaaggtccaaggatagtcccttgtagcgacttggcttcggccgatgggaaactggggtagatggatgccgatttcggctggacatagcgcctcaacctcggccagataccccatggaagaagcgccggcacaggtgcattcgcttagcttgcagtcgactgttacttgaaatttgaccgacgagctgtcgaagtttcacgatgtcgtctaattccaggccccagacaccacgtgggcgcatgtagagttgcatcctgactcattctggcaatacccacaccaaaagagccaacctgtgtccgagttcagaagtctgccttactgcgactcggaaacacgcgtctttccagaaaaaaagtgagggattttcgttcagtcttcgacggccaagctgatcagaataaggaggtgggccaggagtgcccgagagccacgacgccgagtcacatccttatgatgaacgaggtcatgatcatcacgactggcctcacaaacttgcatgccttgtactcggcgccttggagccccattttttgcccggatccgggggagatgagtggcgtaccggaatgaacgccgagaatgccgagacccccgggggtgccgagacacccgactgggctgacgtcgctgtatccgggg

SEQ ID NO: 8004 - DNA, 620 bp, Emericella nidulans
gttcagcggccctcttcatcgccagtttagtaccgggtgtaggggagaggcacattgaggtgcggaatgcggccgaggctgcacgaaatgctgagcttgcgcgacaggaggaagaacgacggcgacaagaagcagcagcagcagcagcagcagcagcagcgaacacagacgaggacacagctggtgagcgaagtgctcaggctacaacggcggccgaaacgcatgaattacagccctcaataccccaagaagcacattaattgtgcttctgtttacacattctttttgtcttgaatcacaagttggcgttactggttgacttagcgtaggcattattaaacggtttatgtacataggagttactagtggcatgagattggaggcaacaatatgagagtcaacatctttagtctatcatatctttgatatatcagagacggaatatacaaacgggtacgcgtagactctataacttgttccccaaccgcatctccccttccgctgaactcgccgtgtctgccatgggccctgtatcaaacgactcctccccattgaaatgccagcctctctctgcaccaccgctcaaaaaactacaatctccgtccaccacacagcccagg

SEQ ID NO: 8005 - DNA, 988 bp, Emericella nidulans
atcccattcacaccacttatgttctcaacgtctcgcccggttatccaactcacgcccatttggtggctaccacctctatggatggagagacgcgactaacatcaatagtcgaccatgaaaaggacgtggtcgaaacaactcgcatgcgagtgggctcgccgtatctgacctactcgccctggctacactcattcgtctctagtgatgaaaacgactttgtacgtctgttgactttgcggcgcttcttcaccaccctggcggtcgctcggatgccgagcactgtttctgctttagcgacgtgcagcccctggcaccctagtgcgcttattggctgtactgggggaacagtaatctcgacgaatcccttacgaagactattgcattccaaggaaaagcaatggcaacaggcctggttctcgcatacctgggttcaaggagaagacccaagcagtcccggggtcagtcgattcttcgatggtttccgtgctgaaagcatcagtctgttacggaatatgacaggggaccgcaagatggtcaatgggactatggtagtcaccatttacgaggaggagacgcacgtcacggcgctgtcgtggaaccctaaccagtcatgcgcgggatggccgctgccgggctgggatgcggactgcttcgaattgaggatctggccatgtagcttaacatcattcttgccctcattctcacgtgcgaatgatgccggtctgaagtgtttgtacatgaccacgacccatttacatatgctctgtttaccctgcatggctgagacttcttggaaggccgatcagtgggccatgattgctcacgtactcccttggaaaacccactagatggcgatcgtacctcaaacaccatgaataacctgaagttccagaggagagaatcttgatataggatcttggtccaaaagcgctgtttcgccggacctacgtaactccgtttgaagaaaccagtttgttacaattacatg

SEQ ID NO: 8006 - DNA, 750 bp, Emericella nidulans
tctatgaggatcaagagcagtgctcttatgacccgcttcttttatgtgaggaggattttgaatggttgccacaaactggggctttagggatttataataaccatccgaacgggcctaggtatttacggttccatttgctttttgccgggcgtttcttgacgccccctttttcatgaaaccgaatagctaagagtatcttaacgtaggcacttcattgcgaccgtggactatgatgattatgtgcgctaccctgcactttgttgacatcccaccggtgttcttctagtcaccgatagtggtcatatgctgacctatttacagaacctggcacgcgtccgcaacgttgatgatggtaagcaatgctatctggaggcaaacgtcgttggttggcacagcacttacttggacttagaccccgacatccctgaagatgatggagattgctactggttgttacccatcattccttaccaaatgggctttcaatgccgaagttcaactgacgcgccatgtttaacgcagctattactccgatatgccggttcaaacagtctgcttccccttccactggagctgcttccaacttctgtctcgcgctctgaaggccgagcctgatgctacagacctcgataagaaagcgctatttgatgtcatggaatcggttaattataacaactgtcttaagcttccgtatggcgacatgcatggcgcactccacgactgggcttgcattcccggcgaagaggtgtg

SEQ ID NO: 8007 - DNA, 933 bp, Emericella nidulans
ccctaaattttgtcacccgcaaagtgcagagcattagtatacgcttagtctcgaaaagatagtatgttgctgctcaaaatcctgaaactgcgccccattaaaattccgttactggtgcacgtttgagcactcggaaggcttattctaacctcgcaagctccgtactgcttttcctttgccgatttcatttctgccttgtacagaggccgcggcagtcagtttgtcctccggcagcgtaagaatgcctgataagtgattctccggcattggtaagcaagatatagcagtacagctttctactctcccacaagatgcgctaaaaggaaacaatgtttattttcatgctgtatacgttgttgtcgcaactggacgtaagagcaggtctcatgcgtgtccaatccgggctcatcccgattgttggaatgttggcgccccaggacatgacctacatatcaaatctgtgcatgccgtgctttctatatgtgtagcaatcgcagaagagaggaaaagagaaaattgaggtccacgtatattcctacatcctgctcgaaggttgaggtagacaagtgaaaagaataaagatgacggaatgatatttgtactcatgctctggcctacataatagccaattctccggtttctaacttttagtcttactgttcaaaagcccaagctttctttgcacataaacctcgagaagcgagccgtttcctgcttacgattgactgtcaagcttcctgtctcgccagcgtccatatggacagtaaaatattccaagcgaatcccacacaggaagggaccagtaacccgtcagtccacgggaacccagagaaagttagtcaaagaggccgaaggccagatttttcacgcattcagatttaagggccaattcttctggtcaaattgacccctgcgttttaagactgcacccct

SEQ ID NO: 8008 - DNA, 632 bp, Emericella nidulans
gccactggcctgggatggcatttcccacgtgcatgcaagcgcttcatgagcaagtttcacgacacgtctcctcaagcatatcaggtttgggaggagtttcaggaatgcggtaagtgaagcagctggcccttcttcaggtgctgtactaagatcgaagttgacgaagtaacgttggcaattagcgtacgaaaaagcgcgcagagatgtttggctttctggtagggctttcagctcaatggagtgccacaagttcacccatttcgcgcggagtgacaagttcattgcatggcatcatgaagggtccatctactggcgatgcgccggataccaagagcatccagatcggccgccttacataatgcataagctgaactacaagctgccttcgggccaactgcgatacctggcagtgtgttcggaggctcaaactgtcttcctcattatacggtgcccggagcatctcgccaagttgagaaagatgcttccgaactccacccgtctcaaggctctccacgaggagccagagcacctgtacgtgaccaatttgtactaataatgtgcaagctaactagaactgagctagggatattatggtcgacatccacaccggtcaagagctatggtctgcacct

SEQ ID NO: 8009 - DNA, 100 bp, Emericella nidulans
aatctaccttttcccgaaatgaagcctcatctaattcgacacatgccactgcatacgcatgtgtaccctattacagcctacacgatattacaatgaggaa

SEQ ID NO: 8010 - DNA, 99 bp, Emericella nidulans
aagtccacagcatgtgcacaatgttggatagcagtgcaagagtgtgtacctagccacggagcgcctggaactcatgtcaatctctacgtcatgttcgac

SEQ ID NO: 8011 - DNA, 730 bp, Emericella nidulans
tcccaatatcgccaccatctcactcctcagtacatggaatagaattagacctccccctaactgcctgaaatttcctccgaacatgcaccgccaaatggctgggtctagttcttttcaaattgctaaaaccgggattgtgcctgttatatagggagacttcgagcgacagtatgaaaggatgggttttcatcgccgcggttgagtaacgggactaacctgacagcctcaattagggttcccgggcccattcgactggtcagcggggctgttatccatttggtgcctgtgagggcaattcactatcaatcactgacatccatggcggaagaatagagggattgcgcagagcttttatgatggagaaagtgagccttcagggggaaaacccatccatggtgatagtagcccggaattgcaaaagttcgctgagtttggcttcagcttctctccagttctacgattatctcccataattagccagcttttccacgtttcaagggcttgtagtggcagttggagctatatttcaggtgcgagtcatggctgtttgcgtacagcaccatagtcctaccctgcaccatcaagctcgtctggcaaagttagactgagcacgattgatcaagtccgaagacatctactcggcaggtgtgtgtcaattctccacggtgccatagatcatctgttgcttcacaaggccaaggaccagtggcaagtgacctatatcacagct

SEQ ID NO: 8012 - DNA, 332 bp, Emericella nidulans
atgagtctcgtgtttccaactctgaatcttgagacgctcagtgcctgtaacaacagctttttcaagagaacatctgtggcggtaaacgcctcgaaggggcgggagatacggcacctggctgtatttctcttgcccaatggtcttataattgcttttcccgagcccaaatatgtgccgtcgatcatcaatttaccgatctttgcctcaggtatgggaccaagatcaacaggacagaccacaaaaacaccaacacaatccaggactacgagctcggcttggtagtcatgcggtcaacgtatccgaagtgctgagggcgaggggggagggggggg

SEQ ID NO: 8013 - DNA, 915 bp, Emericella nidulans
gggttgcattaggcctaaaccacctgcgcacgatggcccttggcaacctaacagccgaagttggagttcggttcgtcgaggccctgcaggcgatctcgaacgaggcctttgctaaacttgggaacatcgacgcatccaagtgcgagaaccatggaacgggaatgaggcaagacgcacggggggcggccggctacagccagtgggctcaatgggtctcgtgtagagctagcatgagcactgagcagcagcgagacataccatttgtggtcccaaatccggattttgggccagcgtcgaccatgtcagctgagaccagttatgcacaggctgcagcggcacccggagattttgcgatgtcgcatcaggacttttccaacgcgattttatcgccggtacctctggatgtcgacccgcagatgatttggagccacgaggaccagttggcgctcatgggcttgactgggctggacatgctggaaatctgagccccccctcccaaaaaaatatcaaactcaatacaactgagactgtttccattatctgctatagtgattgtgtaggcaagatgctaattcctgatccgtaccggaatgtcagcatcctcttttaggccatcccatcgactcttatacactcttccctccttcatcacacccaggacgcactcctctggtcgatcaaagatggtcacgtcctccagcggattcctgctaaggaacagcacatccgcaaagaatccctccttgatctggccgattgactcggactgtcccatcatccttgccgggttgatggttgcactttgcaacaccgtcaacggactcaacgcctgcgctctgagcctgaactcgcccgtctgcgccaaacccagcggcccgaggagatccctatagtagtcgatattatcggcccgat

SEQ ID NO: 8014 - DNA, 1344 bp, Emericella nidulans
accaaaggcatcttcggccccgagacgtatggctatgacgcagtgcatggtttgagctctgcttccgctcttgagaacgctgagagctatgccttcttctccaagtgtaagtttttctattattctcaggtaaaggatgcattactaacatttttccctagcggctttcctcaactgcagtatcacctactaagaagttcctttaagaagtgaaagagtggctagagagcttattattggtattaagcagctgacgggtttgcagtcaaggttgcatccgattattgttggcggccgctgtcgttcatttcggcgcaaggtggcatatcattgtgatgtatacttataagactcttgactcagggcttgacaaaacccgcaggtcggttgaaagtcaggacctgtacccgaagcctgctaacccgtgcagggttttgggtgatcataggttaactgtcaaatacttatttcgcataaaaattctcctagttagtttatattctctgcataaaataccaatttatctacttgtttggcatatacgccatgtatgtactgttggatagcctgcaagttacccaaataaacctgtatttattgaaggtcccgacctataaacaacctgcgagtttagggggtgtactcgaatctggactatcatagggttgaccctgtgacaggttaccagttaccagcgggaggtgtcaagtttcactcctgaatctcaaacagaagttgcagcttggtcatatacatgtatccgctaaacttaaggacctagtgattggcttagattatagacctcggctcgacctccttttgctagcaacacatcactgtagcagccaataaatatatatggttggccgcccattcatcaagatctttgtacatatctgcggctgtttcttgttaacgggccaggactataagaattgtggcaagctagggttcctaattagagactctgtactcaaggttcgactgagtttaacaacgccctcatgacttgcatagggactgattactaccgcaaaattaggcactaacttgtatatcttatcaaagagcagcgtgtcgcaagcaggtataaagctatcatatcaggaagagaaagatttcattcagggatttcttagagattgtaacctactcagaatataatattcaaagcccatattagagttaagtaccacacacataagctacaagtacttgagcccttgggatagctccaaataccctaggcccatcgttgagcggctcgcttgagaaaacaatataacttagagaattgctgcagatcagtatctgccatggcttgtcgcatcaagatagcagggg

SEQ ID NO: 8015 - DNA, 1520 bp, Emericella nidulans
aaaaaaaaagagaaatataaattagatattataataaggaccaacataattaacctattgaataaaaaccctcacaatgattaagcccaaactaaaaaggagattttatattgcgtataccctggatcttagttggaccaagacccccccactgtcccataaaagtctcaaaaggttcccgcctaccccgcataacaaaggaccttaaaaaaaacggactgggcggggtatgtactccacgccaaattgaaatgtccaaattgctggccggccgttccctgaacctgacctagcctgacaagtcccacaaaagcgagccattgtttgcaatgcagcgagagagatggaaccaaataagtccaaatcagctccggtgtagatccaactagaagagggttgaggatgagcgcaagggcatatattatccgattgtgttataatagcgaaaggcttcaggctccgcggggactgcccccgggttttttaaccaaacctgcaaagaagttcgctagtgcttgattgtttgctttttcatccccgggtgaagaaacggggtctttgcgctgggagcggctggcttcccggtcctgcattcaagtaattagcgtcgatcgcgttcccgaaaaagcttggcaccttaccttcagcttctggagcatgtcatcggcgtcaacttgaataccgcccatgttgaactgtacagggcctatatgctcgttgacccggctgttatcctctaacggggacatctccaactgaggggtcttcttggctgcgcggtctttctcatcctcaatcttcagctgctccaagacctccagctgtttggtgaggaaaccttgcatatctaatgtctcgacctcaatcttgttcccactctgttggcttcctgggtatgacagtgaggtgttccgcttgggatccttgatcgtctgctcgtatatctttacggcactggtcccatcgtcttcttcagaagaaccatcgtcctgggcctcatcattcctgtcactgagtggctcaggcggatcctgaatctcgatagaccaagctgtcgaaataccctccaagttagacccttctcggatgactcggattttcgcccatgaatcccagttcgtcggtatcagaatcttgtcacgctcgatgaaattggctttgagagataacttctttaggagagaatgtataccgagagaggaatgcagtacgctgtgaaggttgtttgcatgaaagggcttggtgtatatcagagacgcgccatctacagtgggttagaatagatcaaattccatcgttgggtttctgtacgttttaccagcaacgtcctcatgaattggtggataaaatcaaattcgtcttcgctccagccgtgatcccgctccagtttctccattttgtcggtctgcgcgcgttagcaatggcccgacattaggttctgtgaatgacgtaccccttggcagacaacacatagaggtaccccgagcccttcatcccactccccagggcctatgattgcc

SEQ ID NO: 8016 - DNA, 449 bp, Emericella nidulans
tttttttctcgaggcggtgcccggcacccagctgtagtttcttttagcgggggactatcgcacgcatggcgttgtcctggccatagatgtcaacggggtgaaatcgcaatgggctcacatttacacacaacagactagccgcaagcatagaaagccaagccgggcgcgcctaaagggcttactaactcacattgatcgcgttgacctactgcccgcttaccagaaaacaagctgtcaagcctgcttgaataaatcaatacatccacgggcggggagaggccagcctgtgtatgagaacccttatatggcttgctacgtcaactgaatcggttagttttggtcgctctaactgcgagggagccttattagcttaactgaaaggccggtaaattctggtaatccccaccaagtggatgtcgcacgccacgaacgatgcatagttataaagc

SEQ ID NO: 8017 - DNA, 630 bp, Emericella nidulans
cacacgcacaccaggactttccgcgacgaggccccgggggccagcatcgacattggcgtgcagctccacgaaaatatccccatcgtccgtgactttttcaagcgattaaactcgcctctggcagctttcaagccaacggattttggaaaccccaaatactacgactttaccaaaaaagtggcccttcccaaccacacccgtccgaccatcgagagtgactatgtggccgtgctcaacaagtatcctttcctcgacgatctaaataaccttccggacaatgtgcctgaagagctgcttcttacctggcccgactttgccgagaagcaaaatctctccgctgcatcaactgaagcaggtctgttatggccagcgacccctggcaatcctctggacaccaccgcgctagccatcttcaatgacggcaatcacattgagttggcggagtacgccggggcagcagttcgcagtgccgctcactacaactcccagatttacgacaacgccctggccgagttgaaagagcatgtcttgctgaaatcctccatcattgctgcccagcgtggatcctcccgcaaggacggcgtgcgactcatcgctgaaactccctctggcaggaagctcatcaaagca

SEQ ID NO: 8018 - DNA, 109 bp, Emericella nidulans
ttctcagcatacgagacttctatcctgtctaccgagccttcgtacccttcgccagtctgaagtatcgcaaggattcgctgtagccggtgctcgcgtacacagacaactt

SEQ ID NO: 8019 - DNA, 706 bp, Emericella nidulans
agttgggacaatcaatctaattaagaattatcccggagcaaatatattctctgcactcaaaaaactgtcagagccaagtctcgccagcgaccgatcgtacttggaaaagtgtttctattataagattgcgggattcgtatcgtacggtgccgtgaatgccactctgacacccgttgatgacatttaatactagtactagactactagtagacattcagggttcagtactatgtccctccaagtcgatttcacaaaacagtctctcatatgcgaatgcgatcttgatcgactctgtccaagtttagtaggaagaggtggtggagatggcatgaaccactggaccggctccgttgttccccctgcttcgctcacgagtcaccacggctaggcagtagcaataatgataaatgacaacgatagcaaacaataatcaggaggcttatcctcttgaggtcatgagtctagtgtgatataggagaaacagtagtatttcattccaaggagagctgaatacgccgaattgcggatattacgcggagttactggagggttaccataccagaacagccctcctgctagcctgcccagtgcggtttgcacgatagccccgactgttgctgtccttccgtcacgatcgattcttccctccaacatcctatcctccatctttttctctccttcctggatttctcaacctttgttgact

SEQ ID NO: 8020 - DNA, 1195 bp, Emericella nidulans
gttctgacaatagtccctatcaattcgatcaatgtcgagcatgtttgggcgctcaccggccggccctttcaaactcgaaagctacagcagatgtaacactttacgcccacgccgccctgattttgtatcctccaggactattgaatacatctccggtatccccgtcatccaccccgacagcagctggaccgccaacacctggcacaaacggctgccgtaatggaccggatcaaaccatcgcccagggcgccaatggcggagacgcagatccgtcccattctgaagctgcttttacctcctggaactgaaaaacgaacaccgctatgaagaggattggacaaagtctgggcggatcgagaggggtgctgaagagacgactatcgtggtaagtgagttgtcctatgagcggtctctagtggagattaaggcaatagctgttttataggctatgttaatggtaacagtgcaatctgcctgttgagtcgttgtggttgatgttaacaatgacctcaatacattgtcggggagatcgacggttggggctgagccctagtatatgccttttccaattctctacaaatatggatgcaagtcagctactattactaccaacttctttcttgaaaagagctgtctttaatacggcgttgcttatgccgtctgtaaagatagacctcgatggactattcagtcctcaacaatattttcaagcccgccctggcgtatcgtttactcaagccctgcacaaaagctgccctatcacggtgcccctgtctctgcagtctcgattcacaggcatgcagttctagatcaattgcatttgttggtttcttccttctcccataagatcctggcaagatggaataaatgatgagaagataatggatgtcaatctatggaaactaccttatccgccccagctatttctgccagaaccaggtagtatgtcagactatcttctccagacagtccggggaagcaaagcttggtagtcgagagcttagatatactattctaaggtggagacgagaaggagccgagtcagccacgacaggcctcatcccccgtgcgaagttgggtccctccagcatggcggttcccctccagaacctcggactcagaaaaacctccagcatgataggatctaaatgagcttcaaaagtgctgcaacgcccaagtcaaataacagggatcc

SEQ ID NO: 8021 - DNA, 1197 bp, Emericella nidulans
tagacgggtctagacctggacactcgctaacttgaagcctaaccagagacacatgcttgcccaattcgctttcactgtgcgccagcaacagggcgggctggttcccggcgaacattcgaggattgtgctcgatgagaactgcagtgtaagtgtccctcttctcttttccccttcccctgcggcattcctgccgtttaaatcagtgaacaaggcagggtttattgacggatacctatcggcgtaggtgatgtgatggagacatcccacttatctatccagagtcaggtcaacgtagaagggaaacggaagcgagaaatcatcacgatctgatctaccctgccctcttccctgcttcacttctctaatctctaatcttcgaattcagttagctatctttcaaatttctttatttcagaaaaaggctagactgcttttttaatctccatttttttttttttccctgtgccttaaatgaaaatcgagattccgaattcctgaaggccctggggtcgtccccagtctaataagggagcccgagctcgctatttgctttagtaggagagcgatcttcagccacgacgtcagcggcttggggatcggaggggcgtcggatgctgtaccacgacctttcactacatctatcctatcgagattgctcgatcatggcgcctttgcctggtttcgggtacctatgagcgttgggatgctgatgccatgttgacgttgacagcttgacatcttgacagcaatgttcctgacccgctattagtctacccgtgctgctgaaaacagatacaagcagaatagtaatccagtcctttcggcaatcggaatttctcctgggtggcggtttgtggtcgaccgtgcaacctggttggtgagctggatcggtcgatgaactagccctaactgctcctggctgctcttaaggaagagccctgaaccaatcgaacaaatttcattttatacacataccactcacgatcccagtggagtacgattatcagtcttaaagctattatgctctctggttgcaccttctctgcaaacatgtactccgtagaagaatagaagatggcattcgggtggaacaggtggtggtcgtatgcatatttctgagtcagcgtaattatgcagtagtacggggattcagtctttgattggtgggaagaatgctgagagaaggccgggtagttg

SEQ ID NO: 8022 - DNA, 168 bp, Emericella nidulans
tgtcgcgctagatgcatcgaagactcatctctcatcgttgctatacctatgccttggccgctaaacacgaaaatccggctagctgatagccataccagatcatgcaatgcatagcgctctagctctactctgccatgcccaggatagtcagctcgtagtgctccggtt

SEQ ID NO: 8023 - DNA, 950 bp, Emericella nidulans
ccggactcgttgatgaaaacgggggggatttaactcctgcacatgttggtgatatggtcgatttgactatcgaaagagagaagtggtgtgacggaggcccatgttcgtgctcattcggggagggatggagattgttctttagttccgacgctcttatttctgccgcggaatccaggaaaaggaaacggcgagcttttatagaaggccgattcttgttgtcattgcagtcaaattggtttacatacgggactgaaatccttcgtaataactggggcgaatatcaactccacgctcaactcaagcaatgctctttaggtcgcgccgctttgccgaaagggttatcgaagtattcgtggatagggaggatattaatttaatgcccgagacgtgcatggagagaccgcaatgtggcatgcacagtgagtttcctgcggtcaaaagttgacatctctacgtcaccatttcctggatagtaatacgtgacacgggtagggcttcgacgcaaacatcgagtagctcattcggtctggtgatatactgtattccaccggaatcaattcctcacctcgacggaattactaggactgattggaaatcaaactaggaactggatgttgtatataaaccttcaagcctcctgtctgaagaatgcaagcaatctttctctaagcaatatcatttaacaatcgaaggcttatagctatacatgtacacggacatggccaacaataccacaccaaactttgttgtcctcgttgatgcggacaatgccatgcccgcgacggcaagctcatactgcggagtcgaaaatatggacagttatggaaaacgcccatggggctgactagaccttctaaggctgaaaaagactcttaatcgtcttccagcctttcagcatttgatccccacgtaaaattcgcccgctcgttgacattaacgaggaccttttt

SEQ ID NO: 8024 - DNA, 1412 bp, Emericella nidulans
  unsure (1)..(1412): unsure at all n locations
atgatacccagcctatattgatgcatattgataactgctttctgttcttttccctcctcatccacagggcatatagctgatagtgtacataaagttagaacttggtcgctgaaattctcccacaatccttttcctggtcccagagagaccttacagcgaactctttggttaccagtgactcctcaatgaggtcaaaacggcggctccatctttggcccagcagcggccgatggcgccaacggctacaccacgggaacacgtaattgagcccactgaggctgaagctgataatcaaactagaatttggaatttgagtttggagatcctacgatgatcccaactcctgaaatcctaccttcattactcactcttaaatactctgagattgggacgcgcaatccacaagctcccttccaatagtaattgaagtggattaggtaagcaaaagactccatttcttggccccataagatagcgaaagcaattaggccgaagtttacatagacatacggggtggtctagtctagactagcctagactgggttatggactacatacgggacacggcgcacggccgcacggcagccgttggaacccacagccccatcgaaatcaacaaggaggccaattgagagccgattgtgatgtatcggtggatcggattcaatttccaggttgatgtggttgagattagggtaaagctgcggggatgccagtggcagttgtgcagacctaccaccgccattctgctatggatgatggtgcatgacttcgcatgagattctctgcaacaaagataacaaagaagtaggcaaatagtgtgtcctaaaagaaccatgtatttgttggagaatatacaatcagagtgcttcgttagatgaaatcattaaggatgttaatgggccatacagtggttagttaagaattgcagcaggcgttaatatacataatcaaagatgttggatgatgtatgatgggataaacaatagcctgccaatgttgaaaggggccacaaccagcttgggttacagctttggcttgctttctttgccctgattctgccacgcaaaaccaatctccttcccaatcccgggctcaacaatgacattcactattgtaacggtatcactcacgaagccctctttcgtggctctctccagctcttcctggctctttacgaaataccccttcccaccacacattgtagcaagcatctcatacctcgtctcatagagcagactagtcgagcgcagacccttagttttagcattagttccagagtcagactcggatgttttggtgtcgttggccaccggttgattctgaagtgtcttncagtcctccttcgagatacttgtcaccgggtagatgccctaattaataatgacnaagatcagtgctgggtacggtac

SEQ ID NO: 8025 - DNA, 1159 bp, Emericella nidulans
gattgggtcacatacgttgcactataccgtcctcagcgaagagaacagactgcgcttgcggcgatgaggcaaccatcacgacgtagtagcttttgccctcggctgattcacgtagcgacgaagcagggatgccgccagcggcattgaagcgctccacggaagctggaaagacgtcgaagccatggactgggtagccctgcttgacaaggtgggtggccatgccgaagcccatggctcccaggccgacgaaaccgattgctggcttggacattatggattgcgagtctgtatgaaaagataattaattgcgcgaagtctcagaatgctgaaatccactcctttaaagacagggagctgtaatatggacgcgggggcggggcgctgtgatggggtggaaaaggccttgggctcggagttggtccgatcgcgctgggctcggggctgccaccgatcctcggatagttacttgtccaaccaggtggaagctgatcgaaaaacaccagcggtcgtccggtagaggttacataggttcatgcgcaggactgggcatcagattgggaacaggttgaggaccccccactgttcagcgcgcgcagtaagttctcgataccgcaacggcggtacgccaacccacgctgtcagggagctgtcaagttaagacctcactcccaaaggaattatttattattcgaatcgaaagcaagcaggttcgtagcaatgagggggagggggtgacttcccaaggagaggaacttccctgggggaaaacttccaatgggcggcaaatcggttacattgcatgccaacaaccttgtaagggcatcttaaacttacaaagagcagcgcgcttgttaagaggggagaacaattcagtgcctggcgaaccttcaaccttggaaagaggcagtcacgcacgatgttgtgctggtgagtatttgtgggaagggattttaaaggcggtttgttttgtatacggatttcctttttcccaaggtaaaataatttttggaacctaaattggcttttttgttaaaggggaaacccggtgttttttgttttcggggttgtttgcaaccctttctaataaacacggtggcaggggttttttggaccccttttttttcttgtgtgaaagggaaaattgaattttccggttttg

SEQ ID NO: 8026 - DNA, 1056 bp, Emericella nidulans
acatttgatatactaagtactttcatcagctcttacagttttctactgcaggacgaggctcggcattagcttcttttagaacgccccagattagcggtccagagtctgaccgataaggtagactgaggagtaacgagcgtcgaaggaagaagtaggatggatattcaccaatcgaatgattgtggtgccgtaggagacacacagggtaaccaggcatggccggtaacaagaagcatgtagcaggtaggtaaatatagctgaaggcctacccccaggatagcctctattactgtcatagcggcaggctagcttatagatgcggcctcagaatccagaaatacacatagcagtacccgttgggaaatatgtcttcatctcctgacctacgatatacagcttcagagtcaaaggaaggccagtgcttgttataactcttcgactcgtcggatgttacaaccgaactgccagctgtttactgaaaaagaggatataaagaagacccgctttgggagcgccttgtcccaccttgtcacatcctatttctaccacttctcaactggaacgcggttgactgttttggatgggagtacgaagaaaagagatgagttcaagacattccagtttatttcaaatctgcatactcactaccagcagcagtccatgtgggtgttaatgtagagaaccttggatacagaaagtgtagcattgtaagccttcttgaccctaggccttcgacctctgcttttccactcccctagcattgccacgcccaacagtggaactctaataaggttctcagactaatcgcttcttaaacacagtcgtcggtcactgggggctacaacgcatgatatgagctttgagaggaagtttagcctgagagtaaataatttgcagtgcgcataaggagtctcatcaccagtcgatattgtattcagattatgtgcctaagttagttatgaactaaaatttacgcaataatcacaccgattgagagactaaaacgtactcagacaagttcctggccttcactttcaagcccaccaagcccttttt

SEQ ID NO: 8027 - DNA, 125 bp, Emericella nidulans
tggagcgtgcaattcgtaacgtgacatcgactacagaggatacggttcctcagatggatgcatctacgcatacttgacagttctgacaccggacaagacagtgtacctgagaccagttcaggttg

SEQ ID NO: 8028 - DNA, 506 bp, Emericella nidulans
agactggctgtggtcacatgactgcactttctctgcgcagttctccatgcaggtgagcctcttgaaaggggttttctattgcattatcctccaaggtgcctttctcgcttcgacatcggactgcgttaatgtatcaacttcgggtggcagtcaaaaatggacgactcgcaacgatgagggcttttatctcaagagctgcctatattagaagtcacccccgaccacaagatataaccagcagccagaatagcacctcctttatccttgaaccaatatgtggtcgaaggtctaacgtggctagcctggacaaacagaggttgtcatcccgggccatgataccggcttcgactaagtcttgatttgcagacaagtattcggcacggctattacaattattcaaacgggcatcatggctagtcgtgcggattctcatgacgctcatacttccgaatctttctgacgagttaggcgggcaaggacgaagatacctttcaggccgaggaggg

SEQ ID NO: 8029 - DNA, 1337 bp, Emericella nidulans
gaaaaaaaaatttgtgggggggggggaaaacaacccccgttgttggaaaaagaccccaactttcccccaaaaacccggggggaaaaactatcatataaagggtcctagctaagggtttcagagattcaagaattgggaagagggcccctccccagcgggtacaagtttcctgcaatatcgtccacacaagttggtcggaacgcggccacaagttctgtcggcattgtgcggacgcagtcaatgccattggctgcatccgcaagagccgtgcgggcgaccaatgaaatcttttcagctagctggtcgctgcgcatcctccaagggtcgctcggcagtggctgccgcaacacaacgaatccagaaatgctgggacacggcaacgagcagcacacgagccaagccacctgatgtacagcataattccggaccagctgggttccgttccgaggccgttggccagttcgtcgaaggcggtgaggcctccattcgcctggtccaggaagccagtatcatgcagtggttcctgcgtctgagaataagaattcttttgtattttcgctcaccaacgaggcctaaaaagtctaaagagtggcaatacccgaaatacagtcttttcccagtttgagctttcctaccggaaattttcacacgggaagtcagcgattgtgtataaacaagaaccaaatatttctaactcttggaagtgtttgtacggtcaaagtatgaggtgctgcagtgaggggatgaagttagctagcagccaagagccggctccaagccccgcagcaaacaaggctatggcagcggcccagctaacaggttgtgggaggggtagttggggataagagccagaccggacctaggccaaagtaggcaagagtccgcagcagcgcgggcccgagccagagcgagaccgactggcgataccgttcggtgatctatcaaaaacgttaaatttaaattaataaatcaaattccaatttaatggataatggacatggcggatgtctaggaacctgaacgaactcgttccatgccacaaagcctaggagaatgtcaaagaaccaagccggaaaaagcggcggaaaaaagccgaggaaaacctgtggttgtcgaggtggcctgcttccagtttggtacgagttcgttacacctcaggaactggcaggaacagagatctctcagagtgactggcagtaatggcacgagacgtccagtgggccctcatagtgggccgttcgatatgatcatcgacgatttgcgggctagtttcagaaccccaggaacattcttgagacggactttggctcccgccgatgatttaggatttgataaaa

SEQ ID NO: 8030 - DNA, 1213 bp, Emericella nidulans
ctatgtgttggaatagtattagcatggagctatctttgatgcgcctcacttacactcttctgctcccgcgaacccgcttcagacccaaggtctctcttcgtgtatacgatcagccgtctggtcttccccagtgcttcctcaaacatgggattcactgatgtgaaagggacgcgggtgtctctgcactcaatcacatagtcaattgaagatagcatatttcgcattttgttcagtccagcgcggtggtgaccaaggaagtaggaccgtgggatagatgcataattgggaaacgcctgacgcggcacaaaagaagccgccattatttattagcccctaacaaggttgagatgaattggccgttattgaccgcatgtcgatcgcagaattgcgtcttgattgcggaagaaatgcgatgttttttgacatattctgccagagggtcagggcggtgtaagcagccttgctgaccgctcccttatcgcgtacgcctagaaagctgcttccagtacgatcttattcaatgaagttgtcgtagggatttggagagatctatatagctgatactggtacaattgggtatcctttggcagatgcgctgtgatattcccctctaataacatatatgaaaagtattataaatagggttttgaaaggttacgctcttcatccctggacaaaatcatgaaggcggtcaataaccacaccaaagatggcgttcgcgctgtccccaataagctgctcaaagtgacggatagcttcctcttcagtcatttcaagatggaacctctctttcactttcagcacggccttatcaggctctacacggatgtctgcgatattggcgtctaccatcaaacttgaccaaatgaggattaggattgctgacttgcgtaacgccgtatattcttgaaaggcaaacttgtttacactggagggaaaccggaaaaaaaacccggcctttccccaaacgggttcttccaaattgcataaaagggccaaatggtctggggccccgcaaaaattaacccaatattggtgataaaaaggctcccttttgaaagggaaaatttttttatttccggggagaaccccctttgattaattttacaccacaaaacccgggggggggagttttaaaaaatattttttgttggccccccacaagggggtgtttataaaaaatatttgttctttgggggcccctcaaaatatt

SEQ ID NO: 8031 - DNA, 102 bp, Emericella nidulans
ttataatctaggaacgatgatatatcgtctggatgcatgacctgaatacgaatttctcttatcaatcacgtgcatctacgcttgtacagactggtggtagta

SEQ ID NO: 8032 - DNA, 867 bp, Emericella nidulans
tggttttcgaccgcgctcattctccggaccgcgttggatctaggtcttgaaaagtctcttgacaccctgctggctcaaagctcaccaccgagaagctacctatcggcgcggatggaggaccgacagctcgtttggcagacacgcacgtggctgatttcgtccactctcgaattggacgtcgctagtggaacagggcggaaatcacgcctcggcgatgttgatatctcgaagctgcgaaaatttcttgattaccctctatctcttcatagtgacatgcggaccgtttctattattgaataccatcagatccgaacaagagggcggcagataatcgagaactcagcagccgctccgatcatacatacagagcttccagcaatcatgcggaagctccagcaatggtgggaggaatgggatgagctacaccatcgtaggttctacgtttatatttttttttctttgacatctactcaccacagcagaaaatgcctttcatcctggtgcatttcagcgctcgtctttaaagctgatgttaaactatgccaaggtggtaataagccgtcgaattaaaaacccaggttaacgcatgcaggtttttacgtactgtgcggccatagctagaatacagaaactgcagcagaccccggaaggtgatcaaggcatcagctctgatgctgttctagggctatggaagtcactggtcgaggtaatcgagagtcagttgacgctattagtgacggagtcggcttatcgatgccaactggtctgggccccgacttacccagccctaactattgctttcatcagtgagtgccggctgcaccgacgctcataaaacgaccatgctaatgtggctacagcaacgtc

SEQ ID NO: 8033 - DNA, 680 bp, Emericella nidulans
gaagaactggggttgcggtttttgacggggcggatgatgttgaataaacttctttatctcaacatcgcgtaggtatgttattagaggagaaaataatgaatattaatactgttgacgcgttttacatgctgcccctgtggtgaaatcagcatttagcttgaccacttccagaaaaccccaagtgacggggtcacggaggccacgtcaggtcaggtctgatatgaacttcactagaacgagactgcttcgtgcaaaggagtgatggacaggaacagtgcttggattctgagtatctaccgtatcttgctaagaattatagtatggagttaatgcagcacgtcaagcttggctgattgaaagcatacaaggaggcatagcccagtttctagatattcgcagcggacgtgaaccctcaaaaagcctgccctagacaataggcagcgtgagaggttaacggcatagcgtccaaagatcgcctaaactggtcccacaacagcaatgtgtaatcgcgttggaactgaatatcagagttcctgctcagatctcttcccagcaactcgcatcgggacggcattcgatcgattcctagattcgggccttgtgactataataaatcaccaactgagattcttcaaaggctgcgaagtcttcaatttgggcccttcctcatgaattgtatg

SEQ ID NO: 8034 - DNA, 1640 bp, Emericella nidulans
tacctatgttgacaaccaaagcccccaagtcataggcaacgaaaattcgagcgggctgggttgtcttctacgtattagttttttccccataacactacgttgaagttgccacgggatataaggacactcactgtgttgctgctgtcattgctgtcactcagggagacaatgtcatccagcaactgcacagcctgagtctggaccgtgtccaggactaagtccccaagaagaaagcttgagatatcgcattgaaaaacaaattcccttcttctggatgttgccgtgtcaccgagtatcgtatcatgtctcaactgccgctctttgtctagcccaataacgtggatgattctattgtaatcagaaggattgcacagcagagcttaggatacaaatttccagaacttactcagacatccaaaggttcactatcctcacttggtagtagttgtacagtgttaaccaatttaagccggtggatgggctctcgggacccttcagatacatcatcgctgacgacgctggagagatccgaatctatgagctcaagctcgttctgtggcttatttgattccattgattatcatgctcctactaaaggccatgaagcggaaattgacgaagatcaggactgtatgcgcgagatctaccgctgatagcacaaaacctcggcaaaccactttgtgtacagcaatatgtcagccttttcagagggttttgtgaaagcccatcgggtaacagctcttcattcgaaatgtggtcagcagtttgtgcagtgacagggctagctccattacatgatagccagaaactccgctaggcatctctggcgtcctgtcagcctcgaagcatgcgggtggcttctattgcaattggccaacaatacgattgttgttagcgctgacgctttggccctcgctgcatcacagtgatagctttcatttccagtccgctccggaagccgttagcgtgtcacaaagcggacgcatgcattccgtgcggctgaggatggtcagcggacgggaaaaaacagtgcatgcatcttgtagacgtgattacatggtccgtctgaacccctcttgagaatttctgaaatggaaatgttcgagtggcttcagctgcatttgatcagggtggagcgtaggcgaagaattccgccaaccgatcttctcagtaacataaaaggcttggttatgatagttgatcattgctctgcccgcagagtagacaacttgagaattactggactctcgagctctggcccaaccatggacgaagacgaattatggctgagtgaggaggttgaggacgacgaagacgaggacttcgctgatccatgctctttcacgatgacattgacttaccagggcccaccaggaggtatttcagctgaagcccttatataacgaagatattctgaccgagcaaatctgggaagaatttaggatacgcaaccagccgggcgagcgccacgccctcatgtttcagcgttccgcgcagggccgcgtaaaaagcctgcattcaccgtcagttgcaacgccaaagccattatccacggcgagatgggcgggaaatcgtcgaagaaagcaacactactggtatacgagttcatgtttcgatcttatcggggggcgcgctcaaag

SEQ ID NO: 8035 - DNA, 615 bp, Emericella nidulans
cagaacgctgtctgagtcgagctgcgtcttatctgtgttgcaaaacagatttccagtttcgatacctagtgcgtttaggagtcagtgcgcttggagacaatgcttttgggtcgttatctgccacatcgcaactgacgccttgagtagttccaagggccagacccgatcgacgccacagtggccatcctgccaactcagattatgtccagtagcgctgcagagagtcagcgacaagactggatcaggtctcggaggctgtccgagtaggtgagggtcggtgagggcaccaatcagggctgtgtatgcttgctgactcagcaacccgggggattgcggggaaccgctacagtcgaaagacacgaaggagccggctttcagcgtcatcccagacttgctcctgctcatcccttgcctcatcgtctatctgccttgcatcgtcctgactagctccatctttggttcagctgtatcgatgggtatcttcacccgccgatgtgactgccatcatcgactttccacttagctggacgctcagctccctacttgccatgcgaatcggtaggggatgcgagcgttgtcgtcttcgccatattaaatgcactattggtgaaggtg

SEQ ID NO: 8036 - DNA, 990 bp, Emericella nidulans
gttcctgctgaggatggagataagttgcggcatacaacattgagctagccatactactccagtgactggaagcaatagccagtatccgtggtacacctggagtctggacccttgccctttgttgccgatcatcctcatatccgagaatgtccgcctgacccgtgcctgattccccaattgggcgtgcagtcagtctacctactgtagctacctagtgcactgtatcaggtaggacttcagacgttctgttccccaaactcacgaatctcacgggatacatgttcatcgacatttatcttatgtcgttgaagctttattggttttcttctcaggacgaaaattgcaaacacattcaactacttgtggtcaggacggtcatcggttcatcacgccaagtgcattcgttccacttcctgagacctgcttgcagatgttccaacgaggaaataagtctctattggtatcaatctttctcttttttaaggcgcatagtttagtaccctagaataaaaagttcaacttttacagctgaagtaatccgacgctagatgtcatcgcacttcccattgcacttcccaatgcactcccgacaacagcttgacaaattgcgatgcaagcgtctgtgattcagagtacatgattcaaaataatggatgctacagacgaccgacaaccgacgagccaaatgaaagccttcttttcctcttctcctattctccagctgtaggtggtgtacgcgattgacggttcgaactactcgggttacattgggctagggcttaacccgcagatgacgtcaccaaacaattgctgggtttatttcgaacaagattcctaaagagcaactcacgggcattctactgctgctactgctcctgctcttagatcttggagcaaccgttttcggtagaaaggtggtattaccctaaaacgattaggagaagtccactttattgatgcgatctgttgcggccggagacttcttcgccg

SEQ ID NO: 8037 - DNA, 887 bp, Emericella nidulans
  unsure (1)..(887): unsure at all n locations
gagaaatcctcgcaagggctgacgcgcgtttccatcggaccgagccacctgtcttggactctcaaacctggtgagacatttgactcgcccgagtgtgttgctgtctactccagcactgggattggagggatgtcccgtcctctccatgggctgtatcggaaacacctaatgaagagcaagttcgcgaccgaagaccgccccgtgctcttgaatagctgggaggggctgtattttcatatcgaccaggaccggatgtaccgtctcgcacaggaggcggcggcgttgggcgtcaagctgctcgtcatggatgacggctggtttggggacgagcatccgcggacctctgatgatgccggcttgggcgattggatccccaatccggccagattccctgacgggctgacgccgttagtgaacaggatcactgcgttaaaggtcgcgaattcgcagagaaacatgcgcttcgggatctgggttgagccagagatggtcaaccctcgatccacgctctaccagcaacaccccgactgggttcttcatgctggcaattatccacgcactgagcagcgcaatcagcttgtgctcaatatgagtctgccggagtgcaggagttcattatcagcgcgatgtcggagatcctaaacgccgctgacattacatatgtcaagtgggaccacaaccgcggcctcgaggacaccatctccatgcgcaaaccacgcctatatgctaggcgcctaccgcgtgtttgatgtcctcaccacccgctttcctaatgtcatctgggagggctgccatcgggcgggggcgcttcgacccaggaatcctgcagtacttcccacaagtatggacatccgacgacagcgaccggtcgagcgantcttcatcca

SEQ ID NO: 8038 - DNA, 1246 bp, Emericella nidulans
catatgatacagcgcccggtgacagaacaactgacaatttcttttcccaaccgtgggtgcagattggagaccctaagtttttgttcatcaaaagagcttcgcgcgttggcgaccgctggaccgaccatgttgctctgccggggggcaagcgagttcccaagaacgccaatgatcgaacagctgcaattcaaaaagcttgggaagaagtgggcctcgatttgacaacggacgactgcatatacgtagggaatctgcctgagcgtattgtaacatcgagctggggcagcgttccgtacgattcccccttgtctgctaaacgaatttactgatcttgttaggttgatggttctatgcccgtacatctttctcctaacagaatgcgactcccccatcctcgaactgcagccagatgaagtcgcgtcaactcactgggtatccctaaacgtcctcttatctccatcgtcgcgaacggtagaacatgtcgacatgacacaacggcttgcaagtacaggaggactcatggctcggctggccagccgagccatgatgggctacatgcaattctcagcgatcagcttgacgccaacggaatccttgcagtgcagtgtgaacctcaagcgcaatctcgcgacagcgcaatcttcgacctggcttcaaaaattgaaatccacactttgtaattcgcagcatggcccaaaccaggccccaccactccttctctggggccttacgctcggcatactagccgactttctggatatgcttccccctcacacagccgttcaattatggaaataccccaatttcacgtctcctgacttgcgcttgatcgtgaatattcttacctatcgtttgcgaaagcgtaatatgcatcaggtaaagtttggagcgcgccgccgaccgagcaatacagctattgatggcgaaacggcagcgctaccggttgtcgaagtgcacgagaatgatgaccgcaatcaagtcggcattggaggacttggagttggaaggtactatggcccttctgacaaaagccctgacggcagtgcttatgcggtgggcattatgcttagaggttattaccagaggattcgacttgcactctatatctttgtcgcgtggcgggtggcatgggatctgcggcggctttttatgtttggaaataccttcgctcccgggttactatcgggctatagatgctagctagaatttatagacttttctaatacaatcaccaacaacatgaggc

SEQ ID NO: 8039 - DNA, 1364 bp, Emericella nidulans
ccgccgggcaaagcgaggaatgtatcttgccacatatggaggtgatggatttaccgacaagtgctccgatgtgccttcgtattcattgtacacgtaccacaagctagatttgtcggagtctgtcagcaatgatagcctgcggcgagatgttacaacgaccttgatatatgaatctgacaagtccgcacggctctgaaggagttcccaaaacattttccgacctgctagttcgcattcgtcaacgtcatgcaacaccaaaagcccaccattctcaaggtctgaggatacaagtattaggaaaagattgtgaagatcctcatacgtccagccccggtgaaacttgtgcatatcaaggagaacactcgtcttcggcatggataatttgcgaaatgcagagtcaacctgtaggatggcggagcatatcatggaatctatagtggcacgcacaggatcgtcggctgagaaggaaaaggacatcaccggagtgtgatacttctttctaccctggagttttgacttccagtcgaggaagacctgttcagctagaaaccttgaatgttcctcatccttcccttggatatataagactggcgacttgggtccgatgatccaatcattatatggcttgcttcgcagcacctcatggggagactcagacttctcggaggcgtactgatgttgtgggtgtgccagtggtagaagcattcgctgcagtgccagccattccgggttgctcatccaatctgtccgggcaatcagcaaccgtcagggaatgctgatgtggagtttaggccaaaagactaggaactcactctgcttgcgatagcacactgcattttccaggtcataagcaggctcattctcgctgttgaaatcctccggcacagtgatctcagttgatacaccaagtgttgaagtgaatttatcgaacacctacacttcgtgtaaacaattagtttctctgtgagcagagcaaaacatactgcataagcattctttgaattttcgctggcataaatgctgacaacccgagtacgcaaggtgatgcgggactcgaggaataattctgtagtttcgaccatggcatctgtcaaatatcggacgcagacaggaactacaagcgatgcccaaaggcacccttgactgtctttaagtagtcccaaaccttcacgtcgaattcgtggaaatcccgcctccgcagaaagcagtgagaatatatctgccgcacgaatcaggagaaacggacgaaggagggtagcatcacatacaagttgtacagcgctgtaaaggactccggaccaaagctgctctctcaaggacaaaatagcaatggcctggaatgtactcgttggcgtgcgaagttg

SEQ ID NO: 8040 - DNA, 1710 bp, Emericella nidulans
cttgctcctgagtaacctacctaggagagcaatggcagcttaaggtttttctgagcagtggcgctgaggacagcgagagcgtccgtagcgagttcgaagacaccgtccaagttgacgtagagatcagcctcagcagcaattttggcgcaggtggggataaagaacccaagaccagcgcggatctcgagctcgagttcggagtcgacagaagcgtcagcctcgcaccaagccagaagggccttcctgacagaggcttcgaggtggacaccatcgccagccttaagccagtgggcaagcttcttacggtaagcgaggtcgacggagccagccgtgcaaccaagggcaccaccttgaagagccgcagcagcctcagagctgataccgctaaggacgttggctggggtcacaccgccagtgaggatgttctcaattgtgtggatgatgccgctgataaggccaaaagtgcgggtgtcgagctgggtgctaggagtagcagggagggcaagggccgagccggccagaccagcaagcagagcaatgctggtacgcatggttgcgtcagtagtataaaaacgaaaggctgagaatgataaagactattctcagagagaatggggaaaaatgaattgacgtatcaaacggttaacgacagactggtaaaaaagtatagtgtaaaaacgagggacaggcacagagccagaaaatgacagacaaaaggcttgttgttggttggaagaacgaggacgagcagtgtggagggttatatacttcccctgagtgtccgtacttggtccgtcagcccacaacaagggggctttgctcctgaccatcttccatggtcaaggatcttcatgctctctgccaagtgggccgtcgttcggtccgccaaatgtatatccacactacgctggatgtggatccgggaacccctcaggagccaaacagatgcagagtgctatttcaggccacggggtttgaccaggccagaaaagggcgagtttcattatttcatgcggtggcctgggtgtgctgactattcacattagacccggccgtccttagtctcttaactggaaatcttgccaaaagcgggtaagaggacgttagtagagtctttttgacggagccgattaagccagcaattgtacggtgcgctcgcagtacttgcaggcagttggagcagcgatgtaaccccggcacaactctctctactaacaacaacagtcacaggccgcatactcaaggctgcggggataagcactgagaataactctctgggtttgacagacgggcagccctccaggcaatgtttgtgtaactggaaatattccgcatagccgcattgttcctgcatggtgccgaccaatccagattatccagtctccgaggcgatcgtgctggctataccgaggtaagccaatcagcgagcgtcttcattccaaatctgattgcgcacagagagtaaacgaaagcaacgctaagtgtcatcctatccctgaaagatgttgatactttttttagttgcatccagaactctcgtctataaggtggatttgacgtctgctgcgaggttcatgctccggtttcagccgtcgacccggatcattgtatgcaagtcttaaggcgtgctgacatgctcgaaaaaatctccccagcaacttgaaactttggagtccgtgaccatgatgggtgggcctgatatcacgtccg

SEQ ID NO: 8041 - DNA, 1157 bp, Emericella nidulans
accaaagcccagatccatatcatccaaacgcggtctcgcgaattgaacatatcctcgacgctaccaacaactatggtgctcggaatagcggagagaaacccgctgagcaatcgaccaaaaactacacctttgacggatgggacagcagcgatgatcacacagcaaatgctataggtggctgagctgatgatatacagcttcttccgcccaaaacattctgagtacggcggtaggatgatgcccccaagagcttgtccgagcaaatacctgcaagtcagcttagcacgtagttctttctgcactaccggaaacacagcagattgaacgaacactgtcacgaagatgaagatagacaacccgttggatatcccaaattctttcgtcgcaatattcgcagccgtggactgttggtgtcagcagattcaccgagtgcgggcgtttgacagaagcaagggacctacaccagctgtactgacagccgtgctgcacgcatgacgaaagattagctcatttcagcactgtcgaatcagagcaggtgataacatagaacatacgtgaagaactcgagaaagatcaggagtgagatatcgtgaatctttctggaaataacccagttgcgagggtgcctcggattcccgacagcccattgaatatggtacccgtcagcagcgactctgagcccgtactgggctagagactgctgtaggatatccttgtcggactctagttgagacatcgctatcactcccgcagagtctgattcaaagaggcggttcgcgtcactttatatactagattaggcgggtcttgaatgcaagtagactggggataacgagaggaaagtaagcgcatagatagccagccattgcctccgtaggttcttgatagtgcctaaaagtactctagcagagttagcatccgctccgcaagacaagggggtaaacgaggagagggagaccgagataatcgaatgaatgaatgcatgcaagggatgcgatgtgatgcactgactgcttgtatgtcacacccgaagcctttgtgtaaagtccgacccgtcaaccaacagtattggtccccggtgagaattctggatgggcccatttggagaacctgcattccagtcgatgaaacttaacgggacataggcagacggggtt

SEQ ID NO: 8042 - DNA, 1601 bp, Emericella nidulans
aagtcgaggagataaaaagtacacaagcagaaggagccacccggcgacgcagctattgaattggtaggcacagtaatcatcacaaagtcaagcgagaaatgccaaatagtcaaaggccgagtttccgctcttgaaaattttgtctattcttcgtcgcctgtcccatactacctcaggattcgacttccgcttgatgtacaggatgcgatgttgcgggatgaactcctcgtccgttgaatctctcttccacgagttgagactcgcctccagctggccctcgaatcgatcctcgtagccgataacaaagtcggtgctatcataggtctcgtcccatataagacggttcagtatatctacaataacgtcaggccagattttaagacggaatgatgttgattacctgcggctggtcggagcctgttctctgcagtctgtgaggattttggctgaggagattctcccatacgagcgtcatcattttgagagggacttctctttgtgaagtcttcctcttcaatggttgggatcgtctccacctcaattttggtttccgccatatttagagcaagcgtgactgatcaatcaaatatcaagcgatagagatattaaacttcaaggaaccaaagacagtttagaaacagtgtaaaggtatttatgcctctcaatctcgagtgcatcatccatcctcacgcgaatccaatggtcctgcttctccaaagtcagtcatgcttgaggtgaacggagcccacactgagtcagttgtcatgtatttaggggcactgctcctgagtgaagctgttcagtttttatcctggaaaagctaattggtaagtgagcttagcacagccctaagttgactcaaaaaagagagatctagtgagtcacaaacatgttgccttgtgaaatgaggccagcttctgcaaggttagtctatttctcgccccagttcttcccattgtagacaaatcatcaggaattatagtcaatagttgagacaagtctagcaacttgtgagagatttggaaaatacgtcgggaaaaaaccatatctctcgaccagcccggtcttggcattgctttcccctcgcgcagacaaaactttatccccacgcgacgcgcgccccagacaaggactacatacgcagcctccaaccaccaactaggtgatgaattagtcgacgccttgttgagacgatggacgaccttactacatccttgctcactgagcattttagctatacacccttggttagttcactcctggtcgtcgttcagctcgcctgtcgcgaggcttgctagaacgttcgctaacacagctacagtcgcttatagatgacattattaactctatcaacaacctgatttatcaagccatttctagcctggagtctggtctactgtcgacccctgcggaacgattgggattcgcacatgctaacaacggctcgaccatcccagacaccgacgaggacggaaatgttgtttacccggaagcacagttagagattgagaatggattgcatcagttgaaaaccctgcttgaagcgacggtcgacaaggcatttgacaagtttgaggttgtcgtcccgcaatttattttcc

SEQ ID NO: 8043 - DNA, 1409 bp, Emericella nidulans
ccttctcggtttcactctccggctattctcgatttcatcatcacctattttcgctatttcattccaccaatggagcgagcgcgggcgcattgcaccaacttcttctgcaatagcgctctcagatacaacgcaatcctgtctgccggtacccgcgggtatttgatcttcactcgggtgcaggggcccctgccttgacgacaatcactatcaaatcaccccactcgtgctactgcttgccatcagcccagctctgtcagcaatcattaaggcgccaaccccgcaaagcaatatcgccatgacagcatcatgacacgacaccgccgcagcccgtttcagtcgcatgtgcttgtccaacccagtttcaggggtttcgatctggcgcgctgattcggcagcgcttgcccggctttttggttatcgatcatcgccgccgccacaccaccgcgtggacgtcaaagcgcagctatgccatgccatcattgactcatctgcccatcttgtctcttggatggattgtgcgaggctgacatggacgtggcctgagagtgcattgcttctgttccaattttctttttcttatcttctgttccgctttccttctacctgctacatgattgaagctacggcatgtataatagagttaatataccccaccgcgtatcgcgcgccgcatcgtgacttaataatatgacatcgatcatcgataatatgttgatatcattgtaattcaacaattgtagatcagatgtcctcgcgcttgcacttacagtacgtactggtgtacgtgtacacatggagtcgtgccctgggtcgtgtacagctttgtggcagtgaggatcgagctttcatctaagcgcgattttcctttcggctctcagactagactagaacctcccgtggactgtcgattgttgagatggcggtttgacgctcactttgcgtctgcgattccctgttttgtctagccctggtccccgactggctggagcaggggggccgggcctgactaatgactttaaatccggcccaggcgattccccctgcattgttggttcttaagtgggccggtaaggcttttcttcaatttatttcagcgcatcctttttcaatcgccctttcactttttatctcttttttattattgttaatatcttccacctgtgttgctcagctaatttattctgtatctttttgattcgtttcgctctccttttctacttatttattatacttcttctatttaatttctcttcttatctttttaacaattcaaactgcaccctttttttcccttctctataactattttcccttcactctgattttcctcctgttaatctaccttttctcctatctcctcccctcttattctctttaaatcgattacacacttcctaacctatcttatc

SEQ ID NO: 8044 - DNA, 702 bp, Emericella nidulans
tctggatacgttcgagcagtggctgacttataactgagcccggtgtctaaaagatatcgtggattcgcgcagtgccggtcacagcgaacacataattatcagcaattcgaacgtttggcttctgaaaccgattgccctcatgtcttatttcctctgcacaggagaggatgaaaggaacgacctccagtaccatacaccgctcgaaacgcttactgtccaccccatccatcatttctgaatgagtttcttcgacgagaacccacggctacgccaatgacggcaatctccttctcgaggcacaggaacacggactctgaccagggcgcaccggttgtatctctgttgcgatgagattttgtctctccgtttagaccagattgccatgcaacggaatatgactgtcctcccaaatttccttgtatatgtcgtgtgattgattctcccgtctaatccgcagccgggctactttgcggacttggtaacagctgtccctaagttgttcgatcttgcatcatttcgctgagcgaggtttgggtgtgatggccaggaatggattgagcatgttttatccttaacactgaagaaggtacctgatccatcacaggtttgcatacccgtagtcataagcaaatagtttagctctcaaaagcaaacgttgctgatggtcccgtagaagggaagtccctgcataaaaagccggag

SEQ ID NO: 8045 - DNA, 737 bp, Emericella nidulans
gtccggtgcagtttcacctctaagcaggaagatcgtcagtggtactatctaagtggatcacggacgggttgtttcttaccacggggagcaaggacgggaccttccttagcacgggtcctgtcaacatcgaccttgtcattaccttcataggtagtcattaatttaagaaactcggatagcgggataaaatgacataacatacccaaatagcctactatattcaatccatcaatgacgggttcatggttttcgatgatctctgctttggcgctctcgtcaatacgtcaaagatcactagcacgagactgcaacgaaactcaccatttgcacagctggtacagaccagcaggcacgcaacaagcagaagaacgagtctaaaggccatttgagagagtctaaggaagataaagagcgtttgtagagtaaggagcttaaagcaacgaccaacgtgcgttgaatgtgaaagtgagcgatgcagagcgagaacgagtggtgtgatgagacgcaactggaaaacgaagtcgagatcagaacgcgagcagagcgaaagaagatgcaaccgtgttgagataagaaagaggagtgggagagaaagagggagaaaagtcgtggtgtgttactcgattcgagcagctgtcacttccattctgggaaggtgccacaaacaccctcacaagaaaggtacggtgctatcaaggcctctccctcggttttttcattgaatactagtataatat

SEQ ID NO: 8046 - DNA, 1093 bp, Emericella nidulans
tcttgtggtgagactgacgcgatatgggatgttttaatgtggtggtgaataaggtatgggtaaatatcgtagggaagataggtagaaaatctgaaagcgagtgagggtgaacttggactgttgtacgcgaggcgaggattcctcaagttgggtgtctgctaaatgagtcttgcaatgttctcgaaatgtaaataagaaccctaaacaccgatatcataagagtcgttcgaccaatggattatccaagaatcataggtcgctaaaccatgcagagtgcatgggtggaggaaccgcaaatgaagatgctttgttgaatttccatactgaaattagtatgaaagcatgcgacggccaggaaagcggctgccaggactgtcattgaacggagaagcgagaagtttgcgatcaccggggttgttcctacacctcccgtaggactatcctccatttccggggactgttggccaaaggcaaaagtctgggccctgctcaatttggaccgctgcttgacctttccaagtccacgctcgcaagcaaactcgtgctccttagcggacatttcgacgtagttttgagggtagcacagcgatcgatgctcagcaaagaaaccactgtagcccccttctagaatgtacatatcaggataagatagttgggggtaatgatccacattataagcacgatcccgatgccggatatacttggccataagaggagccctgtgtaccgaatactcgcagtggaagactatagcagtccgtggcttcgggtccgcaaaaagttcggcggccagattctccttgtcattgtaattgacagctccgacgatgtgcccgccatcgtattcatattcaaaccggcaatcaatgatcatgatattgtcaaacatattatcatatttccctctttgatatccacgagggtggccttgtcgatgcgaggtaaattgtctgcttgctcctcgggaatgaagtgaggtagctgcagaccatgtgtctcttcgaagtcgctaatggactggagtggtgcatttgatgtataagaaacctcgctgtcggcaattacatcctcgggatgttcgtacatactcaat

SEQ ID NO: 8047 - DNA, 690 bp, Emericella nidulans
tctctcaatatatgatagacatcatttcacttactgcccgtccatacccggtcagtgtatgctcctgtatcctcccatccgtggaaatacttttgcatgtagccctcaaagtgatgcgctgctggctcaatcaaacggctgtcgtctgtgacgttataccagttcttcaggtcgtgtacatagactgatctggcaccaccaataatgatgcttccgtctgggcgagggaccagatactcatagattccctctttgatgcgcaccgtgtatgaggaatctaaagtcgggctcagaggatgtggcgggttcggtaccacgacgcggctgcaaatgccccgaacggggacgattttgtctgcatactcgggcgcaatgccagaggtataggcattagtggcgaagaccacctgtttggctcgaattaatcctcgctctgtcttcactatccagccgttgtttgactcagatacatctacgacgggggtgttcgtctgcaagttggcccccttggctatacacttcttgagcaggccacaaatgaacttgtacggccagagacggccggctttgtagctgaagcagctcttcgctcctttgactcccgagacctgtcaggttgtcagtaactggcaaccacaagcagaggagatttctagacacaccatttccgcctccatatccatagtgaac

SEQ ID NO: 8048 - DNA, 1642 bp, Emericella nidulans
ataacattgtccagtttcgcgcctctctgtcccaggacaccaatgaccatacagtcctctcgatcggccaatgccttgatagtcggaatcaaaagcataccgtagtctaccatgaccgtaccctgagatacaaacacaatattcttgggtgaatctcctgtcttcgcatccgatagctcaccccaccattcaggcagcaccagttccgggccgacatctgcgcgaggagttccaccaatgaatcgaacattgggcgacaggtcgcttcgcggatactccaggctcgggctacaaggctgcactgtgaggtccgccccggtggcccagaggccaacaggtaccccggtgccttccttgtcgcaccaagcctctgatagacggcattggcatgtccaatcagctccagctcaaattgcctgaaagattcatacagagccgcgttgcgagcacggccttcaacactcgaatctggcggtaggcccggtctaaacggcgcggtgcccacgctggagccggcaaatggcagggtcgaaaaagtgatcaccttggggaaccgggtacaccctttcggtagcggcgctcctagcacaaacggccacagccctgcggatgcgaactcctcgacgataacaacctcatgctctgggtactcttcgcgaatctcctcgagaacgtcctgtaacaccttcatggctactggggtcaggtcgacaaaaacagcactgagcgcgtagttgaaccgctgcgtaggatcgaggaaagtcatcatcttcaccagcacaccgggcggtcagtcgcggtgaaggtggtgaaagactgcgcgggattgacgtatggcatattctgacctggtgcctgcaatgaagtgtacgatgtggccttgcttgaccaagtgtgcggcatggggtataagggggtgcgtgtgcccattttctggcggacatgcgatgacaacaatgggcttgttatctataatgccgaccattttggatgcgggtacgtatgtcttttctctttaagatattatgatttcacgaaaggggtttcgcccttttatctgatcacgttcagcgtgccgagtcgtttcggtggagattaggcattatttagggcatattcagcatgccaatactacgctactactgtacgagaagcggccgttcagaccatccatagcaacatagtggatatctaatattgaatctcacccatctcagccgcaccgtaaccttacagccgcgtgaaccttgctattttcaaagtctacggggcactccgtgtgccttataggctgctgggactgtccctcctattacatggtcgaggacaaacagtggccagcagtggagagcaggaagttgataaactctctattttgggcgcctgtggtgtgactggacggtggagtaggcctgttgtttctcaatttttagcgcttttactgcttaaattaataatgttaaagggcccgtttgttttaggccaggttcattcttgctttacattgaaagggaagggtttgtatgaaccttaataggctgttttattattatccaatttaggagggtttatatattgggttaactttaagggcttttaaggctatctgttcacaattgagtttattttggtggtttgagtt

SEQ ID NO: 8049 - DNA, 1336 bp, Emericella nidulans
gataaagatggagtcggagagctcgaacgggtacaagcggaactcaatgcaccagggagcttacagccgtccggtggaacgtaggccgagcaagaagtcgtcctccaaagaccgccacggcatggtatacccggacagcttcagggaaacaaccattcggaccgtgacccctgactcctcggaagctgggaacaattcgcctgtatcggagacggagcctcttccttccagtgctgcaccttcaccgcgtaccgccgctcgaataagaggccctgagcgagaatctcgacgcgactataacctgtattactccacaggggatgaagatgacacacatttggaactgaggagccagcgggcccgatcccgcactacaaccctggacgaccaacgaagcgatatatcgtcaagttcctttcttgctcgtacgcgaaatcgcctgggctctatcaacacaactcctcagcctaagaatgcggaggatcaatcggcatcttctatcggtttcccgtctatacaatctcccgtattctctccccgaacccccagccgtccacggttgagcaggtctcctggaagctcgggattagagtcttcgtctttgttaaatacggatagctccaaaatattgcagcttatgaagaccacatgcggaagaatgcatggcattctctctttccgaacatcatccaccactgcttggtcttcaggttactgtgctatcaatgtcgcaatgggcagtctgatttaccaagcgaaaggcgagccagctctggcaaagacgctgatcccggacttacgtggttgccaagttcgttctcttgtggatccagaaacgcgaacgaattatctcagtgtttctaccttcacatcaggtcttggagttgaattgcgacctcacgtgagtgagacattcgactcctggctcgcggccctactatgctggcagccaatacgccccaagggcgtgcaaaataagatgacgaagccgcagtctgttacgatgatcgaccgtcgcgtggttgaccgtcggaggaactctgaaagtactgttcaaaaagacgccgccatcataaaagtagggaaaatgcttctttgggataggcctagtgcctcaggtgttcgaccgtcttctggtcgtcggatctcaactttccggcagcagcgcgctctatcctcgtcctggcaaaaggtgagctgcacgctgcaggagaatggcgcttttcgacttttcaccgagtccgacatcacgctcgtgacctgcatctaattgtctcagctgtcacgctgcacaatctataaattagatattttttgtcttggaagatgaattttg

SEQ ID NO: 8050 - DNA, 788 bp, Emericella nidulans
cctcgctggtcccgtacctgatcattctggccacattcggaggatttgttctgtggaatgacagtgttgttatgggccacaaggagttccatacggccagcttacacatagctcagatgttgtacatctggccctacttcgtcttcttctcgtggcctcttcttctggtcccaatggccaatatcgtccttcccaaattcatgctgccgaaattcctcaatcaaggctttccggcttcgcggagaaggcttccaagtcttctgactgtgttgatcatccttccaatcatgctcgctgtggtgcatttcaacaccattgtccatccgttcacccttgccgataataggcactacgtcttctacgtattccgcattttgctgaattctcatccgtatacgagatatgtcgctactcttgtctacttcctcggcgcgtggatgatcatctccgccatgggttattcacctgtcacggctgctcctgggttggcttcagtcgttagaacgcaggcaccgcccgcgtcagcgacctcggcagaggagcgaaccgaaaagacgcaaaagctggagcgcaagcagaaaggctttaaaaaatcggcccaagtggcgctcttcagctcctgccccaatcgaccctaaagtcctcgctgacctccaagagcatattaggcggcgccaacgacttgaacatgagacatcccgcgtgagctttgttcttgtttggctggctgccacagctctatcactcatcagcgctcccctcgttgaaccacgatacctcattatccc

SEQ ID NO: 8051 - DNA, 1622 bp, Emericella nidulans
attttaccagaatccacacatcagttctgcctaactgatctcccatacggatctttttgcgtctctgggcgctctctctcgcgcaccaacagctctctattgtcctctgggacatgactctcggcaccgcgtttgatcaagaagacggcaccattcgtaccatcatgatcattgtcaccttctacatgtggttcactctgactattgccattctctgtgtgatggagggaaccagtgccatgttgcactcgctccgtctgcactgggttgaggccatgagcaagcattttatgggcgatggtataccattcgctccatttagctttaagaccctactggaggaggatccggttgattgaacggtttagattaagctggcttggctctcgcattctttctctctttatatttcctttcttcttgtcgaggtcgatgtattgtatatttcgccccataggaacaatattatagaatggaagcaatttccagaggactcttacaacagtcgaacctacccggcagggttgggagcactggagtatgtcttggctctaaattcgtatatgctttgtggccccctgtatagatcgtcgtaagtagatatatatactctctaagttacggagtgtgtgcttattcacagtctagattagttatgttcagtgtatataatcaatgcttttgatcgcctaatggtaacgatatatatttagtgacccaattcttctttgcatcgttcagttcacgttgctgagtatcagagctgattcacgggtgtaatgtcttcgaagtctaacagaataaacatactagcttgataccaatattgggccatttgtttaggttgcgcgacggattcaccgtgcaataaagtcgatatttcgctgaccctaggaatgggcaaatcggcctgataagagtcttcaagtcactacgtaacagccgttgccctattgcggcacagattacagtagactttaaaggaatctatagagttatgtatgataggcaccagataccgaagaatgaatcatctcaattgctatgacaatcctaccaagactaacgaatgaattcaaggcaaattgacctacaagagactggaacatgttagtgtttgtttccgcactgaacatgaaaagagacaagtgaagggagacagtttcagttacatgccctgtcacaggctgtggtcatcaaggtagacatatgttgaccgtcgtgataaaataaaagtaaatcatcattgtaaaaggggaaaaaaaaaggagggaaactcacaatccagggcgcagtcaaagacggccatgtcaattttcctacttactacgagctatcagtactgggaccgacaagacttcgctgagtaaacaggatatgacgggtgtcagtaatgacaattgtcgtcttagccggcggtgccgacttggacatatgcttgtcttttttttatgtcgattcatcattaaggaagttaaagtgaggttgaaagcaagtcagacatacagatcatgagttggtcgacgatctgtcgagtaggactctacaagtaagagacttcaggaacagttagcgcaatgttctgaaaataaaccatgcaataaggtagagatattccgtat

SEQ ID NO: 8052 - DNA, 857 bp, Emericella nidulans
cctgttgctgtcatcaccacacgccagcagacacagccaaaggacgacaagaagggtctaattgagaccggcagagaagtagtcaacagcgaagatggatggtccggtttgtggagaggcctcaaagcgagcttgatcctcgtcgtgaacccggctatcacatacggtgcttatcaacgtctcaaggacattattttccccgggaagaagagcctcaagccttgggaagcatttcgtgagtaacatcatgataccgcttatgggtacttgaaatactgattccggtcacagttcttggtgctctatccaaggccatggccaccatcgcaactcagccgttgattgttgccaaggttggccttcaatcgcgcccgccaccagcccgtaatgggaagccattcaagaccttcagcgaggttatgcgatttatcgtcgagaatgagggaccgctatctctattcaagggcattgggccccagattttgaaaggtcttctagttcagggtctactgatgatgacgaaagaaaggtatactgtttctcctatagcattattatgaacatatgctgatggctccaggatggaactccttttcattgtcttatttgcatatctcaaaggtctcagagagaagaagcttcgcaaggccgttgatgcagcggcgtccaaggcacaggccagccttccggcgactctgaaatagacggacccccttctgacgagtggtcattccctcccttattttacatctttatctggcgcataggtgtagatctctttgttattgtcttatgaccgagggtacgggtccacacacaccttgtacatatttcatgaagaatagacatcaatgatt

SEQ ID NO: 8053 - DNA, 890 bp, Emericella nidulans
tccaaagagcgtgaggtagccgaactgcacgcacatctccagggtgtcctcgtgcacgttgtactcgtccgcctccgcctcgttgcggacacgcgccaggaactctttttcctcgggactgtcaagcagcacctggttcgtcgccgacgagacacgccgacggccctggactgcctcttttctgctctggtagtcgcgccatttctgccagattacgcgctggacgtacgggagcaccacctccgtgccgaaatccactacctggccagtcatggacaggtagatcacttcctgctgcagccgcgcattatcgacgtggaagtcctgcttctctgtacggcgggtgaagtccagatagggcacgatggttgcgccaaaggggacgtacacgaacgccgtcaggatcgtcggcaggaatgcggtgatgaagtgcatcacaaactgcttcgccgtctgcgcgaggtcgtactggtcttgcgtccggtaattctcatacttggtcagtctcgtcgcaatcgaggtcagcagccccgtgatggagggcaggcacagcgaaaatacgatcgtaggaaggaactcaaggtaccccttcagggagccggtatagacctctgagatgaacacttccatcgcaaaggtaacgacgatcagcccccccagcgccagactggcgactgacgcaaacgggatcagcagcagctgccgcagaaactgtttatacggtgagaatacctgcaccatctcgcccgtgatcgggtctcgcacctccttgtcccacacatacttgtttttcgtcaccttcagcaccccgacccccttgcctgccaccgcaggctcagatccgtctcgcgattttccagtactctacaaacaccattgcccaagacagt

SEQ ID NO: 8054 - DNA, 709 bp, Emericella nidulans
cgattccctagatctgtcttagcaaacatctgacttgataatgcggagcgctttgagataggaaaagcttaccgggtcagtgtcgataatgattttcttgggcgccattgtcaaggaccgcactgctcagtaaatatcaatttctcgcacaagatggtaagaagtagagatttgttgcctggaaaaacgatggaggggaaatagtgggattgggatccatgatgtcttggcgacgttatcgcaggtccactatattatcgttatgtagcattcgtctatcgtcctctccaacttttgtcctttagtattcttcatgttcgaatgtccgctggagagaacccggggatgggccgcaattaatatctgtgctcgtttaaaccaatgcccaggaagatccccaaatagtatacatacgccgcctatatacgcctgcatacgcaggtagaagaactgccgcaagccgagcattcatcggtaagtcctaccagagatcggccacctccgaaaatgttgaaaatcttatagttgacaccaatggagttctgagcggcattagaatatagcccttctcaccctcgctggtttagcggaagaagaggccaatgggaagtatgggagtatcgtccttacgtacgaattaaatcagccgaagaaatgccagttaattcaattagggaatgacaaggatagacagcaatggttgtgggag

SEQ ID NO: 8055 - DNA, 1212 bp, Emericella nidulans
ggctgagcaaggacaacgccagaatccagctgatatggaacctggatgacacatctgaacatttgtgtttatgcagatttaagaacaaactggcagtggtgaagccgtcagatccagcgcaatgtgttggtgaaaatagcttggtcgccagcaatactaaccagacagtattttcctaggtcaaacgcttgaaagcgaggcttattgctttccaaggttccagcctacaacagcctagagggagacggcgtgcttcagttcatgatatccgcaagtcatcgaaatacagtgtgatatcgggaccataatgcttctgttttcagaggatgtctattgagcctcccggtatgtggagtcagcatagctgcacgagtaaccattgatgttgcaatactgatagaggcttgtggagtctggaagcagtccatgtaccaaatctaataaacccaggttagaagagaatagaacgcacgcttattcgcccattgtctatagctttggagtcggcgctggcccgcagtcacttgacagcttgtccattagtcgctttgttgacacgagccactggcgaatcattgcaataaggccgcacggacttccgcgcaagagaggcctaggatgtttccggacgtagcggtagccagccttatccagtctcagaaaacctcgctgacttgtctgacgccgcgatgacagttgtttgtggttcccgatcctggtggcgccatcctccagcttgcgctgatcaatcggagcggcggtcccaagcctcatttacgaactgactagttgcgatagatgatgggcgccgctttcttgccgcagaatgtggctagggtagtgggagaggataacggagataaggaggagctggcgttataacctttcatgcttgctggtgtctcgtgagcccgttcggtgtcgtgtccagtccaagatatttgcggagtcttagcagatctgtaaatcgcagcgggaccagggactactgcaatcctagtgagagtgattgggtagagctgttgagagttgggagagagacttacagtacgtaagagccggaagcaagagtaaagacgggttggtgaagataagtctgaaacaaccacccccagagggacaaaacagaaagtctctaggtcagtctggaagaaggaaaagcaaaatggtgcaagtgtttcaggcgtcgatggctatagttagtcgtattat

SEQ ID NO: 8056 - DNA, 1533 bp, Emericella nidulans
gaggtcgttgagtcagtgcgttttggtgggagaaagttcgtagctggctgcacgtagagcgcgacgattagggctccatcggtagtgtcaagcaagcacattccggctgcaaatgagtgattagtaacctcaatagtttccccgggggagagtaagagaaacctgtaaacagtatgggaaagatgagaataacccaaaaggaggtcccctttgcagcctcgatagacgatatccccagaagtgcaatctcagatgacgtatcaaagccgagtccgagcaatatacccagcgggtactattttccatggactgccatacatcagcagccagccgtgcaagcgctgcaggatatagtcttaccgatcaatcaacttgaaggcccgcttcaagactcgaaacagcacacccccgccctcaatcttccatgcctcgtcctcctgtccctctggcaggttcaggcaccttctgcatctgcttgtacagcttatatagaatatacgcattcataaacccaagcagaatcaggaacgccgcgctgacagacgtcccgataataccgccgattgtgctgaacttgtcaaaacgcgaggataccgccgccgcggtggctgccaccacgatcgaggtgatgatcacgatagtggagtggccgagcgagaaaaatgtacctaccgttactggcctctggcctgttgcgagcagacggcgggtcattaggtcaatggcctggatacattagccgagtcttctgaagacgttaaggactgcggaggtctaccgagatgtgatctgcgtcaaaggcgtgtcgcagaccaagggtatatgatagaacagcgttcgagaccaacgatctcaacctctcgtcaactagacgcccatgccacgaagatgggagactcacggatggtatttctttaaacctggttagtcgtcatatcccaacaccattcaaaagcgagaaacataccaggacaatcgctacagcaacccatacgaccacattaacaaacgcaacaagcaagataaccgctattgagcgcagaggaaccttgcggatcccaggcagccgactatgcgagcgctcggcatgccggatgagagacttggccgtccatttcttgtcatccagatcggattcaatgaacggggaatcggcgggaggtcgcgtcgacatcctgaatctttactcccacctcgagatggtcggaaaaggactgaaaagagagaatatggaatcttttctgttcaagagcgagctggtgaggggaaataattattctagtggggcgataagagagtgcgttatcaatccatccacatacacgcacagatccaatcagggtctaggcttagacaagccttttgctaatcgactgctgttgtagactgcggacgagacggatatcgccggtctaaagccttcgtagtcatagaaatgagactcccgtcatatccagatagtgacggcgaagtgacattgaaaaaatagttgcttaaccccaccgggtgacatatccggcggacgacgccgat

SEQ ID NO: 8057 - DNA, 676 bp, Emericella nidulans
cagaatcagatttccggctacaccctcctcgaccgcaatggcaaagagatcttgttccgcgaggtctacagtcatcccgatcgtaccttggttgtcttcgtccggcatttcttctgtggggtatgttccgtctagttaagatcatggtctacctcagtaactcagtaaccggggcagagttgtcaagaataccttcagcgtctgtcaaccaccgtgacccctgaggtcctgtccggcttgccaggcagcacatccatcgccatcgtaggctgcggcgatcccagcctgattgaggattacgctgcgcacacgagctgcccgtaccccatgtactgcgatccatcgcgtaagctctacgagactctagggatggtcaccacctgggagatcggcccccagcctggctacatctccaaaggactcccgcgcctggtggtagatggcatctggcaggggctgaaacacatatgggacgggaaaatcctcaaggccggcgccgcagagcagcagggcggcgagttccttttcgaacgcagcaacgatggtgaaaagcgcatcagctggtgccaccgcatgcagggctcttggggccataccgagatcccggcgctggtcgacattatccacggtcgcaaagcggacgaactggcttcggcgacagaatagcgggcgagac

SEQ ID NO: 8058 - DNA, 1161 bp, Emericella nidulans
gccctgacgctatgccgtactgtgcgtatactatgtatgctaataagccctgttttattgcttttggattcaaccccaggaggtcagcttgacgtggttgagtatgcttttcggcatgatgtgcttggctatacgacttcaccagcgtgccgaaggcgagcctgtcgatgctatcggcaaccccgaagaagcttgcaacatatatcgactttatgccgcctactgtctgatcagagacagatataccacaccgtctaaatacaccatcgaagctctactcacatacgcacaatgtgagtatttccgaagcgccgatgcccagcatgagaactgggtgttgttcggaatcatcatgcgactagccctccacatgggtctgcaccgggatggctctcgataccctgagatatcctgcttcgaagctgaaatgcgccggcgcatctggactttcatgatacagggggacgcgctttcctcctttcagtctggtctgccacgcatgatgtacaagggcgtggcggatacaaagctgccgcgaaacttactggatgaggactttgacgagaccactacgagtctgccgccttctcggccagatacagatgcgacaccgctctcgtatgtgattgcaaaaagtacactgagtgaagtttttgcttcaatcactgactgcgtggcgtcgacggagcccacgacctatcagtcgatcattcagctagataaccagctgaacgaagcctatgctgcgattcctgcccatctcaaatttcgtagtgtggcgcaatcggttattgacctgcctcatattattatgcgccgatatagcttggagattctgtatcagaaatctcgttgcattttgcaccgtcaacatctctgcgagggacgctctgatccgcgatacgctaagtccagacaaatttgcatcgacgcggcaatgagcctactacaacatcaggctactctagacgcgcaaggctcagccgggtggcgtactatgccatagcagatggttcctctcgtcgctggcttcccatgactttattctggctgcgatgattctgtgtttggagctccatcaccaatcgcggaatagcgagcagccaaatggggatgaaccccatcgcatagatgaggtcctccttgcccttgaaacctttg

SEQ ID NO: 8059 - DNA, 1037 bp, Emericella nidulans
atatatctcaacgtgagtttcctactactctcttgcattagtcatgtactgaagaaaaatagatagccctgaacatctttaacgccgctctggttacgcccacttactacgtcttcttcaccaggtcgaccattatttcctctgcgatccttttccggggcttcaaagggacaggcacgcaaattgcttctgtcatcttgggattcctacaaatctgcgctggagtggtgttgctacaattgtcgaaatccgccaaagatgtccctgacgccgccgtcttcaaaggtgacctcgatcaagtccgtgaagttgcaacgcaagaagagcctgaattcgagccaaaagccgacgccatccgtggcacagccgctatcattcgccgcctatctactccccgccgcaatgtcgaggccgaggaagcacgtcgctatctccgtgagagacaagaagaccagctcagaccacccgctgacaacgagattgtcgaatgggacggcttgcgcaggcgcaagaccgttctttctgaaaagtcccagaggcgcacacctactcctctacctccgctaggaatgtctcgcttcccggatgacttgtccgaagactcccacaatacctcccccagtgtgcatacgtttatgaacgaggttcgatcgcggacgtctagcatcatgagctccccgtggagacctatccctggagaccaacaaacgcatgggccggtgttggaaccagatcccaaagttgtcgataccagctaccctgggcaacatcctcctagggctgtctcatgggtggacgaagagcaagaccaatcgcacctagctgcgccagcacctccgccgcatcgtcatttctcattccagaagatcttcagcagagctaagtcacctgttgacccatcatcagcagacagccgcagccacacccgcagtcgcagccccagaggcattctgcgccgcggacacatgcggaatatgacgtccgaagaggagcacctaggacttgttcagggagacaaagtttccggatacacgaac

SEQ ID NO: 8060 - DNA, 1049 bp, Emericella nidulans
aaaggctccccagcgcaagaggttcaccatgcaagcgcctggcgaatcccagccccatacccgatcttaaagagcgtattcgcgatccagtctcttgtctcctgtgtcaccgcatctcgctcagttgcaaggaaaagcggccataataaccgaatcatgcctccagtccggctactactccaatcttcttgaaaggatgtctcggtagccccgaaatgatagggcacgctagcgcacacatcgtcgctcagttgctgagagagcatcgtactgtatccaactgtttctcggtactcgcttctgcgagtggcatcgatctcttctttgtctgaaaggtgaccagcaatccagcccagaactcctaaaagaagaaggtgtacgaaccggtaatcgttccagcacgctgagattactgtatctggatatatatggtaatgattgctgtagatgtgtcgaaagggtgaaatattcttgccatggccagtgatctcacccacaggctccgggacggtgactacggtgtagtcgcgggtaagcttaaaggactttgcccaggcagcaagctcagcatcgagttttaaagccctcttcactaacttggccggctctataagcacaccgttcttcaagctagcacatagatcaccgacccgtgacatcagcaggaaaagagcatcgtccgttcccatgtcgtcgccttcatgacggtaaggaaaggcttcatgggaccattgcacaagccacggaggcgtagatcgtttcagccagaagttgccaagaacctgctattgagttagttgaggtcttgactcgagaccagcaacgatatacatacaatgttcctgcgagatagagtaaacaagcccaccccgatggggtcttcgagctgctgggagccgcgcagctggatgattctggagcacccgtccatatgcttcacgaatttccccatcagagatgtgccgtcacaaaccatgatctatgtggtatggtcaacccaccggttcgttgaactgaaccacggaccccggccactctgaacctggagg

SEQ ID NO: 8061 - DNA, 1277 bp, Emericella nidulans
gtggtttatatggtttagcacggcgtttggaaggtacaaattgtcttcattgcgttgatcatctgggccgacggatttctgtgatgtgagcttgcttgatcgcaatctgtatgtttatacattttccttgatacccacatccgtttcatgatgaatacgctggggccagagtagcaagactcctatgttgatgtcatgcactgccttcaaacaccagcataaataacaatcttctcaccttcctgaagaactgttattatgcaccttgttgactcagcatacctggcggcgtctgctgactatccatcattacaggcttattatcagctgcactggactatagacagtgtcctttccgcaatgtatatcatagaatgagatacacactttaagcaatgctttttaaccctatctatatgtttatacttttacggcctcctagtaaaactacgtaggcattcacccccgcctctcgtccaatacatttagatctcgatcagctgctgtgcacggaccatattaaactcttggcatgacatcttcgaccccgggcttaagaaggataaaggcatacactgttatgaaagcagctataactgtgttgttgctcactgctctattctaatttcagagatttttgttcaaatactgcctctattgggaatcatacccatacccgagtaacccacgaggaacaaagccacatacaaaatattattacaccccgccgcgggaattcatttccagatcgtatcgcggtagcagtcgcacttctcaaaaatataacactctgcggagcacctgtctcaggaaataatccagcctcaacctcgatcccgaccttaatgcaattccaaccatgaccacaaccaacggcgtaagccccgccggcggcggttttatgcaatcgtcagctctatctccagccccctcagcgtcaaccgttacgccgtcggtccttccaaaacaaagaacgcatccaattcggccgggatctataaaagaagctacggtaatcaactatgttgacaagacgatactggcgattaatcggcggcacgcgaagaagttcagtagtgttttggaacagcaaccgacacaactgaatggtatcgacacaaatactaagtctgcctcgaatagggagagagaggtaggaggagagaaagaacgcgggtacgagagtttcaaggaagtcgtcaaggatattgagagcgttgtggatgagctaagggttagtgggactcgtatgtttccttactacttccgccccgctc

SEQ ID NO: 8062 - DNA, 1336 bp, Emericella nidulans
cacctgcgcatcttcaacaatccgaatatcaaccgtataaatgctgatgagaccgaggacgatgggagcgagcaggttgggaaccgcatcaccgacccctcgatctccaacctcgaggagagctgcattgacgccgaaggtatcggcgagaactgccaggcgggaatagcccgaaatcgaagcattcctctctcttaccctggcaagaggttagaattggagtgggaagcccccggaaaggctgtcggcccaaacaactcgtacaccaccgcgacgactgcggggcagcccaagttcgttggatggagcaaccagctgaatttcacctacacccccttgaccgtcacgggcaagaaccggggatggacggcccagccgggaggggttgtgtttgcggacgatggaatcgtcaacgatacaatggcgatcatgctgacggacaccgacttgtttgtcacgcctttcaacttgaccatgctcaacccgcatattgtggcgctgggactgtaccaggctggctaagatgtggagggttgaggtaaccatactgaagtccaggtatgaactggagaacaaaatgtagtctagtccatagtacctgcttcatagctaatgatattttttaatctgcgtatctttgtgcacgagtaaaagctcctcaaactaggggcatctcggtacaccttggtactttgtggcctttcgagccctcaagaagacttatactggcgacgctgaatgacctctcaggtacgtcatccgcttggctcctccttcggctacctagtctactcagacagcaaggagagaattccctcgatagtatgaactcctatgtatatttacggagctataatcgctggaaactagttagcagggggtgctgtttgctggatagtaagcaggaccctcatctccagccttggctggactgagactactagttgactggattacgggcgttcgtccgaactaagggtcgctgttgtataccctgcgtaatatatgatagacgagcaaaatatatggtttgaatgtgattagtagcatcgattgaggaccaaaagaggcttgaatagacgacaagaccgagtaggccatgctgccaactttgcagcctatcccaccaagggacagaggcgatactggccatctattggtccctacatgacaagaagcactccttctatcttgcatctgctggttagatacgcatgtctctcacttcagtcaggcggactaccatcgcctagccacaaagacgcagagcgcggatttactgaacatcatatactgaacagcgcatttataagagcctagcgagatcattcagaag

SEQ ID NO: 8063 - DNA, 239 bp, Emericella nidulans
ggaaaggcctgcccggcgccgtaaggcacaagtctccccgacacgccccgctcagggtccagggctagagcacggccaagatgagcacgaatagccgtggacggcagggcgctggtcagctaacgcaacacacagctacagcagtgcatcgactcccggacggtcaacaaggcttgcggcgcgactgatgcctgagccagcgaccgagctggaccaggagacagacgggaaatacaccg

SEQ ID NO: 8064 - DNA, 524 bp, Emericella nidulans
cagcaaacctcggaagttgatgtatgattccggcgcgatgttcagatccgctgtttcccctgctagcgacttgagaagagtagaacagcccgaaccggggggcccgaggacgagcagcatctcccctttttccacgacgccctcaaagttgcgtaaaatatcgacgcgtctgccatgtcggttcccacgaaaccatcttgctagataaactgctgcttcaatcaggacatttccggtggttttctgaaactctgcggctgtgccatatgcaaatacaccaagttgtttgaacgcgacgccgagggcccgaggtggcgcagactcggggtctgattcaagcaatctattgaactccttgacccaggtgcgagcgtcaaatgcgggagacgaagggtcaaggttactgccaggcatcgggttcagtacctggggctgccattttccgaagcagaagatgtcgacaatcgcttcgccactttcgaaacttcattgtgtagcttatcttcttgttcactgctgataga

SEQ ID NO: 8065 - DNA, 745 bp, Emericella nidulans
aacagcaagagatggctaagtgagtgttgctcggtaaaggcagatttcttatgctaacggactgctccagcgctacccctgtcccattcgggcgtggtagaggtaaacctgtaaatgtcccagatcatcctcccccgcctgggtatctctgctaccgttgccgtgaaaagggtgagtttttggcttgttagtctaacaaaatgctaattcgctcctttctaggacattggattcaagcctgccccacgaacaatgacccaaaatttgacggcaaatacagagtgaagcgatccacagggatcccgcggtctttacagaccaaagttgagaagccagagtctctcctgattgacgggtccactgaggatcttcggaacaccggcgttatggtcaacgctgatggagactttattattactaaaccagaccaggcatcctgggaattatatcaagagaaggttaaggcaaccgcagcggcggcggctgaagcggcggctgctgaacacagcaaggagctacaggctcgcgggttagagtgcccaattgacaagcgaatgtttctagagcccacacaaacgccctgctgtcagaagacttactgcaatgattgtattacaaatgcattgattgaaagtgattttgtatgcccaggctgcggtacagagggagttttacttgataatctctccgccaatgatgagatgctctcaaagattaaagcctacgagacagaaaaagcagattc

SEQ ID NO: 8066 - DNA, 484 bp, Emericella nidulans
ctttgttcaaggcacgctgccgcaaatctggagtacattgccagcaaagagttctggcggacctatgaagagtcagcagtattttacaaccgtcttcatactctatctttgtccggtcactttgatacaaaggcatccagctatgcgaacgcaaccgcgattgccgaatttctggactaccaggtggtgcataatgaatcccttttacatagtctaagtgcagaggacatcaagcgcgcacgttggtatgctggccgatatgtctttgcgacgaatggaaacacgtcggcatccggcacaaccgttgacggcggtatccggacaatcgcaggccaaggcctcgcatcaagtgttctaaacgctttcgagacaaccatccagaaccgaggcgctaatgggaagatgacacttcagttcggcaacgtacaaaccgctgtgtccttcacctcacttttgcagctggccaccacaagtccaaacttta

SEQ ID NO: 8067 - DNA, 497 bp, Emericella nidulans
gatcttgctgctgagacctctactgcgtcaccgcagccgcagacaagaatgagattgacatggtgacggtgacggtgctgctccgttctccgtaccggtggggcaggccggcagagaagatcgttccctgctagcggctggtaaccctggcgctggtgggcgatggcccacgggtaacagtttgtaataacaacggtatggagaggaaacacggatgagttgggcgcctcgcgcctctaagcggaaggcggcgctcgaaagtgaaaattgaaatcacttgagctggttatgtggtggggtgtggcgtgactggtgcgtgtctctatgaacacaatagaaattggcaaatcaatgcccatgtgactagacagctggtagtaatgctttctgattgcccgtagtaattttagaagagactcaattaggccaaatttccattcttatcaggagccatggccgcggctgccttacccagtatagcccaggactaacattga

SEQ ID NO: 8068 - DNA, 1160 bp, Emericella nidulans
ccatcttccaggcccaagcttattcacaagttcgacgatgatgtccagggtctcatcataagggtcccgggatagctctaagaacgtatgcaaagaaggcacgcgttccctttgaacccgccgaagatgacgctccggcctccgactcagaactcgaacgggaaccagtggatgacgaagaggaggaagagcaagcacttcgcgaggagcgactggcgaagaagatttttgcagagcaacgactatgcgaactaactggaaagctcgtgctcgcgatcatcgggcgcatcattgacacgtccgggcaattaaagaagaagctactgaggcataagacacagcttggtcccaattaccgcgaagttttggtatatctcgaagaccgacccgctaaacgtgccgcttcacgacctgcccagtctaaagggaagcagtctactgcccaagatggaaccaaatcacaatccgcaaccgtatccagcaaggggcctacacagactaagtccgatgagaggattggcgaagagtcggatgaagaggaacgacgcgacagtgatgaagaaatggaggaagacaacattgacgttgacaaggacaacgatgaagacggagaaaaccaagccgcaacacctgagccagatgaaaacgagatcatgggtgattgatgccgtctccctctcatgtgattccccccttggcttgtctttctcactttcccaacggaatcgggtgtatacggcgctggactctctattcacatgttcagattcacgacttgtttcatcaattttaatacctcgctctggtttttagcttaggtctatttttctttccatctcccttgcaacttcagtaccatactcttctatatgattctatcctcgtgtccagtacccttttagctaacgttgccattctctctgaagctatgtgtttctcgatgcgtgtttttgtgggagttccatactcttccctttctcaatgagatccctcaagagtagggttaatgattcatcgatgcattgcttcgtccagactatagcctgtcatcatggaggacaacgaatgcggctttacggcgaaccaagtatcggctcttgcgggttgacagtacgaaagatgcttgtgagagtcagactgtgagccagcatggtcttgtt

SEQ ID NO: 8069 - DNA, 561 bp, Emericella nidulans
gctaattttcaagcctatgtgaaggccaaggagggaacgaattttatcctccttcatttcgtaagagccttatcaccaactatttatactggaaagaatgctaattcctatcaagtggttccacacggtgatcgttcttttgcaccaacccactcttctcaactcctttggaggcaccatgcaacacctttacccgaatagcagagagctttctatgtcgtcagcaaagacaatcgcggatatcttggcattttctgagcttgtggatggaaagagtttcattggcaatcctttcaccagccagccgatgtatatagcagcatgtgctttccttatggagagtgcttattattcttctccctcctctcgatctgcctcgccatcccaccaaccattactcgccaatcagaccagcgggttctttatggactcctctggctcatcagaacgcaagcccactacgaagtatagtcttctcgcgtctgccgcttgggaaaactatcagagatgctacaaagctttgaaggctctggagaattactgggaaggtcaaagtcatat

SEQ ID NO: 8070 - DNA, 1087 bp, Emericella nidulans
acatggaggcagcagaccggatcttcgtagaggacttgtcctcacatgtggcgccgaaaggcctacgtcgatagtgcacgaataagatgctgtggatatctatcatctgattcagggatcatccatcatctttgctttatctgtctccagtatgggtcgaaatctatcatgaacccggaacacgaacatgaggattgtacataatacacactacctattgcccatgttgtataccatatcttgttagactgagctgggatgctccttcaaatgtgatttgatacatttgccagttatgagtagtgtatcctatgctagtatggtctgaatatacggtctgagcaagtatcaatatttttacctagatggatttattcaaaaatatgtaccgaagccgagtagagagatgccaagtagtaaatgcagaacaaaggaaatacgagagatcgtgtgtctatggaagctgtcggcgaaccttggaacaatacatgcatgttctggacaagaaggatatacaatgaagacatcaaacacaatattccctgacaagcgccgaaatgcttgcaagagcaaatatctaatctccccaagaaccaaaaggacaaaaaggaataaaaaaaaaaaagtcaaggatgaaaaatgcctttgtttatgcagtaatcaaaaacgccatgtcgctcaaaacgcaggggtatctcgagatagctcttataacaacttgcccaggcataaacgtcatctcaaggcacaactattttactgttcggttcagccatcatacttgaacaaatggccgttatcgtaacaccctcattggagcactcatgtctctgcgactcttcttgacaccgtcacctcgcggatctgtagcgtgctgaacaccgggaatcctccgcgccaaccgcgccggagtgacgttcagcccgcccgcgcggaacgcagcgtcgctagcgctaacggacctcttcatttcgctagttcgacctcgtcgagctctgatctgggccaatgcttgttcccgactaatgggagtgcccggagcaataacggacaaactcgaggcttcatcgccactgcgcaggggaat

SEQ ID NO: 8071 - DNA, 1081 bp, Emericella nidulans
cttggccattaagcgagtgtacctggccatgaagtcccataagaaagggttgtcttcagggccatctccataccgcaatttgacacagtctccccagacaatcacttctcgccgtaggtatgccctagaattgggcccagcgttatcgcgcatagcatccgcgttccatatccagccattgttggcgagggctaatgctttggggctgtgtttcttagtgatttcgttcagaggcagtctggtgaagtacgactctatgagcggattttggtcggtcacaggaccgagcttcggtccatggtcatcaatcctcaggtacttgatacgattgaaaagctgactcatgatttcggtgacatctgagttgtactccttgtaaaacggcacattgactacgtcgagcagcttgcgcagggtattctcaaccgcagtcaagtccgacgacgtggcgtcaaagtttccaaacagtgcagtagcaatggccaccccgagttgagtatcaatttctcgactgtatcttccgaggatttggcccgcagtcgggactcctttctggcgaatgaggcttgcctgatcttccaatgaccacgctttgtaggctcctagatcgagctgcgcccagcgcccacgttctatatcgctgtttgtggatactttccactcgtctataaccctccgagcattgctcttaacgtcgagaacgtaaaactcccagaggcataggtcttctataacatggttcttcacttcgttcataacgagcgtcagatcgtcgacagtcttaaagtcagttggcagaccgcgcttttgtagttcatggctgaatttcaataatgcagtgtccagctccagcgctgcttcgagccagggagcagtttcaacgctgtatccagcctctgggtgttcctcgagccatttgctgttgttggcagtgtgattccacacgacatcagccaaggacagtagggagtgcttctcctccatgtctttgatgagtttttgaacatcattttctccgttaaaaaaaacaatatcgtcaaattgcagttgatcaaaaatgctatcggcgttggcataacct

SEQ ID NO: 8072 - DNA, 807 bp, Emericella nidulans
ggacgcagggtaggcatagtgaaggtgggctaagtcgatcaagccgattggtggttggttcgactttcaggtctgggaatgcgatagaggcgtctcgtcacataggtcgatagtagtcgaattgagcctattcggctcgtcgcttgttgggtcgccaggcgacaacttgctaactcgcagttgctaaattgttttaccagtatcttgcgttcaagaggagacagatgtaacaacctcctgtgtggtaagacttgctaaagcagtctagtagagtaacgcgaagtctcgttcttgtctcctcacctccgaaacggcaaaaggagggaactgaaggtgggattaagaggaaggggggctgtagaagaaggttgagtaattgcgagaggtcgctgtactcggtgatgggaagactttgaggtgcttgagggaaaataacattgtgagagacgcgttggcgtgacacgcgggacctgagcttctccgcacttttggacacctgaacgttcttccgctccctcatagggcttgtatacttagggctactggccaggccagagggcttttcatgcgttcaaacttctcaaaattgtgactgtttctgttacggaatcttaggaaacttcctcgactattagagacaccataagatgtatgtatatagctagaaatgtcccgcgcaatataagccaggccaatgcaaagtgaccagacgctgtaaaagaacgccatgtaggatagctcaatcagaatcatcaagagtcagaatcgaatttaaacatggcagaacgcctgaaaagtatataggaa

SEQ ID NO: 8073 - DNA, 1033 bp, Emericella nidulans
aaattagctgtgttggtaaagatccggtctacacccttcaccatctctgttgagcgactttccattgctatttcggctcgaaaaggtgtagggcctgtgatggacttggggcgaggacgccttggtgcctgcattgaccttctggggccatcggacgcagacggaggcacaacgccagcgcgtgacatatctggcaaggatccctcgtcgaccccgtcgctgagcagttgaagcctgtccagctggctgacgcatgtgaggatatctctccaagagctctttagatggttcccctctgaaagcgcgacatcaagcagtatctttactgcctcgacattctttgcgaccatctccctgacattgcccaggtttgtgaacttcgccaaggcagtgacgaaggcaacccgcggagtttccaaatcaaacgtacagctgattcgtatggctaatttcataccttccatacagagcttgattgtcttaaggttttgggtatcctgcatgggtgcggacaagccggagagaaatgacatccaagtaacattgaacatggacccagcgtgctggacggacgttgcgaagataaagcgtgaaagtgcctctttcaccgcagtcttccgttgagctcggatcaaactgcgatagagttgctcagttttgttggccatttcctcagaggcttgcgcatatctctcgccctgtatatcccttccaaccgttgcgaagacttgcccagcccttgatgcaagaccgctaggaacaggtgcgggatgggcggcatttgcagcttgctctctttcggtgtccagaacaatctcgttgtttgcgatttcgtcgaagattgaaccaagatattcatcaggcaagtcctgattgtcattaataccacggttgtttttgatgaagtcttccttagtcatgcgacggcctttcatcttggagctatgctggtcggtgttaagcagaataacagagtacgcaagcacgtacgccgtatcggcgttggcaaatgcattcggattatgagtaagat

SEQ ID NO: 8074 - DNA, 707 bp, Emericella nidulans
atcatcttcacaagccacaattatccgtcgctacaagcttcgaaaatcgatcaacattggtctgagtctggatgtatgcaacctgggaaccagttcatcgatcaaacaacaatcaatcatcgctgtgtccggtagtgaccagtctcttgagatcctaaccattgacgtcgactcaagccgacagtatcgagcagcggccgggtacagtcaaattcgtcgctacgcgaccatccgcgacgttcaccccttctcaatgacaagaatatgcttctcacattttgttccgccgcccgccccagtcaccccagagacaccaccacaatacatcaagcttgcctccgtgagcttgggcaacactgtcgtcgtgcacacatttcctctgtccccgacgccaccttcaagtcgcaaccctcgctacgtcctcgtgcggccaggcgagtctgaactcttgacaggcttctccagtactctggctgccgttctctccatcgtgctcgtcattttccttctgcaagccttcacggaaattagaggcgtcatgcctccgtatcttggtatcacggactacttaccaaccgatattcgtaccaagattgccgtaccatataacgctcctctcccccattttccctcctctcccacgccaatcctacagacccaagcgttcccaagcacatcggcggcccccgatgaagcacaatcccgca

SEQ ID NO: 8075 - DNA, 1377 bp, Emericella nidulans
  unsure (1)..(1377): unsure at all n locations
gtttatcattcaggcgttctcgttgtgtcgcagacagagacgcttgaaatagtcttgaattaccatccatgtagggtatgtcgagtgtttgactccactgggtaatagcatgtacttacagaagtagatgaagaagcgaaccttaaagtcagacctcatcagaaaccacacctgctttactcccttcttgatggccatatcgacaatctgcgcagaagatagtccgcctcccacgatgacgagattcgtttccttccgtgcttggatcatcctcttaacatgcgggcacggaaacagacccggtctgaggtcggaactgtggcacgcgccctctttctcctgctcgctcagttcaaagggcatgatcttcttcccaccaggtccaacggccagtaccacagtccgggcatagaagaccctctcatcctttgtggtaacggtaaagaccttcttcacggagtcaagatcatccacatacccatacgtgatatcagaaacctctgcctcctcaataaacccctttctatccaaccgatacctagacacgacgctctcacagaaatctctgaacagccctgtgccaggcgaaaagtaatccttgcgatcacgttcgtcgatttcagtgtcccccagcactcccagattaccttttttctgcttcaacctctgccgttgttgcttctttttcttgtgtttggaaagctctttccctacgcagcccggtatctcccacagatcgtcttcgcggccttgctcggtcgtatacgcgagcatgccgtcgcgatcactggggtcgacatggaagaacataggactgcggagctgagcgatctcgagggtgttgaaggcccgatgccattttgtgagccagtttggggatgtcgagtctaggactttgatcgagggagaatctttgctttcttcttcgggctcagagtcccagtcgtgagaggatacagacgttgctgagtctctgccctgggtgaatgtcgtggagttcgtagaggtggaatcctcgctcgatacagacgaggccctctccttcccttgtgcagcaggttggtgcttgggaacccccaggctccccatctttcccggtctccttcggactaggttcatcctgcccttgtgtttattgatccagtggtaccgctgatgctcggcatccgtgaagattgccgagggggtgtgttctctcagtctggcggcgacggcgagaccgcagggacccgcgccaatgatgaggacgtcgtgaagttgagccatctcagtcgtatgctaagctttgaagtgctgcgaagggatatagaattatcaaggtagcggcaaagaggatgaatgatgataggtctgtggtgtgtatttgaacngttgctt

SEQ ID NO: 8076 - DNA, 812 bp, Emericella nidulans
ttagtggtttatgtttctaactgttaccccttgtgggttttcaccgtttagcggactaggatactcaacgtgttgccgtcttgcagatgaattcctggcgtctcatcggaacgaccatcgttcattgacaatcatcttcactacccggagcacaagaaagggaagcgacacccttcgcaacctacagaatcacctccgcacctccaccttcggtgcttcggccaccgctcgagtgaccttcgttcctgaaaatgtcgacctctgcaacctcctctcggtccgcgcgctatcccgtcgcctgaacaagaccttcccaaaactcgacgcgattgtgcttaatgccgggatagggggttggtctggcctcaattggcctctggccgtatggagcgtttgcaccgacattatccatgcgacgacgtggccaaagtacaaaattgcgcctgtaggtctcataacggacaaccagacaattactgtgaccgacaaggagccccgcctgggaaccgtcttctgcgccaacgtcttcggccactacatgctcgcgcataatgtcatgcctctcctgcaccgatccggatcccccaacggacccggacgcgtgatatggctctccagcactgaagccacgatcaacttcttcgatgttgatgattttcaggcgctccggtccaaagctccctacgagtcatcaaaagcgctaacagacctcctatccctcacctcagaccttcccagtactgctccctgggtgaaaagcttctattccaccgacttcgaaaccgattccaagcccagcaccggacctgaga

SEQ ID NO: 8077 - DNA, 885 bp, Emericella nidulans
ttcatcctcgcacttgttcagcaaggcaatccctgttttctcccatccctctgatcacggatacgccgcaacaacatcgtgcacgctagactcgaaatttcttattgctgttccagtcccgcattcaacggcccatgcatgggaaatgaggaatcacaccctgccctgagttaagcaatctttgctaacccagcaaggatggagatctcgcggaatatctcctagagtatttatttgtttacatattgattgagggagctctatcagaagtttagcgcacgccctgtctgcacgtaaaataaaccaccaagccaccacagttactcggtagtcaaaagtcgatagtcctgaaccatagaatagtaacagtagagtaatcaacagcaccttgtttgccaataattggactgccgtcaaaacaccggcagagcatcaccgagaagaacgagatcgagtgctttggctgggggtgggcactcctagcgcgctccattcctctatcactcttagactcttagactgaccatcccggtactaggccagaccagagttccaccctgcggctttgttgatttgatatcgattccttcttctatgcttctgccgcttcctcgactccagctgacaccttaactgtcgctttcttcttctcttccttctctctttcttgcgtgccgccagggtcagaaaaagggtctgagagacccccgagactctctttccggcctgcttggagtcattgtcacctctcccctctcattccttctacagtacctggcattcgtttccgatctttctccattcctttcgcctatccaagctccgacctactacaaaccccatcccagagcacgtcactttcgcaacacccctcgaccccaaaag

SEQ ID NO: 8078 - DNA, 601 bp, Emericella nidulans
ggacgcgagatatatattggctttcgtaaatacgctcttcccgccctcgctgcggccaatgccgtcttcgctgctagtgagtctacaatgctgggcatgtttgtgctccgatcccgccttgtctaacttgacatgcagactgtggcagtggtaagaccatcaccatcagcagccagagcgacctggatggttacaacacctgcgagagcctcgacggtgacgtcgaactctccgaccgcctcactggcaccgttaccatcaacggtgttcagagaatcaagggtgctctgaccagcactggtggcgcaaacatcacctccctctcggcccccagcctcgagactattgacgacaccttcaagctcgaaggcgctacatcactcacttccctcgacttccctcagctcacctcggtcggtgagattgacttccaggccgtccccgtcctccagagcctcggtttcaccaagggtgtcacgaaggctggcagtgtctctatcgtcaacacaggtctgacttccctcgacggtatttcgctcaactctgttggcagcttcgttgtcaccgacaacactcagctcgagaccgtcgacgtgaacaa

SEQ ID NO: 8079 - DNA, 1182 bp, Emericella nidulans
gccatggggcaaaggccctcttgctccagcaatccagctccgctcaacttcctcgaaagcacgcatcttcgcatctcgctcttgctgttccaccccgtcgtcgagatggttaagatcctgctggatcgaccctcgcttcacgaccgtctctgtcctcagctttcggcacagctcgtacactgccagtgctttctttctctcttctaatgagtttgatgtcgtccgggctaggcattcacctaggacagcggcatcctcaaatgttattcctgccccgctggcaaggtacgggagcgttgcgtgcacggagtcgccaagaaggactagggtttggcttgggtgtacccatgtatccagcggattgcggatgcataagcgccagctgaggacagatggacaaagggcgagaagttttccaatgctgtactccgttagtacgttttgtctttcagtgttttaattgcagaacgggtaaatactttggatcccagtcggcaaatagactctgcatttcgtcaacgtagccttttagagtcgatgggccctcttccggcatattatctggcaccaggaggacgagattgagctgagaggcattgcgaagcgggtatgtcacttcctttctatcagaaacggcaccagtgtgagggcgcggcttgtggacaacttacctgcatgcgccccaggcccgtaccagtaagtcacagctttctcgtctaggtactttgtcagtttaacatctccggtctcgcgtatatcctttgcatccaggagtatccgataggccatgtcgcccgttcgatgcggcggctccggtcgtcctaggagaatctcccgacaacgtgaattgataccatcggcgccaacaaccagatctgcaaccagcgattcctgacccgtgatgaacactctagcggtattgctctcgacgttgaactcgatattggcgacttctgagttggtatgaacggccgctcctaactcaactgccctctccagcagaacagcatgtaaatccgcgcggtggaagtcgttgaacggcgctccgtgctcaatacctgcctgggcaaaatccatgctcgagataaggtcgcccttccaaccgaggatgttgcatgtctgagtctgtgaggctttggatgccagctttccgtggacagcccatgatcgccagataagggg

SEQ ID NO: 8080 - DNA, 394 bp, Emericella nidulans
aaaaggctttcaatagatgtgagtccatcacggctaaatttccgtgccccgatttcattttcagataaagttgggctcgccgggcgcatgtgacatgaaatgctacgaagcaatttttgttactgctttgaatggatgcgcccattttctggcggcagatatagcattgagagtttccaccggctcctaggacaccttttcgacatcggtaataggcatcatcaaagaaggattaccaatagatacttcaggaatccagattgcgcagagaagatgtgaccacttggaagtggtggtctggttgaatgcgccctcaatgttcggacagaagatgcagtttggcgacctcttcctataagctggcatttccggcacagccactgtccttcgggga

SEQ ID NO: 8081 - DNA, 1288 bp, Emericella nidulans
agtcggcatgcaaaaaagctcagtccagctgagcttacattcagcaaagagatggattagacgaaaggggacatcttcgaagcctacgttgctgctgttattttgtctcatcccgatggctactccgttgctgaaacgtggctttctgagctttggtcgccgaaactggatagcttcgaaggatcagtttcaactttccaggccaaggaggcacttgcaaagaaaatcaacgggagaggcgccaaactgaggtatattgacgaaaaggaatcagttcagcatcagggaggaacgcaaactttttttattggcgtatattttacaggttggggctggaacaataagcatctcggttctggacaagggtcaaataaaacgattgccggagacagggcagctcaacaagccttggagaataccgagttaatccaggaaattgtcgcgtccagaccaacgcatggaacaggaacgtcatagaacttgggcttgcggtcgttcgattatccacttgtatcagctcattttcctttgcggaaagaacataatgaccagggggcctaggttcacgttagtagtcaagatcggttgggccaaggagcagctaaatatatctcgacactttttacttgtgaggtggaatgtggcactagtagtaccgccgcatgagtgctctggtcgtttacaaataattcttcagcagaaagccataaacattagttgatatgttttcaagcgttataaccaacccatgaaatgtatagaagacatctctaaacatcttgtctggactgaggtctaatcagacttgggcatagatgattcagcatgtggcacagccgttccggttctcactttcacaagttctcagatgcagacggctttgcaaaagtagtcaacacctacctacccaggaatgcacaggcaatctcatctttcgctacaattcaattacgctgctggtaatagataaccgccaatacagaagtgacacagtctttctggtgtcttgattctgacacatgaaaagatggactgggatcgtgccagaaggtttgttcttccttgccctcttgcaaaactcatgccactacgcgtttccatttactgagcgtgtgccttttccctccagatttgatgaccatcgtggtggagagagctatcggcctgggagttctcgaggttatagccgtcgcagcaggtcacctccacgaatgcgctcacctccaagtcgttttgtcgccgataccttgggcacatctccaggtcggccatacacccgccccaggag

SEQ ID NO: 8082 - DNA, 720 bp, Emericella nidulans
ttgtccaggccatttctgtatgtgcggtttgacattgttgaacgccataaatagcagtaggagcgtacgtaacgactttatattggcctaaaagtgattatacactatcatgtgggctgtgaataagaacataatcccacaacgttgaccgcatctccacgcttcatcggtgctggattatgcccttcgtgcaacagcccatatgagtggcagtgggaggaaccgcctggatagggccaaaccgactacaattgaagaggcccacataccgtcccttagtgaagataactattacttctgtgcaagccttgctactagttatatttgatatatatcaacctgtctttctacagtattcaatataccctgagcctactttcactaatagcatgttagtcggtataggttctcgaatgaggtcatttactttcctggcatggcctaggagtagctctcaagtatttagatattagcaagttaactcctgtttccaggtttagaagctggtacttggaataatgatattggttagaattagtaccatgatgactatcctagagtataagcaaggtatgcaggggcgagccagctatatagtaacgatccaggcagattgaaatatgggacaggccataatgacctttacggtcatgttgagagtatgcctggccgcacactgctcttacattatagagtatatagatgctgtgcgttaaattc

SEQ ID NO: 8083 - DNA, 1446 bp, Emericella nidulans
atctcggcgtcgccgttttccgaatattatcgactaggtcaggtgacagattaccatcgtatgcgctgtagatcattgcattctaataagcggatccagctgcggccaagcctatcaatgtaaacccaaaaagcaaaacgaggactatctccacgcaaagttctgacagggcatccgaacaggataatgtgagattgaattggggatattccgctcttggttactgtcgaacttgaacagacagtttgtggatggcttgatggtgctggctgctcatagaatggcaggtcatcacttacatcgccctgacgagtcatgatattgatctagtaatgtcccctgaaattcagacgtcgtgaacaaacttccctgccaagagatcgccttagaagcagtaaacccggacttctcgtattgggataatggtgatacacacgccaattcaggtttcactgggcctgaccagagatactgttcggtttgcgtactacaatatgccggtgtctcagctgagggcatcctcactttctagctgagctggcaagcatatttagacgtctgtgaattataacatgtgcgggaatttaaccacgagagtcaacttgttcggtgaggaatggcgaactgatcgacggtcatgttatatcctttcatcagcaggtagatattctgtgagcatcccgcaaggtttggactaccacgagagccatgtcggatattttctgctattgaatgatgaatcctcgcatgaagacaatccgcgccacggcggctgcactccgtcaggctcattggcactgctgggaaatgctaggagatgtaggtgggccacctcattcaacgccgatacaagccggttggagttgcggtaagacgagggtcatggtggttagatgtgagctgacaatgcacgtccctggatggggtgccgtacggtttggccagcgtgacaaagggattatagcgtcgttatgcagtaaatatcgcaaggtggtcgcgtaaacgttgctttgaatgattttctgcgagtatccgccttgaattcaagaattgactgcactgcaagcaaattagtgacgggccaattgcaagaacgaattaccaacaagacaatctgaacggttgagccgacatacggcgttggatggtctccatatactccgtaccgtagacgcttttaatgccatagtctagcgacggttggcggggcgccgtggagacctcggcgaaggcctaatttctcaaagcggtaaaaggaggaaataaactagaccaggatcggattaattcaagagaatctaggtttgccccgggcggtcaggagaatttatggagactaggcttgactcccaacagggaatgtcgacgattcactttgatcctccctcaggggttgtcgatcgccttcaagccccgggtttctttgtggagctcgctaaacactat

SEQ ID NO: 8084 - DNA, 522 bp, Emericella nidulans
tgggatcatcgggcgaatccggatcatggtagttttattgaaagtgttttaaatgaatcccaggggccaaattgcatgcaagtgtctctaaaaggtctgggaaacaaccaattgggtttggctcgcacctacgtaggatttcttttatctgcagggttgcatctgcagacaggggatgatgttggccgtcagcttgtactattgcgttgttggactgttccagccaacaagacctcttcacaggaagtccaactatcaaatttccagcaattgtacttcactctggtgggctttttgttttgttcgggaccttgggaatacatgaagggagcaagttagtcagtgtcatggttgcaggtctggattgggtgtttctatattgcggtttttacgtcggccaggagagaccagtaccacaaggcaccagaatactcagcggttgctaaacatggccagattacctgacaggaaacgactcgactggtccgcagatctcggcctaacgtgttctgtttttggaga

SEQ ID NO: 8085 - DNA, 848 bp, Emericella nidulans
aagcgtattcctcctccgtgatatctgcggcgttgcggctccagataggcttagtcttgttaagctcctcctgctcgaacttggactccttgctagccttggtcttcttctccttcttctcctcctcatcgtcaacctcctcaatcttgggcttcttctcgtcaccctcctcttccttggtctcagcctcctcgtcagggacctccttctcagtctccttcaggacgtggaggtagatggggtaggagatgaactcggagtgcttgcgaacaacctccttgatacggctctcctggaggtactcggtctgttcatccttcaagtggaagatcatcttggtaccacggccaaggggctcaccctcggtgtcctgagtgagagtgaaagtaccaccagcggaggactcccaaatgtactgctcatcatcgttgtgcttggagacgacagtgacacggtcggcaacgaggtaggcggagtagaaaccgacaccaaactgaccaatcatagagatatcagcaccagcggagagagcctccatgaactgcttggtgccagagcgagcaatggtaccgaggttgttgatcagatcctagtgctagtgttagtcaaggctttcccgactgtgtggaaatcaagcgaacttacagccttggtcataccaataccggtatcacggatagtgagagtcttgttctcggcatcgggaatgatgtcgatgcggaggtccttgcccgagtcgagcttggaggggtcagacagagactcatagcgaatcttgtcaagggcatcggaagcgttggagatgatttctcgcaggaaaatcttcttgttggagtagcagtattgat

SEQ ID NO: 8086 - DNA, 853 bp, Emericella nidulans
atgcatggtagccagttaagtagacggtgcgttcggtgctgtaaggtttcaaaggcaatgtatccgccgcgttcagttttgtcctttaagatgacactgaagctggggcatctgaggtcttgtatctgtggcggtatgtggaatcttgaggggggattgcctggctagatatgtttggtgggtgtgggcgtgcgtaaaatcgaattggttgtaattagtggtgagttgagtgtgtaacgggctcggaatgagccggtagatatgtatatatatatatatataatataataatataaaatgaaatcgtatcccgtgacgaagtagagatgggaaagcattatttatgtgctaacagttggagacccgaaaggcccggcgacagcatgttctatattactgggaagccatgaaaaccagctccgaatttggggggctctacacaatccaccagatggcaatgtataaagtaaatcaacctgaataggattccgtaacgctttgtggacttggatgggtatgagtgggtagctgtgtgtaccttctggaagatagacggccagggatgttaattgtcattgcaagcaaaggattcattcaagatcgacctgcatcttatcttctaagatacattatccatgtctgttattcaagacctcctgttctacaacaggtgggccaggtcaaaacgacgtcccagaactccatcatcaagatccagactcgatccattcttttcctttttggatttacgcctgtgcatgacacgtcagtcctgccttgactttcattgcccggaaaagcagttgtgagagaaggctgtttatgctggcattttaatttcgtcccttgatgg

SEQ ID NO: 8087 - DNA, 883 bp, Emericella nidulans
tgcgatatacgactactatagggatcctatcagaacaagagtgcttctatccgttcagcacttcgtcatgaaaacgtcgcgcattccatcttgaacgggcctagcatactgggtagcagccaagagtgtttcatttttctataagaagtgcatagagttgggtcgtctttgaagctgaattcattctcgtcagattaaataggtatatttgtcaactcttgacctactaacgcactgagatgttcaacagtgtcaacaacagcaaccctcctgctcagaaacttattctaactaacaatacgttgcatttgcaacaggggccctaataacacctgcatcgagcaggcgttcataagaccagttatcgcgctgcgtcacctgcccatccacaacagcactagagttgtgcttgatattccaaaacgcgccgtcgctcacgtacttggtccaggcatagcgctgcatctcaaaaagctcttgacgcctctcgaaggcattgctgtagagcttttggagcgcccactcacccacgaagacggggaacttgccaccgcctgggagaatcgacgcctgtccacagatagccccgctcacccattgcgagtacacacccggggcggcaaagtagtatacatgctggtcgacgacgagattcgtgccgggagggaagtaaggagaccagtgctcctcggagaggaagcagtcctgtagcatgagggggaagcgcttgtcgacggcggcaatgcgggtgaggactccttgcgtgtatttgacaatccacgcggtgccgtttgctgtcaacgtcttggggggatcgtactgcgtcgggcttatcggaggcttcattgagagaggatatggtgaaggcccagggatacccggt

SEQ ID NO: 8088 - DNA, 869 bp, Emericella nidulans
gcatgagcgagcttcccaggtgttgttcattctagtgggggataatggtgctctaatcataatcagggccatagctagcatatgtgcaaaattgtattcagtttacaattgctcatggaagactgggcaggaacattaattgtaaacgctgacgggcacagtgatcacactgacttacattactcgcgtaggactcactgatagcgttacagacaactaacctgtattgccatctgaaataatggatcttcaaaggctcagaacgtggtgagaaagggtatgtttggtagtacagtgtctagaggactgactgatttggctctgtcaggtcagtgcggcgagcgggatgctcttactgatagggaacatgaccgtgactcagagtatctgcacactaacgcccgtaagaacacgtgagtgtttggccagtagaaggtcaatgaccagcacacggcctgacagatgcatgtttgaggtgtggttggtgcatctaggaagatcagatgaatccagcgttaattcagaggcgactaacaaaacaggactgtaagatcccgggcgtcaccgcagggatttactctacgctgtcttttacgccctgtctttaaccgtgcgggccttgtttttcttcggatgatagccatttattttcaacctaaaatttttaattgataagccttcttgaaagtgtctttagaaaactgccgtagccacctgaaattattgaaaatgttttccaacggagactattattccgaaccgcctttaaaaaaaacccggttaggggccacttttatggcttttctttaaacgttgtggtgggggacactcaaataaaaaatcctttacaaaatactgggttgggggtg

SEQ ID NO: 8089 - DNA, 1048 bp, Emericella nidulans
ataaccctctactaaaggcaatggcagtgataggtgcttgtgcggacagaacattggcatcagcatccgcgcgtgaaggtgtgaactcaggtgccgctgtgttggcggcagtgtcaagcaaattctcctcattgtggttactcgaatcgaggctctttccgctttccttcgtttccttgttctcttccgaagacggtgcgtctggttctttttctataggctgaccttcaacggcgttaatcttggctacgagcacgggctcttcaacagccttattcatcggcccaacagtaggctccatatgttcattgttgctgattgaagctgcttctaactcgatatattcgagctgcggctgtggcgcaggctcaactgttgcctctggttcgggaaccttcgcatcgtcaggttgcggcccaggagcacgcacagactcagttgttggctctgattcgtgggcttcgacagtctcaacttccggttcaatttcccgtttcagctgtggctcatgttcaagctcagtttcagcgtccagcacactgtccttctcaacattctcagactccgtcacagagacatctcttgcagcgaaaggctcatagaggccagactctacacgtcgtagcgtctctattccggatgggagatccgtctcccatcccttctcctccacattatgatcagcctcatcccgactcatcgcatcaaagaactcatcctccgtggtatcagcgacggactcagcaggcttatttgtctcgctgggtgtggtcatggagaattccccttgtacggcattgtccacattggcggtacgagccattgtggcgcctacgatggaggcgaacgccaaggtgtcgggtggatgtaatcgcgttctgtcacggttctgggggagtgtgacggggttaagtctgcaagggtaggcacatcgttgccggtgactgttcgggcgtcatcatcttggccttcgacttcagcttcaagactctcgcgtttggaatcagcgagtagctttgtatcaggatatggtgttgaagcagatgaa

SEQ ID NO: 8090 - DNA, 841 bp, Emericella nidulans
ttgcacatgatatagaacaccaggaggcacatgcgagggaggctcgggagcatgacgtgctgcttgttggtacggacgaccgtgaaaacagccagagggattaaaagcccctgcaagacacgcatggcgatcttttatctaaaagcctgcaatgtccagaatattcgactaaaccaatctgtcgtctggatgttattgaccgtatctaagctgtagcaacctgctgtgactatcaaacgctatgcatcatcagatactgctgacagtgcaactgcgaccacttgtaaggaaatggatgttcaaccgtcccagattgctggtagacctccatgcgggtcatttgaactcgacctaatagccattactggaccagtaattacggcaaaacacattacaagtgtgcgcgttctgtaccattactaccgaaatcgggcgcttatggcttttaatgccagatgtgaggcttgctggtttcatgcatacaatcttccaaatctcttaaaaactatgaaaaacgcccttaatttaaagttgcaaacacgaagggcgaaaaataccccggggttacacaagaatgtactctgggtgctttgtgttccacctgtcataacttaagtggcctgcttcttatttgaaggttttttattatcgcctgtttaataataaggagatagcctcgaacaagattgctttcgaacaaaaagaaaaaaccgtgtttttgggaacttgaaaatcaccttagaaaaattccttgtaacctttaagatatggggggtgtgctttaattttgggggccaaccgtcctaaacaaaaatgtctttttcccaaaaaaatcgtggaa

SEQ ID NO: 8091 - DNA, 158 bp, Emericella nidulans
ggaaatcgtctcagaatagaagtgcgggtgaatccggtgcactccatggagctgagatattgggtcggggcaagaccccaacccgggtggggtggttgtgggagcactggctgtagtgtgacagcgacaacagggaagaacggttgtcgaactcgacg

SEQ ID NO: 8092 - DNA, 687 bp, Emericella nidulans
tcaactcattctcctccttcccaattgtcatacggttcgtctccgaaagcgcacccagtctgagattgaagcatcttccggcatctcagcgatgaacttggcaaagtcgtccacgaagtcgtcttcagttttgagagttgcattgtaatcgctgttgctttcgggggcgcggacgtgcttatcaacgccgggttcgattaccgaaaagtcatcgagataagtgagcttcatcgggtctttgcgaatcctgaactgctctgccatatcctttgggtcaatggccgcctcaccagcttcaatcgcggcgagttgctcgggcgtgtaatgcttcttcaggtaggccttttcctcctctgtgtatggcttgaaatcatccggcttcatctcttgcgagagctgtttaagattcacgccattttcaacgggctttttgctgggtttgtcggtaaattgcgtggcggacaattggaattgacgacgaggcacgcgagggctgtttgcagcggcgcgtgagaagctgcagaacagacacctggcgggacgggcgaaactcatattgacgagtcagctccgcggccctctgaggtccagggctccagaggtagtatcgaagggtgtggagtgtggaggacggggggtgaatcggaggatggtggaggacaagttgaggccggcagacggagagaa

SEQ ID NO: 8093 - DNA, 695 bp, Emericella nidulans
gtacacttctgggtgtagtcagtacacctctagtactcgggatgagtgccaggccatggcaagagtaggtagttttgcaacctcgcaactattttgtctcctctttattgcctgcggcttcctccatcgatatgtttttacttcatctcgtcttagcacgctctatggaccgaactactctacgctcccgtcgcaagacaaaggccatctgcgactagtacatgtcgggatagtaatgaagtttgttgcggtgccaaccatgataataccgctatgcatcgtcaacctgggtggctacacgtggtccgccacgttggagcctggcgttaccctcctggatctcactagtctgtctggctgttctttggcggcatcagcattatttgacctcgtcttcgacgatgggataaggccgctatatatcggccatcatttggcaatgctcctggccacacatggcacaactgccctcatcatgaccctccccatcaacaataagatgcggatgctggggctctttcaggcctacaaggtcggactgacatggggtaggctgtcatcgagaaacctccgttcctcatggctaacgcagcggcagttctcttctccagtctcggaagcacagtctccaggctaacttatctttttcgcaagctctttacatgcgagcccaatactctgcgccgactcttcct

SEQ ID NO: 8094 - DNA, 927 bp, Emericella nidulans
tggagagaatgcacagcaatgcaaccaatgcgaaaacactgtgagggacatgctggactcattgatcagtcataccctgtgctatcttcatattcgccgcagctggagattctttacggggccgtctccaatcccgaaccctcagcgctcgctcatgtctcctacgatcctgcgtcactaaagtccgagctcatcgactattctcctcctatagacccctctcacgaactggcccgcgtgggcttctatatcacgacaccaactaaccccaaacaatgggttggcacactcataccgccgtctgcgctaacgggagctgattcatcgcaaataccgaccctccgcctgcatgttagccctaccaacgagatataccatgtctctatcggctctactgccgcatcttctggttcctcgtccaagagcattgaagttgagcttatagcggataaactcggtcctagcccgctccttaatcgccctattgttgttgggccggacggcaaaaattccgaggaacaacccgagaagactttattccaaaagtgagtaacctctttccatttattcctgtgtgttaacttggtctaatcaatacatatatttcaaaacagatactggtgggtgtttctcattgttactttcttggccatgtccgggggcgcggaacagcaatgagtctccgattagctagctacttcgagttggaagattcgtgttctacttgcgtaccaattagacgctattgcaaagagactcaactataggtgttcttggacgtgtcgttttgattagcttcgccagtcccaactatcctttggatggccatatgacaaggccactgccttagaagtttactggcattgaagccctgaaacggcatatatagaaagtggacacaaccctgccactgcgctgagagttgat

SEQ ID NO: 8095 - DNA, 1398 bp, Emericella nidulans
gtgtatttgaagccttgttggatggcgacataaccaatcggccggtgctgcaatattcagaggcctggatgcgttagagcttgatcaaacatcactagagattgaacacgtctagtcattggttcggaacagcgttctaggcattcgttgcaagtttgcgcagtactagtgtgagagaccctctgtttgaatggaacacataatctacctggtaaggccttgagacatagcctaacaatatcaagcttacactaaaatggatacttcaacaacccccgaaagacagtaacagtgtactgaaaagatttttaagtttttggttatttcaccacaaatcactgatgagcggaccatttagggaattgccaatgaataaacctcacccgccgataaagccataacaggtttttctcacagagctagattagaagatatagccatgagcagaatgattcattatgaagtttaggcctcggtatttttagcagtgtcttgataagggtatgtacgtcaagtaatgctatgcttcgcttcttggaatccctactggtaatggatgagccttgttttccgcctatatatctaccttttttcatcgatgtaggtggttttcaaagaatgctaagggttgatgatagatatggtgagatgccctttctccaagtaatcgggctccctggttcaactcattttggccacgatcatgcgtgtccgtcagtactggacgaatttgatggccagtgaacgtttcgcatatgggaggtagtaaatataacgcagcagcattctctgggtcgtcgaattatctttaggcaatgtaagcttgacttctggatgctggcttgtcgacagatatcttcaaggacataggggactctatttacccagcgagatacacgctatactgcatttggatgttccagcactaccttttgattatctctacttccatacgcagtatattgtatctgaaaataactgttctatctaccatgttcaactcggcagagggtcgattctccggagctgctatgtagtaagtcttgaagagttaaatccagcatcggacggtaagactgcgaacagtaaccaaggagcttaggcttaactccgaactcagtagatttgagactccctgaagttatagaaggaccgtgctcgcacaagtccacaccaaatgacttaaggcggagggacagcgataactccgattatgtccgttgaatcaggcctgcgttaacaatatataagcccagctcaagagcatcaggttgatgaactacacatacccaaatcagttagcctctagtcatggctcagcaatacgccaaagaccaacctgcaggcttcaccaaccgcatcgagaagggtgccattattgagtagtctccaggtgct

SEQ ID NO: 8096 - DNA, 958 bp, Emericella nidulans
tcggggacgacgccttgtcctgcttacgggatatcaagcgatggctgaagttatatgatgagaaattcaatcggatggatgttgcacgatgtctaggggaagcgaacctggtcaatggtgaccttattcagattctttccctttggtggagagaagggcagcagagcaaatatatgacaaggattgcgctggcatgcggtaaggttttgtgcctaattcactgctggcatctggtgtacctgacagtttgcagtggagttattagtgccgttgacttggccgctagagatacatggggagatgacagttaaccaccatcgccacataccttacctacaacaagctcaagtgggctacaaacgcggcattttaaatatggccagctgcggtattttacgggcggttatccgcatcggccttcccagcatggcaattccaccatcagaacggacggctcgtgacgaagggatactgaagatcatgctctatctgctgcggaatattgcaataataaccgcaaatgcgcgtctcgcagcggagggagaagaggaagaaacgtcaaggtcggcgacgatcaacgcgttccacgaccaggacgtctttgccctgctgctcaccttatgctcgaatgttagcgacgatttcaatatgttggatattcctcttctcgagatactgtttcatatggtaaggggtatcgatgtcgaaaagttgttcatgaacgatgctcagcgatctgccaagcgtaccgacgaattaaacgacctgctacgacaggagtcctccatgcgaagagaatacgcaaagaatgcgccgaccaggcacggccgcttcgggacgatgatttgggttaagcgtgatgatgcgaaaatgtcaacggtatttggtcaggacgtacttagagatgaacagacgaccctttacaagatggaccagagcaaaaggtggaataagcctt

SEQ ID NO: 8097 - DNA, 998 bp, Emericella nidulans
gctctcggacatttctgtgccatgaagcgtgatataattaagacaatagcttgatgtttttgcagtaaagacttgaattctcttgaaacttgttaactgctacctggcttatgttacttcacttggattcacttataaccagtttgattacagcattcatcttgttaggaaagatatctgcttacattgttatattttataccctctgcagctttgcatgagcactgcgtgggcaatgcttaggcttttggatcaggacgtggcattttgcgtagattcttccgtctttgcctctgaccaatgctgatccctataatcagagcgtcttatcagtttcaacctataatgctttatcgaactcccccatacctccaatacagactttctgcagcgtgtcgaaagatggcagaggtttcagcaatcgtagcgacgtggtgcaaccgtcggcagccacatgttgatatcgatacctggctggctcaaatcaacgactctcattctctgtatccagccaccaagccgctgctaagccagcttctgcctccccgcttgctcttcaagctgacgagtataccataagcagaccccatacaaaatatctaatacaaagaaagcccccgataaccaccgcatgaaaatattatccgaccacgcccatacctgcggccagtaggtcgagcgaagaaacaaactagctactgcgaatactgatgcgatgaatcgtgggagcctatggttcaagttaaatcagccattcatcctcgaggcattcagtgcatttaagtcaatcaatttaagtatgtagacttaccacattccatacgacgctccacgcctttgtccccgtggaccaacaacccagcgccgtgccgttattgtgatcaacatccataccgctcagtaaacgcgcgagcggcctagcttacagaagggccaaggcccgggagaacccagacccaccagcccattgcggagttggcccgaagggcggttacttt

SEQ ID NO: 8098 - DNA, 116 bp, Emericella nidulans
cagctgacggcgtacgagctacgtggcttcagtcggttggactagctagtgatccttcttgaagacttcctacggaagtgacagcagtcaacattcagttcgcaagcctatcacta

SEQ ID NO: 8099 - DNA, 1224 bp, Emericella nidulans
tacattattcccataccctactcgtctcccacaatcctccaaccgatcagtccttgatgtcataacttaagcctccctctcacgcaggagaaccaccctccgttcctagtcgaacactccacatcaatattcccaatttctccctcatacggctcacatctgtacttgggccaaactcaatggacccctcgccctgcccggctggccctctacgacgacagtccagtgctgcggatccggtcgcccgttcggcaaccagaaggaatagttggtgtcctcgcagacctcaggtgcaacgtaggtggcgccgtcgatcctgtttcgaatcagtatggctctagctaagttgtagggcttgcgggggaaagagtgagggggtggagttaccaggcactgtggcaggtagtggaacccagtgcggctccgtagggatcgcgcgaagtcactttgatggtgagatcccaggtgttgctttctttcaggtggtagagcttgacgtcatcgatgctgaaggggaagggagagggagagctggctgattcggtagcgggagcagcaaagcgggcgccagcaagggcaagcagggtagcgatggtggtcttcatgatgaaggcgtctatgttggagatactatattggttaagcgaatgttcttgatttagtgtatgctgagtatcgttctcctctaccaggagatctgggaatatttatatcccttcggtggcagttgtacagaaaggccaccatatgatgatgacggtgatgatgatgatgatgatgctgcagatgcagatgcagacgcagatgcaggtgcttgatcgtacgccttgagtagcatgtctcacacctcgtattcaccgtcgtcgccatcaaggactcagcccacttccacaccttgcgtggcgatagtcacacagtgtgaaggtggctctgtaccactctaaggctgcaatccaggcgaaggcgtgtcacaaagatagatggattcgagacataccgaggggtaagcattacaaagcacaagtggccaacagtcagtttagggctggagtgagacatcgccaagccgcagctggcacaagcatagctgctactgggtgattttttttggacaggcttatttgatgaggatacattggccgtgcgcttataaggattcttactccagaacgaatcatatgacattcctgcgtcaaaaaatagatccctttagtgagggttaat

SEQ ID NO: 8100 - DNA, 551 bp, Emericella nidulans
gcttcctaggtagatgtgcaagactgatgtaaagagttcatcaaaaaagcagcactgggtcatgtcattatctcagtagatcatccagacatatgtgggtaaggggaataaacaaggcaaaaggaaaagatacatcgcgaatagagtagttctatctatacagatgctcaaggattgcaacttcaagtgaaggttaagcagcgcagtggctatcatgtgaagtcgacgctatgtccttgtcgttcctgccttgctcgggctctctccgctcgtctccggcgccgattagtggcgtactcactcgcatcggtccccgtatatgttccaggggatgtgatgcttccgtagggatttgttgaaggcgcacggggcgggatgtaactcatgctctggtgtggggggaggaatgacgaggcagggggagggatgctgtgccctgaagctgcagggccgggggcgaggggcgtttgaggcactggggcaggggttgtatttgcggtggcggcgcacagcagcagcagcagcgcgttctcgatccatctgctcctgtt

SEQ ID NO: 8101 - DNA, 113 bp, Emericella nidulans
cgtagaaataattgcggcaagtcaatccttaagacagaagcttgaatagatgtctgctaatatggactagacttgttatgccacgggttggtcgcggcgtttacagcgcctag

SEQ ID NO: 8102 - DNA, 1121 bp, Emericella nidulans
atatcttctcctttaccggtatcagttcatcgcaaccgatgacgccgttctccccagcaacttgtgaggatacgcccagctctcgggagtctgacgcggtgtccaatgggctcacaaactgcctttcggatatgccacagtttgaccgtcgattcatcctgcagttcatcttcgtttgcaggctcggtcacctttttccatgtttccttccatcgagaccaccagggttctggcaatctgccacagtatttcaccataaagtggacataggcctcaacgccgtcttcctggatgcggaatagtctgttgccaaagcggatttcgtacattgttgctgctagagcaaaaatatcggattctttgccggccttctcgtccagagcaacctcgggagccgcatactggaagggaatcccagatccatgtggcggcgggttgccggctataaaggactccccaaaatcagcgatacggatctggtgacagcatacttgtgttgatgaagttgacctccacgagactgggttgagaatatagcgcgggggatgtgcattcggaggagcgtttttgtacacgacgacagctgctccctcgggctcgcctaagatgtcgatgacttctctctctgacttaccatccagaccgttgactctgagaagaatgtttgaaggtctgaagtctagcttacagttagcaggtttcaggaaagcagtgtctgcgacagactcaccaccatgacagatattatgccgatgcagcacagacatagcctcagctgcctggcgcgtgagtttccgcaaaaacacatcgacatcatcaaccacatgagatatatttcccagccctgatgcggctacttcgtagacaaaacattggtgggtgccgttcggaccgtcaagcgtaaactcttgccaggggagaagacaccattcctcgacgtcaggatcacggtccgctattccctgcagccagcggatattctcctgctccctgcaatcctccccggaccactctgctttgaggatcttgattgccacgtatatcgttgggtcggtgcaacccagctacagagccagacgatgccaaaccatccgctacaagcttgtggatgacttgaattg

SEQ ID NO: 8103 - DNA, 210 bp, Emericella nidulans
cgagagcaagattgtcaaggaattgggcgccaccacgtagattaaccactgtagccacaatgtcgagaactgtcgacggtaccccggtagaggcaactcctaggtctagttgcgaaggcatgaagcgtatccaaagctgctcttaccggtcgaacatgaggaacccatcactagatccgtctattacgttacctcccacgatgcaccaat

SEQ ID NO: 8104 - DNA, 710 bp, Emericella nidulans
cattgtctgagaaagtctgcgatctcctgaagctagagcatcccgagatacggatcgagagaagtgatggccggctgatcgaaaccggcggacaatatactgcggccgcctatttcaaaggtgacccgttcctcacaagggccggcgcaattgggcgtatctagactttcaatagtactaggactgcagtgcatgaagcctgcgcttggaatgtttgcaattatctgattgatctggtgaaggaggacatgatgctggaagacaacgcagccaaagagcacgaaacaattactcggtggggtgacacagctaggaagtgattctatactgatgatatgtgacctcataagatcccggtgtgatctgaagccgactatgatcttcggtggctttgtcaatgtaatcgcttagggcttgccaaaccaaaattatagggatatcaagccccatttgaaagggttagacagagcaacgaagatgattcaacttgcgaaaaattacacacatttacgcttggatgcataatatgaattggttccgcttgcgtcctcgtttgttggggagctatctcatcactaaagaggcattcagcaccgtgggctttgcgccggttatcagggtagacgggaaataagcaaatctagagtcccaatagccgtgtcacaatctgaacacgattatgtcagtatagttaactgacagtgagtttg

SEQ ID NO: 8105 - DNA, 1114 bp, Emericella nidulans
gtctaccattcgccctcaagcacctacccacatcgataaactcgcccacgacacggaggacgtcgcctcgccgcaagcagagcctctgacagtggatgagctcgtccgtcaccgtgcatctctcgggccatcgcaaccagtcgtttactaccctcgggctgggatagagtactctgaattcccactgcaaaatctcgatgtctttgcctaccgagtcgcgaagatactggcagagaagatcccaccccggaagtcctcctcagaatgtcccgctgtcgttgccttattgggtccttcgaacctggactacctcgttctccttctcgcagtaaccaaactcggccatgctgggctgcttctttccaccaggatatcagtcgaggcccatgtgtctttgatagaacggaccaacgcgcagcatatgttcgtccacggctccttcagagatatagctgcgaaagtcagcgagcgaattccgctggtgcaagttcacagtatcccaagtgaagagaactacgattaccacatcccggacgaacccatcgacacgaaccttctttcccatctggaccctgaagtcgaaacaaagcatctcgcctggatcatccacagttcgggctcaaccgggctgcccaaacccatattccagtcacagagagcggcagtcaagaactatgctggtaatatgaacatgcgtggtttcattaccttacccttgtatcataatcatggcatctgctgtcttttccggacgatttattcaaacaagactctgcatttgtacaaccctcagcttccgctcacaagtcagtatctggttgagattatgcggtcatacaatttcgagatcttctacggagtcccgtacgcgctaaagctgcttgcggagtccgaagagggtattgaagcccttgctaaactgaaagctgtaatgtttggaggatctcgtgtccggattctttggggaacttgctggttgagaatggggttaactcattgctcattatggctcgtaagtactgttagatacgatggtgctcactaaacttacttcattagaactgagacaggccagttgatgacttccatgcgacatcctggcgataaaagatgg

SEQ ID NO: 8106 - DNA, 680 bp, Emericella nidulans
tatattccgttcatagtacatacgagtatttatctcgaccttaaatgtgaagaaatatttgacgagacacggcattctggcacagtattatgtatctacggtttcctacaacagtgatttctttggtatgataatagacgttattgtcgaatactagaatatcatcaaggtagaagtgtcttattcaggattttagtgttcccattcgacgagccgctttcaagatgagctgagttgctaaggctactgatggcctagaattacgacaaaagagacaacacggagaatgtagacccggctcatgatttgtgaacgcttagaggataacgtcaagtctgaagcgcatgttttcatggattatactaagataacctctactcaactagtcggtccgcatgacgacttatagccaaggtactgtgagttagcaatagctccacccaggcctgcctgacagaggaaagaaaacaagggaccaccagttcacaagcgaataaactccaaaatccggaagaatgtcgtccatgacttcgcattcctctctggtttgctaggtaggtatcgcagtcgaaagaccgtactccaagaggcgtgctatcacgactacatattacgaagcaagtgctatattaaagggtgatgttgggggtgaagtgtcttgtatgatgaccgcacatgtt

SEQ ID NO: 8107 - DNA, 1009 bp, Emericella nidulans
ttcgcttagagttcaagaccaagagaggtgaaaggagtcatcaaataggcgttggataccgcgtagataaagtctgagtgagatatcaaggccgcagaaagcccgatgacaggtccgttcagcgccgtaaccagaatcttcgaatggctgtagaacgctctcgccacgtcgacgttgttattcaccaatttcggaagccagtaagggcgagacaacatctcctccatagatggtggcttccctttgaggtcagcccctctgaagcctgcgtcagcatctcttgcaaactctgcgttgttcgcgccaaagcgaagaggacttacgcggagaaaaaggggccctcgccgattagcacagtaacatagacgtctggattctcctcggcagctcgaagcaagcttgcaagacgatagtatagactctgtgtcaaggcattgaactttctagggttgttcaacgtgatgacggcaaaaatgccattgatatcaaggcgaacaagatcttcctcagccatgactcaaaaggatcgttcagtatgtttgatgacaagagactttggaaatgtcttaattattctagatctaagggttcttgttgatctttttaaatagtctcttcagcgttgacttcgtcttgagtacccgcggctattcagtgaatatctttagtgccgcggaaaatgctgcccatcaccgtctcagcctaagtagacgttggtttactgccccaagcaagtactcgcctggcacgtggtctggagtacatatgcgttgttaacagtcggcatttacttcggtccttagcatcaggaataaccctgtttgttaggatggatcactggatatggtacctaggcctggtaataggtctgagtcccaaaaacctacctctcatgcggcatgtaagttagagattccagtcctttctcccagaaaatttatactaataatttagtttcggatttttggtgccttataatgggctatctgcacgcagaaggtccgcggtg

SEQ ID NO: 8108 - DNA, 515 bp, Emericella nidulans
agcttggatccattgaagaatcgcttggaaagactgaagtcgacaatgcttctcttgctcaacgttattatgtatgcgggtcagattcgaaggtatgtctggtcctttgcagacttcttgtaattactaattgccaactataaagcagccacgggtttccacccttactccaagaccaacgtgtcttaatggacagccttctgaaggataaaataaagaacggtcaagagccacgccaattcgccgttgctgaacaatgtccaaaagccccatcagtatctacaagcagcaatggagcccacgctgacattgatgggaccattgataccgatgaacccgccgagttcaaagagtacaacctccttatccaaaagatgcttcaagaaattggcaggtgcaagtacaagcttgaagaaagccgtcactcacgaatcaaaactggcgtcttgaatatacactcaggtgaaatcatgcgctttcactagaatatggacatcatgttcgcactgaccatt

SEQ ID NO: 8109 - DNA, 1160 bp, Emericella nidulans
acatacggctgcttggccgtggacaatttgtacaacataatgcataccacagaccgtatgtcgattggattatatcccatactcattctcactaactctctagccatcgcgtatcgtgtgaacgccgcagtcgacagtgatctcgccaattcactaaaacccgccatgatcccaggctcaacatccacattctggcgctccttcggcagtgccttccgctggagcagctccacagcgtctgtgcccgagcgtccctccgtaatagcaaagctaccatcaaacgtggaaatggaaacacacgatttcacacgcgaggagatagccgaaaaacgaatgctcctgctgaacgataacggccaagttgactacttcctgactggaggcggtggtgccttgaatattcaatacctcaacatgcttagcgcgcatagcagctactggacgctcacggacttcgtgcgattcctcgttatagagatcgctcggaagcagagtcgcgacgcagtcttgccggcattgagggcggagaagaagaagggatggaagtaccataaagggtgatattctccgtaggcgaatgcggtgctctgaagaagttaggttttgttggaatgttgctcgaggtgattggagaactacacgatgacacatagataccctactcattgatctcgtttgctttttgttttcttcttgctttctacacttatatcacatctacttccaaatctatatcatcatagaaaccatttgctaggataatagcaatacttgatatcatttctttgcggctcctgcgatgcctcggctaccgcggacgtcggcatagatctcgaagcgaggggaaatcaacaacctactaaaatatttcaaggtaccctgcctctacacctaatttacacagaaatgggtatttgtatgcttgaaattgatggtcgttcttctataatttcgagtcctaatttcacctgagccttgttcatatttaacttcatcctcagtatatttatcgcatcacaagtataccggtatactccccgcatccattacctttatccacgcaaagacacatacttataccggatataacatacaacgcgataaagcccactagatcgtttatataacgaaaatgcaacgctggagccattcctagaaaa

SEQ ID NO: 8110 - DNA, 212 bp, Emericella nidulans
ttacattttattgtgaaattgggtcgcgtttcatacgattcggttatgccatcgacgcgtaaaggtttttaatggtttcccgtaaccagacgatcttcggattatggcggttccgtttatgccacatcagggtactaggaacttccagcttaattagcaggctttcatcacaccggagaggaagagcagccatcggcagttgatggaggtga

SEQ ID NO: 8111 - DNA, 687 bp, Emericella nidulans
gatgccttcgtgtgtagtgcatacgtcttactaggtttattcagggtacgctgcaagaattcctcaagccccgaaatctgtccagagtctcgagtagtccaccttgacgagttcctgctgcaatgacgctatagctcggctcaatgcggctagccccttccgtcggtccagcccaatcagatcacaagaccctggctagctctcgaataaagcaccatcacatgccactcgcttctgtttcattctctaacttctttcttctcttcaacgctcaaatcatggatcgtggcctctcaacaggcaccaatcagtccggtgctggacttcgggaacgagctgtgacttctcaggccgatttaaacgtcattactgagaacccaaccgttaccaatgcgagcaatggaaaggacaaagctggcaagacatttggtcgcactccagatgggacaggtgtgtcttcctcacttccacgccttcaaacgggctttgctgtgtctatactacccattgtatgtctgtatgttaacccaaactgcctcagtcttcacggtgcctcagacgcatgatatggtctccagctcttgtcgcctctgagccaagaactttccgactcgttgcctgacaatactcgcgggcatatttcctgctgtggaacttcttcaggtgcaaaataccgtatcgcggtga

SEQ ID NO: 8112 - DNA, 1106 bp, Emericella nidulans
tagatttccgccggggttgcggtggcgaagtcaacaccgactttatcttgttgatattgttaccccagttatctccaggtcagtcttttctgacagatggtggatccctttttaacgattttatagatgctcaaacggctttcctcaatgaggtttatcgggcactatccatcaactgcaacttcacaaccgagcaggataaattgatgaatcacccatatatccctcgtgctctaagcatacaggccgcgctaggcttcaagggcaagttcagggctcgcaatattgcttctaatgttccctgggccatcattcaactgcgtcaggctgctatgatatacccgtcctttttccaatacaacaagggggttcagggacctgaaccacacgatccaggtgattccgccaatcaagctctaacggcttttactgacttcctttcccccccactccagacgtcctccgcttggtcctcggaaataccaaatgggcccttgacttctctttatatattttaaacgagcttttcgaccttgcagatgactttgaaagcgtctcttccgaccaagaagctttcaaccagaagcgtccgtaccaccccaccctccatagaccatatactaaaatatcttagtgaaaaccactacttctctccctcttatcatcctcctttccagcatgtcccgcgccttcctccgcttcatctgccgcggcctccgcggaatccacgccggctacgcaaacgcccccctcactggcgactcccgcgtttactacacggaaatctgccaaacgctcgacgcctcccccgtacgcacagacgtctacgagaaacttctagccggcgtggactccgccgtcaaacacgcctatacaggcgccggcttcggcgacaacgagcggcccggcccagaaaaggaactccttgtcagcagccgcattccgccggtccttgttcctgccgtctcaacgatccttcgccaaacaggccccgctatgaggggagaaatggaccgccttgccatttttatgggcgattatggttggctaggttttgggaacgatgcaaggagcgaactgtacaggcgagagagggacgtggatat

SEQ ID NO: 8113 - DNA, 694 bp, Emericella nidulans
ggtggggtccgtctcctacctccgggtggctatagagagggatgatcgggcgctgggactactcgtgctcataggctgctactgtgggaaattgtagaaggatagcatgcccgcacatcatacaagccgagagcataaagtgaaaagcctgcggtggctaatgaccatgctaacatccattaatagcgtggacgtgacatgacagcatttaccctatataaacctgctgtcgtcagatgcatcaatgaatcagctcaccacgcggccgagaggaaaattgaatatagagcgctcataggcttcacacatcacagacgatgtgagatcccccgtggatctgcagagagcagcttatacttattatagggcgggagttcgagggtccacaataacagtgatgcaccgcgggaagtacaattaagaaattgacctgtaaggccatgaaccataaaacggccgtagagctgacgatttttcattgatacgcccactgtcgagatcgcaggacatgctctgaattttatggggcgcaaactgcaagagtgcttaaatatacgagtgtgcccaggagataaccttatttttccttaggaacttgggtgaccggtacagtccccttttgcattaagggggacctttgacattcgatctgctaaaaatatggtgacgcaattaaaaggtggttaaaaaccct

SEQ ID NO: 8114 - DNA, 992 bp, Emericella nidulans
tcaaggggctttcaggcgtctgctggtagggaagatgatccggaatccgagatttgcgccaggaaatccaatctcactgttcagttccagatcggaggcgaaatgaacaaagtttgggggttgcccttgtaagacgaattctccaattgctcgattgcgacctttttgactccttgtacagcgtgccgccatagagaaactctaggaactctagaaacctagaaaccccttcagttcaagcttcttcgagagctcgctcggctggagcatgagctgttcattccgaaactgacttcgctttgtccctatcatttccctatcatttccctatcatttcccttccagaaccccccagcctcactttgactttgctgtggagaacgcggatccataatttgccggaagaacctacggaaacagaaaacttaacctaaatgcacgcactgaccatttgtgccaacaatgcggtgtaccatgtaccgaatttcaggaagcataatgcgtttcgatccgccgccttgggtacgacagggtgctcggatctcagtaatccttcaatttgacacggacaatcgcaatcgtgcagtcctgcttgcctgcaccaaaggatgatcttcccctgccaaaataacctttggctcctgtaagcgaccggcggcctcagccactcgattttctttcaggaatggaagccggactcgtcaatgatttgtcaagaatttgcctagtcagtttgcctaccacgctgagtaaataatgaatcgatcaatgaactatacgatcaggtttctcttcgatgatgacggcccttcgaagattatcaactggagtctacagattatagaatatgcattgtatctcgttcctcgaggattcatggaattaccgactgggggaaacgagatttgagaactagtcaagcgaagctcgctcatcgctgctcattgctgaatggctggggcctgaatctcactagtcttaatcaggaatag

SEQ ID NO: 8115 - DNA, 520 bp, Emericella nidulans
cccgcgggccatggttctctgggcgaaatttcaaggcctacgaggtcattaccgggaggcaattaggctagtccaggaagtgatgcggctgatcgagccgagccgaacgcacccccgcaggaacgagaaccccacgataaatgggatggttgaaccgccgtgggagttgtacatgtggttgagacgtgaggagaagaaggctggacgtggccgccgcgccaatggaaagggcgttgttgataccaacactgagagccttgataccgatgaagaagccgcgatgcgtctcggggcgattgagtatcaggatcccagtatgctgatgcgctatgcgcagtattgcaaggagagacatcaaatggatctttacgaagagcacatggggaaagcggctgcttcgggatacaaagacgcgtgccgaaaattaggcaattactactacctcgtcgcgacaggacaatatccacggcggggagcgcggcctgccgaaagtgcggacaagccaggaacgcaggaattg

SEQ ID NO: 8116 - DNA, 164 bp, Emericella nidulans
atcaacaacaatcagtaccttttcgtcggcacaaatgatgttgttagcgaaagaagcgcctttgacgatggactgagcggcacgggcgacgtcagcagtttcatccgccactggcgacgggttgccagcgcctgcggcaatcagacgtttattggtgtgtttac

SEQ ID NO: 8117 - DNA, 908 bp, Emericella nidulans
  unsure (1)..(908): unsure at all n locations
tactcctacctccccttctagcctccttacaatgttgaatggtgcataggctgagtataaatggcaggtgcacaatctctcgccaacgagatntccaacctcgttggcgcttccaacatccacctttcctcccgtatcgccagcattagcgaccatggttcgcacatgagcatcacaacaacaacaggccggaccttcacaggccgaaaagtcattgtctccatcccaagcaccatgtacaaagagctcaacatccagccacccctccctccgcgcctccagaccgtcacgaacgccacagtgctgggagactataacaaagccatcgtctgctacgataagccatggtggcgcgaccacggtttcaacgggtactttgcatcctacgtcggccctatcattctagcccgtgacacttctgttgatgaggtcggcaactactgcctcacctgcttcgtgaatgggaagccagggagggagtggggaaagatgcgcccccacgagcgccgcgctgtggtgctagcacaactcgcacaggtcttcgggcacgaagaggaggtgtataaaccgatcgagttcttcgaccagatctggcagcacgagacgtatagccggggcgcattagcgatatcactgccttgggccatcttacagagtataaggacgtgtacgggaagaaggtcggcaatctgcattttgtcgggacagaatatagcgacgagtggaaggggtatatggaaggggcaatctgctcgggcgaggctggggggcgcgaggtcgttgaggcattgagggggaaggaaaggtccagtctgtagtttgtctttattgcaggtgacaaatggaacatgcactgcgtttcgatagtaattactgagaattactgagtgtggttgaggatgcgaggt

SEQ ID NO: 8118 - DNA, 800 bp, Emericella nidulans
gttcctaacgcggcaaacgggaaggtcaccattagtcaattgtcgactgaagcccactgaattttaccccccctaaataactgaagattctcgttgtctagctgtcacagcacacttgatgaacaatgggtaggggataatggttaacgcgagaattcaagatggactgataactatagacgataattgctgatgatgacaggtacttatatggaattacacggcaagaatcatctcggctggcaagtgctatggatagggcactcttacgtgtgtgacgctagtgacacagattgggtgtttggcactgttgagattaaacaaacgtcgatcgtaatcgtattcaatatatgactgacagaaggagaaggagaaaagacctgagcagtttagagaacctagatccagagcacgtggatctcttgctctagatctttccatttcaaacctgaattcacgcttcggggaatggtccttttaggaatgcttttcttgctccgttttgcgcacactactttgccccgtcacatttgtaatacatttcttgttgaccaggtataaaagatttttttaaaacaaaattcatatttaactggacaacctttaatgggtatccctttttagagtcttcatggcctcaagcaggggtttaaccttctataacaggttttttggaaccttttgtctttaaacactgtatttttttgtttcaactttttacctcgtgtgaagactaataattttgcttctttccctgtgtggtattaaggttattgaagtcttttcgaaaaatgttaatt

SEQ ID NO: 8119 - DNA, 658 bp, Emericella nidulans
cgttctcaaaacaactctcgccctaatcgagcagttccaagtctctctaaccacgactcaacccaaccccggacccgtgacgagtgaagagaaccaaaactcagatccccttcccctcctctcaatatcatcaacggcactcaaatctcatgtcacgaaactctcactactggcgatcaattccccgttcacaccctctgcggtagcgaagacgctttcgactcttaacgagtccgttctcccgtctctggttacagccgcactccttataacgccagagtctcatacgagggcgtttcaaagcgaaatccgcgttctgacaggtacagcactgaaggagctgtctttgttggttaaagaagtgcagctcattgcggaggaaaaggctgataagagaagcctggaacaggcggaaaaggatgcagtcacagcggtgacggggcgggtctgggatgcttgcgatgtacttgttgatgttgccgcgaagggggttgtcggcttcgtggtcagaagggcacaggagtatagagacttggttcgagatgcggtggaagagattgaggagtgggatccggatgaggagggtgatgagtttttcgatgactcctagacaatggtgatgaatatgaagctgggtctgtgacaccaggaccaagga

SEQ ID NO: 8120 - DNA, 596 bp, Emericella nidulans
cgtatcacgagttatcccattttcatcccaggttgtacatcagcgcaataagatgtataggcttggcccacccatagatcatatccggcaccgggctgttgcaatgatccggtatgatgacggattttgagttcacatctccaattccgtcgaccaagcacatgtgaggttgatcccaaggaaaagttggctggggacaggcagcagcgctttccgcacataacccgccggtggcaactaggtgggacaagcacgacggtgctccaatccgatatcaaggtcaagtcagcgctgtttctttttagctccacggcgacgacccagagtctagaatgatcaattcagctgattcagctgctcttgtgctggtcgagaccgggaataccggcacaaccacaatcggagagcctcaaagctctcggcggtggaggtcttcagatcacctggcaactcattccaatcgatttcggaacgcaggtgaggttgattcacactggtaagacattccggcgatgcgtcatttgtcgcttcaacgccacgagtctcgaaagcctgagtctttcagcatcatgaagattgacttcgagccttttgat

SEQ ID NO: 8121 - DNA, 794 bp, Emericella nidulans
gaaattggaaataattgacagaaagaggaataaacgaataaacgctgaatcgtcataaataatattaaaaacatgtaacaaggctataactgatcaagaggctagagcaggtaaaataaaaaataaaaaaataaaaataaaaagacaaattcaataaatcagacttggaagcactgcagctctcccgtcccgatggaaaggtacgcgaagtagtgggttgagcgatccatcaactgccccctttcttgctttttgttagggttccccaacactggcgccagaccaccatcgatatttcaggacgcagcgctgaaaccaccgatctgaggcatcgggcgacctgggcacggtctttgtgactctctgaagctaatattggaattcggcttgcctggtcagccaacgtctttcaggctgggtgtagctgaaagggccagaggacgccgtaggagttgtgattgctccccaaaaataaaacggtggatgatgagtaatagtacgggaagagcgaaccaacaggggcatggcgtcaggtcaggcccagccaccatcctccttgaaggccaacatgaaactgatctggaaaaagaacatagaggaagcaaattactagagctctccaccagggcccgccggggaatcagagctagggaaccgactcttcggacaggtttgatggtttgatggcgataccgcggatggatccgaatccagactccatctgcaccagacccgcctctcttaatcaatccctcgcgtggtgacgattccgacgaaaaagaccagaatcaggg

SEQ ID NO: 8122 - DNA, 533 bp, Emericella nidulans
aatgagaagccggtccgcaaggagtgagcgccgaccgagtgcgatgaaggcctccggaaaagggtgaatctaatcgataaggggacaacaataggagacgtatctgtcagatggtgtatcaaccacttcaggataggtctatgaaaggaatgaacgctggggagggaatatatgcttaagaagcgagcataatgcccataaatatcaattcgagcgaggttgagagcatcagcgatgacgggatagtttacttggctcgtcgcccgccgccgcaggcgtccttcccgatcggaggcggcaggcacgtgattattctctgccacctcaagacacagccactactaccacgttaccagccaccccgccgttaaggcagtgaccatccaatgccgcggagccgccctactagcctcagggggggtttgtccacgactctacgtcagcttggtatctcaattcttctgcctttgaccagtctttagttagcattttgcactctattttccgcacttaacccagacataattgcctgc

SEQ ID NO: 8123 - DNA, 982 bp, Emericella nidulans
aaaggcggaatccctcctgacgaagatccattttggccgtgaagctggctttaaaggaacgaattaaagagtcggggcctggttctttaacactcctctgacggagtattggggcgaaagcatgccaggcggatgaaaagctcggggttcaccaagggggcagtccgcgacgggttttcaagtcagaaagagctgcgcgccattgcgagagggtggagggagtgggttgcgcatgaggatgggtggtttgggctgttgcatgggcagattctatgttggaagtagctacgggttgacggacggaatggtaggtaaaagtcacggccagatacccatagtctgctgaatggtcttcatgtaatatctgaatataataaatagattatatatatacatcaccgccatccacctgcgtccatcacctacgcctggctgatctcgcagtgcacaccctctggcagtccagcgctcttcaactcatccgccgaaacaccatcaggaacaacgaatctaccggcatggtattagcaaagccttgcttttcggaggcgtgggggtctggttcatacgatgtccgatgcgtaggcggcatgctcctcgtcgagaagaacggggtctgctcagtggctccttttgctgcgaaaaagtcttttgttctgccaggaaatattagcgctctcgaaagaaaaagttgtgagaggaccagggtaatacatctgctcaatctggcttccatgttgctggtaggcctcgcggctgtcgtatttgatgatcgcggtctgttaggagtcagttctggcaaagtgagtgtgtactatgggagagtggcttacgtatttgggcatctcgatggttattcagaggtagctgttcctgaccagtgcatccagtggaaagataaaagggggaggggctctaattgcggggtaagcttagtacggggacgggatagatgacatcatccagataaggcagccggcgg

SEQ ID NO: 8124 - DNA, 854 bp, Emericella nidulans
atgagaagtctctagcgtaattttcgtctgggttattgctcgggaaattgtatttagtgcagcctctttctgtatcaacctaaaccgtatatgctcttcccgaagtgcatggctctgagagctcagcgggaaacgcaacattgtagtggtttcgttgcccggagaatgagataatttggccctcagttctttcgtcatcacaagcgagacaacgaattcttcgatatcacgggaacccttcgagcaagacgaagcccgttgcagtacatcgggcattgtgagagcagaaaatgttttccctaactttatgattaagaacttgtcgtatgcttcaaagacctggtaaacaagtccagagtttttatcctgagattattagcatgatcgggctgtcagacggtaagggtgtcacgcacggcccgccaaattgtttgccctagactaatttcggttctcagtctttggaagtcacgtttctcgaacgcctcggccagcgagatgtatggcttcgacaatgactggtatacccgggtaacatgaggagcgaccaaatttgggacggaaaatagctgggagtatagttagttaagccgtgacatgcatttcggtcccaaattaatcaccttcccgtgcccaagcagattcgccaaaacccacttcttgtatgcttccaccataattttgctgaccgagttagcggttggggccgatataacaatccccaggcaatgagacgcctggtcccacttcttgagagccatataaaccatcccgctgtacatatagaattggaggtggtccggtatgttaggtttgccgaaaaccagacgaatctgtaaaaaatacggtgctag

SEQ ID NO: 8125 - DNA, 1521 bp, Emericella nidulans
gcgctggatatcagatattattgactgtggtgtttgaccgttgtttgctctgaattcgattgttatggtgcacttggctggataagaggacgcctcctctccaccctggattagcccgcaatgcagagtcgccggccccaggatatcgtcaatggggagcctgcttgcgtgcttctccaaagcttgcaggaaccacccagcatggagaatagcgtcgactccgtcgatatggtttgagccgtgagcagccacgccgagaatatcgacctccacccaaacgaagcccttgtgcgcatgcgcaataatctcgttcgtaggctcaggtacaacagcggcgtcagccctccaaccggcagctagaatgtccctcgtcccctgggatgcgtcctcctcgtcggagacggcggcaataatgacatctccacgcaagggctcgcaactggctttgatcgctgaaagagccgctaatgcgcttgcgagcccgcccttcatgtcgagactccctcggccaaggaccacctgttttccgcccctggtgccaattgcgccagagagtgcatctgtctcgtagcttgctagactgactgtgtcgatatgaccgttgaacatgagcgcctttcctcccccgctgcccctatgaatgccgacgacagaaggtcggccaggaactggttcaacgcgatgtgactcgattccgcgatgtgcgaaccatgcttgcaggtaatcgcagatctgggtttctcctacgccgtcagcgagggatagcgtggggttcgaggagttgattctcgttagcgtgctcgctatctcaacagcattgtcggacgacacatccaatgggatagggtagtcgcggggtccttctgtgctcagcagcacgacaaccgaatcttcggtcagtagtgactcggagcattccttaactcgtctcagtgctgccagcgacgccgcaccacagggtccggccttgattgagcgcgaggctaagtatcccacagcctggtggctctcgtagcaagagacagtaacgctagcatctacaagacgctgcaagtttgaccatgccgtcgtcgaaacagtcccgcagttcataccgtccataatggtgaacgaagtctctatccgccttaatttaccagctagcagattactgtgcaggcaagccgcagtatcgggcttaacaacgatcacagaaatcggattctttcttgacttgcagaacgtcgacactgtgttcgcaagactccccactcccactggcgtgaccatgaccgtggcgcgcagacctatctctgccaggtgacttttaatcttcaacattatggaccaatagccttttacaaccacgggggaattttttcgacccctccatgcggagtcctgatgagaatgcgccatcatttcggtcgacactttagggctccagacagcggtataatcgccttaatcgcgaacttgttccttggccgattatcttgtggccttctagcttgacaaatttgataatcccggttccccttt

SEQ ID NO: 8126 - DNA, 434 bp, Emericella nidulans
atgcaagtacggaataagtactgcctccagagcaccttcggtcgcgaactgaggtataggaaaccggtctcggttccggccatgggcggcgctacgcttgaagccggcgaggacagcactgcggcctccctcggcgaacagtatcagcgctttcaaaaaatcgtacccgaattgctccctgcgtccaatgacattatcctcccccggagcaggtccgatctgttggaatttctcgagaacatcgtcgtccactccgtaatcctgcacgtccccacctagagcccgcgcaagtgtgccggcggcctgcacaaacctgtaagctgactccctattacgtcgcagcgtctgctgcactcgcacgatttcaggggtgggattgggggggtatctccaggtcctcatgatctcttccatctgaggtaaagagggtcagt

SEQ ID NO: 8127 - DNA, 1078 bp, Emericella nidulans
agaaagtctgtaaagatggagacagacgcagtccccgtgacgaagtcggaaaggttgatgcacttttcgttcgggtacgagtttgggtcccagttggatgccacagggaggcagctgaacgtagtgatcaggaaggtaaccacggccgcgatggcgttcagcacgagcaggcaatgatcgttcgccgcacagccttcttctgccctgtcaggcggagaagaaagagcaggatagaggtcttgatgagggcgaggacggggttgtagagcagttctgcctgtatttttgtcaggcctaattcttgatgtgcccttcgatgggatggcaaacacctactgcataggaaaatttcgcacctggtgtcgagtcccagtccgacgggacgtcccaaatatggtagccgacgtaattgtagttaatcactgcgattttcagtttgacagtcactggagtggtcgggagagagagagagtacgaagtgacagtctcgccctagtatagaatctgcaaatccttaagccattgtccacttccaagggagaaaaaagacacttaccccggccacgcatatcacccagtcatctgtctctattaacacgtgagaagggcctcgtcgcttggatttgtagacgcttacctgcggcaaacgagcgcgtccatacttggatatacacccgcagaaggccggcaacagtcgcaacagctggaaaggcaagatcatgccaatcgcctgcgcctgcaggttatcgtggggcagatcgcctgtaacggttgtggccatggcgagaactgagtccctgatcggttcaagcggcaaggatcagcatgatatatactggtgggtcaggaaaaggaaatcaagaaatacacatataatccaggcaatgtcccgtttatgaggttggggttgaggtcacaaacgattttctgtgcggattcgcctccgcactaggttctggtggtcattaataagatgaatgactgtgttaggtgaaaagactggcatttttcctgtcgttacagaatgctatccagaccaactctatccgctaatgcaagccctgaagacagggccggc

SEQ ID NO: 8128 - DNA, 1221 bp, Emericella nidulans
  unsure (1)..(1221): unsure at all n locations
cgtgttgatttcgggctgactactaaacaatagattggtcgtgagtttcagcttccagcagctccgactactctgttctcatactctaaagggtgctcggtgcttattcattgtgttctcatttggtggaacctgcagactcggagcccagggaagcacaggacagcacacgacctctcgcttgtccattgcatcactgattcccggcctctccctctcctatctttttctcattccctgtctttctcctacttcccctctcactgtatctcccttcttgcagtttcatcgcttctatcttctcctttaccaagtatctttgaactctctgcagtttgatcatcccttgccctctccacggctcttatcggtcccaaaaaaaaagctttgtttagattgaagcttccgcacagactcaaacatggccgacaacagtgaagtcaggtatcccgacccaaatgccagtaaggtaagaacattatggagccctcaaccaaggtcgttctctcaagaaattgaagctgatattcttttctacgctcagtaataccatcatcggctcagattccggcgcccttgcgaaaggtcacacagactaatcgttttcgtttgcagacatcaaggagtcgatcacaaacggtactcgattcaatctttactttttccgtaatattactgacgcgctgctaggcccggttgctgaaaccatccgatccgaggcctcccgcactggacaagaatttcgcgacctgaagagcgccaaagtgattccttcgaccaccacggccaccggccagcccctgacttgtgcgtgaaacaaccggagttccgactgaaaaggcagcactaattgcgattagactaccactctctgttctacagcctcctcagcgtgagtaactagccctaattgcgcaattcgaggattcgctgaccaattgctgattccagtgggaacaaccccgtgccactgccgcttccttcgccagcgtcgttgctttcattttcgcggcccgttacctccctctccttcgctggttcttcaagttcctctatctcgtcctcggnggtaagcttatatcttggggtgataatataatagcgctgacgggaaatcagttaccgctgcagcagagattggcggcagggtcgttctctctcagggactcaccagctcattccgtccccgcanatactataccctgcctagggaaacgatcg

SEQ ID NO: 8129 - DNA, 1272 bp, Emericella nidulans
acacatatcttttggaagacctctagacattggtcggtcatggacggaatcaaacacctattttttttcaaagccgtatcaacggctgtctcgggggagtggcgtttcttcatatgggccgtcctcatcttgggcatcactgttttcaccaggctggcttggtgcggtgtccttgttatagtcgtggctatggcctttattggggccaagatactcgaagaacacacataggacaaggagtgtgccctgtaagcacgccgtgacgattagaataccccacgtgctccagcccttgctgcccaaccgtgcggccagactgcctgcccaaacaagcgcacaaggcgtttgaatgcacatcattgggtatgctcaggctgcctacacagcggagtctgagggtggtgtatatctgagggaaatattgtatagaggcgaggatagcggcagtaattccgcagaaattcgaccaagattgaagcgccgagggcttttcgaagccaaccgcaaaggtaacaatcaacatagccactgcatggactatgcatataaaggccacaaccagtgcggtccgataagtaggtccttctttccgcggtactgaaaggggagccaacggatttttgggaaagaacacaacaaagagagtgagtctgcaggacaagttaacctcgcaaactcggcaagcagaggtcgaagcttacatcgcgaaaaagctaagcagctgtgttgcaacctgcagaatccctagtaatcctgcaaagcacgataacccactgacatccttgcagcatgagacgtcttgcagcgtctgccgctgcgacaccatgtttgccaaagcgaatgtgcccgacgttgttcccaacaacacaaaataaggcgaaatcccaaaggagctccttagagcggcgattcggactaactgcggcagataggaaacgaggattccgagcacgatcaagctgatttggattagagactacgctcgagttgtggaagggaaacatacatggacagaacaaagttcagcaggcctggcgaaaccaggtgcccgcattgagtatcagaagaagccatcatgatgtacaggatcgtagctaggaataagaattcgtagcgggatatggactcttaaacaagcgttgggcacctgtcggtactgagttggcagaggcagttaccggaaccaccaggtgttcgaccgtatatcaacacatgcctcccgtgggagaagatgttttcagcagtggttttgctttttctttttctagcaga

SEQ ID NO: 8130 - DNA, 138 bp, Emericella nidulans
acagcgtcaattgcgctcacaggtgaacctctgaccaaccaacaataagtagctgaaccgatctataagtgcaacgtaattgctaagtacgagctaacgcctatgatagttgtgcatcaccaagtagatatcacgcaa

SEQ ID NO: 8131 - DNA, 1001 bp, Emericella nidulans
atgtaattgtgcgtacttatttgttcttccgcactgaaattgaaagataaatagagagcatgctcttccttcaagaaatatcattactctttccaccaagccaaagcattattgttatttatcatcaagccttccttcctcctcaaatggcgtggtttagttcaattgttaacggcatcggcagtgcagcaaactggctcctatctaactccggcctcatcaacaatgttctcggcactgtgcatgcagtttcaaacggccagttttccggcttagggactctggagggctatgttattgtggaacctgtaactgcagcagaagaagactgcaaaaatgacttgattaggaattttagaaaggcgaacaagaagcttgaagagcacgctgcaaatttggaagagccaccgaaggtccctgacggtggcacacagtcaagtgcaaccctctcgggtctatggacgaatccaggtctcactgagggcgggtacgcgactcctgaaatgtacagggacattgcaaagttcctaacagaaagcgatatgcccacagagctaggggagggtgacgagaaaatcgatgtgtcacgaagtatatgtgaaagcatcttcgccaacgttcctggaattccagatcccgatgacgtccaaggcgttgttgttcaatgcccacaatttcaggttggagatagcaggtgtactatctccggtcgccatgcccattatgccataccactgggcaaacgcacagggggagagttatgtgatgatctggcctggcatggagcggtccattttataaaaacaagcgatagcacattcgagaagctacataatgaggcgaaaaaacgtcttctatttgtggcgcgggacgaagatgcagcaacggacggtcctacatgggtcgtcacttgtcaggtggattggaaaacaacctcacttgccaacagggctccggagaaagtctctaggccgttggagcaaaagcagagtcgactgctc

SEQ ID NO: 8132 - DNA, 1183 bp, Emericella nidulans
gctcttccttgaggctttcttctacttccgtgggttgaatcacatccaggagaacagacatttgctctgaaggctcagtatctgcttgaacactgctgtttggttgacggggagctgcaacagaagcagctcctccacggactcggcgtcgtttgttcggtggagctcgaccttgctgagtcgtcggtcgtggtgaatcccggcctgatcctgttcgaggctcttcattcactggttttgctgtcaagtttttgttgacattgaccagtgagcgtttccagttgacatactcccttagtttcctgcgcaacataacttctcctgagcgcttcttctcttgcttgtcctcgctaccatctgcaacctcctgccgctcatcttcgactttggtattcattgttcccagatactcccgaagttgacagcacgttcgttgatctgtgcacattatcagtaccgtgttgtttgattcacctgtactggccggattatgatatgcgtccatttctatttcctcgaggatctcagccagaacgtcccatttgggctgctcttccaatacaggccgaagcgtggtaggtaaagatgtcatggatgagcgagataattcattgccaatcttcccttcgtatactctagactttgctgtctgaaagaggacgtgggccgcgtcgagaaacagccagggtgagtaattgtgcctcgtggagcccggcggaggggaattcgcggtcacaatagtgtcaagatattcgacaaatgagacagcatcatatgtgagcagggcgctgaatgttgttagatgaatgtgctgcttaaaagagggccatcagacgtactgaaatatgcgcgtaggacactgagatcggtcaaatctgctaggtcctgcagctacacgacgccacatatggtcaagcctgcgtctgatgacaattctcagctactatgcctagagctttcaacgcccaatcgccatgtgtaatcccagatcgttctgtgagctctacatgcagagctgccacactcaagactgcgtttgtattctggcacttatcctcatgggaccctggcggatacttggctttcgatggcctcacgattaacaccgtacgggaccgcgcctaagaaattcccaagaaaggtccccaaattgtaaggcccattcgttaaaggtccgggggga

SEQ ID NO: 8133 - DNA, 783 bp, Emericella nidulans
aaaggaagaggatatacaaaaatagacaggaagattgtcaatgtataacctagactttcaactgagcgaagtaggtaggcgcagggcaaagaaatgcgaggcaagaaaagaaaatcacataaaatcatcgtcatccaaaccatcatcatcataagcggtcgtctcaattttgtcactcctcgacgcaactagcgacacctttgtcttagccgccttagtcttcttgcttcccttatcagctgccctctcctccttcatcttctcattgctcagcgtcgtcaacgcactagccaccttcttaatatctccactaggcaattccttggccagctgcttggcgaactccggcagccagagtgcatactgcggcttcttgctctgcgcggtcaaaagcggtacaagcgtgttcgacaacgtggtaaattgctccttggtcgccggcttgaacaggggcatcgcggaaagatctacagcctgcgtcgggtcgcccgaggcgtcatgcacaacaattgtcttgttcttgccccggttgcggttaaggtcaatgtcgccaaagagatcctccgcgtgctttaggtcggagtccttttccgtgcggcgcagcggcgcgcttctcggcctcgtcctcgtcactctcgtcgtcctcttcgtcctcggcggctttgcggcgtggttttgtgctctgctatccgctgtgctttgctcgacttgttggcggcacttcagcttcagctttggcattggcttcggcagacttcgcgttcttctcacgctctacttcgc

SEQ ID NO: 8134 - DNA, 934 bp, Emericella nidulans
cattccatagtaagacaaggcgctggatatcatcgtctcagtgtcaggatcatcctcgtggcattgccgtacacaccccagagcgaattgaatattacctcagaagggggtaggggcctttaacaacacacgtgtttgtgcccactcgagaactaggcctctccatgaagacgtttattgcctggctctggaattcatggagagaaacagcccaatccttgcacgagtactactatgatcctggaagactatcgaatcgatccttggactgtgtgccgttctttaagtagttacactgaattatggctttggctcctttcaggaagagtgaaacaaacaggcaccgcgtcagctcaacaaggaaccaagtgatctgaccaccagcctcgggtaacttcggcttacaagcttgactccctcaaagagtcaccaacgacctgataatgcatctggagagggtttacatcttccgattgggatcgatctgtcctacaagcatatgcttgtgctaatctgatacttgttgtttccgattcgcagaattcggatgaactcgaaacagtgatcttgaaacagtaaactgggaggctgggaagttgttaacctcacaacagtggtccaggaggacggacaagcttcaagacctctgccaactggatccgattccgagtccaagcaaacttgcactagatccaggtcatataaggttgctgtcttcagtttggttaccttccaaagccccccagcaccattttttaaaccattgcttgcgcactcggtggtcttgtcgttgcttggctatttaagacccagacctggctcccagtgactactgcgaataagttggtggacagcagaattcgccgcacgcagaatccggtgagttttcggtctttgatactacaggaacttaaattttcgaactttagatacg

SEQ ID NO: 8135 - DNA, 789 bp, Emericella nidulans
  unsure (1)..(789): unsure at all n locations
tcgccagcgagaagaaagagaacgccaagaggaagcagaacgccaagcgtcagacgcagccccggagcctatggacgatgtgcagcgaactggcgttaccgccgaacctagcacaactgcacaaccggcccaagctgaaccaagtccagccgaacctgcccgccgtgtgcatacaaccataagaggccgccagttggacattaccggactggaaattgatccagaatatctcgaagcgctccctgaggagttgcgtgaagaagtgatcatgcagcaattggctgagcagcgctcacaagctgccgctgctggcgaggagcccagtgaaatcaatactgaattccttgacgcattgcctcctgagattcgtgatgaactcctccagcaggaagcagccgaccgtcgacgccgggaacgtgaaaatgctcgtaggcaagcagggacaggctccgccgctgccgccgctcatcctgaagaaatggatccggccagctttctcgctacgcttgacccaactttacgttctgctgtccttgctgaacaacctgaagaattacttgccaccctcggaccggagtttgtttctgaagcccgtgctctttcaggaggaaggtcgaggctcacccaattcggcgatatcccaagagtagatcaccgccagcggacagaacaggccgacgatcaagagccaaagaaacagcaacgccgccaaatngttcatatgctggataaagccggaggtgccacactactccgaatgatgtttatgccttttcagggcaatgcgcg

SEQ ID NO: 8136 - DNA, 638 bp, Emericella nidulans
acgacttcaacgtgcagtaaaaaggcccgattggaatgcaatcaaggccagcctgatggtccgttgtccagtccaattccagactccatacatgcagttcagacgtacgtaaaaccaaccccagcggtattgtcctcaatgtatcgtctttgatgtgttaatccgtcaaaagctttaagaggatttaatacggagttataagtggttgaggaggaggcttccaccgttcaataaacgaaggacggaccaaccaaagcagcgggagctccaagtcagggtgcctgcaaccgcctactctcgaaagtcttttctgtgtctgtcctcttccaaccttacctttccatcctttcccaagctcctctctctccatttcttcgtcttttgttctctccataattgcttccatactatatcatttagtcacgtcatctcgctgctcttcagcttctctgtagcccgccgttccacttttccgcttctgccctgagctgccctgttagtttccagccaccaacgagccagcttttcgggcccagcatcttgtcgcttcaattctttctcgcctctttatctccgattgctgcttcgacgattaatcgcgttatctcggtcgttttcctctagcgagtcgttgcaca

SEQ ID NO: 8137 - DNA, 125 bp, Emericella nidulans
tatgcttctgtttgactaaacattcgtataccctgcagtctggaacggacgtaatgaccgaatcgcataagctacgcgaactcagtatcggtctaaaggtgcctctccctttaagagttggtgtt

SEQ ID NO: 8138 - DNA, 831 bp, Emericella nidulans
ttccgtttttgtgacattaccacaacgatcgcacgtcacactgcttcgaagcttgccgtaaaacgttcggtgaaagaaacaactgcagcctttttcatggttttcccggttcccctccgcgctggtatgcagcttgtcgacgaggaactggtagtactcatgcgcatcctgctgttgataaccagccaaggtctacacgaaagtcagcttgtcgcagcttaagaactcggaaatgcacctactgggcttgcacgccaggaggccagaagcaggttgagcgccgcgaagccctccggcttgtcgatgctgtggaaatcggcaaaagcttcagcaacagcgcatccaatgcaatccgcaaccgtgcaatcatgcggttggtgaccattaccgagaaagtaggtactgaggatcggatcatgcaatagcgtctgcagaatgacgttcaggtagcatgtctgcccgagattgaacaagcctctaacgccttgcttcgcacacggccgccggttagcgttgctcttgacgtaaagttcgtcggccgagctctcgctaaaacgccgtttccttgcgactgcaggggattagctaacgaacaagaaaccgccggggctcacgcggaccttttaatgtgctctctggggttgctgatctgcatcgttctaggccgtgatcgtacaccaaatcttcgcagccctggcaaaacaaagctcggtttctcgactccatgtctgagcgaattagctctgcagccggtgccaaatcaatacctttcacttacagaattgatgaccagtgttttctgtgtgtgacttccggtcgccattcatacac

SEQ ID NO: 8139 - DNA, 226 bp, Emericella nidulans
acacactgcgaacactcgagagcgagtgtccggcagccagacacagagcagtgtcatgcggcatgggcaaattgcacacatgacgaccagcagatggcagataagaccgcaaactgcaagcacaggacccggtggcgagcaggagagctgttcactcggaattcggaagattgataccgagagtgagctgtaccgatgcccacaaggttgaacaacgcaatgaagc

SEQ ID NO: 8140 - DNA, 575 bp, Emericella nidulans
ttattgtgagggttgtgcagtgtatcgctgtgaactcgacgggtcagacctcgagcctttggtctcccggcagccaaacaaggaaggcagcacgaccgatgtgcaagactggtgcgtaggcatcgccgtatctccccggttcaacaagttttactggacgcaaaagggggcgcccaagagcgggagggggcgcatcctctgcgctggaattcatactcctcctggccccattgcagccggagccgacaaggacgaggaactatgtatcctgagcgggctgcctgagccaattgacctggaaatcgacgaagagaggggtcaattatactggacagaccggtgcgagttgccctggggaaatgcggtatatcgagtgcagttagacagagagggtcgaccagtgagaaagcctgagatcctggcttgcgggcttcatgaagcaattcggactgagcctttgtcacaagtcaggagatatattattgactgattttggccgttttgtctaccgaattaaccgtgatggcaagaagaggtgttgtaccggaagatgacaagctttacaggcgtttggg

SEQ ID NO: 8141 - DNA, 718 bp, Emericella nidulans
agttgccagtcaactattcttaggcgcgagatctgctctgttctcggcatccaacttgcggatcaattacgactatggcttaaactaggatctgattcaagtctcctatctgttcttagctctcattattcatagattctgtgtaatgtaccaataatctatcctaaaccacatttcccaccaaggagcatctgacatctcagttatcctcgtactccaggccatgaccatacctgaagacaggattctccgtatcgaatggcagatcctctgcctgcgcctcgacagcgtccattgaccggggcaaatcgaacgggagtttgccctccggcttgctgactccaaacacaacgtccaagaaggcttcgctgtcgctcccgtaactcgcaagtacggcctgcgcttgctcgactacctcaggaataacggcaggccggtccaagatgatgtctacaatagtcgggagggatgagtagatcttggcctggcgtgccttctcagtggcgttaaatgcgagagaacctgcgtggaaattggcctcaaaggtaccgttacgtggttcatacggcgcattgtaccggagcagggcaaagtcggcttcttcagtggtgttgacgacggtatagttcctggcggacatgaaggcggaatcgaagccttcgatgtagaatcttgtaccctcaccaggtttggcgagaggaaggattgtctgattgtt

SEQ ID NO: 8142 - DNA, 392 bp, Emericella nidulans
gaaatggttttgtattaatggtaatctctgtcactgggatacttggaccttgagtacaggaccaggtactgggatggcgacgctgagtagtttactgcctagtatgtccattatgtccattctcatactgcgtcttcgcaagaggcttgcgtacgccgtacatgtaggcatgagtagatatacttagatattatataatatcatataatatgggaacagggcaggatcgacggcgcatgacgcaggacaagaatcatacctctagctatctacgctatcagtattttgagaatcgtaaagtaacaaaatatggctctgaagctgggctctgaaatatttgctaacctgtctggatcagtcacaatgtaatgatacgtttgcaaagtagtttg

SEQ ID NO: 8143 - DNA, 1151 bp, Emericella nidulans
tcgaaactgcacgcattaagaaataatttgcgataaggggtggatccatcgtattcgtgagcttctagtccagcctcctcgaaaatatcgaccaagaatgtagcgttggatgcgaatgttgagaccgcgaagccgcgaacattgagaggacttttggtagaattcctggaggactgagcgcacataacctggacaactaattccacagggctcggggattataagcgagggctaaattttgacaagctacgcaaggcgctggtaaagaatgtaggcctcggaagcacatcccgccacaaatgtcggaacacccgcccgtcaagggtttcttaatatacaagcatattttttgagttattttagttttgtttctggaaatctaggcctcgtatctgcttggaaactatagattcggtgcctttgacttgttttcgtgtccctggccgtggtcaacagcacaaccttaccctatcatgcgaggagtagtagcttgatagccattttcgcgccatcaagcactcattacacaagtaagccatatcacccagcatgtttctagggctcacaaagcgctacggcaccttatgccccattactcatggtgagccagaacatggaacctctacttgtcccaagacgccttccgataatcccagaggcaacagaacgtctgtacgagcaagcgcaatggccagatgtgcttcccatcttcaaaccacagtcgccaccaatgccgacgggtaattgtgagccttcattgagggtggacaatccacaggcccctgagagatcattgaaattacattggcgggacgcgatacggcagcaagatacgcgcgaagaactgacccggccaggttcctcgcagtaccagccacacgagcttctacaatatggcaaggctggtgaatatcaagcatcaacgtgggttctggggcaaggtcttgatagagtacggtgtctacaccatgtgcgcggcttttgtgtacctggttcttatcggcatgcccttgtggaagggggcggtttactggctttactggctggtgaaacataagttcgtaatccagggaggttgagcgatcgtgatcacggtgctgatattgtagggcttcctgacatggtctattcagccctgagtagggtgccgg

SEQ ID NO: 8144 - DNA, 450 bp, Emericella nidulans
gcagagtgtagatgatggctgagtgtggtgattgcagggggggcattgatgttgctgagcatctccacgccggtgccggtaaagtcaaatgttgcggagcgtccggtgaaatggagacggacagtctaatcagcgtgccattgtccatctggtcggttgccgtgaggtgaggtcacagccttgctcgaacggtagtgaggtaggagcgcacggctagctcggcgttggattggatggcgcccatgtacaactgcacggttggtagcgtgtattctccaatcaatgcttggacaagagtcactcgcttgtggttggctagcacctgggcttttaggtcggaaaggttgtcgttggatgtgtctactatctgtgcagccggtgtactcgccagaactcaagaggatctcggtgatgcccttctcgtcgaaatcacgtcgtggatgagcttga

SEQ ID NO: 8145 - DNA, 838 bp, Emericella nidulans
acaggagacacactacaacctgttgtcgaacgccttattggtcagctcgaggaacctcaacatacttttcccaaggggatgcctcagatgccggagatgtagcggtgttggcaaatcacgtcggtcgtagggagctgggaaaacatcctgcctattttcctatctctgacgagtatcgggttgaaatcctgcaccgcgtcttagacatctgttctcatgacaactattcaaggctaacagattttgaatggtacgtcagtgtattaattcgactggtgaaacatcttcccacaagagttgaagaacatacggtgagccaagggtttgaaagtagctccagggacgatgcagcaagcagaattggattggaaatgcgaaatattgctgttcgtgtcaagaatgtccggatggaagcgacaagagcagctgaattcctgctactcgttgacaacaggcagtcagtgtttgcaaatgtttctcttgcatataatggtgtactcggccctctagcttgggtcgttggcgaatacgccgaatatctctcgtcccctggtccgatgcttcagtcactcatcgatgtgtctaccacgtcattgtctggaagagcccttgttcttttcgttcaggctgtcccaaaagtcctagctcgcatagttcatgattatatgggaacatgggacgtgagacagagaagtgaagtttccctgttcctggcgcggatcgtggagttttacgaaggcctcgcgactcatccggatctagaagtacaggaaagggctattgaatttcataaagatcatgcgcttggctgctgatgtgatgcagacgagcacgcagc

SEQ ID NO: 8146 - DNA, 1250 bp, Emericella nidulans
ttgaagccctctgagcctgaatcgtcgtccgctccaagatttaattcggtgtatcctgccgtagttcatgctgctcacattaaggaaaggttgactgcgtgaagtatcaggtctgatggtgacatgcgatatcaaaagttgaaggtggtgacaaggacgagcgcttgatatactaaaaagcaagcctctgattggggaatattagtcatcgaagctttgttgccttaaagtttgtactgtcttgctgcctgccttgctcttgtggccgtcgaagacttcgaccaaacgacgcctcttttctctcaaaagcgtacaggtcaatgtggaaggattgcttttcagataggttccactatcccttgatttcaatccaggaaattctagcactcgtcaccgcgcggctttggtccgaaacgacgtacgtcaaattcggttgcaccggctacattaataaggtctaccagtaagtatctaggtacgtacacctagaaatgttaagactaacttgtgctgcttcaacaaagatgactggtccaggtttgtcgccagtggcagcctgtaaaggcccatcagaggtcacaggtccaaagcgttgaccgcaacaaagttatggtatagacgatctttgtattgcatcctaggttccagtgccaagttcgcgttgatcacctcatctcgtcatcaagaattacgagttacggttagcgccagtcagccctaagccgatacagacggcgaagaagggcgagcggcggagccgggcgcttagccgtacaagtggcttgaagaaggctatgaatgtgatgatgaggaatcaacacagtgcctgttaggggataatttgattgttgatctgagaaattctggagtacgaaaaaattggaaacaagctggaaattactatataagggcaggagaagactaccatgggtgatatttttttcactacaatagagatcatcgcaatacccaagtatcacgtactacctggcttttattggatcaagatgcgcctcaaccctattttttggttctttttctcagtactggcattgactggcgattcccattctggggcatattccaacaaggcaatctaccttctcaacaacaacgcccaaaatgccaatggtggagtcccaattcacaagaatgggcttcttggagatgcccaagctactctgacaggcggaactcgggagagagcacttttgaatgatggacagcttgcaggtccagactctctcttt

SEQ ID NO: 8147 - DNA, 406 bp, Emericella nidulans
  unsure (1)..(406): unsure at all n locations
agctgnttcccgggggcgaaattttgttaatcccggctcaccaattcccacaacaacaaatacgagcnnncggaagcataaaagttgtaaaagccctnnggggcgccctaactgagttgaagctaacctcacaattaaaattgcgttgcagcctcaccctgcccgnnctttccagttcggagaaaacctgttcgttgcccaaagctgcaattaaatgaaaaatcggccaaaacgcgcgagggaagaaggccggttccggcggtatttggggcgccttcttcccgctttccctcgcttcacctgaccttcggctgcgccctcggtcggtttcggcctgcgggcgaagcgggtaatcagcttcacttcaaaaaggcggtaaataccggttatcccacaagaatcaggg

SEQ ID NO: 8148 - DNA, 1741 bp, Emericella nidulans
acccgaaggagatatatcaaacgagtgttgctgttaagagcataaaagaggaaggaaacaagatagtgaacgtgttgagcagtcagaataagaccataaacacaccaaagatgtcgctaattcagggagaggaatggagagaaggtagatagatcatgcaagaaaacatcctccagcgaacaagagatcaatcatcccaggatcgaggtcggtcaggccgctagagtcctgacctgggtacgtaaagtagcctaaattagccacgattcgctggagtaatgcctaatagaaatgcgagatgagcgctctgtggcttgaaggctgtaacaaatcccccctgagtgtctcaacctggtgtagaagtgggtgctcattggcgcgtagatggatcctactgggtcttcaatagtcgctgcttcatccttagccctgttctagacctcgagccttgaggtctgcgctgccctggctccagcgtcagagaaaaaggccatcaagtattctgcggcaagcggctgaaccgtttctgcaggcattgttccaccagtgaaggcaaaggtttgaaaagtcgagagagatagtgacttgaagggtcaagtggtgaccttgttattgagtacagatagtaggagtgggttaggaagtggaaaaccacattattgtcgtggactagtaagagaggatagttcgaatggatcaaagtgtgccgcttctccagaatcgggccgaatgttggaagccttcgataacagccacatattaatagtaaccatattattccttgatatccggtctaatggtaattcggtgaggaggttacagtgtaggtagttctaggccaagatcaagcttgatttagtttgcactctacataagctgctggccgatcgcatgttgctgctattgctattattgcaatctctccgtccacatccacctgggttataatcccttacgagtccgtccttgacccctgccgcggtggctgagaccaggtttccagtatacaacatatacagagtagtaatatactctaaataccgtattgggccacatttccagcagcagccatataccactcctagccataatgcggacctcagagatatctggcccactactagaaagatacaccgtgatggcaaagatgctgattgcttgagaaagtctgattgcatcttaaaatgaacgtttcatagatttcatataccctataccttatgtactccttaatcggaaggcactgagcagtatctactaaaccactactagtactgactatttattaatcgacccacatcattcaacccgagacaggaagacgctgttaatttaccaccatatcagttttcatggcttgctcaacacttggtgtggcccgagtgcttcggcgagtggcttggagagaacgaagtaattcgtattctgtactctgtggttgcatgtacatacagtacattgaattgtggagtgaaagaaccccattttgttccccggaggctggagctacaccccatgcttcgtccctctgtgctagtaagggaggggacggatgtcttatgatatgcacgtacttgatcacaaccgctaactgctggtcaacttcttagggagaatgtgactgtggcgactatatcagccctaccagctaaatacttattattccaaatactcggatcagcctggagcagttttctggtactcgttcacgtcatccgcatagagatcacaccatctccga

SEQ ID NO: 8149 - DNA, 206 bp, Emericella nidulans
gaacgcagagtagactacttaggaggctgagacggctgagccatggtgtgtggatggctcctatagtctgcccagattattctcttcgaggactcactcacatattactactagggcactccgcgtatatgacccgagactactccaggaggaacatcggagtatctcgaagatgcgccaggatcggataggcgcctccaagccta

SEQ ID NO: 8150 - DNA, 745 bp, Emericella nidulans
cattcatctaacctactcagggcgttgcggggtccctccgacgaggtattgtcaccgccccccaaaagaaaccgatcgcctacaaccactcgctctccttgtcttttctcgaattcttttttgtttgcatttgtcgtcgtctgtttgtctgatttaagcggacgccttcccagtccttcctttgttctagcagggaggatcccctggaatcaccactggagccggtctcaccttggtcttttgctggatgcaacaccatgtcgcacacccgggtttacaaagatcctattgtcctggtcatcgacttccaccatgctaggtgagtggcttcgccgagcaaagaatctggtgatcaatcatcagcaatcccggccgggattgagctcgttttctgtctccgctttcaggtgttggagctctcttcgtcgatgcgacttagccgaaaggctagcatgtactttgtaaaaaccaaatcttactgtcaaccagtactgacgcagtgaattgtacaggggcccggagatcgaactatgcattggaccagaagggaccgaccctgcggccgagaatgactggtcactactgccgttcatggcgctttcagatggagcgcatatgtacggctcagggctatcatttggtacggatattatggctgatatgtatgggcgctgctaggtcaactgaggaattctcctactttacccttcgccgcagaggcaccgacaccgagcccccgacatac

SEQ ID NO: 8151 - DNA, 126 bp, Emericella nidulans
ggatgaaggcgagcccatcgtcgatgatctagttccgctgttgaaggcggcgcactggaagatcaatcgagtcgcgtctgacatttccagcttcagaggacggacgtagtcagataagaggacaac

SEQ ID NO: 8152 - DNA, 1480 bp, Emericella nidulans
tgagaccagctctttgacttctcatcggctgctaatactcccagctttcatgttccattttcctaccttaagatgagcaggtcgccatcgatgataaactcctgtgtttttgaggcattccaagtcttaattggcgtaaaggttaagtcatctggcattcccccaccaggctcgttcttcttgacccctggacgacttcccacataggcaccgttattattgataattcgttgaccctcactcttgagcgccacaagaccggcggaccaaagaaccttgctgaacgtcttgtcgtagacaagggatttagggagagttacccgcgcagacggcatattggcaaagtttgtttgaggtgcgtgtggattcccagactgcggattgacaaaaccagacaatgaagatttgggattgccgggtgatgcagtacgaggcgggggcgttggttctgcagttgaagttcgtggtctgaacaattggcggtgttgcatagacactgcatccgcctcatctttgccatgaatgagttcgacaaattcataagcaagagcatgttgggctacccgtcttgacggatcttggttttgctcttccataatctttgagatttcaggtataggcaagaaggtgaacatcttgagataccgctcaacagcatcatcaggagtgcgaacgaaaaactatttatgttaataagatgctaatctttgcaagatgtgctgaacctacctggtataattcaaaggtagaagtcatatccttgtccaaccagattgcgttaccagcggactttccgaacttctcacctgatgaggttgtgagtaagggagtcgtgaaaccaataggcttgtctagatcatctgacaagggattattatcctcctgtaggacagtatttttgctgattgttttcacggcaccaactccaaatagaatattcccatactggtcacttcctcctacttggacttgacatccattcttgaaaagcatccaccaatcccaagcttgcatgagagggtaagtgaactccgcaaaagacatgccatctccccgctccattctgttcttgaccctgataaccagtcagcagctcaaatctaattcgcggcaaaaagaaaaactcacgtatctcttcctagcattggaccaatgcggatgtaagctcccagatcacggaggacctccagaaggggtgttttattccaccagacattgttgtttgttaaagtccgtcgccagatcatctgtctcttatagccatgcttttcaccatatctttcaatgctcgcgcccaatttcttaagttgcatgtgcatgctggccatatttgctttgcggacggaagaatgaacctgttctcttccctttaatcgccctgtggggtcaccaactcgcgatgtagcacaccaagcttcatcacgtcagcaaatggaagaaatcctctccgccttaagagaatcactaacagaaacgtaac

SEQ ID NO: 8153 - DNA, 1368 bp, Emericella nidulans
aataagagagagaaatacagagtggaataataaaagaaagaaagaacataataggaagagatatataaagcatatagaaatgagatacagcaatagagggcaataaggagaaaaataagggactggggtaggaccaaaggtggtaaaggcatcagctaaataaaagaaaagggtttattcccgtcaagtggaggaggaccctgtatagtgaagcatcggaatgcatggacaagaccactatgtccatgtatgtaaaatagcaggcaagaagtggcatataaggcccatgagaacgtggcgagcctggtcctatcgctgaaaagcaaaggatgggactggtccaaacatggaactgtggacgaaatctgagaaatatatttaccccgccagagttgtaactggaggggcgatgaccagccgcttgtccatcatgaggaatctgagtggcgcggttgagcgcagcctcccgactcgtcagtgagtcagaatgcacatctttagtcatacgagttccagtatcatatttaaatctcacgacaaagccggagaatctagtgtaaagagagagcagcagcggcctggcgaccccaccatcgggcggtgacttgaaatcggaggggcttcgtcttatttcgtcattatcttcagttccattcttagtcactgaactctcagggtcgctatgactaccaagaaccaggtggaggaattgctaaaaagaccactatatggtttgtctatttaccgaccctatctctcgacggatgcatcgctaactcatcccagtttatgatcttccccaggaacttcttgcatcgatcgccctcaaaggcgaggatcagcccataaccgttgaggatgccgagcctacccgcaaagagtcctcggacgacgtacaagaacatgcgattgcaacctcaacaagctgcgccatttgcaaagtgtccttcgccaacgtacaggaacagcgcgagcatgtgcgctccgaccatcataaatacaacgtgcgagctcagcttagaggcaatgccgttctggatgaagtacaattcacgaaggcgattggcgagcttgatgagtcgatatcggggtccgagtcgtcggaagaggaagacggagatgctggggaccagctctcagctttgctgaaaaggcaggctaaaatctcccaagcggctgaagagggcaaagagagcgccacaccgaggggtgtcgggaaacatccgctattgtggtttacgcatcctgctctcccaccgaatacgtcgctgggtgtgtaccgggcgctgtttaccaatgaggagcaggaggagcggaaatgtcctgtcgtatccctgaagaagaagcactagcctccatttatccgcg

SEQ ID NO: 8154 - DNA, 542 bp, Emericella nidulans
atccatgtattttaccgacattcgcacactggaatatgcgcatagtagccgataggatttgcgcattatttcggacaagcaatcgaaggcgatcaagatcaattcgtatagtccgtactacataacacacgtagttaataacatgccgggatcagggttcaaccagcatacttgggattagactcctacgaacaaacgaaggcagctgtgtacttaccctaacctgtacagcgtcggatctttataagagagttggaacatggtgagttttgtgcaaggtggctcatacagagatcagagcctaaatcctgattgacttggaatgactgcttgtaaaagtccctgaaaacatacagaggatgagatctttaatatttgcagcaacagcagaagcaatatagactacatgatgtgtgatgaaaggtttttaatcacaagttggggtaagggcattagcagatgacttcctagttctaggctgcgtcagttgggccgagccgagctggccagtggacgaacccgactgacggtctgcaacacgg

SEQ ID NO: 8155 - DNA, 880 bp, Emericella nidulans
cgaactatttctgataagcttgcatcagtttagtaaagtagaaatgctgccatgccatcagcggagcctcaatgataactagtacgtctactttctgtcgcgatgctggacagtatcctaacgtactgacttcaataagattttgttgctgaggtggaaaagttcatactcagcaagttttgaattgtacggtccctggacgagcttatatcggaatattgttatatagttgctctattatcttaccgcaggtcctccagcagaactgaatctgggaaattcggctgacagccgagctggagcgggttccggctgtccagcaatactaatagcggattgcgggtgatcgaccttacttcaacaacccagtttacactgcgagcttcttacaactaccatcctcccaacctcttaaagaccatatattcctttttcaatcgaaagcatgtgtgctcggcatgaaacagatagaattggctcacccaaaacagctatgttcggcgcatgagacagaccgagcccaacagcctctcaataagacttagcaaaatgatttatccgttcagcgtggctcctttgggagcgctttcagtgtcgtatttgggcgtccctattgtagtcgagggaagtttggcttaagtaggaaagcaacagccccgccatgactctgctagccatctatcaccgtaggagcccatgttggcggcgcaagacgacgaatacacagccgccattgaaaagggttcgatagtacaggattccactgaagtgccccaaatcgcgtccctccagaaataatggaggatcctccgaaccacagcagttgttgagaataaacgctgacaacaaccggtgggatcggtcgtgcgcagtgattgaa

SEQ ID NO: 8156 - DNA, 869 bp, Emericella nidulans
tgtcttcttcgatctgctgccgggtgcgagtgctccgagggctgtacgtaggtagtcggcatgcccatcctcttgactgatatataataaacacgcagtcattttgtctcttctacgctgatttctctagcgacctgtcgtgcgtaagcatacttccaagttttcgacaacatacctgaaatatgcaatttgcttcgtcctatccaagaatgtcaggtcggatgcgtttatttccggccgacctcaggcatatgccctttttttttctttgagcagctcgaacatgaggtgagagtaggaggctaccttacaatctttaggtatttctggtactaaaacatcatggaagatttgacaccctcacttctattcagcagatcatattctggtttccagtgccatgaattctctatgccgtttgaatctgtataccatagacacggtccgcaaatctgatgctatccctgatcttcctatcccttgttgctgttggtattctgcccaacttattttcttggcttgattctattatgttcccctcttgatgttccattagactttttattttttcttgtaagtcttatgtctctattgattgtaatatctatatttgtttctttttctttttttttttatttctctttttttatttctctttgacttttttttttccttattttcttcttttatttttctttctctcctatttttctttttttatatacctcttctttttcctattatttcctcttccttttttattattacttcctcttttatttactatattctaattgtttttctcattctttcttcttatatttctcatttttttttctctttttctttatcttttattttattattcc

SEQ ID NO: 8157 - DNA, 845 bp, Emericella nidulans
ctcctacgtccttctaatcaagagatagacagatggccgaagtcgcgcatccaatgtttggatgccgacgaaacatatctcgaaaaagactgaagatggccaaacaggtaacatatcaacctatcatcatgaaaatctagctaatgatcaaaggagatgtgaacgacttgcttattaaaggaggcttttaccgaaaggtgcgtccagactagccagagaagtgagcagtactgacaaccgtaggcttacgcgggcattttccacatgttgcccttagggttgcgagtacaggagaagttggaacgccttattgatcggcacatgcagtcattaggtggatacctactgcttagccctgctgttgcggagcctaactattcacaggcgcctcaaaggtttcattgtcttcgatctcgtcgcaggagctctgggagaaatctgggcgacttaaggacaattcagaagtaatatgcgccgtaactgtttgtcactgttactaacatgggctaatagtacttcggcttcctcgataggaaagaggctcggtttttacttgcgccaacacacgaagaagaaatcactactctagtgggaagcagcgcccactcgtacaaactcttgccgattcggctgtatcagatctgtgagttgaggtaggagctctgtagcgccatggctaatcgagtagcgaggaaatatagagatgaaccccgaccgcgacaaggcctcctccgtggtcgagaattcatcatgaaggatctctacacctttagaagataacgtggagaatgcactgcgaacttatgagtcagtgaagagtgcctacacaaatatgaacgtttgcg

SEQ ID NO: 8158 - DNA, 158 bp, Emericella nidulans
ttcagcccaccagtaggtttcaccgaggatatccattgcacagtttgctgcgcagacatgagaaactgacagtggacgtatgtaaacggtgacatccacaacctcgtgtccgcagcgtggcgcaagacacgcaacgccatactccacgccaagcactt

SEQ ID NO: 8159 - DNA, 468 bp, Emericella nidulans
aatgcatatagaagatagcgtcagtcgaatgtccaattaatgataatgatgcaagcatttttatctagacccgtagtgatttcaaagttgtgactggactttaagtagtaatagccttagtcgccaacggattcgttccgacatcgctgcagtctccagcttcaactttatcttcggctctatttaagatcgtcctggaccctccctaacatccaaacacaccaccaagcctatatacttacatcaaccttcccactcatcttcacgatcgaattacgaatttcgcaatgtaccttcttcccgagccagcagtcggtcaactcctccgggacctgacacgcgcgcaatgcctctcattcctccgcacattagacacggcccttttaactgtctcagcacagtcattctccccgcctgaggagcgcttagtgcaccaaccccatcgcacagcaattacaacgagagaca

SEQ ID NO: 8160 - DNA, 691 bp, Emericella nidulans
gacccatatatatctgttcgacgaagcttccaactttacaatgcctcaagaaaccccgccacccatccaacaagaaacagacaagcacgatctctccgacgacgacgacgcccttttcaaagctctagaggaagaagacaacaccggttaccgcgcccaccgccttgaacaattaagcgcagaatttgcaacggcgcagaaatctagcagtcaaaagaccaccctcgttgaagactcgctctacccaactctgaaaggcgatcaagtgcttctagactacacaactcagacgcaacgatgcgtaattcacttcgcgcatccagaatttgtgcgctgcgccaccatggataaccatatccgggcacttgcggcgcgacatcaggatgttcggttcgcaagggttgacgtgcgcgaaacgccctttgtcgtcgagaagttgaaaatcagaatcctcccctgcgtaattgggtttttggatggagtggccgtggagagagttcttggcttccaaggtttgggaccagggggaactgctggactggaaggatttaataccgctagtctggagaagaggttgctaggaaagggtattctgtcccaggcgagaatcatcgccggtgacgaggaggaattagatagggacagtgatgatgacaacgatgcatggcagggcagacgcggtattcggact

SEQ ID NO: 8161 - DNA, 111 bp, Emericella nidulans
ctgcggactcggcggccgctactcgaacatatgcgcgggaaggtcaccaagatgcgtctgcagagagctcagaaggtagctactcaaccacgcgacgaatcggattgtgcc

SEQ ID NO: 8162 - DNA, 1572 bp, Emericella nidulans
  unsure (1)..(1572): unsure at all n locations
tgttcgaggttactcagtactatcatgcgtcgaaacaagttgttaagccacactagccttcaaccgactttagcttaagggcatctttcgcgggtttgctagaggccagtcggcaaggccgttgatactcggatcaaagccggcagagagctgttcgtcctatgtagtaatttagaagtcaactaccctggcgaatccgggagcatggcattgccggaaaagcaaaaggcgcacagtctacttcgcggaaggtgaaatgataagcaagaggtcgtcacaagcctcaatcttctatcatgtctaggttgattgatgatcaaagctacttttccataattcccattctgccatcgcccactcagtacgcttccaactcgtagctagcgtacatgaaaggcccagcacccttgtaatcgttctggacaactgggacagagatgtagtactatcaggattagcacagtccctataagaccaaggaggcgcctacctcgaacgttccgttcccactcaaacttcctacctgcacggtcccctcccagttgagcgttccgttcgcattgtgcgagaggaactcgttcttcagaagcgaatatccgtccagcgcaaccggcttgtattccttggcagggatgaatcctttacggataccccgcaacaaagcataagtaaacatggcactggcgctgctctcaatgtagttcctaggatcgcttgggtatggcgggtcctggatgagccaccagccgccggactcatcttggcttttcttgacagccttggcaaggctttggtagcgctgcagagttcgcttgtagccggggtgagatttggggaagtagtccagaagctcaacaagcgagacaaagtaccagcctactgcgcggctccagatatgcggagaagcaccggtgacggggtctaagctaagtaagcatcatcaccagctgaaagagcaagagactcaccagcccaaacagcgactttgctggcatcgtatccatgaaagagcagaccagtctcgttgtcgcggatgtgcgcctcgatcaagtcgtactgtaggataatatcatcccaggcagtcttgttgtttggctggaaccagttggtccactgcgcgtaaaagttcgacgccatgtagagtccatccagccacatctggttgggataagtcggcttgcggtgccagaacccaccgtcctggttgcggngcgtgaagtcgagctgctttcggagtccatccgcagcgatcttgacttcttgtcgccgtgacagtccacaggtagagaaagttgcgacctatgcgaatgttgtaaagcgatagtgtatttgggaaaggtcaaaccgggagcccttttcatccaacttcatcgactgggccttgagaagcaaagtagccggttcccggtttgttgaggctatcaaccccttttaaaacgggtagctatatccgggggggaaccttgtgaaaaaactgcccccctttcttttggcccttgcccatgccaaaaaacccttgaaaggcgattttttgaagtttgtggaaaacgccccccaaagtgccttttttgg

SEQ ID NO: 8163 - DNA, 368 bp, Emericella nidulans
gccgccagcgagtgcgataggcaagatagtggccgaagcagacctcggggaaaaatagaccacgagcggacgccccattgaaagcaagtctcaagaaacgcggggacatgcagccacgctcgccgaaccaatgcgacaatgggatcgacgcctgacgctagaaacgtgtcaaatacagagcagtagcagaacgcaaaatcgcgggagacggagcaaagccaggcaggatacccgaggtgataacccaagcaggacgagagaggggtaaggaaaaaaaaaatacatagagcagacacagccctaccaggtgacctaccccaccacccctacatcgcgagaacggggcaaggcgcaagagggtagtagcg

SEQ ID NO: 8164 - DNA, 453 bp, Emericella nidulans
ttatactaaataattcttattattatagaggattatataggcttattaaataatacaatctgaaatttttaagctaagcctacagtgaggtattttatatttaatatgggtataattttgacctagttctaaaaaaagcttaaataaaatagtatatttagtaaaatatagtaactagttattagaataaaatttaaagttatatttaaataataaaacacatatcacctaataattctaaatatactagttcttattatcctagtatattttctactaagattatattatattattactagatttcctagaatactagaaaaccgatatcataagcttactaaaataaatgtttaagtatagatagttaacctgtaacttagtatattgactaaaaaccattctttaaaaaaataactttatcttttaaatttaagtattttatatatatat

SEQ ID NO: 8165 - DNA, 205 bp, Emericella nidulans
  unsure (1)..(205): unsure at all n locations
cgacgacgatgagaaggcggatcgagtccgctagcagaatcccgctaggagagcacgaagtgtggcggcggctcgaagagttcgcagatatagcgacacttnaggacgaggataggaacatattaactggcgatacatacgtgtaacgaagtccgtacgcgtcaagcgggtcatcgagctgcgcggacgtgccgtgcgaaggcac

SEQ ID NO: 8166 - DNA, 525 bp, Emericella nidulans
ctccggcgtagattctccagttacaggttcggcttcgacttcaacagcaggagtttccgcaacaggtgttccttcggccggtgccgaggcgggctcgggctcctgagcatttgtggcgggtgcttcctcttcagtcgtagttgagggaggcacttgctcgtcaacaggttcttgggctgaaacctcagcttcaccagactctgcagcgggtggctcctcagccgccactaaaactggcgcttcttcagctggttttgctacagaaggttccccggtgggctccgccagtttttcctcattggctggctctgctgtagaggccggttctacaggttgaggaggctccaggtccttagcctcctcaatcggttctgtggcaggcttgtcatcctcagctggtgttggttcacggccgcgacggctggatcagagacaggaggatcggcaggaacagcaggagccgtctcttccccagctttctcagcagagggagactgttgtcgactctttctgttcttcttgtct

SEQ ID NO: 8167 - DNA, 399 bp, Emericella nidulans
  unsure (1)..(399): unsure at all n locations
ggggactgccggttatgtgcccgggattcgatttagctgaccgctaacaaaggacacctgatgatcatctcacgaggcgatagtaaatcagctgcgagtcagtacttatccgatccncgccaactccgcggaagttattctggagaacgtgtaacagggcgtgccgcaagtagacccaccagataaatatgtgcactaacccctgattaagaatacggaggccctcagttactcatccgaggctcgtcatacccggaatgtggaagagcagcctgaagcggggctgtctaggacgcatactcacgcgccagaaaccagtacgccacccgttcaccgtgcatgacatcctgcaaaatgctcaccgtcagcaaaacacggacaaacggcttcgggtgcagg

SEQ ID NO: 8168 - DNA, 154 bp, Emericella nidulans
gaacagcatgggagcgcgcgcgatagggcgcagggccacgccccgagtagacatagagccagtggcgcaggatcgctcaggagcagccggaggcaccgtgcgccaaactctggcgggcgcacggaagaagatgccgccacaactagagtagctg

SEQ ID NO: 8169 - DNA, 991 bp, Emericella nidulans
atgacagtagctagaaaagatataggagtctcttggaaaagaaatctaatacataccatgaacgaagacgactatctagaagggcattctaaactcaatgccacaggattacactgtacagggtcccagagaccagtcccaaatctaccaaaggaatcgtccgagtgtgtgccaatcacagccgctgaggggtcttccagccccacccaacagcacatggttttggaacggcggcttctcattaacgcggcagctaggataaggtagcgagttcagtagaaacactcagaagtgctagagttgaagaggacaaacttggtccatttccaatcccaaaaccgctcaccagcgaatcagctctccttcatcgttatccacacctccaacgcccctagaactccgagaattccgtcatatcttccaccccccggctgcgtatccagatgactccccatcgcaatcatgggcctacgtaggccaactctcccttgctgtctcgcaaacatattccccatctggtcaacagttacctcgcacccaagtttctgcacctcatcgctgaaccaccggcgtacgcgcgcgtcgtcctcattcagagttaggcgcgccatgcctgtttcgtgggggttcctggccgtgaacatgtcaatccggagtacaaagtatagtttagtgaggtgaatatgggtgtttgtacggtacgtactctccccagcgatgcgtagcgccccatttacaggtctcgtggatggtttcccagagccggctttggttgattttaaggccggagggagcgagtctggggatcttggtcaggcgcatttcaatcttttctggtttgaatatgagcgagtaaacgaaggaagagtacgaatatctcctatagaggggtttaaattccgcagcgccttctgcggacactggtggatcttttccccaatttgtgcagacgccttcccataacatgggatgggaggcagatctgaaaatt

SEQ ID NO: 8170 - DNA, 1051 bp, Emericella nidulans
cttgctgttatctcccagccggcgcagaccagctctgatcttcccccagaccgccgcgcgcgaatggtacgtctctgctgccctgttcacctcgtcaagcacctcctcccaggtgtgcagtgatgtgcttgtaacgcaagtcttgaagttagacccggctgtagtctgctcgtaggcctccaatgcctcttggaaccggtctttctcaagcatagcatcgcggtacagttcatctctatacacagtatacgtcagttgtagatgtggccttagactgaacttcatacaagtcataatcgtccttgttatcaggactcggcgtgctctgagatatttccatggattctttgtcctccccgcgaaccgagctccgcgatgcgatcacttgagaatttcccgcaggcgcgttgccgtgatctctgagagcgtcaagagcgggatggatgtcgcggcgtagctttcgtctcacatagccatctaccaagttccctaggccgtggcgagcgggcctatccgtcacctggctcatggattcttagcttttgtcgagagataccaatggtgatggtatagggcttcagataagagtgtcggcggaggtggacaatgtgcgtagtgacgaggagataagccgcgacagtcaacatgcaactccatatcaacttgcggggtaggaggcgtgctttgacgctggctttcttgaagctgcaacatacctcggcttaagatgcgttggcaggagttgattggtcataccggtacctagtgcttatatacacaaggctgcggcggacgctatggtagtatcacgccccctgattcgtgcaatattgcgctatcacatttgtagtcacttgaggctcactacatatagcctagagagtgccagaaattgtttccttactcgactgatgcttgggaattcccgcggttttatcctaccgaggtgaatctgacgatatgggagacgcccctccgccagcagccaatgatgagctcgtcacgccactgctctttagcttgagcagcaatggtgctacgaagggaaatc

SEQ ID NO: 8171 - DNA, 1426 bp, Emericella nidulans
aacgggccagtcacaagagttgcagtttatttaggtcattatcgaaagatctggagagcggaacgctttccttgacaggaaccacttcccttttcaggagaggttctgcgaagtcttcgaaggggcaaagtccgcctcaacagccaaggttctgtttttcggcttccggacagagtcttttgatctgggacgtaagaagcagctcggtgatacgatttgacataaacttcatggatcgaaggagattcatggggcatcgttacgaagtcactggcgtgcagcatgctgcagctggaagtaagcgatgtgctgtgattgtttcagcagcagaggtagtttgaatttgcctccagacttggacttttgacctcgctaacacgctaatagcattatgagctcttagtattccgaaacaagagcgccattcctgaagcaaagctgactattgaaacgccgcatttatcttcgccgattacctctatggttatgtctcgtgatgataaatacgtggcattcactctcagagacgaagtccgagtatatgaaatttgtacgactgagatttctcaggttcaactgggtggtaaaacaggctattatgccgctggaaatgtcccagaagcacactccagtggtaagcatgagacatcagcccaaggtcgaaaaggcgtagaagaagtcattgccaggaagctccaattttccgttgatggcagacgcttcattgtcgctacacatctcggaaaccaatacgcttatgtcgacgtgtggaattgcactcaacggcaatggaagcttgaaccaggtggctccaaatcctttaaactcccacctgtacgtaagaagatccattatccattaggaagccactaaccatctccagtggagcactgatgatggagatctcacctgtgtgttctacgacagctttaacgaaacggtcattctcacagcatttctcgctagagaatacccgatatcattctcactctctggcgaggcgcccagcaatggcaccattagtcccagaatagtacatggagcccaatcaccctcaggctcacggttcgtgctagcaaacggtatgaagcagatgtatctgtgcgactcgaccgccagcgggtctctcatcccgacgaagatgaagaaggcaatatccaagatcagcccctcggcttttcagcccagtcagcttgcattatcatttcctggggagaatgaggtgtttgcgttctggacgagagagggcaaactgatgctccgaacgattagcctgcatgccggtggggaggctgtcagcgactatgatctgcggtcagaattcgaccggttgctagtagatcgtccactggctgacttccaccggtcgcgtcaccagccatcatcgctctcgcggcagatcgactcagaaatagaagggttgcag

SEQ ID NO: 8172 - DNA, 977 bp, Emericella nidulans
tacaaatgggtccatagaagtgtcactcatgtaagtcatcgaccgatgtgggaccagtactgcacctttgttctttgaatgtttttcttatgctgtttaccagctgaagctgactgctgtcttgatttttcattttcacaataagaagagaattaaaacaaagacattgacgaagggggagatcaggatggcctagcaagcaccgatggtttcgggtgtggtcacttccctcttctggggcggttcgtcggcttctttcgcctgtgactttttcagtcttgactaactctcgacttcaccacttctcaactgcaggagttcccctttccacgcccacgccattcttgcttctttcgcttcctccaccctttaccgaacccttgcctctcgctgggcaccccaaccggaaggggaagtcgtctgtccctcaggaggtaaaagggcttttttcatccctcttccgccttgacacattttgggccgcgacctggagattgggacgctagctttccccttgggttcggctcgatcgtttcagggagaccttttcttcttttcagtcccctttcccgttacacccgcgatgcgtatggtttaaacctcatctctaggttctcttccggacagaacaacaagagaacgagaaagcgaaagcaaaagcgaaaagcgaaaagcgaaacgttgaagcgagacgtgagaagcgagagtgagaagcaagaaaagcgacagtgagaatcgagtgtgaaaagcgagaagcgaaagtgtgagtgagtgcgtgagtgtgtgtgagtgtgtgaccatggaagcgtctcgcacgcgccccgggggcctcatgctgcctagtcccgtggattcggtcgagtcacttgcctcgtccagctccaataccagctcacgatccagcctttctgactcgccgggggacgtcaacaacggggagccagagccagagcgctcgggaaacgtcatgataacac

SEQ ID NO: 8173 - DNA, 1437 bp, Emericella nidulans
aaaccaaatggcctgcctaggtccctaaaccaaaagcgttggggataaacagtttatattaaggggtattcgataaaatgcacaaattataaatcttcaatccccttgtcatgccaaggcgaaacgaatgtacggagtaacaagttcaaagaagataccaagtaggcataagaagaaaccgaacaaacatcaagccaaagtacacactcaactcctgaacaccagagaagacagagttcgcttagtatgtagaccaaccaggctgtggatgcccaggttgcattggctggccaggccaacctggcatggctgggttcatccccatacccattcccggttgctgagtaccgggcatgaaaggctgaccagcgggaccgtgctgcgatggatacatgcctcgtgcagccatcgtagggtaagggccaccgccggggaagcccattgacgccatgggctgctgctggggtgtttgaggctggtgcatggcaaaagactgcggcatctgtggtacccccggacggacttggttacgcggagattgcgacgggtgttgctgcggtaaattgtgggtaagaggagaaggcgattgttgatgttgggcttgctgtgactgtgatcccggctgttgctgcatctgagatggatactgcggtactccctgcggatttgatggtagcggggaagtctgtggttgaggaggtggctggccccacatctgttgttgctgcgggggataaccgtatggtccagcctgcggcgcaatagctgggttggaccgctgatgcatgaggtcagggcgaaccggaggcatagcgcgaatcggagactgcgccacttgaggctgctgatgcattgttggcggctggaacccggcttggctaggcatcatttgagcttgcggcatcatgttcggctgtgtcggagtcgaactcaaaacactggccgctgataggcgcggcgactgcatagggtgagaagcagaagtggtaggttcaggctgtgactgcgccgtagacacgggagcttcacgttgcttggcatagaactcatcgagccctttctgacggaagttacgttgattcgtcaagatcttgttgaactctgccgtgtgcgttgcctggttcaagatctcagcggcggaactgggttgtgcaccggtcttggtacggctgaccggtcaactcttgccggagtcgaggcatgctgttgtattcccgcaaacgcgggtcatctgtagtggtggccatatgaatcatcggaagtggctgcgacatggaagcgcccgatcccagcgacagattactaggcacgttttccagcgcgttactgtagatcacatcaccatgagccagtgttggcaacatgttggcagcattcgctgcttcagccgcagcctcacgagccttagcaccacccgggcgtttctctccagcaagg

SEQ ID NO: 8174 - DNA, 1225 bp, Emericella nidulans
tacttggaagagtcgacgtccgctatgttgttgacacgggggatcgggctcatgatgccgcgtacatgcccacagttgcagccacccggaggctgcccgcaagaagacaaatgctcgtagcactaattcctggagccaggtcagcgaattaattggggagccaccgcgtaaattgcactccagtcatctccatctaccactccaaggacctcatcaattggacgctccatagccatgccctcattcgactgaaccaactggccatgtttggcactccttcgtcactcggtgagtgtaatgacgcagaataaaactttcattgttacagagaggagatctttactaagatagcatgttcttgcaggagtatgggcgtctaccatccaatactacaaaaatcgaaactacgtctcctccggtgagtgaaacccaacagagagaaattagtgcgcaatttgtacaagatcatcgggacctactacctgataactgcgacaaggggacgaaaagcgatagccaccaagaactctcataccgaagcaccggacccccatggggccgtggggatataatccagtggtgaaaaacccgtccagctccacgatacggcatacaggccatgccgacctgatggaagacaagaaaggaaattggtaggccgtgtttctcggtgtacgacccattaatggagtcgcgcaattagttatgtaggctacctttggatttggtttacagtactgatgaagaaccttcataaaggcggagaaacattcctgacgccagacacttgggaagagggctgacctttctcagacacggagagcccgtgaatgtgtcgcagccgagcccactcaatatacgttgcagtacagtctggacgagggtaaaataatcaagaacgcgacctcgttctcaaattctctccttgctcaagggatctcgtcgtttactggaccattatttggactttacagtacaggaaagtgctatccaagtctggtcccagcagatctcgcgtgggctcgaacaggcgagatttgaagcctacacgccaggaccatgtccatgagacaggaccagtgggataggaccacagatctaatcggaaagcaatctagaactctgaatatttgtctccggttttgctgatacagcgtccgcaatcacactctgtaggcaagtgcccagtcaactggcccgacacaggacgctttgccgatttgtt

SEQ ID NO: 8175 - DNA, 1196 bp, Emericella nidulans
actgccatgacccctggtttgagtacgacaggtaaattcactactattgttcctcttttgatttttgtcggaatctccatgggcaaagaagggttcgatgattggcggcggtatcgactggacaaggaagaaaataaccgcttcgcctacgtgcttcgacccggcgcaaacgtgctatcccgttctgtcactggtgacagcggatccacctcgagtgagtcgcaggactgggatatggttaagtggaacgaaattaaggttggcgatgtgattcggctggagcgtgatcagcctgtacctgcagatatggtcttgcttcacgcggatgggccgaactgtacggcctacgtggagaccatggctttggatggggagaccaatcttaaaaccaagcagccgtgccactctgtggcaaaggtatgcggaacggtgggaggtatttgcagcagttcaatacactttgctgtagaagatcctaaccttgatctctacaaattcgatggaaacgtgacggtagctgctggagagaagacgccgctgacaaacaatgaaattctctaccgcggtagtatccttcgcaacactgaacgggcagtgggcatggtcatttacacgggcgaggaatgcaagatccgcatgaatgcaaacaaaaaccctcgcatcaagatgccctctctccaaggcaaggttaaccgagtcgtcatgctcattgtgcttttggtggtaatgctggctggtgcctgtaccattgcctacaagtactggtcacatgacgtggaaagccatgcctggtacctcgaggacgccaacgtgagctatgggcctgttttcacctcttttctcatcatgttcaatacgatgattccgatttcgctctatgtgagtatggaaattgtcaaggtggctcaaatgctcatgctcaacgccgatatcgacatgtatgatcccgagtctgacacaccgcttgaagcccggacttcgacgatcaatgaggaacttggccaagtcagctatatcttttcagacaaactgggaacattgacaaacaatagcatgcgtttccgtaagatgagcgtcgctgggaccgcatggtttcatgactttgatctgcttggcgagactaaatcaaaaaggtgaacgggaaaagctgatccataagaaacgaagtgtgaaagtgcacttagactgtaacccgg

SEQ ID NO: 8176 - DNA, 1425 bp, Emericella nidulans
gagactgggccgaagccgatgtgagtcgagtcgtagggaggatgatatggtcggggagaggtgtagctgcagaagagcactgagcaccggactgagttgaacttgaggctctgacctccgggcacgctaagcccaatctagcagtcatgggctagttcggctccgcctcactagagtactcatcagaagtccagtatcgtttcctaggccctcgttactccagttattaatttacctagctaccaaaatccaatattcaaattcttcgttgatgttgccagacagggctcgggcaacaatggatgtatagcttcgtaacttgggtctgatgacataatttactggggtcgggagggctactggtctgtgcgccacgtctgtgctttgaatggaagagaccaccatctcgatctatatcatccgcttttggaaatgaattgaattaatactcgtacttggcatctaagtatgaacttagtgcaacagaagataggtcctttggctacattcgacactggtggtgaaataatcttgaaagaacgtcttatatatatatcccggttagcagatcagattttgactaacattgccgataatgaactctgctggtttcttcataggctttcttcgtaaagaggttaggactgtatcatgttcttgagtttatcaggtggcagctacatatataggctaaaaggacagtgcgccagacatctacgcgcattgtgatagagcaagaatatgtacgtcggctccgatagcatagttgactatcaaaagccttgaagaaatataagcctctttattggagtaacctgcaacaggcactataaatcttttgttcttgcggcagtggattctcatattgtttgctagatctcttcttcgttgggttcagtattatatcactgggagccaaagccgcgccggatgtacacagatatctgaggaagtttcctagatacctgatgaaatataatgctaactctcggttatagtaaaaaacagtcccttgctactacttcctcatgcataactaggatcggactaacattaaatagaaagacctaccctgatttcccctgacgatactactcttgagcttcgcggaaacataagagcagacttgcctccgtgatccggcaaaccattgaccaaccgagtagtcttttcctgacaggataactaatccggtagaaaggatgggtaacccgaaccaaggcagaggtttcttgtgttatcagaatactgagattgttaaggagaaggtccaacttgacgaaacctcaagaccagataaaaggatcttttattgctttaggccactgatctttttaaggtttaagtttgggctgtattgacgattctataaaccatttctcttgtctcacatgctctattggtaaactcatccatcttttcttt

SEQ ID NO: 8177 - DNA, 972 bp, Emericella nidulans
gctctgaagcactaacgctttcatctagggtatgttatccatgctcaaccggggtgaattaagagagcctcaaggaggcatacagtcagcctcagttctacaaatcctggttgaccgtgcctactaagattatgatttagctcatttataggttctcgaaccatctagttcaatttaggagatactccaggatcttgagggaaaacgaactcttctcgcatcatgtcactaacaagggccagccaatggtcccatgtgcagttatctgcgcctgttcgagagccatatgcataccatgaagacgcatttggcatgtcctgttcttgctgattcatgagaaaacatttacattcagacccatggactgacgtgaagcccacgctaggcgaccaaatcagatgcggagatcgagcaaactgggcaagggacagacacggatgtgcaggaatgctctctcattgcctaacggagacttgggcgtaatgagcagcgtatactgggaagggatgtgcgcaaggtctgaatagtgttggcatcaactattcactctctacagaccaaccgcatcgtgtcactaggcgctgtgacattcgtctgggatggcagagatacctctagactcccacatccccactccttagtgaacggcaaagttatgctgctagtcctacccctcccaatggtatttcactgggcctctactttgaccaaacctaggcccgtcattctcgtcctcaggtacgacaaggtccttgctacattgtcacacgcggcgacgcgccattgggccagcttcttttccacgagctcaggaactgcatcctagctatacgtcccacatttacgaataacccgccctgtttagccctagctaggctaaggtgtcctacagcgccctgattaacgctaacgaacgtccccaaatctgccgtacatcttgggagtggttgcagctatggatattcccaaggg

SEQ ID NO: 8178 - DNA, 1806 bp, Emericella nidulans
cgatgagttgatagctgggtactatgagccatctgtgcgttgtcacgtgttaaaagacgtaagcactaagcagtaaaaaaccgctgctacccatctcattcaaataatacaaacgatggagtgaatcaaactcgaaacagcaggtctcggtttcacctacatatcttaatataaatccatccttccgtcccgcgactccacttggccaaactgcgtcgttgtccaaaacatcaacaaactcaccacatcttctgacacttcaacccctacgctctggaccaatgtctgaccaggagcaccattacaaatttaacgtgagcatgagctgcggcggctgctccggtgccgtcgagcgcgtcctcaagaagctagatggttagtaaatgagtgcccctctttcccctctttttcgtcgccgtatccaaaacaaaccccaagaaacatacatactgtcactgcataaccggtcgagattctgacaatcagtctacaataggcgttaagtcatttgacgtgaacctcgattctcagacagcaagcgttgtcaccgatgcctctgtgccgtacgagacggttctcgcgacaatcaagaagactgggaagaccgtgaatgccggagaagctgacggcgaggccaaggatgtttgaataatatgattgcctagatataacagtgggatccgacagctatgatagattgggtgaaactgtttaattagcgatcgatatggtcatattcgtgaagctatgacaggaggcatacacacgccacacacaatcatagggtatattgcacttgataaaaggatgttttcttgtatttccttctcgtaggaaaatggaaaatccttacgtccgggcagtagcagaaacagcacataccatgcttgtcgggtatcataatatatacaataggtaacaatgtccaagaaatgaacagaaacagcgacaacaactcctcatactgaaaacctcaatccacagtcatgacagacagccctcagatagtggatatggtgtatttcctcgccttgcatgcgctgggaagtgttgttccaaaaattgggcgtgctgatggaattcgtacgctgtcctaagcatgaaaatgagccataattctcgctgtggtctccgttttctaataaagaacaaagcgaaaaatcgggcgggattatgttaagtgcctatgagaattgggttcttgttttggtcataccgtgaagggacaacggtgttcttgggttgtcttcgatcctgataaaaagagggcggcgtcttgatccgcctgccgtcctcgtgtccttgaacttgactgctgatcgctggatcttggccgggaggtgtctttccccggaagtcctatgggagggcacccgcaaggccaattttatgcctggctgcctgagggcccaccccacctctaacaatgggaccctgcttaacggggtggaagggtctccccactcccatgaaataggacccgcctttttttccttttttcaccttccccgcgcccacaagtacaaaacttagtggcttgtttctctctctcgggggggagggagttgtgcccaattctctcctacttctctttgcattactatctctctactcacctcttaacccctccttctttcccttaaccttcccccttcctgctcccctcaactctaccccctttacacttcctatggccctcatttcatcatattcctttcttcccactagttctaacctcaacttttctttcttcttctccctccatccctctctcctccattcttctctcctcttttacacctcccc

SEQ ID NO: 8179 - DNA, 1433 bp, Emericella nidulans
gccggaggggtcgtttgactggcggttggacgccatcacgattatcgtgtatgagtcgtgcctgtcgtcaaaatcaagcctgaatgctggagtgtaggctcggactcgcggtatggaatagagaaggtgcaaggccgttaaggcgctgagttgagcactggcgaagtccgttcgtcttctagtcgccctttagataagggaccaaccagcacacatatatattcagaggctcgtccgtacagcaattagacttcatcgcatcgtgagttaggacaatcgcggttgcgcctgttccgcgagagctcggtgtgaaagtagaactgttacgcagctaaggagtatgttttcaagggactgagaagtagtaaaaagagaaaaagcgatcaccctttatttcccgtctccagtccttgcttctcaatttcaaccgttctgtcctgagcttcgagccgctccaatcgaccagaagatcaaaagtggaatcgcagccaatcgaaacggaaacggtttatccggtcccgattggtcatacttatgagaagagtgcaaaagactggttgcgcatttctgaataatcaaataaatacattatatatcttggaagaatgaatggtatcgcttgcagatgctcctgctccaaacgccagctggttcccaatgcataaatgacaacgccatgatacacatgtccttcttaaatcgcttcaaaatgtgactcaacaaagcagaaacaggacgtgatatagggtgctggcatcattcctcttcgctgacctcgctttcatcctcgctcaaaacatactggttcgcggggatgtgcgcctgggactgctgacttcgtgcctcttcttcaaaggccgcctccatctctgcagccaacaaatcgtcttcatcttccatctcttcctcttcggttccgccattatcaccctcgacctggatacccgagccaggttccggcctttgggttgtgggaacgggcgatggaagtcgcaaatcctcaatgtcctcattctcatctccgtcctcttcatcttcatcattcgagggtgtgttattggatgagaaatgagcaggattcaccttgaacgggcgagctggagggggtgatcccatgtctataatcagatctccgtcgataatgatgttggatccaggtgaagggacggttttctgcgacgatacagcgccagctcctgtctcggaaggtgaaggagacttggacgaatcaaagacgaacttttccacatcgtcatgattctccctcttcgtcactgtgtcattagccgtgtgtctttctaccactttagcaggagagctcaatttcggtttcgcagatgccgcagtactcgtccgaggggcatcggtcgccagcttcttttgacggaagggttggtttgagcttcaacctagctgaagactaggggccgttt

SEQ ID NO: 8180 - DNA, 123 bp, Emericella nidulans
gccgataagaaatcaacaggcaaaaccgaatcagcaacatgcccaaaagatgcaatgaacatggcactatgttgaccggaggcccgaataaaaatgcatgaaacggaaggatccgactcgcga

SEQ ID NO: 8181 - DNA, 1918 bp, Emericella nidulans
aattaataaatatatgaaaaggctaaataacaacagaagtaaggaaaacttcctacaatagacaaaaaacctttaactcatgaacataataaagagagattctatacgtcccaatgtgttctaatcggacggaaggttggccgtcccggaaacaaattgaaaagccccgcttaaacggttaattttccccttaccctaatcttcgcacaataaacattattttggtcggcacacattgactcatttggcgacatttgattaatgggcaatatcaagcgagaaaggccatctctaatctttcggcggcttacgtggtcatccattaaaccacctgctttcgtccgacaaattaagcccgccgacattaaaaaggttatttcctccctggagatccgaatggggatgattgaaaaactcgaggtactgttcagtagcgaggaacgcggacatagacgagacatcgaaaccgaagagagcgccgcctatcgtgccgaaggcagcgagcactggaacagctcaaccgcccattcaacgtttacggggatggatgggctgcctaccgtagatgttgttgatacgatacatcctgaccagcagattgcactcggcggttcaaccgggaagagctggggaacccaccgagacggccggccggccgtcctttatactcgagtcacaaccccctccaccctccttcctccaccctcccccttccctcctctgcctggcggcgcggccggtgcgacgctggtccatgccaattgccaataacccgctacaaagatgcgggtagtcgcgaaatgcgggaatgcggaggcccgagatggggaagagggtcgagtccaaccagaatccggagagcgaggcctggtgcgtcatggtggagtcagtggtattcacaaggccactcggttgtttctcggctaagcagtactaccgtggtcaaattaaccgatatcatgccatcgactgagaccagacaagcaacgattgtcgtttccagaatatcttgtcccgggttcacagctggacagctccagctgtccagctgcgatcccgttggggcctccaccgggatgctcgggtacctataacgtcagcacggctaaatccccgggcgcaagcaataatagattttgtgagaggtaagaagagagactatgccttgacatttcccaccttcctcggatgcgactcgttcatcacggtatgctatctggtttggtcgttagcgagaccatcgtcagtggctgggctaatgtctgggcgcaagccttcagtccaggatggccaggaactgcagggaatcggctgcgatagcctcttgcggtgccgggccatcgccttgtcctgcagagaattgagaatcttgatgctggccggctaatgatcgggccgcctgctgttttctgctagagaatccacagttctccttgctggcagtatacacgggagatgaaactgactgtgctgttccaggaatataaccgtgcgcgaattgcctcgtcgtttccacttctgatgatttctgggcttaacaactagctggccctttccgatcggcgatttatcgaactgagattagatgacccgagagaactgtctttcgtctgattctatggcgctcaaacatcgagagctttacgaaacacgctattagtgacctttggattttaacccgaggcagtcgatccgggactaattgcccaccgcttaccaccgacgcagggcgaatttggccctgcagttgagaatttttgaaaaaattctgtgtaacccacctcttccggagttccagaacattcaatggtggcgtcaggcaagggaagacttaataattaccctcagaagggcaaaaaagttttttttaaaaaatttgcacttttttttaccagagaaaaagccccgaaatattttt

SEQ ID NO: 8182 - DNA, 811 bp, Emericella nidulans
ctgcggagccggattagagtgcgtgtactaagattaagaatgacggttttgcgatctcgctaaaggaaggtcgctagcgttgcttttgtcggaacttgaagtgcgagaacccaaccgcgaatattagacgacgtcgattgaggcacagaccagtccagtggctgcactacctgactcggattctggggagaaatcgaatcgaaagggcatcaaaggagttgactgaagacggcagaacaaagaagacggccgagataaagcggttggtagaacgggtcgtccacaacggtcacttgcaacagcgtgaggttctatgcgtccttccagtccagcttattttttttgttctgatctcggttttttaatctttgtcgtaacgaaaggatgtcaggagccctgcaacagtgtgtcaaacacagattgacagcgagtcctgaagcatcaatcaaaaaagggggaataggcgacgaaggaggggggcgagaggttagcggacgaaaaggaaagtaagaaaaagacagagagaagacgaccaagtgggaaacgggggggtgacgaagaaaaagggaagcgaagaggataagtctcgccagagtcgccggaggagaaacaagattgaaccgaagactcgagccgactaaatttaacattgtgcacaatctttatgaagaatattagtcagcatatcgatgagcacgcttgtccgctttgagaactgtcactggatgcacattgaagaacttcaacatccacgtcttcataagtctccaaattctctcccgtctttttttcgtttttcacttcctgtgtt

SEQ ID NO: 8183 - DNA, 842 bp, Emericella nidulans
agagcttgatcctcctgtcaatatcctgatatgttgtgctctgctaatgactaagcccaaccaagccaacaatataacttgactaggtgacttgactaccttcatcaacctttcttcgccctcttgggtacccctatgagcttagccgtccccttctcactgaccctcacgtccgcagaaagagtaaaagaatggaaggacctttacgcccattcaccgatgtatgggctccttgcttgattacttcaggaatgaatactgtactaagaatctcgacagccggctagtagataatactcggacagggcagttccgctggatgatacggacatcaactgtatctctgacgaaaccatcgtagccctcctcgaatctgctccaatccttcaagacctcggccaaacaatagtggtgcgcttgtgagaggatatcgtttaagggcggcggcaatgtgctgccatgtgaggcagaagtgcttcaattagttgcatgttaaatattcgagtttcccgtgtccatcggtttctccatttcatggacgacattatatattttggaaccagtggatatattgtaatggattatatcgacggtaaaacgcttgatagcggctggaaatatctcagtactgaacaaaagatggacattcctggggcgtaaccatttctcctttgaagacttgatgagttggtttaacgcgtctatgtaaggtcattccatcaaggtaaacgtctccccctccatcttcccctccatcttcccctccatcttccctacatctattctatttgcgtagttttggaccgctaagattatccatgtcaactacggggttttagtta

SEQ ID NO: 8184 - DNA, 972 bp, Emericella nidulans
  unsure (1)..(972): unsure at all n locations
gcatcatcctgagaatatgcatatggggcaatgatggggaagtggtgtaaaatatggtgtaacaatattatcatatcagcggatattttactgtgattttttcctgttatcttgtctacgtttagttcttaatgcattgtagtcctacccagccttaagtatggtagcgtagtctgtaagtccgtcagtcagtcaaagtgggtccggaaccgcctcaaaacagcttggatcctactcagcttaaattcgctctcaaattatcctcatacttctgtcaagaagtgcttaataccaattcaccacatcaatagcgtgctcattgcatattgcattgtcaaccattgtcgatcgagtttctgccctagcttaaatcgagtgaactgtcacccctgccgccaataccgccaacgcagcttccccctcaccatgtcggacaccaaaccaccctcaactctaccacaatctcaacctccgccgaactcacaagatcagtcatctgaagcaatcgtcgttccgaaactcgagccggattcagacgctactgccctcgatacctccatcgaacaagaagccgttatggccgggcccagcgttaattccgctgctgcgggcccagacgcaggagcagcacccggagcaggcgttggcgacgaccagattgggaaccccgtgcaagcgccgacctccgttgatgcagcggcgacatcaaaaaaggagacctcgctgcgcgagtttcttgggaaaatggatgattatgcgcctattgtacgtgctccattaccttgcttgttctgtacccattaagaaagatgtatatgctaatgtatccactgtgaacatagatccccgacgcagtaacagctcactacctcactctcgccggcctcccaccaccgggccacggtccgaaccaaacacctccacacctggcgcgagtactaaactcgcgacgcaaaagttcatcncgaatat

SEQ ID NO: 8185 - DNA, 679 bp, Emericella nidulans
tctaggcccttccaaaatccatggtcaatctatggagcatctgggtagtttacctgagcgggcggcattagctgctgctacgcacaacgcttgggtgcccctaaccagtgtgaatttacttgactgcgccagatggtgcctagcctcctggtcgattcgggtctttgatctcggcaggcacatatcagccgcctggggccgaacttaggaaacttgttttcttgttacataattctgttgttatacttgccgacgagtctgggcctggcgcattttcggtggcgccctccagtctacggcacgctccggaagcgccttacattttgaccataccaaatcattttggaatcaccatcccccctgtattccttatggctagaccctatcctggtggcccctgatttgttgggaccccatcctctctaccctatagtcgaaacgaagccccaaatttgattaatactcaacccaggctgttatttggacgtgcttcacttgcataccgtgggttactccaactttcttgaccccgtacaaaggggccttccccgtaattgtgtttgcgttggaaaccaaccttgtctggtgtcctacatcctctttatcaacccgtggcagacctctcttccccccctttttttcccctccacgactacggctctctacagggtgctttttc

SEQ ID NO: 8186 - DNA, 1022 bp, Emericella nidulans
catcttcacatgctgcccttaaagaccttgcctaaaatcttgaaacacgccaccccggacggcagtcagccaagttcctcaagctctcctgatagtccgggcggcgcatcagtggaaggtcatcgccgacaaaactctgctctggctgcagtcaagagcggtaaagtcgctgccagcattagcaatagcagcatagccagcgaagccagtagcgctgtgtccgcgctggaagcggaggaaaaggccctgcgggaacgactgatcgtactggaggagcaaaagttcttcgtttccgagatgattgcagacgcgaatcgacgacgtaagttcgacgaggtcagcagtctcgcaatgaacattgaggatctctctagggagatcgatcgcgtcaatggcttgctggacggtctggactttgaaggtgcctatatgggcaaccacacataacacccctccatattcacatccttttctcttcgttcatttcccctgatcccaacaatgcgcagttggcttaactcccctatgtgcttatatactttgttttgtcctcttggcttgttgcggtgtggcatggcgtttgggttctagcatagcgctgggcgttttgtgtaaggggctgttggcagctcggtgtccgtcatcatggagggttctttaccgagcttcatactctagaatgaatcatgaagtttctctctgtatagagtgcgatccgcagtgtcgatcagagggctcttcactcttggggccggggtcagttttcacttgttccgtgataggcatagtctactccaattcatgcaggtgtgaggatggaagtgacagctcagctccaactcaacctccaacttcagttcccccttcaacatctacgtagagcacgtttctcttcacttactttgggatgattctcacgtcgaaactactcctcgactgatattccgcctgttcagcaccacactgttttccaacatgagtcaggcgactaatggacacaagtatcctattctgcaactggg

SEQ ID NO: 8187 - DNA, 703 bp, Emericella nidulans
cattttcaagcgccacgctactcgtggaaaagtaagcaatgtccggacctcaactgcaagattggagctgttcgtcgggcccgcgtataagatattgcgagaaccctctggctttgtcggtgttcatagccttggaattcctcacaaggagaagttcacgtctgcttcttcactgctcattgcgcccctgtggtcatcatgaaggaaaagagggaaaccgtaagggcagatgctgtggaaccagacctccctccgaagagcgccaaccatgtggaagaagccgtcctcgccagcctcgctgaggaggatctgttcaagctgtcccgagagtcgctgactatgcgctcttgggccggtgttcgcctatgcctggtcctgttcgtccagggctgcaaccaagcagggtatggtgtcgactgggcagtcatcggtggcatcaatgcgtaccaatcctggcatgactacttcggcatcggtacagcaggtggcgaatacggattgcttaacgctctcatgaatatcggaaacgtctgcggtgccccgttttacgctcttgccgatatcatcggccgtcgcgctgtcaactttctcggcaatctactcgtccttgtcgcatgcattcttcagtcaaatgcaccgaatatgaaatggtttatggcagggagattcttcatgggttttggtactgccctgacgcaagtcc

SEQ ID NO: 8188 - DNA, 908 bp, Emericella nidulans
ctgtaagcggtggcgccaaagatgtcaccattgacgcgctggtgacacgatctagcgtcgagttgagaaccctatgcgagcgctgctgaggagacagcagtggcagtgacagcgactctgattcaggctcgagctctggaggctatggctacgacgactcgtcgagctctggcggcgtcgatagcgacgaatacaacacctgctttattgcagagtacgtcacttgtaaagcacacagcgaaggatatatgcacttttactctgtgtggaattggaagtatgtcgaccatgaaattccgggtgaagtagagtaagctaacaccttatagagaaacaagcctcgaaggcggctataccccagggctccggcacaccacttagctgggacaacagctccggctcctggatcagtctcgacttcttgtggtccccagtctcgatgatcccgcctacatctcctacctcggcgtcgaaccccaagtatttctcgacctcccctacgacccagacctgggccccatcccattttacattctctggagcgtgacgtgcttaattcgtacttcgcgtacaagtacaaagaaaagttcaattggacgagtatttcctctgaagaagaaaaatacggggaatacgtcacccgctgggtatctatttatcgctgcggattcaacaccctttgtgggtgtgacgatcatcatcggatagcattttcgttaccgcgctcacgcaaaggctgggtctcagcatgtcgccatggaacatgactgatggaagcgcgattgatatcgagggtgagacgacgttgctggtaaggggcgagttgttgaatgaatcgaccaaggcagatcgcacggggccgtaccagggcgagactgtgacgaccctggtcatggggcagtgtacaa

SEQ ID NO: 8189 - DNA, 830 bp, Emericella nidulans
caaacctccccttcacgatccccttccccattctattcaacctttcattcagctacgtatagtcgagaaatatatactccgacgaaaacgaaagacgagatgaagttgttttaactgcagatacattcccgtgaagaaggacagccagatgccgccatgaatattagcaccaggttcgggccaactcaatatatgtggaacaacgggcccatggcgggataccccttcgttctgtagcacagattagcattctccgagcgcccctattgatctttaaaatagagacgataccttttaggccttgtcggatgcgccgtcccgcggtatacgttccgcctggcgtagggcagatagaagggaacgcagacgccggctgttagggagaaggcaaccatatatttagtgagcatggtactttgttgtcaaagcaaagacaacggaatgcattcaatgggcgaaatgatttatgctggattataagataacattaagtcaattaagtcagttactgtatggacacatgggggtactactcaagagccaagtgtcagctggcaggtggggaggtatagaaagcaagggttcttaggcctggggcgcgtgattataaattgctctgcgccgattggacccgaggccttatcgaatgcaccataatctgtaattactagtttatgctggtgtggggaagcgacagtgcaggttaccccgcgtcctttccccacggggttcgggatagggttatcccatgagtcttgcaacccggggcatacagggtctgttgatgggggtatagcatattgaggtgtgacaaggcaatccgagcatcg

SEQ ID NO: 8190 - DNA, 768 bp, Emericella nidulans
ggcactgcttgccgaagcaagctctcattggaaattgatttgatacacggtaaagaacaaatataaagccatttgccctgtgatagactagataatagtcttttgttctgaatataacattcatgccccagttggcagagaacttggggtgcctgcaactgcctatcttcttcaagggcagaatcagaatctagattctcacagattaaagagactagtcgtggcctatgcaacaagctattaggcctcgcagctcgtttacagtagcgagcctcaattgtaatgctcaagagtacaagagctgcattttttatttcctagacatgaaacagcctgaaacagcctatgattctagctctatcatgcattctgaagtcgtggctctatcaaaaaacacaaaactcctcatcgcactacactttgaagacatcatcaaccctcaccgtctgccccgtgctcatggaccgattcgcacaaatgcccgtcaagatcgacagcgccccatccacatgcgacgccgccctcctgtacggatcatcgccaataaactctccaaatagatcattcagcagctgcggatcgcctcctccatgaccaccactccccttgggaatctcaatctgcacgggcttgccaaacatcggccgcaacacaatcgactggctttccaatgccccttccagggcttgctcaccaccagaattaacgtacgactgctcgacgacttccacctccagccggcctttactgccattgaacataactcgg

SEQ ID NO: 8191 - DNA, 914 bp, Emericella nidulans
ctcattgaccccatcatcgcttcatgcaattcctctcttgttaacaatagcgactctcgccccactctcatgagcgtcttagctgcatgtgcttgtcagagatgcctcgccaggatatggagtggagtctcactgtcctcgtctgtggtgtcaagagcgcatcactgatccagaagtaacttgatcaaatccaactcgataatttcgccgttcagagaccagtaagcaagcctgtggagaacagtttgcatttttgtgatccacaatgcctgcatttgctccgcgggaacagagccattgaattgcatgataggcgtgatttgaggcctggctcccacgactggcgtgcgtccgaacggcgtagtgaagagtgtggcgccttgcttgtcgcgggaattgatcagcttcaccgtggcttcagcatcgttgggcacgagcagctaaaaggtgctggttaccttctggaccaaagcgttctccgatagggacggctcaaatgtgggatcaaaacctgcggccgcgtagtgcagaaggagccggcccatactatcacgagaggatattaggtctgactcgttttcgtgaccatagtcaagaaccgccctgatcccatccacattcccatgcccggctccctagatgcaacgcagtaacgtcccgaacatcaagattattatcccagaaaccgggattgttgctgtcatattctaatgctgctgtatgtccgcgccatgctctaggagccatttcaccattccataactggccccgtattagccagactaagaatagtgaaatctgcttgttgcggtaccagctgccctttactagttatatcaatattactagtagggaatagtttattattacatgcagaattgccctggtccaggagtgtttccctaccccaaaga

SEQ ID NO: 8192 - DNA, 764 bp, Emericella nidulans
gctgtcgctgccgccgaacgccacgggcccggatacgggaacctgatcatcctcgcgaccgtgcaggagaagcagaggcgtgctcttctcgattccgcccttggattgatcttccccagagacatacccgtcatccttatcctctgcatcaagtctgggccacagcgggttgctatttgcatctacaagactccagtcagggactcctccaccgcagacaacagcgcgaaaatcgaactcgttgcgtatgactgcaagagaagatagaaagccgccatccgaccatccgctaatcgtaacccgggactcgtccacgagattctctgagacggctttctttagaatcatcaggacgtccgcgtagcgctcatttattccgcctccacctccgccactaccacttggacgtatattagggcacaacactgcgtatccagcggatgttagatatgcgacgtcgaggtgagagcctattgagaaggacggcagcgttgaatggctctgcaataggacaaccgttggcggcagacggcgggtgaaagttactggcttgggcgtaaagagccatccatcacactcccagccgtctgggccagtggctgagatacgcttcgagcggaacccgtcaaaggccgaattgtgggatgagagtttcacgaggctccggcttctgccatctttgatgatgacagaccacacctcgtttgcgacttgcggactactccgcgcgagaacgagggtgaaatcatctgattcgggatgac

SEQ ID NO: 8193 - DNA, 977 bp, Emericella nidulans
agctgtcgattacgtcgtcactgtagagtgtcagtatatacataattcaaaggagattgaagttggagtgtgcaggttgggaaagatggccagatggagtgcggaaaacgtacaacatcgcgtagcagatccagtcacttgagagcacggacggatcatggagtctcgagattcgacttcgaacgcgagatgcgtgctcgcatccaccggcggaaaaggtcactgtgccctcactgaacaccaagatgtagagcatcgtcataccagaaggcgtcggaggaagatgctcttgctgctttggctctgcattatcatcgtcaagcggcgatgtcaaagtccgaagcgagatgagatagtagcccgggaatgtctcaatcttctggcgcggttcctgcagggcgatgtcctcgaccgttagagggtggatagagaacctgcgagccacagcggccacgtctgtttctgtggcatcgtggacgtcaagccaccaggtacctgcagctgaactttcatttatactgtcaaactccggggccagttcttcccattgtgaagcttgttttatctgctgcgtctggcaggagaagtgtgtgaaccgggagacctttttagcggccatctccaattaggctgcagcgaaatttgcagggtaaaatattgaaaagccccatccaaccgtgttgatcgacttgactcatgtatttcttccatatgtgaaggttgcaggagggaacaaatcagcaaggaaaggctcttggttgggaagacgacgataccgaaaccaagatgttatcccagccagccctaggaaaaatgggtacatataaatatttcccctgggccggggattttcttcatccaccctgattggactatgtagccctgcaggcgtgagactgtggatgaagtcactcggctacctatctagtgcattcttgactcttcgacccactggctggtgctcgcagtatacaggc

SEQ ID NO: 8194 - DNA, 1002 bp, Emericella nidulans
ccttccaggaatatgcttttgatggacgttcacgtgcttcgtataaagagcgttgagtgacgaagttgggcatgatttgctgcaccaagttaccgaatatcgtcatcaacataaacacactgaacatctgattttgaaggccttggatagaggtcggggcgttgaagaacgaaaacccaatatacagcgctgtgagggcacagagcgccgctttagaccagatgtaggttggagtgcggtagtattgagcgaacacacgcacaaggcactcccaaagttggacagaaaatggggcagcaaactcgctcagggcgcttggatcagacgagtccgcaggtttggctgacaatgtggctctcagttctgccaggtgctccctgactttggcgtattctggggattctcgccaggtcttcacccagtcaatttcagtgttagagcctggtgctgctccgataacttccaacatccattctgctgggttgtccccagggggtaatccgtgagaaccattgcgtacaaaatagttcgagagtgtcgaggagttaggtccaatttccccaaaatagattgttttcccaccagatgctaataagagaagccggtcaaatctttgaaacaacatagctgaaggttgatgaatggtgcaaagtatcgcttgtccgtgctgagtcaaggtatcaattaagtctaagatagaccatgacgtctggctatcaagaccagaagtcggctcatccagaaacaacagaagctgaggttttgctgcaagctctaccccaattgtcaaacgttttcgctgctcaacgttcaagccttgcccaggaacgcccacaattgcgtccgcataggcttccattcctaggagcttaataacttcttcaacataatcaagcttttcctgtcgactcaggtgtgcgggttgatagaagtattgcgctgaagcggagagcttcccggacagtagaagtagccaagtgtagaaccagttgttgcgcgtcc

SEQ ID NO: 8195 - DNA, 347 bp, Emericella nidulans
gcccaagccgcctacaatcgataacaaatccccccaagccggtgtagaacggccaagtcccatcgcaaccagggaatgacgagaacccggatgcaggtcggaacggacgcaacgctataccgctaaccaggccgaacccgatctgaacacgactgctagccgtgcggcgcgcgtaggtcaatgtaccccacgccgagatccaccggccactcgcgagcaacgacatgggaaaaggcccctccataaggatgcctgtcagacgacggcaagaagttcagcgcccctgacaggctcccattgtgtgacatgaaccgcagctgcccgtggacggatcggactgggctgga

SEQ ID NO: 8196 - DNA, 1484 bp, Emericella nidulans
tctttcggtacatatcatttgtgtttcatcataaaacggtggaaggcccgtcaacatctcatagagaagtacgcccagagtccaccagtcgacagtcttggtgtaaccttgaccgaggaggagctctggtgcaaggtactccggagtaccgcagaatgctgtacctcattagctacttagaacgcaaaggggacgctgaatgtcctactgtttgtccgatcctcatctttcatgtcgagtttgcacagtccgaagtcgcacaaagcgatatgtccagtatagtcaagaaggatgttctcgggtttcaggtcgcggtagatgaccttgaagccatgcaagcactcgagagcgcagagcagctcggcagtataaaaacgagcacggttaacgtcgaatcgctgttctcgttgaaggtgatggaacagctctccaccattcacaaaggccaaaacaaagtacaacttctcaggtgactggaaggagaacttgagaggcacgatgaaaggattgctaatctgcgcaagtacggatctttctgcgagagtgtgcgtgacttgcgaccgtgaaatgatgtgtgctttacgaatggtcttgagagcatagatgcgggccgtgtcctttttcctgtgaatgtgtaacttgacgacaaatcaatgagcaggaagattttgatgagtacgcacataacctgcatgacctttccgaagctgcccttgccaaccactttgagcaaatcaaagtcctccaattttaggctacggtgcttgctctcaacaaaagacacgctaattttgagtgaaccagaaccgaattggaggtcatgccattcggcaccaacttgcccaagtgcgcgttcctgttcggcgtgagcggcagcggtcttctggttgtcctttttgctcagctttgggtcgccaatgtaaggctgaatttcctcctcgaatcgagggtgaaccttgacgggcacccaaaaagatttcgtcgttccggcgggcacctggccgagcagcagggttgcggagatataattgaacattcagatcagtctttcgagacacatcaaacttgaatgcggtgttgtcgcctgcccaaagtgggttttctggcgtccctgagaccgcatcgacgaagacttgattcttatcaaaatcaagaagggcgtacggaaggtacttggttgagtaccgaccgtgaatagtgggagccgcgttgatgcccgaacttgtggattgaggacggttgctcggcacaaacgaactggactgcgaatgcgtcgagtgagaagatgaagaactagggcgcatcgaatagccattctgaatgtgtgaactgaaaacttgttgataatgctgcggaagagcaaagctgcggccttcgtgtagggtgactatcaaaatcccgggctttacgggcgccacgggaggagaaacgagtgcttccgaggcagctttacaaaatagaacccggttctaaacggactgaag

SEQ ID NO: 8197 - DNA, 863 bp, Emericella nidulans
gagtaaagatggatgaggtcgacagggttcctcgactgacgggcagcgctcgattctatgccagagccctatatagactggccaaggttttttgaggctcttggaaatgaactggagcgttcagaatgggccgattatttgaatgaacatggactaaaactgtatgaccaatacctggaggacgacatcttatctgaacttgaagaaggtgttacatttatacggggtgctattcatctgacaccagaggatgacccagaccacccaaagtacctgaataaccttggaaatctgcttggcgacaggtatatcaggacaggctcagtggctgatcttgaagaagctatcgacgttggacagaaagccatcaatgcaattccaaaggaccatcccaaccggccaaggtacttgaacaacctgggaaaccaactcaatgacagatacctaataacgggcgtgcttgccgatctggacgaagctattcaagtcggatgggaagctattcgtctaacaccggaagatcatccacatcgaccggcgctcttcaataatcttggtaatcgactcggtgacaagtatctcagaacaaatacgctggatgatctcaatgaagctattcatgttaaacaggaagccctcaaagcgacgccagagggccatccagaccgggcaggtcgtttgaataaccttgcaatcgaactgagtgcccggtatctaagaacattcgacgcggttgatatagagaatgccatcgaagctggacgggaagctgttaaaataacccgagctggccatgcagacctgccaatgtatcttcatagtctcggcaattctctcgactacagcgggtcgaatcttgaaga

SEQ ID NO: 8198 - DNA, 745 bp, Emericella nidulans
cccttctttttggggggcccgctacccagcttttgtggggtttattgaaggtcaattgggcgcttgacacactcatggtcctatatgtccccctgtcccaaaactgccttttcgctcacacatccacacaacataccatccggaagcctaaagcgcccagcctgttgcctctcacgagtctgctatctcacatcacttgcaaatcgcctaactgccccctttccagacaatgcacctctctagccagctgccttacatgatgcgaccaactgaaccagaaagacgctccgcctactggctgcctcttccacttacttcattcacctactctctgcatcttcttctgaccgcttttgccacgccgcatcatctttacttcaaggcggaaatacctgctactcaccaaaattttgctgcccccccaccatcgtaccctctagaaaactgtcccacccatgccatcttcccccccacggctcccgcctctggcgcttttccctaggcctcctccctccttttcgacccttaccaaatccttccctctcataatcttcagtccctacaacccactaggacttttcctacctctccctcacccccttgaaagtcacccctgcctcctcaattccacctctgcactaccggtctctaccgccttttttccttctgaaaatccaagggacttttcctacctcccttaggttccactctccctctcctccttcacctcgcccctcccaccccg

SEQ ID NO: 8199 - DNA, 1725 bp, Emericella nidulans
agaagaaaaaaggagagatagaaaaggtgaaaaaaaataaaaaaccaaccatttaaaggattgaatcagaaaaccagtatcacttggccataaagggaagggaactttagaaaaaaaggtcccccaaattctcttttagaacaagccacctgcgaaaagggtttattgaaggaaaaaaaaggggaaagatcattaaccatcccctttaacaaaaagaagagaaagaaaaaaacttctttccgggactccggaccctgcatatgaaacttccccaaacttccgaggcacaaataaccccctaaactctcatccgcgaacgcacaagcccacacggcgtattggaacgctgatctctatgggccgtattcaaaaactctcatcttcttcgtagacaggttcacctctctcccgcgcatcggggctcgaaactggtctcttctaacgccggccgccgtggaagtgccgcagaacttcgaatcccaggtgacgtttactgcggcaagggtgcgagcaggatgtgttcttgtgaaatttggggcagcggatttcgagacagcgaaagactggctcggcggtatcctgaaggaggagggcagtatagcgagggaatttggagaagatgcgctgttttgtttatgattccgcattttctgcgaattgctttctatggcatgatgaggttgctcgttcacaaatatttgtgacagcgcctgtccattttctctcatgatgatacccagaagttatatttgcgtctgacggctatgcaaactatcagaatctaagtctagcaatctatcaaaaggttaacaatgaacgtaagaaatcaatgcttttgcaagtaggccttctcatcattcaaatcatgaagcagaaacatcgcaacgccgggggtatattcgtataaaacaaaaccaagaatcttatcgtctatcccatatcaatgcagtcaacacaacctagctgacgcccatgtaagcataacgatcgaaggcatatagatcgacgctgacactccaccgcttatttaacgagatattccgaaacagaatatcgcgagaggatatgttcgtcgctctctttttacaaacagcattattgccaccagtcaaaaatgctggggcgtccattctttctttgttgcgctcacgagatcgtccacgttgagcaaatcgacgccttcgcgggctaaaacgcgccatacatggtttcgcagactccgtggccaggatggtgttccccagtatcggaccttgaggccttgacggtgagcagccctgatttgggatctgattgtttgcacttggcggtttgtaaggtgcagcattccatgggataccaacggctttcttaaaggagacccgaccataatagctggtaggtgtgttgaagatatcgggttcaatgcgcccattagagtctcccaacaagcccacaccccctttattagcccgcttttcccacaattcttgtatactatcccctgacattcttcacttttggcaaactgggcttttaaaaaatgtcctgttttcgccccttccttattttataaagggctttttccttacaaccctgtaatgggccctgctccctccttctctttttggccagtttcccttttgtccgtcccacactcatcaaatatcctaatctcatactttatatgatccatccgtattctcttttgttgactttctctactctcctgttgcactactaata

SEQ ID NO: 8200 - DNA, 781 bp, Emericella nidulans
ggacgcgcgaaacaggagaacgtttgtgcagtgctcgttctcgactcggaatactgtccagatgcctcggcgaaaaatttcggtgaaggagatgacaaagctgagcacggcagagtgttgaatgtcatgtgcgaagatagcataaaagatccaattgaatcgaatgacgacatcgatgacaatggctacgtaataaacccatgctcttcggaatgccagggtttcacgcagtagggggtgtttggcgtaggggtttcccaaactccagtccattgctaagtcccacacagaaacatatatagcgttcagcagcgcgaatgttatgaagggggcctgaaatcgcgtcgttctgttgatgcggtacatgctcaaggtggtgtagtagaggactccgcacatgtatttgccgaagttcaagagatggggaaacacgttcttggtgtccacatatcgacggatacactggaaagctctccatatcgacgggagagtggtaaagaaccccagtaatctggagtgagacgaggtgcactgcgttgacgaggcgccccagtgcttcgcatagaggcagaagaataattcaatgttctaagcaaggtcaacgcttctgcgcagatgaatcagggtttagtcactcacgcccattgcatacgtctgggaacagtacatgtctcccaggaagaagtcacgaaactcaaccgggtacagacccgccagtagaagacgccactagccatgtcagcagtagaaccccatcacggagattttgactaacattaga

SEQ ID NO: 8201 - DNA, 1854 bp, Emericella nidulans
  unsure (1)..(1854): unsure at all n locations
tctagcagtccaattcctcttaagaaaggccctgagagggaggccgctgttggagaatctgcatgcgttccgtacaattctgtgagccttgcgacgccgaatgaatttgaactcgcagccatgtacaccgtcgcgcgggaaaatggccttttcgaaaccgccggttggtggcgcgttatcgatgcaatgggtatgacgtcgtcaggctcaagagaacggctcgtcgcgatgacatctgccgctcttgtggacgaaggcataccacagcagagcatccagcttcttccatttcttccatgcataatcaccaaattgggcgccagaggagcgctgcttacccagttgctgaagccgggagattcccgccttactgatccggaatatagtccctacattctctcccgcactgtgtctacgggcgatctgatcggaggggtgtacatgcggttgtttccacccgctgcgaaactaacagacgacgccatcatcagcgtcaatggagcaggtgacactttacttggggttattatttctgggcttgcctccggacatggaagggttgaggatgtacttcccttagcacaagaagcaagtgtcctgaccttgaaaagtgccggaggggtcagcaaagaactcgcgcagttacagtcgcgactcaaaaatattgtggcttaattctgctttatcaattatggcttatctctccaattaatatagaacgctacttgcagcttcttcgcctacaacaggcattcgctcgatggtgtcctttccttcgcggtttggcccgattgctttgaaactggttgggataagggttgggtctaagagaccaacctgcaccagcacgcttgcttgatcccagtatatgttgtggttggcgatcttcccacccaggaagccagctgtcatgatgagggggatgcgaacagaacgtccagtcggcggtaccccaggtagcatccagggtatttcctctgtatgctcaaaggtgagcagcagctcgtcaaccacgcggtccgcgcccgaagtgcgagaaagcaggcggattcgctgggaaggtgggccagaagggacgaatttcgtggagtaaaacgtcgtgatttcggagggtgacgaccctagtctcattagcttacgtatgattgtcaagcagaattggtggacaacctccgacgccagaaggaacacaattcacacacgtccggtcatcgaattgccgatttccaagctcctccacccaccatcagaccaagcatgtcaggcgacgaagtaaagggtggatttttggcagactcgtggatattcctccaatatccttcccagaccagctccggatcaggcgccccccaatcacctccaccactaggccatccaaaaccgcgtttcaaacagttcaacgatccggcccatgccaatcgcgaactagtgcggtcatacgtcgnataggcagcggactctgcaaagcctggttgggactccgggtagaagagcaggtggcaatgatgccgcttgttactgtcatcccacatcgcaaagctctcgttccgcgacccagcgaggtgaatctggattgcgaggttcgcgtcagtcttaaaggccatagacgtcgatgttgatgctgcggttgtcgagggcgggagacgagctggctccgaagagtttaaagatgccacctgcggggcatctgggtagaaagcaataaaggcgcaaaggcgagggaaggggttcgtgcttgatgactggtgatgcgagcggaaaaggagatatgcggggcggttgaacgctgtccaatgtatcaatataagttactatatacgccgatactcttagattagttcaaagacataccca

SEQ ID NO: 8202 - DNA, 720 bp, Emericella nidulans
  unsure (1)..(720): unsure at all n locations
tagacgacgaggttgaattccaaggcattaagtaccgcgtgcagaccgacgatctctctgatgaggtcctgacctctcttgcccccggtgccagctttgaggatgagtttgacattgccgccacctctgacttgtcctctggcggccccgtcactatccgctctgagggcattgtccccctggtcaccgaaaagtccgtgaccggctcgctgtcctacagctccaacgaactgaccatcgatgtcgacggtgctgaggctgccaagatcgagactgtcggggctcagctttccaagctctccaagcgcaccagggtgtcctcctgctcgggcactcgtgctaccgcgctccagacagcccttcggaacgctgcttctctcgcttcccgtgccgccagtgcggccagccagggaggctcaaccttcacaactttcttcaagagtgactcttcctctacacggaacgccgtcgctgctcgcctccgcgccgttgcatccgagtcctccagtacctctagcggatccactacgtactattgtactgatgtgtacgggtactgcagcagcaatgtccttgcttacacgctgcctgcttacaacatcatcgccaactgcgatatctactacacctacctgcctgctcttactggcacttgctacgcgcaggatcaggcaaccaccactctgcacgaattcactcancgccctggtgtgtactccc

SEQ ID NO: 8203 - DNA, 1375 bp, Emericella nidulans
accctcgcccttgtcgcaaaaagtctaagcatgctttaagcttgagacctctgtgtccttggttttggcagtgagtaccacttccgtgtcgcccacgattttggcaagcccttttcatctgaggcaggtgtccaggtctttcagaatttcagctaccagcaaactggcaccaacgtgcgcaagcttatcgccgactcgatcgctctctttcgggaagcgcgtttcaagcaatctcctgctggcggcagtgccgacctttggcaattggagctgattatctcggacggcatctgtgaggaccatgaaacaatcagacgccttgtccgccaggcccaggaagaacggatcatgatcgtgtttatcattgtggacgctctgaaggggaactctatcctagacctcacgcaggcgagctttgagccggataacgagagcggtactggtgagatgaaattgaaaatgaagcgatatctggaaggattccccttcccctattaccttgttgtgcgggatgcgagagaactccctgctgttttggctacggcattgaagcaatggtttgcggaagttggtgatgtttcctcttagattgactgattgagtgcattgtggagttatgggcatataaaagcacgttttctattttactctcattgttgtatataggtggcaaactgtgtatatcgttgtaagaatatttatagagttcattgctaaaactctttgttggaaaagctgagtttaggccctaataactcaaattgcaagattccaccaagtatatgatgttattagacgaatatccaatctaccaaccgtatttcgcacccgcttctttcttgttccgcttcccagaagcaaaactctcctccaaagcttccttctgcgtgcttgcagcattgaccagctgttgcagcgtgtgcttaccaggagcaatagcccggacaggattatgctgcgccgcggcgagttccttatgtgccatctcctggttagcagcatactctgcatctgtattgaagtgcagaatctttgaactggaagggtctgcgttgcggccgaacaactggcgacgctgtgagcgggagaggttcaaatcatctgcgatgtaatccaaggtctgagctgagggaggcggtcgcgttgaggcggcagggacggattcggtttgtgggacttgagggcctgctgtaggcgagtcctcatttgtggtgtaaaccaagggttcataggttgagccatgcgctgaggttggtgcatccgacgcagccgtttcttctgtcggagccgaaagagagacaaggctaaccttgggtttcggggctggaggcgcggcgggttctgcgtctgtactctgctgacttctgctcatcat

SEQ ID NO: 8204 - DNA, 105 bp, Emericella nidulans
  unsure (1)..(105): unsure at all n locations
cgaggtcgaaaagccgctcatgggcgcctagggaatcagcaggtacagtcaaancatcatccaggcacactgccggatacataatggataacggatgcggctgcg

SEQ ID NO: 8205 - DNA, 212 bp, Emericella nidulans
  unsure (1)..(212): unsure at all n locations
ccgaggcgcgagaaaacgcatccgagtggagagggtccgtcagaagaggcgatctccgacaacgtatctcgtcagagcagggtatcagggctatgcaggcagtaatcncggcganagcaaagcggtagccgtaagtcgccgtctgggcgcgcttagcaccgcggccctccaacgtggcgcccgagctgcaggtggcgccacagacagatacc

SEQ ID NO: 8206 - DNA, 884 bp, Emericella nidulans
gaacccatggccttgtaccatggcccctcacttgctggcatggggatgcgcagcagtctcaacgacatgcttttttggtgcattgcggtgctagatgccgagcgcagtgaaagcgacgccaactacaaacgcatcatccccaataatccattaaagcaaatgacccgcgtccgccgtggctactggactcggccatctgacgacccagaattcagcaaggccgccgcctacgggatgggctggtttcgtgtcgaccttccttcctcccagctgagctcgtttagcgggaatgcgctgtcccagggcaaagactatcaatttcatttgcatcatatcctggggaagaataatgcagccgcagctccattaacgggtcgtgggccacaccgggggaatgcaagggtcgatcttctccgtgtacacgttcccagaaacgcagagcgccgtggtcaccgcaacgaacgggcgcgacttgggcgatgctagtgactttactgcacagctcttgatacaagcgctctttgacctgcagccattggtcgatctacggccttgggcaatgaaggaagcggaactggcagtgaagcattatcgtgaaaacattgaagggttgtggctggagaacaggcgtcccaaggacctggagcgagatcgcatgctttatttgggcgagtatcgtggcttcaatgatcggtttaccttgggtataggtataaccggggcgaatatgccttcgaaaccgccgtctttgtcagttgtgttcaaccaccgcccagcttcagagtgcccgttggtcttctatcagacagacgtgtacagctttttcaagccagacgaggattggtcgaaaatgcgggcactcatcgcaaaggtgtaccagcaga

SEQ ID NO: 8207 - DNA, 830 bp, Emericella nidulans
caaacgttatcgcctatacttgacgaacgtgaaggggcgagcagggacttacggaataccgaccagccattaataaagtctggcaaagaaagtagacgcctatcggttttgaaaagaggcgcattggaaccagtgggtttgccgcccagaatagctcgataacgataaaaattgtgcagccgcttatgaaggcgaatgcaagcaaagatgtctggaagaacatgcctttattctgggctcctagtgcgcggaggaggaagagtaggaggagaactgtcccggcgaatgtgaagagacctgcaaagtctagatcgcggatacctgagggtccgctggcaggtgctggctcttctgcagactcgcctttcgcctctgtctcgttgagataagaaggtagccggtaaacgcagaagagcgcgcagcaaatgacgatcggtacctggccgaagaatgacctgcgaactaagtcagaacccttttccaggtagaggttagctagggaagggaccatcgccatccaacagtgtcagccagaaaccctccaatgggacccccaaggctgcgtccggcgatattgaccacattttgatagccacggtacagcgcgacctcgtccacgggagtcatgtctaatgccaactgtaagcttcccaaactctgcaggtagagcacgcaaagtaaactaccagtgataatgaccgaggccatgactaggatacctgcgccgctggtcccagccaggacccttgacaggacgagttgcaggatggacaaactcgcaccactagacatttatcaatcaagacggtattacaaccatgctctagaaa

SEQ ID NO: 8208 - DNA, 111 bp, Emericella nidulans
caacgcgtagcttcaatgattatggtcaagccgattgatgtccctggaggtccgatacgcgaaccggagaatcgatcggatgcgcttgatccggatgtacgtgagacggag

SEQ ID NO: 8209 - DNA, 1250 bp, Emericella nidulans
gagaaaaagaagttctaaaggggacttgagtttccaaataagatttaaaaatttagaatattgggagcctaaaagaaaacgtatctatgagcccatatttaagatttttgggtgccgttggaccccatttttaaaccttttttctaattcagcttgtaaccaacaaggttttcatgacatcgttggccgtgtctatgggcaagtgccaccagattttccgcataaattaggggaaacttcgaaagggtactcctgagcaactttttaacggggatggtacctgcacgccaaagggaaatcgtttacgttccttaggcatttcgggtatcgctacaaccctcggattctccgggttgccaccctcacctacgttctctatgcattcgacaatttgcgacggaaccggcgaaagtctacctttctgatccctatgcggatatacgaagacattacgccaccgacccgtggtctgataccggcaacaacgtcgacggttgtatcaagcagttctatcttttgaagcaacggaatcataacctggaggtcctgctctctatcgaaggctggaaatactccacgaactacgcacagtcagcaagcagaatagtggacggaaacaatttgcgcagacagctgtcaagctgcccaagacctagggctggacggcttggacaacgactggaaggtaggatgtggctctctcacataggatgctctacccctgacaagtattgcttctagtgtcccaacatgacccataggcatagctattatccggctgcaaaagcgttaaccagcagcaaaaggttcactatatcatttcaaggggcctagccctggatcctttcagtctgacgatcagaagccacggcgtgcttggttgccatgaatatatactaactgtgaatacgaaattttgatacggcggatcgatgtcatatggtgctgaggcggagccagtcggtcccggtataaatgcggcatatgcaaggatccaacaggtcaccggctccatgccttgcggttaaaatatctttagttttccgctgtcgttcgcactgccatcgagagataccggatctcaacatctcagataaatgtgcgctttagagcagagtagcagctctgtcaacagaggttagggttatggctcggtctgggcgtatcaaaatccggagaaagtgtgaggggaggtcgaagtccgacactgcagctaatccctgagcaaaagcgcccacagcgagaggaat

SEQ ID NO: 8210 - DNA, 1194 bp, Emericella nidulans
  unsure (1)..(1194): unsure at all n locations
tacatcaaactaccttgcacccatcctgcccttctcgtgactcattaactacctcattaacgtaactcagataactaaactgcacgtaattcaaaatcatcacggtaacgcaggagatcgagctcaagaccaaacccgcagcaccgcctctgtcagatccccgcccggcagagcccccctaattctcttcccaaagttactccccgtccgcttctggagcgcctccttaatctgcgcaagatatggcgggttccaatgcaaccggaccacccagtagatcagcctcttgatatctgccttgacgccgcccggcggcacaatagccagcatagtttcgacgtcgaacttcagcggatcctttgctctggccagaatggcaaggagggctttctccagatgcccgctgaattcatccttgatcgtcttctcgagcgagatgtggtactttgcttcaaaggcttgcgaaattgcaacaagcttctgatcgcttgcgccgaggaagacggccgagacgccgagttcgtctgttccggtcttcgcgttcgtcgcgaggtgcagctcgtgcacatctttgtcgacgctcgcctggtcgaagtaggtcccgctctcgggccgcacggcgttcaggagcatgaggaagaatttctccgtcttgccggagaggtcgctcttgatatcgtcgaccagcgccttattgtaccgctggacgtagccgtacttgatagcgcggaggtccgcattcgagcggtcgatcagcacgtcatttatggccgtttcgtccgttccaattcccgacatcgcatcgcgaaggtacctgatgtcttggccaagcggtcccgcagcaagagagagcatgatggtctcgaagtcaccggacaattcgctcttcagatccttctcgaggttgcgaccgtgccgatccatgtatgtgtgccggatcagcgccatgtgcagcggatccggtttcgcgagaacattgatcagcgctgcttcgtctgtaccccaacccttcatggccttgcgcagagcgtccgcttccttgcttgcgtcaccggcgcacgttggtctgggtcataaccttagatggagggcgcggcacaggtgcagcaggcggatagccctctggtgcgctgtaggcccgacgcccggcgaggcggtcaagcngatagccctgggcggtatccagccgccgcg

SEQ ID NO: 8211 - DNA, 1158 bp, Emericella nidulans
gtatagactagacagaagtctcagaatagaatacacagctgaagtgaagggcttgtaacttacggtgtagggagatggctggctcattcggatctgggttgtggatcttatgcagtcccaacttcgatacattagagatgcttcaactagttaggataacattacgaaccttgtcagacatatatgtgacctgattctcgccgtacgttgttactttcgtgacctcgggaggcgatgactgtccatgctgaactttatcctgatctggccatgtatatagggtttcttgaaggttgccctttaggacctaaccatgacattcaaggtcagcctaagcttgttgtcttgggataacagtcaagagcaagagatttgtactaccttcattacgcaatgggcattggcatggtcatgaatagcacttccccgtccagggctccagacaagaatcaactaagaggaggctgagcgttagtcattataactcaacgaactctctgtcaatacctgcatgcacagcaacgtcatgcacagacatatcaacagtgagggcagagctgggaagataaacaactagcggtgagatgggaggtagcttaccaggttactttttccgtttccttcgtcgataaggttccgtgtgtaagatttgttggtatctcccagggcataaggaagccagtcttctgggttggaggtgtagagttccatcaagcgctgaatgtcgagagggtcgacatcgtccgagtccagccccgagctagggccgagagctctactgaggtcttggacgagctcttcgaaagcattgcggggagaattcccggcgtctgacgaggaggttgaaccagactttagatatggcatgatggctcttttagttctgttcgaataaactcgatggccaagtattgcacgagagtttgtagttaagcaagggctattggatacaagaactaagaatgggaagaatgtcaagaacgtggaatgggtgagaagagaaagataagaacagggtgtcacgtcgggaagtttctaataacaaccgcatagagatgtagaccccccaaggcccagagcaagtacgtatccgcaatgcaaggatcaaagtagtagaggacctttgaaggagcgaagtgaatgggctgttctcgccat

SEQ ID NO: 8212 - DNA, 898 bp, Emericella nidulans
aaacgctttggtagtctttgctatggccgtcagaggaaggttatactgggcagagtcctgctctctccggcttttggtttggcgaatccccgatctttgtatgggaagcgaacacaagtgaccttcaagctgcggcaatggcagtagctccaactctcagttgatatgacgtctgtatgtagtctcaatgatcagatgtcgactatgtatcttctcattgggagtccagtgtccaaaattaaaactccatggtcctgcatcccttcagaccgagatagcccgccagcactcgtggtatccttgcgtccaccgtgagcactcaagctcgactacgtattagaacacccgggttggtgaaaactgcaaatatgcgtgaagctgggttggttgatggcttccagtaggcaaagaccacccacacctccataagctcgctccggatgtcgttcctagccggtctcgagtagcgaattagtcccagctgctcggtgggcttcatatgcattgcgggctgacgataggcttgtgggaggctgaggttgacacccccactagcatcgggagagctctgcggcagcaatcgcctttcatctgtataaggctgttagcggattcaacaagtcgcaactgcgtctcgtaagatttgatgcctccaacgctcagcacctatgccaaggaaaacttgcaggttctgcattgatagcgtgtttaccacgttttgggctgaatctcaaggtgtctaggcacagttctgtttcatcaaccaccaatgatcatcgtcaacttcactaacaaggtaatcagggaacacgagttcttagtccgactaagcaaacagtcctctgacgaagcgagacgcatgagacacagcaataatgcaggattccaccctgttggg

SEQ ID NO: 8213 - DNA, 713 bp, Emericella nidulans
tctttatctggcttgtcaggttcttcaaagagccagggatttcttctcttgcgtgttctgttgttcgtttccgaagacggcagctgtaccctggagcgcgtaagctgttgaaaaacaacaaaaaaaaagatttctttccgcagcgtttaaaggccgcctctgttccagctcgggctatctgttgtcatcagtagccagttatagattattgggagtaccttgcgacgactgctgcaacaatcaaaggacggagttgccatccacccgttgcggaaccggggctgatactggttgaaggaattgggaatagcgggttcgatagcttgacaatatggaccacttcagggctccatccgcaagattagaaaaatggaaaggccattccattggcgggcggccccctgaaggactcctgcagccttccgggggatcggcaagaagctcaggaaaccaaccactgcaaccctttgggaccaaaaaccatatgggcgctccagtaacccttcgcaaaagaaatgggttaaaggctcccggaaactaatggaccctgatttaccaacgggctcggggcatcccaaaattcgggcggaccccaatttttacaacgttaaaaatttaaacttgcttcccggggaaaacacataaccatttccccgtttccccgggggccaaaaaaggaacatcgttccttggtcgccaaaacccgcaaggcc

SEQ ID NO: 8214 - DNA, 1003 bp, Emericella nidulans
gaacctcattgtatttggacatttagtggagcaggatggtggtctctataacgctcgccctggtaagtgatcaggaacgcatttatatccctcaggcataagcagctgaaacctgagtatccatcgggagcggccaacccggccggccacttggcagcctcaagcttattctgctgggcgaatcacaccaccttgttatattgaaagattcgtgccgcgttggctagggctgacagtggcctagggtagtggttcgctggttttgacgatccccacgtccgcaaaccatccagctccactggctatctctgtcaatgcgtaaggtgtggcttggaagctttaggctttaaggccaactgcatggagccaatgcgaagccatttgagtaacatgaaagccgagaactgtttatagtatgtctcggaactcgatgtctctcagattggtttcttttgcatactatcctaaaggcaagccaagcctactcgtttattctccgacgttactctgccttaccagtgctactcttcgctcacgaatcagcaacccagactgataccgttgcagcggtagtatagaccatgaaaccaaatcccaacaccatcatggctatatccccgcgttgcgcccatggagactcagccactcccttccaatgcagatactgccggtagatgtacaccagaggtacacacgcaaactattccattcagtgagacatatttgttcagatcaccagcgtccatagcctgaatacgccccaccgctaaactgccactgtccggaacctttttttttctttggtgcctggacgtgctactcgcgctgcctcgaagatcccttttatatccgccaggcggaaagtcgatggttcctattggtggcatgaaatcagacttgcttgttgcctccgtttttggaagagttaatctctctggtccactactgtgcttagttcctttccaaggtgctttcattctgtttcacttatactctctctttc

SEQ ID NO: 8215 - DNA, 901 bp, Emericella nidulans
tccggccgataatatcgactcactattggggatccaatctaagtgttattagccacaactgcagagggcccgaaccgaggtttcgggcagaaatcaactccagcttcgactcctcatcgtcttctattcctcttcatctagctacagttgcatcttgtcattctattatcatctagtgtcctcacaggacaggagcatcatgcctcccgctccacaacccgatcctggggtaaatccggtcctccgcaacgccctcgctatctccttgagcgccaaagaatacagggcccttcacgaccacgtccagttgtatccctccatacagagcaaactgctcactccagcacgattcgaagcgattactcggtcgaaaaataaatacaatgaagctgccgtgcggtcggcgctgcgcgtcttcttgggatcgggagtcgctctgaagatactcaaatttatcgccggtcgcatctcgaaggtcccagtagagtgagaacacctactctatcggtcattatggaagaacaggagaccgctaaaccttgcttgttagaacgaaggaccgcacttcactactccgctctgcgatcttgcgcatatctacagcgctgtcgctcatggtattgctgcaccgactccttcatcgcttcttcgtccgattacgcgcgaacctacgcaccgatgaagccgcacctttccgtgagcgcaacccgcgggtctcgaaagcactaacatcgcgatgtgcgcccgctgtcggagccagtttggcgggccttgctctgggaatctgcacaagcgaccagctgcggatgacgctcgcaatctacacagctacacgggggttggaggcggtctacaatgtgatggacgagaaaggatggctgaagaacaaaccgcggtggtt

SEQ ID NO: 8216 - DNA, 1770 bp, Emericella nidulans
ggcaaccgtgacctttccctttcgggcacggcgaacggcccgtacagccgccacggtcgtttacctggggctctgtttgtgcgccaggaacaaaatagtctcgatctggttggaccaggaactcgtcttgccatgcactctgcttcaacgctcagcggttccaatggttttcactgccgccgcctgatccagcccgggcgctccgccgtcttcgaatacggacacgcacctcaacgctcgcggagggctccttgaccgacgtggaaaccaactgcagcggtgaggatttaaaacatttacataactcgaattccatggctcggtatctctcttggtgcacatatctggtgccatttccaccgttgttcttcgtcctcacgaccagcctcgagtttccgtccccctctcataacacataccatgggctctgtagactccccgttcttccttcggatttccatttggggattcgcaactgcaaggtaagctttctgacgtcataaatcccgttgattggcttacgtgagatcttatttccgacacagttatcagattgaaggcgcggtcgatgaaaatggccacgggccttccatctgggacactttctgcaagaaaccaggaaaaattgctggcggagccaatggcgacgtggcgtgcgactcttaccatcgtacccacgaagatatcgatctgttgaagcagtgtcaagctaaggcctatcgcttctctatctcttggtcagtttacttttcgatatgacatcagatattgggatgctgatcttatccggttcgtgtctaggtcccgcgtcattccacttggaggccgaaatgaccctattaacgagaaaggcctgcagttctacgtcaaattcgtggacgacctgctagctgctgggattacaccgcttgtgacattgttccattgggatctcccggaagagctggacaaacgctatggtggtttgctaaacaaggaggagtttgtcgccgactatgccaactatgcccgtatcattttcaatgcactgagcccgaaggtgaaatactggattactttcaacgagccatggtgcagcagtgtcctcggctataatgtcggccaattcgcccctggcaggaccagtgatcgaagcaagaaccccgaaggtgatggctccacagagccctggattgtaggtcacaacatccttgttgcccacggcaccgccgtaaagatctaccgcgaagaattcaaggctcgtgacggtggtgagattggtataactctcaatggagcgtcttacgcctcttttccataataatagcctcaagttaacggagaataggcgactgggctgaaccctgggaccctgaaaaccccgcggacgtcgaaaccgttccccgcaagatcgaattcgctatcttctggatcgccgaccctatttactttgggcgctacccagaaagcatgattaagcaacttggcaaccgcattccggatggacccccgaagaagtccgttggtcagggtagaaccactttaccgatgaccaatactggccaacttattgcgcaaaacaagagccgccccaaaccgtgaagtacttgagtcttgtcgacaagctggcatgtcgcccaaccaatgcctgtttacatccgcagttcccagctttaaggtaagacgttaacccctaatactcccaaccgacagttatgagaccatgcctggcgttttagcaatccgaaactgggttttagttgtgggccctccataagtgttatgttgctt

SEQ ID NO: 8217 - DNA, 1545 bp, Emericella nidulans
aaaaaaaatgagttttttcgtctcccccccccaaggaggccgaggttgaacctcccaaaaataaaaacccgaaaaataaaacgggtgggaaattatgaggggggtggaagagttgttccacaaccaaaaattgtgccccgggtggccatggttaaaaccccaaggggccttagggtagattattcattgggccccaggaaacaaagtgaaggcccggtctgaaatcatcagcccggcacctacggggaatcgaccaaaaataattattcacaacaaaggccgtatttattcctatcggccggaaatattcaccagaatttgcgaaagcatcaaaaggcattttcatttctggccgacatgttcccctcttctgaagaaaagatcattcaatcgcatgcccttcaaacagtgctgtacttctctttctcccctggctagcctcaaaccacctcctcactccttgctctcacctcaaaagaacgaatcaagctccaattttaacacactcatttttttcttcccttaaatccaacttctgcacgtccgttcaaccctttaattctccctttctcgctctggaaaccgtctgtcttcttcaacccctcttgcatgccctttatccaatgatccgttggcgctttgcataagatcttggaagtgaaccgggtgtgtttattgttgcactgcttctctcctgttaattgaccaccatgtcaaacccgtgagtattcttgcagattgatatcccccttctcacctggttgatactttctaactcattgccttccaacaacagctttggttcagcatggcgctccttttggcacacgatgacctcctacgaccggcacgcgtcccacgactctccatatcgaacaggtaaacatgtacctctcagtcaaagccggcatgagcctctcacatccatcgcgacaagcgcgatcgagtcccgaccggacctcaccagcccttacgaggacgagcaagcgaatggaatcagttctccaagtcgcccttattcccctgggatgcgatcaatgtcctctcaagcccgtcggtcagcagaccacggcgcggaaggggttccggagattcaaatgcaaagcttccacgatggggcgccacctccccctcctgtgtcccattcttggagaaaaatagaacgatggctagagcacaattacgaagagctctacgataacctctgtgaagggtgcactcagaatgatatcaacgagctagaacatgaactagattgcagcctaccattagaggttcgggaatctctgatgagtcatgatggtcaagaacgaccgggtctacctactggtattatctttggctgcatgcttctcgactgcgaggaaattgtcaagagtggaagaactggaggacggggaacgaggagtttcttgctttcccatcgacaggcaatactccccttccgagggccagggccagttcatagttcgcttccccaccacctcaggcgtataacccgtatgtggagacaagaattgttcgaacgacaagattttcagcttc

SEQ ID NO: 8218 - DNA, 645 bp, Emericella nidulans
ccaatccgctaaacgcccacgcccgcgtttctgacacgaccgccttcccgctccccaacgagggccatgtcgttgcccacgatcccagcatcgtccgccaccacgagcacttttatctcttcaagggcgggattcatattcccgtattccgtgcttcgaatctgtcagggccatgggaacgactcggcacagtgctgaacgggcccagcctggtccagaaacagaaccagcggcggccatgggcgcccatggtaacgcagtggaagaaccggttttactgcttctactcgatcagccagaatgggaagcgcaatagcgccatcggagtcgcatcgagcgattccgtagaaccgggcggctggaccgatcacgggccgctgattaatacgggacatgggccggggtcgggggtatacccgttcaatgtatcgaatgcgatcgatccggcgttcttcgccgatcccatcacgggacagccatatctgcagtatgggagctattggaaggggattttccaggtgccgctagcggaggacttgctgtcggttgagaatgccacgcatccgaacacggaccatcttgtttttctgccgaagaagaagccgaagccgaacgagggggtttttatgagctaccgggctccgt

SEQ ID NO: 8219 - DNA, 188 bp, Emericella nidulans
  unsure (1)..(188): unsure at all n locations
acaaatgtaaaccccgtggtaattagccngtttccctggagagtgctgcgtcgaccgtccttataacctcttggcaagattgctagccggtatttagtgagntaccggtgtctagagcttttgtaaacgcttggttcatagttgtacggttccgtgtcggactcgtgtttgggcctgaacggtgggat

SEQ ID NO: 8220 - DNA, 1076 bp, Emericella nidulans
tgaccttgttgtaagtaaactcgacagatgcctggttaacaggttacaggcccatggcccatctcgatctttgggatggtatgtggaccagcacagttagccgcaaataggagcgccttggtagtgattgccgacaagaatccatgatgatctcagataaattcgcctggaatcggatacctgtgacatcagttcctagattcatggctgtactctgtagctaagcattaataacagtgtcctccagggctgtgggatcctgatcctttcgacggcggctggtgtgactgtttttcgatattcttcgttacacatgcctcatggcttttgtctcccgctctgtgcgtgttatgatcgctaatatatacgttccctaagtcaggactcgacgagccttccaggctcgtcttacagcgcgctctcaccaccatgtgttcgcatttgattacattggacctccgaccttccgctcaccattcgttcccgccagaagcgcggcaagctccgattttcaagatccaagttacagctgtcacaaaccgatccttccgccaaccaatgcgccccgtttaggcacccttgggcctccccgtggtacaaaaaatgacacgtgacgtcaactcaaaacacatgatggctgtgcaacatctcagcgacatattgcccccagggaagctgggccacgggcgaaactcgtatataccgacgccttgaagcctgcaggactcggaagtcttaccaagctggtgcctgacaggacaactcgagcccgaatgattctggcggggcagactggtccgtttgactttcccctttcgagtcttttcggcgaaatggctctgcccagcctagccaacgccaccagagttaatgaggctgggctccgacctccaggtgcccgtgctcatgcctatcacgttggagggaggatggtttatagttcacattgcgcctgactgatctgcgagtgggagacctttataccttatttttcttctcagaaggcgatagagccctcgctaatagcgcttaatagcgttttcaccaaggtgactgcgctgagaggctcagagaca

SEQ ID NO: 8221 - DNA, 636 bp, Emericella nidulans
tacaactactattgggaattgggaaattggacccgccattgtggcgaacttttcccgtacccaggagtttttgcatttcctgcctatattcatcaatgagcacctaatcaccacccgcatccgtcataccgaggacgcgaatgctaatagaacacaccaagttcgtacaaaatcccagtccttcaaatgttttgatcgatcttccggatccgtcgagcacgggaaatgtatgagatacaaatccacatactccagccccaagtctctcaacgaactttccagtccctctcggactcggtgatgccaatggttatcgagcttagtcgtcacccagatctcctcccttgggatgccggaatcgcggatcccctgtccgacctccttttcgttgccgtagttcagcgccgtgtcgatgtggcggtagccatgttgcagggcgtgtttcactgcgaggcacgtggcgttggcgctgctttgccaggttccgaggccaattggggggatggagccagtaccgtgcaagaggggaattgggcttttcatggcgttggggatacggttgatactggtgtagagttgaggagggcttacaattgttgttcgtcttagtgtctcctaggattttttatgcttgag

SEQ ID NO: 8222 - DNA, 125 bp, Emericella nidulans
  unsure (1)..(125): unsure at all n locations
acgacgattgtgtttggtgtgaggatatatccttgcttcagactcatgttttcgtgcgtaccgtcggagtggctgtgcatgttcattntcattagagcgacggctgagatccttaccgatttaaa

SEQ ID NO: 8223 - DNA, 1316 bp, Emericella nidulans
atctacgctagaggtgtgctcaataccggactctggaatagcgctttggagtgatgagtcacttgacccaccgccttttcgttaattgaccacatacgaccgaaacgaacgctccgacactcttattacggccacctctcgaaaagaacagctggagtcaacccggccagcatggccgtcgcgcgcaaaatgcggcgtacgagtccaataaccatagtactagcctcgctaatggcgatcggcttcctttgcttcctattctcctctccatccacacctccagcgtcgacctcttccacgacgacgaattcccgactcgaagacacagcaaaacaccctctctcccctcccacaaaaccctttatcccacaaccagtccacggtgacggccggcacgtccaggcgccccccgttataaaatatgacctgaacgctctcacaaccagcagcgactcaaccagccactccgagcgcatcctcatcctcactcctctcactcgcttctatcagggatactgggacaacatcgagaaactcagctacccgcatgagatcattagcctgggcttcataatcccacacacaaaatacggcgacgccgcactctcagccctcgaaaaagcaatcgcgaagacacagacaggccctgaagagaaccgtttcgcatctatcacaatccttcgccaggacttcgatccaccactgataactcagaacgagaaggagcgccataaactcgaaaaccagaaagcccgtcgtgaatctatgtcccgcgcacgcaatagcctcctcttcacaactctgggtcctgctacgtcctgggtcctctggctagactcggacatcgtcgaaaccccagaaaccctaatccaagacctcacctcgcataaccgccccgtaatcgtcccaaattgcttccagcgatactacaataccgacacgaaatcgtacgacgtccgcccctacgacttcaactcctggattgattcctctactgcccaagcgctgggtgatacgctaaagcctgatgaaatcctgctggaaggatacgcggagctcccgacgtatcgcaccctcatggcctatcaagcagatactaagaatccgcgcccgaagcgtgtcattgatctcgatggtgtgggcggcacggcgcttatggttaaggcggaagtgcatcgtgatggcgcaatgtttcctgcgttcccgttttatcatctagttgagacagaggggtttgcgaacatggccaatcggctggggtatagtgtgcaaaagaaccggattattttgaacgtttcctttccgtcgcctttcct

SEQ ID NO: 8224 - DNA, 1225 bp, Emericella nidulans
ccaggacaagggcacgatacatcaacttctgattccccctcctcctcgtcagactcacaccagttcctctcatccagtggtacctcgccagagcccagtgtgcaatctccggacaatcaggccaaggaatcccacgaggggcacacttgtaccatcgacggagaaaagtctttctgtgcgcaattgggcatggcatgcggtaacatcaacaatcctattccagctgtgaggcaacggagtgagagtgctacaaacacacccaatgcaccatctagtacagataatgttcctgggatcgacttcatggctcagcagaatggcggccagttcgacccgctgctatttggagactggcgagaaccgcaagatgccgttctgtcgcaggattttaacacgttctttgacgacgcgttcccgttgcccgatcttggtagtccgtcacataatcttacagaagttggccttggcgcgcaacagaagaagagcatacttgaggaaatggataacaaggaggaggaagaggttgtgcccggtgaggacaaggctcaaatgttatcttgcactaagatatggtacggtctacagttacagtttgctaccatgtatatactaacttgtttctctagggaccgtttgcaatctatggagaagttccgcaacggtgaaatcgacgttgacaatctgtgttcagaactgcgcacgaaggctcggtgttcggaaggtggtgtcgtcgttaaccagagggatgtggatgacatcattggccgcgtgtagtcgattgttcaattcgattcgcttgaccaacaactatggaatatctacttctcacacgctacggatacccacgatatgatacctcgacgaatacttggagtaaaggatacgagcgggtttatagctatgtcgtttttacttgggacacacaacaattgcagcttgagccggtgctgaataatgaattacggatgttttctttctctattgttaccctttcttgattttaggcgaatgggcggtggattgacgcgcaataaactggaggtctgtacaccatcgaagcttgacttatttggtttatgccatgttgcaggtggaacatattgtccgtcacctttggacttccttcggcgaacacgtacatgtgagtactggaaaaccgaacaacagaaaacaggcgctcgcgttcgttcacaccgcaactattgcggggagttacaagaatcgg

SEQ ID NO: 8225 - DNA, 136 bp, Emericella nidulans
  unsure (1)..(136): unsure at all n locations
tgtancacacaaaccagaacatcattgcaagtacgcacggaganatatggggcaaagaaaccgcagaggatagcggntggaaacgcaattggtcaagctacatggactatcgtaggtgcgagagcgatcacttccc

SEQ ID NO: 8226 - DNA, 1256 bp, Emericella nidulans
gcggtccctctcccgagacagctcttcagcctcgccggggtcctccatgtcctggtcgtccttctcgccttctaactgttcagccagctcgatgtcccgcgcccagattttgcgctcagtgcgtgtgcgaaaacactccatcagaagatcttcctttggcttgaagatgatgtcaagaatctcgttgaacccttgctgggttacttggtacaagatctctttgcccacatccctctcaacctccggcacttcgaaccctccccatctctctccgactagaatgctccgtgacgatgttgatggattggatcttacgtcttcgtagtcgtcgacgtcggtcaggtcgtcctggaagcgtacctttgaagatgaccgggaacgtggagaaggtggctgtgactcgtactctggctctgctccatcttcttctttcgcctcatccccatccgaatctgtctggtaaccatcaggagcagtaccgccggcctcttcatcagtataaaatgctcttcggcgccaccgctcatctatgccctgtctccgagcagagtcgacccgtcgttgatcgctatcacacatccgattatacacggcagttccaatccgagccctgtcatccgggtcggtaacatcctggaggggcacataagatcccagcgcggcgactatatccgtcgatgtaatgtgttcaggaggcggccaacggtcactttcagcggatgaactgtccgtctcattgtcattgtcatcttcgtgttcgttttcatccctggcacttcctctcctgcggctgccagacgcttccgccgtgtttgatgcagagggacctacacgcacagtgacaggaataagaggttgcgagcgcccaaactggtgtcgaacggcagcttcaccaacaactgagtggcggtctcctgtatcagcgccgtcagggcggagtacgccctcattgtccacaatctccatatccccatcctggttgacgcgtttaccctctcctgtccttgaggattctccagaagggatgcttccagggaaggcagaactgatgggttgacttccaagcaccacatcgcgtgcgccaccttccaaaaaatcgtcctccataccggcaaccatatctcgggtgagctctcggctgagggtatagtaagcccggaacacgcgtagaaaatccttgcgttccacgtagccatccccatcaatatcgtatccacgaaagacacgacgcagtctctcatcgttgctcttgttgt

SEQ ID NO: 8227 - DNA, 1887 bp, Emericella nidulans
gcattgcactcacaacacctaccgtgagaagccaggctgatctaggccaactctttatcggctgcatggctaacgtcagcatattcacatactgaattgatacacctttctgtcattcgtcctgaatgacatcatcgatgtcaatggccgcatttccacgaatgacaacgatgaagcggccaggagtcagggattctctcgtcattcgtgatgctcgatatgttatctcacatggagctgcatcttcattatgttcctgatgtttcagtgccgagcatgaagactatggaggtgagcttagtgtcttcgtccgggggcaacttggatttgtctgcgttaggtgaaactgggaattttacgattgagagtccttaaacgaggcacaaccttttcaacctcaaataagagggctcgctgcttcttctggctttgctaacagtgtcaacatgcaatcactgaaaaacgccatattgaaactcatagtctgcactaaagccggcagcaaagtggactctccacggtcttttcgactctccatgaggcattgagtcgggatattcatgatgtaatcatcgaattcgtgatctctcccgtttcactttgaatctattctgaagatctctaaccttgcaattgcaaccaatgcattgtatattccctctgctcacaacggttgacaacttgaatatcacctcgagatggaggcactggtgatggctctgaagacagaatgtcaattgcaagatttatagagtcgagaaaggaaatgagcatgggatggggtaaatgtttcaaccgatggtgggcgtgaaggtgttcgccgtattcgaagaaccgcccaaacttgtagcaatatatagcatataatctattccagtgacacatttaatgcacgcttacggagcatcgaagtataatcacgctcaacaaaagatcttccggcctcatccttgtctcaagcaccagttgttcttgagggaatcctataattcttgaggaaattgagcaacaatgtagcataggtgacgcgctgcccatccaagatactaagttcgtgccagtttcagtccggtctatttgaacattattactggtataatcattgatagttggcaagactctctttagtaaatgagcaccagcgatgagttagaaagtagatgattgactgggctgctctttagggcaccattgttatgtgttatcgctatgtcattcactatccagctttttcaatatgttcattctctttataaacaaaatttcattctaaggtgaattcttgggtccctctgttatcatccccatctcctactttaccccattgagctacaacttctccttcagcattccgtctctttctccataccaacacccaaacgaccgcgaacactaacaatgtcccaaccaatcgataactcataccgtggccataaaatatataacaaacactccaaacccccctacaaccacgaatatcatatgggccacggcgccctcggctctgtggacgcagtaacggacagcacaaccgcaaaactcgtcttatacgctctgaaaactatctctcttactcacagcccaaagtgtcgagattccgactgccagagcctccaaactgaactctccaaactcgcgagtttcgagcatgaacatattgtgagacttatcgcaacgtacgtcaatgaagatgcatacagtccgactttcggtatcgtcaccacaccactagccgaatgtgatctcgaggattactttgggctgttttggaatgagaggggaaagaaataccatgaggagtcggctgggtggtttgaatgtctgatcagcgggttggagtcctgcataacgccgatgttgtgcatggccggatcaattcgagaaata

SEQ ID NO: 8228 - DNA, 802 bp, Emericella nidulans
ggacggagctctgactattccggctttcacgctcattgccaaccgcgttaagctcggaggttcgttgattggctctcctgacaccatccgtgagatgctggagcttgccgcggagaagggtgtcaagccctgggtggaggagcggcccatgaaggatgcgaaccaggccatcaaggatatggatgctggtgatgcccggtaccgctatgttctggtcaatgaccactaagtgccgttaaacctgatgatgtgatgacgataaacggtgtatatagatagattggtgtttatttagactaatatagatttcttaatatctttcgaaatcttgatcttgtgttctgtagctcctatagttcatccttgctggaagatttcccgatttcttactgacaaaacgtcggaaaatactagtaatggcaatgacgggccgttgaagtgactaagtctggtttagccacctagctgagcagaaggcccgcgattctcgccggacacgaattagactggctagtcctgcgcaacggagatgttgatcgcccagaatacggcatattaggaataccctgagtataaacttaaaattggatggggacgcacggccgacaaactaaatatagtggcaggcgcataggacatacaaccgcaagttcgttggcgaggatgacatttcccatgaggcaatagtatgatagtctaagctctgtaaagtgcaggagagggctgaatgtacaaacaagctggcgtcactccccgaaaccattatataacattcttttactggtttgtgtccctgattcgt

SEQ ID NO: 8229 - DNA, 502 bp, Emericella nidulans
gaagcaaggtggtggcctaatggcttatcgttcgatacttctgagcgacgtatgtgcctgtcggtgagaaacaggaagaagtatgtgttggtatgcaggaagaattcgtgagtagggtccaggttgcaaacgcgggtcgagggagtagcgaaaggagatgaggtgaaggttgcggtgaagaagctaggaaggaggactggtttttcttttcttcttcatccgacacgtcgaagagctgcagctcaggaagcaggaacgcaggaaaggttgggagggagaaagattgttgaatgggaagagattgaagacgatgccttgcataaagacgtgaagctacttacgcgacgtgaccgccgatcgagccgcgtatgggcccgcaacaaactcggcaaacacggttcgaaacgcgtggcacgtgatgtgcagctctgcgacgcggcacgtgacgcgactccaacgactgcgaaagtcactcaggcaatcatgttaactgtacatagga

SEQ ID NO: 8230 - DNA, 1045 bp, Emericella nidulans
gccagactcgcccttttaaacccgcaagcatagacatgcacagtatactcatgctcttagccccgcagaatatcgccatagcctccccccatcgcgcaagcgttgcacggatcgaacccagcattcatatccattgtacaaagatatcttatcaattcgcaatcaaccccgcacgaagcgcaaccggaggattttaatgacaggcttctatttgttcgcttttgtccattctacggggctttggaactttggaggctagtgttagacgaagttggagaagtatttcaccatgtagggctctattgcgtgacaattgaccttgaaagcatgcatgaaatattgagcttgatgagactgactcggctgacatccaagcgctctttcaaacaatgaatcatcttagcgtgctattgcgattgagctactgctggcttcactcagttttactcggctcgacagctgtaaccaccgggctggactccggatcgcgggatctgaccgaatcgctcgcatatgtggcatctctgaccttttcacgtttgctgagtggggttagcttgcgcttgtgaacggaaacgatcggagaatacgtactcctggcgtgcaatgaagtacttgatgaaatgagccaaggcgatgagacatatcgcgttcgcaagaacaaaagaatatcctttcgtaaagcggggtccttcaaccgtcttgaacactagcagcggggtccaggctgtcgtcgactgtgcaacagtgttgagaatgaccagtgttattgagcgctccactggtgagtaacgtaattgctcgttcacccagccatacaacacgctggacatagacacagcagaatacgtcgtgataaaggcgaaccagagtgcagactcagggacattccagatgacaagaatgaccagtccgatgatattccaaatgtgagcgagggtgatcgcccacgcaggtcccaggacaagatcagacgcgaaacagataaagagggtatagaatatcccgagggccggggatatggcgcctagctcgttcagacggc

SEQ ID NO: 8231 - DNA, 1008 bp, Emericella nidulans
gtttctcgactcctgggtcaaggaaagtaagtggtgagtattatccaccgatcacaacttctcgggatttgaaaaagcggatgactactcacgatgggcttcttccgaatctctcggaggcatttgcgataaagagacagcacttctctctgcaatccagagagacgtgccattctattgtaacaatttgcgtttgtagaggatcgatgttattgtgacatttgttggtgggaaaatttccaggaagtcgatgccgcgggaaatacgtagagctgacgctccccgaacccggctctgccgatccgaagcctggagtttgctttttatctttaccggccgagtatctggggtcgagagcttcgcatttaagttgacggggcccctgcttctccccacgtcgtccgagaatcaaccaaaccgttactttaatttgtcgaatcaggggtcaatcacccaacttataccatacatatcacaaggtcgttggcaactgtgctatttataacatgcctgctttctcggtacgccattctacgagtgatataagatgcatacaatgcatacgagctgccactttacggtggctcgtgcgccgtaaagatttggccgctgtatattctggctaacttttatatcgtacagcgtctcattcgcttccttgccaaggacggccacgtctattatggggatgccactctccctgctggcgtcactgacatcgccaaaacgaccaaggcaaaagtcattaaaggtgacatctttgggcagtattgtgtcaccgaccaagttgccgaagtgaagctgcttttatcccctttagcaagaaaagatattaagactgtgcgctgcctcggcctgaactatgagcaacacgcaaaggaatcaaaccttccaatccctaaataccctgtcctattttacaagcctgttactgccattgcaggtccaaccgatgatatccctgtgtctcttatggcccaagaagggcaaggcctggattatgaatgt

SEQ ID NO: 8232 - DNA, 1382 bp, Emericella nidulans
actttcctattacaagctggacctgggcgtgttggtggcagacggagggccaattctatatcatctggtttaaactttccctccttaccgtagcctatcacggccactacaacaccattccattataccatggttcggcagattgttcgaacagaatcaccttcgcccacttgtatcagtcccctttcccttgctggtatcaaatttcgtcgagtcctacacagacgcttcgattcttgtttacgatactagaaccggcgaggagattgtgggcatggccagtctcgagacgtatgatggcacccggtcaacaggcgttaactcacttgttgcaaccactgttggttttgacgggtcaccgggtcttgatcctagccgaacgctggctgatgaagaagcttgttcacggggccactggttcaagctggtgtggagggcgttgtcatcagtggctactaagacagatatattcgcttctttgacgccaatagcggtacgtctacctttttatttttcttgaagtgattaggctaataactaattatgtgcaggacaatgtacctacaccatgctagcacatccttctgccattgcttccctttctctttctccagatggccgcgagctagtgtctgcagggcacgacgccagcctgcggttttggaaccttgaaaagcgaagctgcacgcaagaaattacaagtcatcgactgatgcgtggtgaaggggtctgctctgtcgtctggagtcgcgatggccggtgggtcgttggcggcggcggcgatggagtagtcaaggtgttctcgagataacgcagtggatgtggcctgatgtatgattttgttcttaacatgtcctgctgactgatatttttctcgcaccatgttcttttggactcatgaaatgattgagcgattggccaaattcccgagcatttgtaacggtgtcaagttacctactacttacctggcatatgttcctttctattcctcctgtgcttatacattctatactcgtcttcttctccttttcttaactctcttttctcttttgtgctactcgttgacgatgttcgttcctatcgacaacgaccggagccacgtataccaaggtgttctgttactattatccctgttcgtacaagagttgctagcctatgcgatgtatgaccagggcatgcatgttactgtcttaacttcttgacgcccgctttctcctctgggaatatatctgctttctacgccgaccaggtatgacactcgatgttagatgtggagataaacatcacggactcccgttcccattcctgggctgagaattatcgataagataatcaggtagcactactaccaacaatgacattcaccgactggcagtgcccgc

SEQ ID NO: 8233 - DNA, 650 bp, Emericella nidulans
ctgcgaccaggcttggcaaacaaatcgcttgtagaagtaatcttagcaatttgatgctgccgttaggtataaccgatgggttctaaaaagaagctccattatcctgtcgcagacctcctcgtgagcatccaacttgtactgagacagatgcagccccttgcttagcaagatctctaaataccttgagcgagaccagagtctagtaggctatttcatagtttggaccgtccagtataaacatataaactaaaaatatcgcatatcacgagagttgaatgttcactacaactgatctgattgacgtctaaaccaagcgcgaccttacgagaacgaccaacatgcctttcgctgacctcaagcccatcacggccaatgataaacctcgatccccatgtattgggcagttcttaagataagttgtaagtaatgccgggattggacgtaatggtttctctatggaggttttgtacggttgagaagaggaccccgtggtgctgctatgttaggtcatatccaggggcgggattcttgaaaacgttcaataggtaaggtcgccctatagccatcaccttgctggcatggcttctgttcaggtatttggtctctgagacgggcggaagagaagatcgttcactaggagatgttgaagg

SEQ ID NO: 8234 - DNA, 128 bp, Emericella nidulans
tatgtcaggcctgttcgaatgatgaactagagggggccccttgccgtatagatccccgaggacgtctaccagcgcgtgcatctgaagcgcttgcatgccggcgcgctatcctatcgtacatgcagcct

SEQ ID NO: 8235 - DNA, 150 bp, Emericella nidulans
  unsure (1)..(150): unsure at all n locations
tatcgccccagcgtgaaggctcgaggttgtgcatggacagcagaccgtgagcgcaagaggggtacangagatnctgngcctatataaggccgtagccgacctgcgtgcattccancnttcgctatggggagcggaggacgncacaaagga

SEQ ID NO: 8236 - DNA, 703 bp, Emericella nidulans
gcgccaggaacctcggagccgccagagatggcaccggtggtagagcccgggggcagaggctgttggatgaagttgacgactgcgcaatgtcagcaaatagcaaagggcagtctttccggtcggctttgcgtacaaacagcggtggttccatagtaggagaaacgctcgcacagctcgacgaaagccacagagaaagtgatccagttcatcggcccagcaacgcggcggacggtttgcatctcctcctgcgtagggtggagcttgttcagatcctggtcctcctcgctgccggttggatattccttggtcgcggggatttcctcgatactggactccctggcgatggcatccttctccaacttgatatctttacccaagggcagctgagcgagatgagcattctgctgagcggcgacggcgtcgatctcaacggaatcggctgggttcatggcgacaatctattctgggagcttgggtgacgagattgcatagaagacgtcccacgaagagaggaggagagaaagatcgaggttggcggggacgcaatgcagcttttaaggtaggagccggggctggagtatgtactagtgtgccacagcgagaattctaacacaaccgtctcgggacgaatcacaaccagaggaatctggttatcgcgtgcctgcaagcgaatcggtaggggcggccgtggcgagcggattta

SEQ ID NO: 8237 - DNA, 178 bp, Emericella nidulans
taccagcccaactaccgccaactatctatgatatcctcgccgacatatgtgaagtacatgcgccccaattatactatgacgcaaccttcggcaacacacaggccgggccccatccctcatgagccccatccagatctccaaaagcggacacagcaccgcggcacgggtctgctaaccg

SEQ ID NO: 8238 - DNA, 1246 bp, Emericella nidulans
gttcgctatgaaaattggtgcatatcgttccacgacctcgtttgctttatcttcatcgagcagcagaccaatagggttcgaaggccacataacattttcgtctggcctgagcgatatctgctgttcagcgccaaaaatcatcggcgttttcacatgcttttccgggtcaaatcatataaatctcctcgtaggggagccataagacgtgaagagtataatgtacgcttgtgatcctagctcgatggccttggaaaaggtcggcccatagttcgtcgtcccaatagaattgttaggcctcatcgacaaagagatagccgcaatgtgtcatccagtcgcggccatcactacagttttgttctcgagataagtatcccagccttttgcacttcgaacggcatcctcttcccagctcgatatgacatagacgggtgtcgatgggtcacatacaagtagtttattggccattagattcaatagagttgtcttacccgaagcaggggtcccgttgacaatgtgaaagtgtttcactcgggcaatgagttcatcgaccagcttgtttcgggaaacagcatggggtgcaacgcctgtaagaatcagcacttatcttgtcatatgtctcaacagaggcgcttaccacaggtttaactctacgtgcgggtggatgggtgaaaccaggagaagcgggagagactgctgggtaaattagctgtggagtatcaacagtgaaagcaactaacagcaaccaaggtgaagagacagaggatgcgagcatgtatcacactctccttgagttgtcgactcattcaaaagctgaaatagaggaccccgagggacatgtgcacttggtaatcccatttttgcttgccaagtacaaggtcccatagtgagaagtaaattgtgtttgttgttagtcgcagaggctggtgttagatttctgtagggtgaagaagacgaggaaggagtaaccgggtactggggtagaaatgagagattgaggacagatgagttcgccattgtgtcagtcatggatgatcttgaattgcttgtaaactgtcccatctttgagagctggaggtcctatgatcgaatgccaataacacgcacgagagcaccgattagaagtagtatcgttaaaacctttgggatatttcaaggctcgctgaaccagcttccttagtgtaatattttcagttagtataggtataccctttaagaataacagaacaagcacttttccaggcaaaga

SEQ ID NO: 8239 - DNA, 797 bp, Emericella nidulans
ggacctggcacgcccgcatcgttagctccttttcacgcgggctaacggcacgctcggcggatgactaggcagaggcgtagcctggcgagaacagggatgcgctgacaaaatcacacaacacactaccggagcgcatgatgtacaatgcgcgtggcgactgatgcgcatactgagcatgaatactctgttggaacgaacggccggctgcgcaatcccagaacgtgaatcacgccgtgcacctgcgaaatagacagatctcgcctagatgctactgagggcgactttcgcgcgtccgtcttgctgtggacagtaaatgtgcgctggggaggaaacatggagggtagcgagatgagccgactcacgtacgttatgtcgaaagcccactgatgcgggagatttcactcggaagaacatcccagctgagatgccggaaaacgccgggacccgccaaggctggggtgcttgcttactgcatagattccgcccctgcgaggataaccaattcggaagcacagacgaccggtaaaaccctcggcgtactaaggttcaagcctgtccccggaaggtcctctggggtaaactgacccccctgaagtaccgcttctgtcggttttcctttttaagggggggtcccatcccccgccgggtctttaaacaggcttttttggttcagctgttttccccatcccctttcacccacctgtttattcctactttggttttgcccggatgcccctttgcctgccctcccttaccttacttacgttttggctttccttcctaagtccctcgtccct

SEQ ID NO: 8240 - DNA, 1191 bp, Emericella nidulans
ctgcaaccatcacatccccagggcccgctaggagtctagaatcatcctctgttctgtttacagctcggctgaccagccgagcgttagagatggcagagatccaacaatcttgacgtttagaaatagtaaaccggctgcaaaagagcttatcatttgatgaatgcgctggagtgcgcacctaggactccatcgattacctatccaagtaagcaatgctgaagaatacgaagtagacttgagaaagcacagaagtacagaagtactatctacattccacaaggatccccaagacttcaatgtctttacgtggttatcaattcttgtgcgacgccacaatatatcaaacatagcgagtgcgctgctgtcctggtaagggaatcatcgtagtctcttccgggcaactgagtattttttttttccaggttagtatgttactatcgtcactcgtctgtagtcaatcatatgtagcaaaactatctggaatcaaccatatcagttgtcattggcttggaaatcggtaggctgtatgtgcagaagtatattctaccaaacatacactctgtagcgacttgtaatgcctacgacggagagcacccaatgcccctctgtatccctaatttatcattcacactgcaaagaccgtatttctaagagtcggggtacttttgaattaagccttccagcccacctacaggaccatcactttctccttccggcatgggggtgttcgtcaacggagtgtttggcaagagccccagtacctttagaaccctgtgaatgtttgctacatcctctctctgactacataccactcgctctcggctccgttccaaactaagtaattagatacgaggcgggcacaggccagagattcggttttggtcgattagtcaactaaaattatatccttcctggggagtagcgatgttgtagtgcactcagaatcgggttgcgtacacactacgtctccaaaaaacttcttactcacagaaatgacattgcccatgcttgctttgcgccaagctggcacaagcctaaagaaccttcagggctcgggccccggtctcggaaccgggggctcagcccaatacatttagggcgcccatctcccagagccatatttatttatctaatttacggagtactctgtaccatgtacatacattccgtaagcctcaaagacttagtgtt

SEQ ID NO: 8241 - DNA, 1156 bp, Emericella nidulans
ataggtcagctttactaggtttttctggtttgatccattgcaacggcgttccattactctgtacaattaatttcatttgcgggggtaaggcgactttcacctgctgaccgctgtgttgtgtcgagattgcacggcatttaccaggcgatcgggtagaaagttcctgcgtgagagttcctgaatatctagtttgatcaaaacgagattagcatcgtcaccaccgtggatgggctctggaataccttggctgttgatggatgaagagagtgggtggtgaggaagccgaggaacaggcggactgaaaatgtgcggcaccgagaatgttaccaaaccatatataatatcagaaagtaaaattcattgggaatcataacacctaaatcattcaaatatctaaaactaagccaccgcattcaccttcacttcttcccgctcaacatgctctatgtccagcttcttgagctcatccacgggcgcagcaacctcgctaggataaaactcaatcttaccgccagcctggataacgtttgtgcggtcgagcgtgttcctgccacgcgtatacgggtcgatcttccagtagttgagacgcagctgttcgatgagatcatcgcgcctgctctgaatattctttatttcttctttgttatgctctccaccggccttgatccattgcgaggtttcgcggagcagatcctcgccgatcttggcgcgctccgcctgcagagcgtctctggcagctgtgtcctccatcaaggcgttttcaccctcgacgggctcggcgtattcatatgtccagtcttcgttcccgcctagctctttgggtatcttgtccatgtcgatgaatttggcgagatcttttgcgccgttcgtgaagtgcacctttgagacaatgaccgggtccatccagcccttgatgatcttccagatgcctgctagagtcagagatgtaatggcacggactgtggacgcggagcttacctgagaaaatccagggcgcgttgtggatgagcagattcccgaggcactcggggtagttgtcttggaaacactcgatgatgaatttgacagcccggtccccctgataccattagcttgtacggaaaacagatgtagcgaaagaacgtaccatgctagatagggagaacgcggtcgcatt

SEQ ID NO: 8242 - DNA, 903 bp, Emericella nidulans
  unsure (1)..(903): unsure at all n locations
atagtaagtggacgggtaactctcccagaccaaaatagcggctatagcacatcccaagagatcctaattggcggaaagcagtccaattgttttgccatattttgcttttccgcaaacatttgctttgaacagttatttgcaggttgtagggtacagtgtctaccccaccagcccattcacgagatctcgctactagtgacctctagttagaggaggtgcggaaccaaacaatctttccttctccaaagacgatatactgctgtgcaaagataggccttggaatcggtttcaaagctagtaacccgacctggaaagccgacgcgctcaatctggtcccagcaacggcacaaaaagaacaaaacagaaaccctaacgtcaagctgggaacaggcaatactcaaagaccctcacatgttcagcacaagggatatcgtcttctccagcgtcgttccggcatttgcgaggaacacgagctgactgcaaggaacaggaaaaagcaggagtataccgggtgtggttgcatagggtgcatgagcattcatcacgccctcaacttcgctctaaagaggcgctactcctccgggggaatccgacactggacgatgttaacgagacgcgatggagaaggcagcgtgcgagaggcctttcttgccggctgattgctggcaagtttcagccacgcagcacgtttgtggctgattataagggcattggatcccacccttagacgtctaattcgccgtcgtaagcttgtatcaataaacttgatgataatgttgttgcgattgcnttgtgtaacctaccatctggcccaacattcttcttgatgcctgtgagggtcgagattgaactcatgtagcttgcaacactcatgataagcggttggtctccgtattccatgcg

SEQ ID NO: 8243 - DNA, 784 bp, Emericella nidulans
taggggcgtttctctgctggctgactgggcgggtcttgacttcgcccattgcagacatccatgtctagtcccatgtcaattactgtgccccgtacgcaggtccgctcactccttaacttatcaagagagcaggacagtctggcagcacaataagtttcagatgcatttcaaacctgacaggatgagaattttccctaataactagcctggaggagcgctcgcctcgcggcctgagcttattagcgctctggaggagctcgccgttactacgagcaggtcagcgtgctctaacggcggtgcccagtgagactccgccattcctcctctgcccactcaaagctcatctcggccgcgcggaatcccagcaagatttcaatgcggacaactacccttgcgtaacgaatgtacccttgcagtgagccacacaacaccatgacagggagggccacatcagaacagaatgccgcaacagacatgtgtcagtggagcgaaattgcccagtgatttggcaggttgaggtttgccagatgaatggaggaccttggcggagcgcgcagttagggctcctctcagaaatgctgcgcggcaagcctcggatagaagcgtcagggctggagctacggaccctttcacgttgcattggcatcttacgacgaagagacggcctcccgcctcgctctccaaaagagttgatctgatgtttgctcatgggtgcgtattacaggtggtttaaggtatggatgacgcgtctgatgacattgagagatagatacctacaattgat

SEQ ID NO: 8244 - DNA, 931 bp, Emericella nidulans
ttacttttatcctggggggcttccatgaagcggcggtatctgttcttaataatagcgtgcctagtacgcagagggatgttctaatctgaagctggagtgggtacatgaacatcataaagacgcggttgtggtgaaagcctgtttatatgtgaatatattaggtggttagcatgctgtttttactgatgagtcctaaaatttgagggatattagagaatgtaggaaacgcgcttgcctacgagatctgtgcttagcttactggtccccgcagacttgtattgtgctggtggtttcagtttgggaggcttggttggaatgggtggaatgttcggtttgctactgttgttgcggtattctttttattgttgtttcttgtgttttttacaatattgttatactttagcgtttgctttcctttctgttgttggaacttttttttggttcattcatgtgtgtagatattttggatgtttatagtttctgttttttttgttatgacttttattctgtctttcttgtcattattgtattttgattttggtgtattattgtatctcttcctcttttcttaattactctattttccctgtttgttttttttttcttactatatttgtttatttattttgttacttattttttcctctgtctattttatatcttttatctaatttttttattttttctattctcttctttatcatattctttttgctttgtttttctcgtgtttgtaattttttatatttgttctttctttattatttctataattttcaagtatttattattattttattatttctcatctattttaatatttttttgtttgattttttatttttatatttttataagtgtagatattttttttttattattatgttttttttttttttatttttatgttctttcctcacacactctttat

SEQ ID NO: 8245 - DNA, 1798 bp, Emericella nidulans
  unsure (1)..(1798): unsure at all n locations
tcgctcaccaatccagactcactgcattacgtcctcccgatgttcaacaagcccatcctctttctcagcagacacatcttcagcagaacctcgactgaattcattcgtttggaccacctcctcttctttgattctgtaccgttctggcctcctgatcacggaaaactaaaagtggcgggcttgtacggtagtactcgtccatatcttcaagcgtccgtcctgcggtctctggatagaaaaggtaaatggtgggtaccattgccgcgttgagaacaatccatataatataaaagcgccagccgagattctgatttccgatgggcgtgagtccccaaccatgaaattcaatttccgattggttgcggcgccaatcgcagcgccattcgttcgcattgagggagnttgatctcggtaggatatactgcaagggtcgatgttagcccgtggtctcagacggagggcatggaaagtgaaatggttgccacaccaggggatgccttgcatggcgatgccgaagaaaacgtagtacagggaaaagaatgctacagaggccgacgcgacttgctgggcgttcggataaccaggcatctcgttacgccggattaaggcggcgatgacaatatagcagaggcactgtccggttgcgccaaaagtcatcgttttacgccggccccatcgctcaactagtctgattccgaggaaagaccaaagaaggtattgtacgctgttgcaggcggccagaagtcgcgccaggttagggcttaatccaactgacattgtcaggactgtcggcatgtaataagaggtaacatttatgcctccagaatgtgtagtttaacctcgctattagggaaagctgcgtgaacgacttgcgaattgttgcatagactgcagccccattcccagaatcagccggcggattgtcttcgtgccggatttgttggagcctttgcctcgcagaaaatcaccccagctcatcccgttagtgcgttcgtattcgtctgtatactttactgcttgtgatgagagagaacgaaagcgtcagtcatgggctttccctcaatgtcagacaagatctttagagcctctttatctcgtttattcatgatgagccatctagaccacggaggtcagcgtcaaatctgcaaacagaagagggcaaagttcttggtttgtaccttggcgattctggaagccatggaatgaccaaatagatcatgatgatgatgaaaacgagctggaaggctagtggaaagcgccaggcagannggccgttagcaaaagcgagaccgtagatgatccagctagacattgaaaagccgacgagtagcgnggcgttctgtagaatgacaagctttcccttcaacctggctggggcggtctcagattgcagacagtacagtggagaagtgaactatttccaagcctgagacaatccgcccactttatgtgaggacgcttgcgatgtaactgaattttccccattgcataaaccaatccaggtagtgatttttgggccagtttctccgggttgagcccctggacccagaacatcccctttaaggcccccccccgggcctcctcttaaggctttttctgtcccaaatgtctgggaccccccttaactccgggtattacgcccctcaatttttgttctcttaaacctcacgcgtgtgcctccccatcccttcttgggtttgtaagcttaaatttttccttcantaatcagttttttttttcttcattctaattcttttcacctcatatctatcatttaatcccttactctctttcttcc

SEQ ID NO: 8246 - DNA, 1132 bp, Emericella nidulans
ggcgtgttatcagaaattgccgtgcttgcaaaagaactttcatttaactgagaaggacacgaagccttcccgcgactcgtcagctgcttcaattatggacacctcagaagacacgcgccaggataagagctccattgtgcgcccagccggtcaccttgggacaaatccggatgatgaggagagccaagatgacgatgatcgtgacagcgaagacgaggatgcgaatgattctgaagagaatgatgaagaccaggatgaagataatgatgatatctcggattctgaaacttcgtcgtcttctgctcggggacgttcatcaaggttggaggatgcgatgcatgattcagtcattcgtcatgcacgtgctttcatggagcagtatgaatccagtcaaggagcagaaatgcgtgagaaggctttggagactctcaacgaactacaagcgcttgctgccgaaattgaagcctgctattccggccccggtgattatggggaggggattgaccttttccgcaaattggcaagctattttgaaggcgatgcgttggaaagtatcaccagttcggaactcctcaactccgggatcattaataccttgctcgctgtatttgacgatttcaattgtgagtgattcgtcttctaaagcttgattttttgcgctaactggtcttatatagccacccccatgcgtgaggctcgcagcgccttccttcaggcgttcatgggctcgactatttccgaaaaggcacaaagccagagcacggcaacgacgcgctttggggtgttggtaaataaactgcaggatcttcttagccggacagagcatttcgaggtgatgactgtcggccacaattcactggaaaacacgcgcaacaatgcggcctacatgcttggaaaacagctccggctgaagttagttgctgatgaagattctgatataccccgctcctacagaaacatcatggtttctattcacgccattgcaactttcaaggccctggatgatttcctccatccccgaattgccctttccgacaggccgaagacatctcgtagccgtgaaacaatcttgtcgcagattgcgaatgcagcgcgtctcagggatcctaagcttgggtctcaatatagtgag

SEQ ID NO: 8247 - DNA, 789 bp, Emericella nidulans
tctgatcattcaacatggacaatgatcgcacgggacgaatctggagcagagcaacctaacaaacacggcatcgcggattaggcgaatataaggagggtacaagaatggaaagacctcaacagggttagaggcaatgctgcaccggagcacaaagtgagtgcatattgaagcactgcaattaaggagcctgagcatctctacatggacctagtcaccctgtagtacctcaagggctgggtggacacagagacccgctatcatcacattggcagcgtcgagcgctgagaactgtaaacccgctatttataccagacgaggcgtcagcctcagagataggacacttaggacgccaagatcggcgtacgagccgtgcaaattaagaggtcgccagagcgccagatgccgatcctggcatcctttaggccaacaagggtagagtaacatatcaccgtagcaatgggaaacaacacgctagcccttcttttgctgaaaatgtatggttttcgaaagggccggctggaaccttccaggcggggctatgaagcctgtgggtttaagtcaaaatcagttgcctacgggaaggaaaccacggtatgaaaaaacatggtcttaaggaaacggaaaacccgcgtgtttctcaggaaataatccgttccaaccgcggaccctgggagtctgagtaaagtatagcggcgggttggtccatagcaaaccccacaaaattttggtgaaaggattggcacactttgatttatggaattaaagtccttcatatagattcatcctcat

SEQ ID NO: 8248 - DNA, 1174 bp, Emericella nidulans
aataaaaaaagagtataagattacagaaataggagtggctatttgggaaatagaatagtaaggaaattaatgcgtaaagaggaagaagatatgtcaagcaagcactttaaaaaaatattaaggccctaaaaaaactaagcgggagagaaacaaaaccatcgggggagcgaaaaaatatccaaggccgaaacgcaaaaggggtccaccaaatgtttgttgagtaacaaaaaaaggtcacgcacccgccatttggtatacccctgctctatatcctacgtgaacaccccccctggtattccaacatgtctggttctattaaccggggatgttgctgggtttctgttgggttggctccgaatatctgccaatcgcaccaattctttttttcttggaatggagtgttatagcccccgccgatcccgcatgctagtttcctaagcaagcaaccagaagacgcgtcttccccaccagtttgcctggccaataacagtttctccggtactgccaatgttcaaatctcttgtcctctcccagctagagagctggcatgccttaaccctcgtgtattaggtaaatgcaaattggcttggatgttgaaactactcgttagattggtacgggggaatgagcccagatgccgaagaacttggaaagtctttgtgcagcgctcaacagagatgttgtatgtattgcgttatctgtctttctcctttggacgacaacgatggaccatgcatacaatgccgttcattttactgaccccttttgagctgaagcatccactctgacttgtgttgacgtcttgacccggttgacgaaccctgaagctctttatgggagagtcagcaggacggagcactcaataagggatggggttctcacgctacatgaggtatggcaacaccaagcttggcatcgttccactgcccgtcaacgccgaggtttccgtccaatacaaacatacctgtggcgtcaggaaaccgtgacatgtctcgggtgtatgggcttgcttacagtggaaagtaagctttcaggctcaggtcaccaacctccctttgagctctgcgtatcaaatcttggtattgcaattgagacatgtgcaggcggcgagtcagtggatacagtgacaaggaagtaaacagtttggtgatattttcaccattcatcgcgcggg

SEQ ID NO: 8249 - DNA, 981 bp, Emericella nidulans
tgagtggtgaacatggtgttttgtttgacctgaaccgcaataggttgtggaggggttatttacacgagtagtattggatgagcatatataattgtcagtcgggaatattcggccgcgggggcatttgagtcaaatcaaccacgcgcggagatgttcgggcgtcttctcgttgaacagtctaataagtatttgcatcactcgtactcgtaggcatcaatgattcatctttcctttgccaagttttactggaatgtattatgtgttgagtttaactgctcgggcctataggaggtaacagccgatatacatgtcacatgacacgatcacgggacatctattggaggcggaatatgatctgttggagatctgccggcagttccaatatcctatccactcgaatttattgatatgaaagacctcttattctctgattcttcggcttttctgaacctcatcatttctcactcctcttgtctgttggaaagggtgctttgaggtcacccttcatatccatcggtactctcgatagttggagtattattatccttctgttcatccaaggtcgatatcgtggtttgttcatctgtcgcttatgagactttgaaaatattgttaatctttgctgtgcagtctacctggtcagtatcgaagctttccgggtcgcgtatcgctaggttctctggactgaagaaaggaaagaaacctgtttcctggaaaaacctagaacagcttccggaccagcagcgcgcttgtcactcagcaaccagcaatatttgtcgttggtcgcctccttacctcttcgaatcttaaagctggttggctcagaccactgggtttctcctaagtcaagatgaatgcaccagatcggtaagatatgccttgcgtcaagtctgcagctcgcagttcaataaaaagcattattggtctccatgagcgacgctgggtggttcccctctctggaccttcacagtggttaagcac

SEQ ID NO: 8250 - DNA, 1615 bp, Emericella nidulans
agctcttgaaataaattagtcattaagatcgaacaacgccgaaacactgcggaatcgttagcttcgcgatgctccttttttgatagagataaatagagacggacctttcgccataatgatggcgtcttatgctctctgagaggaggcttgagatgtcaatgatgatcaatttcctggatttcctcgccacttgcggtgatatggggaaagtattagtgacgacaatgtagttaatagactcgcaagcctccaattgttcaagggatgagtccccaaaaagcccgtgggtggcaatgcagtaaaccttcttggccccgccgcgcttcaccacggtctctgccgccgcgatccatgatccagatttgtctatcatgtcgtcgacaaggaagacagttctatctcggacgtctccaaccagagtgatagtcttctcttgttcaacatttcgtttggtgcttccttcttcttcatcagaagagtcggcagcatcgaatgatccgcctaaagcgtggtcaccaggctttgaggatgtggtcgagacgactgagtctaccattgaatctgggatggcttcactctcttggctgggcagttgcccaggggttgcatcgccggatacagccatagatgtaggaccagatggcggatagtcatcatcgacgaggtgaccttgtacgagccgtccggtgatcacatctcgcaccctgacatctgtgtattcatttacagcctccaactccgaaggccgccgggcgcccgacggggtctcaggacgcaacgagtcaagctcattgagatccgcctgcgattcccttgattgtagagcgtcggggttttcaatgtgtgtccgcgcaatgaacggatcttgctctttaggcagcggtgctgtttcctggtccaaagcctctacgaatactgtactatcggccagagttggtcctggctttaggcggcgcctgtctgttgcgactatgccaaagttgagcttgagcgtgtctgccagcgacgttactcgtttcgtccctccagcgttcttgctaacgacgacagcttcttttcacccgggaacattgttccgaatccagcgtgcaatgaaaggctcggcgaataggttgtcgacgggcttggagaaaaatccctgcatttgggatgcctgagcagaaagaccaggttagaacttcgtctatccactagtgacagaatctagtgcagcaatccatcgttctaaacactcacatggagatccaaggtgatcacatggtcaaccccagcaactgtgaggagatttgcaagcatacgtgcggtgatagatccacgatggctcttctttttggattggcgggaatatgggaagtacctcgtctgtgtcagcattatgagtagcaatcagcctagctaggatccatacggcataaccgctaccaaacgaccatgtcagcctccacaagaattccgagaacgtgacataagcggggaagtagggtaatcatacctgtgatagactttgcagagcctcctttgcaggctgagatcatgattagaatctccataacactgtcattgatcttctcgctgccgctctggatgatgtaaacatcttggtttcgcaccgaac

SEQ ID NO: 8251 - DNA, 179 bp, Emericella nidulans
actccatcttgaatcatcagccaatgtacgatcaggtcactgactttttgatgtgacacagtctcttaatcctacacatgaatttctatatttatgagatgatcgccacatgagagacagatatcaggcgctgtggatagtgggcctatatctagtctcctaccttatctcgtgtatcg

SEQ ID NO: 8252 - DNA, 120 bp, Emericella nidulans
gcagactggtcgaatgcaataaaccagtggagtcaaaatagaaacaaacgagacatatatcattttagtaaagcatgcaaactctaagagatcccgcagcccccattataatgaaaacga

SEQ ID NO: 8253 - DNA, 1534 bp, Emericella nidulans
gggtttgttccgctccccattgtcaggctggactcgggtatcatggtatttaaagcagcaggaacagagaacgagcttttcagtcctgagctgtcttgagggcgtgactcgttcgtgtcgttcgtgcgaacagttgactgcacagtgtttgcattgaatgtgctaggatctgggactttctctcccggctttagatggatgggattgccaatgccgctataggctgggatagggtttaccgagtactcagacaagggcgtgtctgcagggaactctccagggacattagccctctgctcaagagggacgtccttgtccagccccgccgttgtcgatccgggggccaagttgctctccttggagacaccaccagctaatccggcggttgtcgcgttaggtgttacaccagagacagtagccatgtcttgcgcaccgttctgtagtgccgcgactgaatccgcttggatctgatccggatagaggatgttgttgatgttactgctgccgtcgtcctcttgaggtaatcggttatcggtagtccagttgccgtcgacgacaaactatgaatgatagatagacgtcagtgatacgaaaaaacgtattcacgaagcgaatcttatagttttttagcgaagggtggaagaccagtaagcgctaacgcaaatgacgtcaaaggccgttgaggcgagacagcacggcgtcatcactgcgggcacgacgaaggagcctagcttgcttttggagattccccagtagaagactcgagaaagcagggtaagcagctagccctggagctgcccgcgtgaggttggcctgggaagttgattaaaatgacataccttgaagtgcactttgtcgccggtcaccgggaggtggacttccttctcgaaaatatcgcctttccgttccaacctgattgtcttgccccagtcatcaaacgtccctgtgacgaagacctcattggcattgtaaggcctggattcgaaaataagggtcggggtcagcgagccatggtggatagctgggtcaaggcaagttaattggcctcgagcaacttaccatcgaaacgtgtagcttcccattttatgagagctatggtatgggctgatgcgacgaaggagagaggagatttccgggcgtccaagattacgagtaatatagcaaagaacaggacggagctttggggtgctgcactgataaagcgtgagggggctgggattggatttgcggtgccggcagcaggcagctttgggccaaagcggagtggcggtcgcgcaacttgtctttcggaggatttagcattgacaacgccctaactttgataagggcagcagctaatacagttctagttgacctgggtcattttgtgcatggtcatcaccctattcaagtagcggtgggaaatactttaggtgaagcacaccaacgcaatctagagcccgatttagacactagacagcagggtagcattcagactcaagacaccacaggaccggctagtgctgagtactgctagctactttctgaggtggga

SEQ ID NO: 8254 - DNA, 1359 bp, Emericella nidulans
  unsure (1)..(1359): unsure at all n locations
tggggcgttttgcgcttgggattcggaggtctcagcctgctaattagcaacgattaatgacggcgaacatcgtgggacgcgtaaatgtcatacctggtccgcggcacgtgctgtgttccctctaacgacttgaggcgcgccagatccatcctggtccttgagcgacttgaacgtccctctaatcatggtcataacagttgaaaatttgcccgcggcgataccgccagcgagtgatccagcagcagcatagtgagctatgaccttatccatgtaggactccacgcgcaacgctctaggatcaatcacctgcccgatatacgagtctggggcggtcacaatcgagtacagctttatcagtgcaacgaaggcgaacaccgttcgagccagcgtaaagcttggtacgctgattaattgttttggcgagatggcagtgacagtgtctaaagcttcgtgtatggacgagagcgtcgagctcagggccgttacgcgggcggctgcggtggggtctgtgatgtcggcctctgcaggtttgtgctcgcccatggtatcgagggcgttttcatggagatatatattgacgatagcttgagcttggatcatgatggctgagctgttagcaccggtggagtgtggttcagcgagctgagcttacgcgattcgaatttaccggacgcctctcttccccattgatccagttgcttctcgaacgctttcatggtgaataaagacttcggatcagtaaatgataaactgcccaggtcgtcggagaagaaccgcgaactgatctcttcaagaatcctgcccaatttagcccaatggaccattntcttgtccgtaggcagagcatctggcgaattctcgaggatttctacacattcatccgtatacgggagccatcgaacaatgttcggccgtcgtagggcgctcgacgtcctagcagagtcagctgtcactggcgcggtacctacatgcggttaaatacctacaccatagatgtaaaatagcacccaagccacgcccgccgtacctctggcgaatcagggtctggagactgtgactgcttcataaagtcacggtgcaaattacatggtttccccgttaggatctgcttcccccttggttgtcgttttccggtgcntccctatgtccctcccttttgcctctgccaggtgcgacagctgatataacgtcatctggtaaaaattttctggaggagtttaacatcgacctcttttacagcgctatttacccattccattactgtttattgttggtaatctttcatgctttctcgtttttatcatttagtcttactgacacatttactttctgtctcattgtaattaggaagtgtcgtgc

SEQ ID NO: 8255 - DNA, 207 bp, Emericella nidulans
  unsure (1)..(207): unsure at all n locations
ggcgtgcggaacatacatagcggctcacggacatgcacctgggcgacggaagacgaggcacgtgtccatgtcaatggccataacatgcgctagagccccgtgcagctgataccaacgcagcatgaccatcncggaactacgatcgatgcggcgtgcgcagagcagcggggaagattagtcgctggcatttggccgggccaccattga

SEQ ID NO: 8256 - DNA, 1594 bp, Emericella nidulans
agtgtgttgaaaatataaataggagattagtaaaggtgagaagtaaggtataagaagaagaagagagaagagagtgtattatgtggatgtaataagattggtatgagagaagtttgatgaatatggaggtggagagagttgtgagggtagatgattagtatatggtatagagaaaatttatgagaatatatgattagaggattgtgaggttaataaggaatgaatagaatgaaggatatatagtagaaaagagataataagttatgtataaaaaggggttaaggagttagaagtgaaagaataggtaaagaagggaatgaattgggtgggagtagtggagattaggagtttggatatgagaatagatgatgagtaatagaaatattggtagttgtagggaaagaatttaaagggatgggtggacttggaaggatgaataaaagggtcagtagagggggaattagagataccattttcgcgagggcgttttgatgcgtcgtgtgtcgttatgatcagccccagggcttagggaccgctattgcaccctcaccccgtccctccttggcccgccatgtatggcacctcccattccgtctccgctccgatgaatgggatcggaggcgatcttgttgatggctcgggcaccatcgaccctgccgctttgaataatacaaatggtacgtcgcgtatccgcctactatcgtcgcttttgtttttctcttcctgtcttggtttgtgtttgtttgcgcgatgtcgcgtcgacaacaagaatggggatctactatttccatacttcccactgccatgtccatcgcgacgagctccgaactgacatcctttagtaccggttgtccttccgacaccgccatatggagcagcagatgccagcacgacccctcgcggtgtcaagcgcgctcgcacgccggaacaacgcggagctccgcgcgatggagaccaggatgacggtacgtgtgctggacacttgcacttgaagtacaagtcgatagtacctcgagttgccttgtctcattagctgcttctgtcttgccattttggtccccaccgcacttttacacaggtggctaacgcgcggtactagtaacagacgaacacggtcgttgaaaacgaggccgacctccaaagaccccgcgcccatctaccagcgactcgtctaacaacccccagctgcagactcctcaaatgcagcctcaacagttgcatggatcacctaccaatgcttcgcccccgtcgggctcgccccccgagaagacgacgccctcaaaagcgcctttggttaaggctctcccaactgtaagggaccacactaccgatcaactaaacgaggcgcgcgacgagtatattcctaaagagtttgatgaagctggcgagaagaaggtagacgagaacggcgttctgcagggtgaccgagaatacaggtgtaggaccttcaccgtcccactccgcgggaaaaaactgttcatgttggcaacggagtgcgcgcgtgtcctgtcgtacagggactcatatctgcttttgaacaagaatagatccctgcacaagatcattggcacccagcttgaaaaagatgatctaa

SEQ ID NO: 8257 - DNA, 1195 bp, Emericella nidulans
tcccctggcgagtagacgatcatgaacaggtaaatccccgttgccaccatggcggtgcgagtctgctcgccctcgatgtagaacgagaagcccgtccagaagaggaagagagccatgaaggggaaagtggtgaggaggaggttccgtcgcccgaacgtgtcgattgtgtagatagccggtacggcgaaaagccagttcgttatcccacagcccagggatacaaggagcgcgttttctcggctgaaccctgcgtcggtgaacatggacgaggagtaatacatgatggcgttgacgccgcagaactgtgcctgttagccgaattccgctgcatttcgagttgcccagtggaattctgagtgtacctgctgcatgaacatgacgaagaaggaagactgtgctgcacgtcggtttctcgggacggtgaacatctcccgccagagctgtttgccctcacggagtttctcctcaacttgcagtgctgcatggatgtagtagaggtcccgcgccgcttggaacttcgatggacgcagcttgcagagggcatcgtatgcagcgtggtaacgattccggatcatataccacctgggcgactcggggcagaagtagacctgggcacacacaagcatgggcctgtgaacgttaggaccagagaagagatgaaaccgggtctctgcagagatactgacgggatagcggtgactccaaacatcaatctccaattgaggccttggagcgtgtcactctggacattcatgaacgctacagacgagatataacctaatacagtcaacatcttaattccaccccaacgtcatcgaggagcactcacccagcatgattccaaaagcagtccatgtctgccactgcattgcaagagcaccgcggatagctgtaggagcgcactccgatgcatagaccggcgtcgtggtagactttgcacccaccgcgagaccgagcatgaatctgccgagcactgtagacaccaatcagcatctgccttcgcaagttcaacaggaggacaaacagaggttccccacgtgtggggcggcgcacatcaggaacgtggctgcgaaggagatgaagcacgatataaagatgcacccgcggcggccaagtagcggttccaggtgcggttgtccagatccaaccggcatgacaaaggtacgagcaccggtataagacctgagccagtgtt

SEQ ID NO: 8258 - DNA, 1020 bp, Emericella nidulans
tacaagtccacctggtcatcaaaatcatcctccgggtggccatctttgtccgcatagttcccccctgcgcctccagctgtactcgctgccccgcccctagcaacactaaccatatcctcgctatccctctggcgttcccgctcttgttcgcgttccctctccctgtcgcgctccttttcagctttactcttccggcctcgtttgcgtttaaataccccatctgcactcgcgccacctacgcttcccgtgaagctccccgtcacactgcctgcatcgctggtggcggttgcgctgaaggctcggagatccgggtcgacggggaaggaggtctgacggagggggtgcatgcgagggcgtttggactgatggccggttgaagcgctgcagatagaggtgcgctttagggggttcggatttggtgggtttggtgacggtgaggacatcttgtggcgctcgcgctctcttttatctcgtttctggactcggtacgcgctgattcgtatgatgtttggcttcagtaatggtgtagttatgagcgaaatgagctgcgacgggagagtttgtggggggcgaagtgaggaaagtggtgaggtatgatagcaccctaacgaaaagtgaaataaagacgtcggatgtgctagtattcgaaggtaagatacttgaatcgagaggtgcggtcgtgcgttgtctcgaagggaaccttgaggtgcaactaggtgatcgcatatcagatggaagcaagatgttccggcccgaccacgcctgccgtactagaacactgctttatgtatatacgaactctatatattcgaaactctaatacaatactttctggtttctctgtctttgttctctatcaacctgatattataagcaggtctagcaagttgcgattgaataattttggttcccgtgattgacgcagacaaaggaaaaggtggtgactggagaggaataaggaaatctgctattttgagtaactgactgctggacagatatgaccgatatgcggaggtatgg

SEQ ID NO: 8259 - DNA, 1216 bp, Emericella nidulans
cgtccgacgcccttctgctagcggggcctcgtctaaggctgtctgagtatcttgatcgggtcctagattcaatcttactttcgagcaagggggttcgtccgatcctttctgtgcctgaatacctctcctgacctttctacgtcggtatcagttttttcgtccgtgtatcctggaaacggcaggctatgtgatgatgggtaccaaatgttattctacatatctggagcttctggtatgaccaatgctttttccaaatagctgcgataatggttgccgagtagatggtcggttcctaccttaccgaaacaataggtgaaacaacaacgctcgtccagtcttccgcgggtccgcagccatatccattggtccgcccagcactaacagtccttgcaggatattcggtgttctagggcttcgtcaagaccgtgccttccccggcctgtcctttcctgcaacgcagagcacgggtcgcagcttcctgatactgcattggccggagcctaggaagctactgaaggccaaggcatatgtgtggctctttgcgtaatcgttcggactgcgcaatggctatacaatgacctttggtttggatcggttgggatctttaggcccttatgggcaccatcccaagctcgcaagctgttttgaatcccagccctaaatcgatttcaaaaacccggcgtggccatacgaagcgcgcagtggctgagtgacgctatacttgaactgcgctgaacacgctcgctatctctctagaattcaggcccgaaataagcagcccgaggtcagttatacccggttgctggtctaagaaagttatacatggcattgtttgttatcaaacctaggagggcgacaatagggaaaccatgggaaggaccacttgtttcacgggctttacgttttaagcattcgtctaatttagaagccctcctggggtggtccctgctgtggccatcactaccattttttatgcttcatctatgtaaactctttttatttttttccttcctcgttgcttatactattacttaatccctcctctcatttccctccacttccccaccaaaatcttgaatatttcatatatatatttatacacacatatcatacatcaatcatccctctccattcttattatctatattaactccatttttactttatcaaatccacttctctatattatcacttaccctttatttaatcccctctc

SEQ ID NO: 8260 - DNA, 140 bp, Emericella nidulans
  unsure (1)..(140): unsure at all n locations
tcagcaactgtgcggccttcaaatgcgcagacgtcaggacgtgatgcgtcatgtcctgtngntcctagttgcagatcgcgcatagagcatagcagagtacaccgactggcgataagggnngcancttgatgaacctgaca

SEQ ID NO: 8261 - DNA, 1299 bp, Emericella nidulans
gcttacgcagtcacatagtctccgactgggatcgaaatgcagggagcagtagagtctaccctctgaagtggttcagatgatagtagccgtgttggtcaagtcatacttagatatgatgaagaggcagagcctggaattgcgcattccatatgcaccagcaggaaataccttgagaggacaaggttcctcgttcgatgatgattccgatattttgcgtcctgtgactggcgtggcgcgcggaagaatactctacggcctatgcagaagcatcgaggctaatctgtttaccagatgcctacgatcatctggttgctttggacttcgtcaattattggacgcgtgcgttgttggctattccgtctgtgattaatctttgaaatatccttgtgtccctgacttctccatgtctccgacttccagtttttggtgtcagactcctcgcagctattctatgaccttgcagcacattttttttttttttaggtctcattaggaaccaacatgaactgttctatgtctactatcggcgtgctggtcctaaactacgcctgctcaaacgtactcaagcagagatcaacgccaacaatcaacttctatcgtacagcggctgcatatttctctgtatctcttacttgagacacgtaatcctctgatagctcaacttctgcactctagtatggcacctgccttgaaaagtactctgtaatcaactccacctgctcgtgcttggccaacggaacctgcccaaagccatcacccacatggaacaccgtctcattcttccccctgcccacaggagcccaatacgtcaggtttttccatggataagttccaccgaggttgggatctcccgtcttgacaaagttaacccagtaactggacatgatctccgcgacatggtaatcataccacgtccactcgtgatcgtctgcgttcgcatacagcgtgtccatggtgtagaaaacttcagattcatggtacgcaccctgggtctggctaggtggggcgtggtcccagtagtatgtgtagaacgggctagatgcagacttggcccagtccttcgggaacagccaggacgagacaagcgacgtatctcttgccgcagcgttccaggaccggctcgcttgcgtctcgttgttgccggggtaaagagcgaaataccaggatgagaggttgccgtacttgaggggggcgctcgcgtggtgctccttaaaacgtctcccctgtcgacgtctcagctgcgctcttgtcatgctcggtgccggataataaaaaagacgacattagccggcccattgc

SEQ ID NO: 8262 - DNA, 1880 bp, Emericella nidulans
tattaaaaaaaaaataaattaagaacgtgggcaaccaatcataactaactccgggaaaacttaagaaaaaacttccttataatacgcaaaagacttggatatgcttacaaggcaaaaaaggtaatcatctaagcgatcatttcttcaaggtaggtttcgataaccgctcggcaagcgcgtatctcgatcaagttcgcgttttccagtattcctcttggatcgtcaatatgccttaaggtgcacataaaatgtaggttggaaatggagtcctttaactggctaacaagcttgggccaaaaaggccaacccgctttatcgacacactcgtccaacgcatcaatgacaacataggtttcggctgagtctattgataacgattgcagcaactttaggcattccgattctgttggagccgtttcctttccgcgatgccgctggtataactccgaagcacttcctggcatggcctgtttctgctcgaccaactggcgagcaatagcacgatgaaaatactcggggctctgatcttggcttgctttgtgattgcaatacacgaatgccaggctgatatccgggctaggtaaatcagtctcgaggaagtcaacaacaactgacctgtggttcttattaatgatggttgacataacctatcgcatagacagagtatttctcacttacgataaaacggtcttcccaacaccagctgagtaagtcagtattcacactgccttgccgtagaggtagcacctacggctgccttgacaccaaagaattcctctgccgccagtttcccaatctagaaaccttgaatcctgcagtagccactctacagtaccgggttgccgttgtttaagcacgtctgcctgtctcaaccaaaagttggtgggggatagccaatcaataatctcgcgagttttatcgtctatgagcagaagaaaaaaaggttagttcatgttgccattgggcctaaacgggccataccttgcctccaccgtattatcagatcgaccttctcgaccgcttcagagatcttatcactgcggcaatcagcagttagtcgaaagtcccagcatctaaacaggagtcgagtacatatgtagtagctgcaatgccaaagacagattggatcgagattcggttaggtaggtctggatgttgcgcagagtttcgaccctgaaggggtattttcctctgagtacatggcgtcgcattgtaatccggactccagcttgtacagacggtcctgtctccctgatcttgccgagctcggcgttcagctgttccaggttagcaagagtggccgcaatacacttttccacatctctcttggtttcaatgtcgaatgcggcgggtggttgaatcttgcgctgaatctgggccagtaagctcgacaagctgctcagagcgttgtacatgctatcaatctctgcatcttgattcctccatgcggcatagaactttagcaatccttgcgttatctccaatcctaacgagataatcccagccacgccacttgcaatgcccaaagcttccgccatagcttgacaggatcagattcaaaccataggattcggatgagtaaggtcatgttattgcctttgactggatataaagaaaagtaatttcgaaaaagttgctggtctgccttattgcaaggggacagcctcagcagtgcttggaagtggggtgtgagaggcttgacgctccgccctaggctgatgcctggataacttgctgacaggagcctcaaatggataactaatcagaagtcctccagcctcacaaggctctttccacttctagaagtggtttgttgacaggcgtacccgggagtttcagaagcagtaagcatagcaattaattacataccatgtactcac

SEQ ID NO: 8263 - DNA, 1302 bp, Emericella nidulans
cgctagtgcctggttcatgtgtccggcgaacataattactgcgtgaattaacatggcgctggccgcttccgtgtaatggtctcattctcaaaggccaggaattagatctggatctccggctgtcgccgtcttactagcacctttgcggtcatgtttgcgttgattgctgccgcaaactcccacacgtgctgcccagtctccccattggccggtttaatatcatacttcatcaacacgtggcaaagagatatcttcagcaccgctgcggcgaagaaccgtcctggacaggcgcggcctccatagccgaatcccaggtgatcggaggtaggtgatgtaaactgtgctgtattctcctgccctggagcctgtcggagtctgtaaaaccgatacgggtcaaagtgcgcggcgtcaggatacttgtcctcatcccacattgtgtgtccagatatgcggatagactggcctttctgaatgatgaggccgtctttcaacgttacgtcagcgacggcgaccctgccaactgctgtctgatagttagggtgtgtccgaaccaggagaagggatttggcataccaaacaggattggatctacccgttgaacttccttaaaggcactgtccatgagtttcaagtggtacagcgccgttttgctccacccatgagtctcgtagacttggatgacctctttacgaaggtcgctgacgagctgaggatcctcagaaaggcgcaggaggatcttaaccagatggtcgcagaggccatgcatggacgcaaaggcaatccgcaggttaagtatgagctcgtcatattcttccccgtgcgaggcttctttgaaccattcaaagaagtttagcggttcttcgcctgttgatgcctgcagagccgttctcctgcgcatgtcacggctcatgagctctcggccagatttcatgatgcggtagagctccaggcactcaggtagaaacttggccacaatccgtcgtagcatcacaggccacgcggagagtgccgccgatgccatacccagagccatttccatctttaccacaaactcgggccacgcctcgtccaggcagtacacagaagatgtaccctgggctatggtacgctcgaccaccgacccaagaactatttcctgccagcctggggattattagatagacgggtcagccacactttcgcgcatgtcgacggaagtcatggtttacctgattcactaggccatctatcgctaattgcttcaccgatatctgatgcgagcggctggatcagtttgcctggaaaagcttgttagtttggttg

SEQ ID NO: 8264 - DNA, 1077 bp, Emericella nidulans
cggatgtgatgggtagcatgggacgtggctgtgactgcctcaacggatgtgctggaggggagggaataacaatggtggaacaggataaaatgagaatgtcattattcatcaaagtacatagcgtggtggcgattaagcaatccagccctgactagagctgattgacttgcttgtgtttatctttccttcactcgttgggtatatttagtgcttggcggcttctatatatatcatacaacattagcaaaccatccatgaccgaatgcccgtcgttatcgggaccaggtaaacgcaatacgtacccttgtaaacatctgcctgagtctcatgaaccttctcatccttcttgtcaaagagagcgtccttggcagcagtggcgcgcgtagtcaggtcggcgttattgtccttggcgacgtctttgttcacctccttcgaggctgtcgcgccggcgccctggatggactcggtgacgtagttgacagtgttctagcgacaactgttaggaatgggaacaaagaagataaagagagtttagtgtggtacatgcttaccttgatagtctccattgtggtgcttattcgggttaaactcgatggtaagttgttagaatatttgtaggatctgtgtgattttccgagttgatagtaaaacgaaattatttgcgaaggacaagaaggattcttatatccttattgagagctagcatcgtcatcgtcgattttcagggtctgatgttgctcaggggtccgacttttggtcatgacgtcacctatgaacggggttgacggcacagatcgcgattcggctaggtgtaggtccacaaggtccaggccacatccaatggcgcagcatgaatgggagaggttcctggattccagtcatagcctaattttcagccgctgacgcagtgcttgaccctacgtcatcgcctactacgaagttgcttgcttcacgcctaaggcagccataaatgaaatctaaccctgagaaagctgcattgaagagcacgacaaaatgattccagttgccagtgccaggtacgtgtgagtgtttcgtgcaatatacaacaggtcgggc

SEQ ID NO: 8265 - DNA, 1572 bp, Emericella nidulans
agctatagcaacaccgaacctgtacgactgtgaaacagaccgcgggcctacttgtttggcagacttgcaagcacgctcaaatggagcaacttgccagcagtaaatatatatttgttctgtagtaatttgttttgggttgatggtatcgcgcaagtgcccaattgtcgtggtttaagtccgcacccgctcaagattagcgcgagcaaccgcattggttggaattgtgaaccagatcaagccagatcgtgtgagagaacagatacaatactacacttaagtctttaacaagcgctcgctttaacatggctcatttccccggggatctgtaaatgacgtgctatatgcgtggctaatctacaacttctggtattcgagcttgccttccagtttcttcgcttctgctaccttgcggacggccctgttgaagtcgtcctgattgatcgcatctcgatagtccttgatagcaaatagaccccttttcaacgttagcaatgaccaagtacaaaaacaagggcatgacatacgcttctgtcacaacattacggagatcagcaccgtttagtccatcgctcattttcacaacactttcaaaatcaatgtcgccctccatttgcacagtactggaatgaatcttcaggatctcaagacggccgacctcgttgggcaaaggaatctcaatcttccggtctagacgacccgcacgcagcaaagccgggtcaagtgtgtccggccgatttgtagccatgataatctttgtcttcccaagatagtcaaaaccatccagctggttgagtagctccatcaacgttcgctgaatttctcggtccgccgaggtaccttccgaaaatcgtcggccacctatagcatcgatttcgtccatgaagatgatacaaggttcgtgttctttggcgtaaccgaacatttctatgattaaccgtgcagactcaccgatgtatttgtcaacgatagcggatgagacaactaaaccgtgttagcggaacgctagacctaacgctggtaatcagctcacccttcaagaagttggtctccatagaacttgcgacggcacgcgccaagagcgtctttacggtacctggaggtccgtaaagcagcacgcccttgggtggcttgatacccactcgctggaatagctcagggttcttcagcggcaactcaatcacttcacgtagttcacgaatttggtcattcatgaccgccgataccagcaaagttgatctgtcccgggtctttcaacgacctgttgtattaccaagggtcaacttccctggcagcattcccatttatggtagagtcggtatattgagggcacacgggtaccctgcttaacttggactatggctttgaacggagtcgacacaatttggtcaggggaggctggcatgatactagattggtgttcgggggaataaaaaaatttttgggaaaaacgaatcgttctatcggggtttaaactttaaaattgcaacttgggagttgtgtttttgaataacttttggagtttcataaaggttggtactcttccgaacaggccttcttcagcttcttggaaac

SEQ ID NO: 8266 - DNA, 294 bp, Emericella nidulans
  unsure (1)..(294): unsure at all n locations
ggagttgccggttgtcttcgcgatggagctnggggcggatccctgcgcggtcatgacgtctccatcagtcctgagtatatctcaaggtctattcgccttgcggtatcaacggatgtaaggacattgaagcagtggagattgcggttagccgccgccagcacagtgatgcttcgtgtgtgcgcctgcaagaattgaagtgggtaatatctgcgacttanttcctcnattacttatatgagtgcctgtatcgagtcagcaagaatggtgatgaccttggagacatatgtgacaaag

SEQ ID NO: 8267 - DNA, 113 bp, Emericella nidulans
  unsure (1)..(113): unsure at all n locations
ctatacaaggaacaaactctcaagatacagtccgttaagtagtccagccacgaagcatagcaagcggacctnattcgaccgtcaagcgcaaagagtccagacgtggagacagc

SEQ ID NO: 8268 - DNA, 1125 bp, Emericella nidulans
tccatatttcacagcttagtgcgacaaagaatgacccagtgttgagtacatgacgttgattgagacagagccgagtagcaaacaatgtgacccggaatggtcaatacctattgcctccctatcttgtacctgcagacctagaaactgtgtgcatcgaaaccataaagaaaccaaggatcgcttgctggccccagtctgattggcgggtgctttgagggactcgtatcctccaccaagttagtgccatcgaggaactccaggcacagccacatcttgcgccctcatttaaatcctgttgctgctcttcgtacgcccacttgcgagctctttttactgctggctggtccatggagtgacccaaacatggccaagcaaatccaaccaaaacccagcgcactcgccaccctcattcccgagcttcagtggctcattttcaattgcttatcgttcgatgataaagtcctcttcaccgagatcgggctatttcacccggatctcttgaccagccacggccagacgaatacatacgaccaacacggccgaacgctcctccacgtcgccgcagagaaaggatgcgtaagggcagcgcacacctcctctgtggcggcgccaccccatcggcgaaaatgggcccaggggcacgcgattttaatacaacaccgctaatccttgccgcccagcaagagaacaaggaactcgtgaacctgctcctgagtcatggagccgacgttaatgactgggactacagcggcataacggcactccactacgccgtcatacgcggcgacggacgcatcgtccggattcttctcgataagggcgcaaagcagacgaacaactacgacatcggttgccccgtccatgtcgcggctgcaagcggggccctggagatacttcgactcctcgtggcgcacggagcggatgtcggcgccagcaagcgaggcctgtcggcgctcgacatcgcgcttcttaatggaaatatcgcggctgcgcggattctcgttgacgcgggggcgccgctgaacgatcccgtcgagggctggggcttgttcaacccaacgctgatggtcgccggcgggccgcatgcggcagatgctgctgagatagtacttgatcacagcattc

SEQ ID NO: 8269 - DNA, 285 bp, Emericella nidulans
gggctcgtgcccagtatgattacgaggccataggcggtagaacacaaggccgtcccgcaagatggacgtcgaccgacgaaagccggtgtcctagcaggcgcgcagcagtgcactatagcgcgtagacggtcgcagcagcggacgttaccccttgacccgcggcggtgggcgacgctgatacctgtcgatgaccaaggtccataagaatccctcagggctttgacgatagctggatatcggtaagcgaacagccggtcggagattgggacgggcaaaatataaaag

SEQ ID NO: 8270 - DNA, 145 bp, Emericella nidulans
  unsure (1)..(145): unsure at all n locations
acgtagaggtcaaatatacaccgcgtgggatactcgagcgctatagttcctggtgnggggcctggctggctattgtgatgttataaaaatacaaataagttaagattaaaaggaggggacatagagggtaaatgggggcgggaaa

SEQ ID NO: 8271 - DNA, 676 bp, Emericella nidulans
ttgaacgcgatcgaaaccgactgtctatggtcagtgctggtgggcctcggctgagtgagaattttggcgatgctaccgggctggaaagcgattcagacgttggcgggaatacaagcgtaatgccggacggagaacaagatgaaactatcatcagtcatggcgcgttcgacagggggtaagctaaaacatctgagatattctcgcctatagttcctaaccatattgcagtggggaaacggaagaccttgggcgatttaactttgatctcaactttccatcacctgctgcccagcccgatgatctggatgcggacgaacccataaatgatgatgaaggatttgaattaccagctatcgaccttgaatctgaacatggccctgacgccgaccctggatcagacgatgatgaggtcggcggtaccaccgggggcttcggcctggagctatattctcctgaaagagtctccatgagcgaaagcgcctgggcttgttggaggaggtctacgagaggaagacaccgttgttcatggctccaaacagaagaaactctcgcggcatgggattccagtccccaccctacctgccggtgtcgtcaagaagttggctacgcggtttgctcgggctcgagctgggccaaaggcgaagatcagtaagagcacgctggcagcgattgagca

SEQ ID NO: 8272 - DNA, 107 bp, Emericella nidulans
tacaccggttaacgccagccaaagtgaaagcagccagtcggaactacgagaccgcatacacgaaagcaaaactctcgcgaaacgtcgaattcggcacggcaacaaac

SEQ ID NO: 8273 - DNA, 663 bp, Emericella nidulans
ttgaagctggaagcagctttggccggtgggctcgtgcgcccagcgctgagtggctggtccaggccccgtcgactctctctgacttcatcgttactggaccaattttgttcccgtcccggtttggtggtatcgtcatcacttcaacattccttggatgcgcttgtgctgccgtacaaaatcaagttgcggccatatcacgcccgtctccttatatttgtcttcgatgagttcgttagtgaagagcctgtgatcatttactttatttctcgttcccaatcccaagctcagtcgatttctgcccctctttgggcctcttcccgccagctccccgcgcaaatattcacgaagaacaggtaagctgccagcctgcagttgaacaagcggactcttttgttcttttatcatttttgtcaaagcgttccacgtgtcttcaggctcaacttctcttattctctaattctgttttgattcctatcgctgtcgaagtctgcctgtccaaccttcaccgacgtcattggtttgtcactttctaactgcttcatctctagtaaagttccttgcatatttcttcatcgagtgaactagcaaccatctacctacccaaccggaacatactcgcagcctctaaggttccgcatttatataacctgcgccaggcccggc

SEQ ID NO: 8274 - DNA, 950 bp, Emericella nidulans
  unsure (1)..(950): unsure at all n locations
ccctggacgctgcattggaccgtaggtgagttttgttctgactgtaaagtgtcaccggcggaattttccttttgttggagctgcacttcctaggcggagtgtgcatgtgcttcagcggagtcctgcagctgctcaccttgagaatcgaccgactgatattgcagtttggtctcgattggtaagggccacgggcccgactggttcttatggggtcggtgcatcagggattaggggggaactagcctcctcagtgagatttcgccgatttgtccagggttactctttgaaactagggccgcgtatatacccggtagtatccttcgatgccgacttggtggggacctagacccctgttccaaccgcgtttaggcataaggatccgcatttggtaacaacgaaagtccatgccagacagccaggtctgtatcccgggcaaatggggtcttggtagccccatgcttgcagtgcacagcgttccaatcaagaatttagagggctccccttcctctattggtgaaacgaccatagcattttgactcaacacagctgctttggactctgaaacgcgcatttcgggaatcccacccccctcaaagggcttcaacaattttatcggggaagggtcgcatttgtttttgaaaaaaagccgcttggggccggtgggcccaggccccctttggggttccatggcaggagcagatttggtaccatagccttcccttgggttcagcctttgtttgtggcacctaatcgtcgtggtgcttcggaccggttttaattcttccgcccggaaggcagtggtccaggcgaatacttccgggcaattttgctgcttcctcgaaaccggcaagaatcgtttatcctgcgcggcgctgtccttactttttcccagttatcctatcanaatctccttctttctctcatatgtttattaactactatctcttttt

SEQ ID NO: 8275 - DNA, 913 bp, Emericella nidulans
atccctttctcacagtcctaccgaaggaaactcacccgaacatctccggcatagtaagagcaaacgctgcatagctcatacacaaccgccgcgcctcacaaatcacctcgaacttgggatcattattgcgagcttttcgaaagcctttgtgcagccgcgtcacccgtttccagcacggcagtagataatccagcggcttcccatcaggctgactcgacgccgcttccagcagagcctgatccagaacggcggtactaatcctcaagctcaggttctggtcttccaactcactccgcaaccccgaaaggaacgtcaatctctgtccatgaatatccctttgacggctctcatctaatgtaagcttgaagacggcgcttaatgtccggtcttcaaatgcttcgagtgtgtcttcttgtttgggcggaggtggggtgttcgagacgggtgtcactgttccggattgcggtcgctgctcggcgggcgctgcggacgtcggcgtgattttgattcgcttcccttctgatccttctcgttctaaccttggtgttgaaggtgcgacagtctcgccggactgtggtcgcgatgcttctggggcctgaggggtcaaggccgcggatgacggctcactgcttgtttccgcggacgttggtggattcgcactcgcaagctttgctaggcgtttgctgcggatctgtagaatagcttttattagctctaggatagacagacatgtaataaacagcatgaagatcaaactaaccttatccgcctcggacatgttatcgcccatactcgatgtcgggaagcgatacaggcaccgcaccgagtaaagagcttccaacttcgcagtaggtgaagagaaggaattagtaggccctaaaaataaagaaaaagagaccaaaaggaactagga

SEQ ID NO: 8276 - DNA, 121 bp, Emericella nidulans
  unsure (1)..(121): unsure at all n locations
cccccccccaatgagccactctaaccactttcccaccttctaccctccaccgtcccacatcattttaactatcaaccaagcggatcgaccttgagtcccnnnttttcncagaccgagggcg

SEQ ID NO: 8277 - DNA, 1692 bp, Emericella nidulans
tcattggtcaattttcgatgcggactgttcacattaaataatggggagagtatttgttagagcccttgtaatagaagaaaatgagtggattgcatttttttaaaatgttttcattcgcgaaaaatagcttttattccctctttcctgccatcgcggggcacgccgctttcggagcccttacatttcgaatctttagtaatactcaagagtacatgtgcgcataatgcggctgacaaagaaaagtctcattgacgttattcactcgccaatagcatcatcacgtgaaataacgtgatgcaccgcgcacagaccactgcgcggcaaacaaaaacgagcaccgaaaattcctcccaatttacttttttctcttttcttttacatgaacaacgcaaaattcacattctttcaaaagcgttcctacaaaggaaactatcttctagatagggacctatgaagtacggaaatcgtcatatagaatggagacagactgcaatgcagagtatcgatcttgggtgcagtgtctgcctggccataaggctctatgggagggactgcaatgattggttctacagactttggaaagctgtgattctatgaatcaccctgtagcgtagtgtaccgttttgttaaactccgcctttggctgggtttatattccggccgtgacggacgtatgctgcttgatgtcttcaaatttccaaactcggtatcaagggcatatatcaaaatgaaagagtaacaggacagagagccttgtctggagacatttattcgcttctgatgaaaaaaagactgaaaggctggacctggattcagcccttcatagtttcacgacgagactctcccgcaagctgcctgccaatgtttccaaagcatacgcatgcgcagaagagaacactagcaatccacgtccgaaccgccatactctcctgggtgagtcttgcccctggtgtggcttctggcccgaccccattgagcgaggggataacgggtgctgaaccctctgttgctggaattagaccaggcttaagaccaagcaggaggctcattcctccgatagcgagggttgtcgataagatgaagccggtcttggtgcggtcgataagataccacagcacagggttggccagggctagtgttaaagatgcttgggttgtggactcccagggggtgcgacgctgaataaacagaaacatatgttagcttcttgggtttggataatgtccatataacaggaaaatttaccatggcaaatgcaattcccacaaaagctccaacgctacgaacaaccgcagaccaggagagagcaagctccgcggaatcattgctcgactgcttctcttgtgcgatagctccgcctagatacgaatccagccagggaagcacattcccaatggcaacaccagtaaagccccagaatcccaaatattcccacgacccgtagaaatgagtatatttcagcttgaccggagtgatccagtgattttcgtgcagatgaatggtaataataccgtaaacgacgcctaacgcaaagagttgcgcgcccgttatcgtctgaggcatgataacgccccggacaaaccctggctgagacccgaccggttgggagaacagaaccgactaattttgtttgggccacgtttgctgaacttttggatgttgggttgaagcttgcccttgttttttcccaga

SEQ ID NO: 8278 - DNA, 1099 bp, Emericella nidulans
acatggcctcgtcccagctcgcgcgctctagcttgccattgcgccggatcagcgggtgcgtgagacggtcgggatggttgatcgagacccagctagctacatttcagtccttttatggctggctcaagtgtttaggccttagtactcacccattcaggccctttggcccaagccgccctttattcacccggtcgacggttcgcccgcgcacgccaacaaccttaccctccttgactccgatatcgaggccgcagccgttgctaattgatcagtatggcactaggtcgaggtggacggaaaatacctgcacagcacgcaagcgctctggacccatgtgtccggggtatccaccagatggctgtcgcagcgggtgggccactggtgcttgtacggagtgcgctcgccccagatattcttgatagagtctctactctctgtgtactcgggcatcttggctcaggctgaggctcttggacgagtgggttgggtgcagttacaaatcatgaatggaggtgttcgtattggctctaatgacctcattatgatgcgcgcggggattcccagatatttttgaagctgccaaggcagggtcatactcgaaagttcgattttgatacactgaaaaacgtcaaaaaatatcgaaaatcaaaatggctctatcatacgccgatgcagtatggctagtcaagactgacgcccaaaggcatgcttcgttacagagagagcgatgttcgatctacagtgcctgcgaccgagtcgcagctgagagaatcaccagccctatttccacccccgagtacgatacctcggccatggacggatttgccttgagttctactgcaacagagactgccagtcccgagacgccagtcacgtttaacgtcatggctaccacgacagccggcgaccggccgtatccggctgcagacagtctgagggatgcaaaggatagcattcccccctgcgtagagatcatgacgggagctccttttcctactggccaggagtgggagcgattcgactgaagagtcccgattgaggaggtagtcgtgcaagaggaccggtgtcctccctcgcaacgccggtacgtattctgtct

SEQ ID NO: 8279 - DNA, 1075 bp, Emericella nidulans
gttgttttagttttttcccccagaggggcttaacacatggcttccaagtaaatgggtgtccgagtttttccacactaagaccaattgaaggggggggaaaattggccccggggtttcccagagaaccaatctttccaaaaagcaaaacccccaatattagccagccccgcgtgctacagcgtacgcttctaaaataaaaggtcgagacttggaggggccttgtccccctaccggagggtcgttgttaccagttcggaggaaaatgacttgcggcatggccgctctgggacataaacagggcgcccccctctcaggccaaacggccaagtgcgcaaccgtgtccgcacccgtctattttggattttggaccgggtgtccaaccgggggttcctaaccttcccaaatggcaaccgccgacatgttgaggtgccgcttggctgtattgaacgttgcttccagtagcttctccctaaaagaaccctgaaagtgctgaaataaaccatgctcattcgacaaatgccattccagcgaggcctcaattggggcaatgatatcgtctgagatggtagtgtcaccacagcactctgaagcaagccgcgcaatttccaaggcgatgtaccgcacattcttcagccaccgggaagatccccggatacaatcctcggtctcctccagcaaagtcccgatacgagaccgaaatgtggcataggtctgtgttggagctggaagataccgtctctgagaatggatatatgactcgaagatataccagcagatctcgagattgatggtattctgcatccaacctcgcgcctgccacaagcggtctgcatcaaagtcaaatgtatcgggaaatccgtcagggctatgaaaatgcagcataaagtcactcagccctttgaggaggagcgcaagacgctaaaagctgtcagtttgcgcggggcttttcattctacgcagctcacgctcccgaaggtctaggtaccagtgtcgagatgattccactggacatcgccctttcaattttgcttctgaaatactcctggagaaaggggatagtgtcttcgatgagaag

SEQ ID NO: 8280 - DNA, 622 bp, Emericella nidulans
gccccagctgagctcatatcgatgtgccagaacgatctctagccacatcatgttccggcgacggtaccgcggtggtcaacgcctacttttccgcgtgttgcatgcgatgtccctctactttccggatacggggtacgttcaaggtatggcggcgctcgcggcgacactccttgcttactacgacgaagagcatacgtttgttatgcttgtccgactgtggcaactacgggggctcgagaaactctatcgttccgggtttgcgggcctcatggaggctctgggcgacttcgaacgagaatggctggatggtggagaagttgccgcgaaattggtaagttgacccataagacagaaaagtgcaccttgagctaaaggtattgcctcgcaatagaatgaagttggaataccgcctacagcatacggtacccggtggtatttgacactgttcaattactcgatacctttcccagcccagcttcgagtttgggatgtctttatgctccttggcgatgccgaggacgatcccaagtcgggcaaaccggaaacaagcggtttcgggcaggggcctcgacgttcttcacgcgaactcgggagctcttatcgacgggatgcgagaaatcat

SEQ ID NO: 8281 - DNA, 154 bp, Emericella nidulans
  unsure (1)..(154): unsure at all n locations
tccagggttataacgaatatatagaccggttgattatgggactaagaatcatatgtaatacgaacatcatcgagagatgacaactgatagtatntatgcttcgcaaggacattgccagcanctggcgccanggcagacggcagcccagcatctg

SEQ ID NO: 8282 - DNA, 101 bp, Emericella nidulans
tgttgattatcgcccagagaccgagtatataggtcattctctctacagacgtcatatccgattgacatataggaacgagacacgcgacaaatgctttcata

SEQ ID NO: 8283 - DNA, 963 bp, Emericella nidulans
acatcgacgcctcaaccacttgaagacgagagtggtacaactgctgctgctgctgatgatgatgttgttgagtctgctctaagtaccagccgatctcaacgaggagatagtgggagccaagggccgctcgcacaagctacagcaaactcgcccccgccgcgaagggagcttccctttgcgaagaaaacggaaaaggatcccgggcctgggcatctttcctcgcgagcgtggcaggattcagttgaatccggaggggagacagatgacgacgaactgtagctaacgccccttttactataacctatgcctatgtgttaaactggttctagtgcagatcacactccctgatgaaaatacttattcggtaatgtaagactaacgtcttcgcttgggcctgcaagttaagacggttggttaagatgattttcgagcaatcgttatgttggtgaagccaaagaagcatggatagcagctgttcctagctattcctacgcagctacattttcaggactgtaggcataaattttgccattcctgagctgcttttgatcttatgtacacctctaacatctttaacctgtaccgtagtggagctggaacactataggaaacgaggggaaacaataatacaattaaacagggaccaacaacagtgtttaggtgttacaacaacaacgcctagatgaagaatgggaaaaaaacaaactacaggtccagtaggctttttaaccatacatgtgctgcggagacacttcaccacctgtagacatgtagttcacatcagggtttccagagaccttagctgccgaagcgcgagccattgtcggcgaactgcttaatggttaacattaacttcaaagagtgaggagtttttgatcataccttctggagatcgaatctgtaaaatagaaatcttcaatcaccttcttaaaggtgcgttggttacttagatccatgttctga

SEQ ID NO: 8284 - DNA, 629 bp, Emericella nidulans
gatagggttccagaatagagacgggcaaatccaatcagatgctcggggtcttccttctgttcctgttctgcgggctgattctcatcgtctatttggacccgctcgaacgcagatgttactcgcgagaagtcgtctgcttgattcgtgcttgcttctgcttgcattttagcaatttcttctcttttccttcgagctaactctctcgcctcatccgcagacatcgttccagttttcttcttgctagaagacagctcactttccgggatggagaccatcttgctaacatatgcaacgacaggctcctttgggccagtcttgaactgaatcatggcatccttcacagcggcatccacgtactttgaccctggcgactcctctatcattggcggtaatcgggatgattgagctgttcgcggactaggaaggtactcaatgactgacaccaaaagtgctgtggagagcggtagccactgcgagaacaaagtggtcatgatgttccttggatcgcgggatcgtaagatgtacggtggaatgttaatacctagggacttcgtgatcttctccagcaatgcagggtcactatagtatggtaagtatattgcaaaagaaacagtgtgcttgatcatacc

SEQ ID NO: 8285 - DNA, 804 bp, Emericella nidulans
cagctaattcaatttactttcattttttcaaacccggttatcttaggacggactagctatacagtgttgagggattggccaccatcagcgcgtgccattcttcatccgacaaccaagagcgaaggctccgtagccaagccagatcgtccactttcaagtacggtgtctctgtcaaagcctcctcctgtgtgcgaaccttcatctgcggcgtatgcggcctagaaagtcagcccgatgtgcaactattcgtaccaacactcaccagtcgctcccccaaacgacctgcctagggttcgcatcgaagaacgcgcggacgagtggcctcaaatcttcatacctgggcgcctgagtactgacccggtaaggcgcactgattttgacatagaagtatccagtgcgcatgagctcaatgatctcctggaaccccggctgcagcgaaacatccacctcttgaccgtcaccgccaccctgacatggaagcatactactccccttaagcagggcaaaatgatccgtcactagtcgaatcccagtaggaaccatttcagcctcaatgaacggcttcaactccgtccacaactccgggcgcacatgggtgaacgccatactccaccttggacaatggtccttgatcgccttgacatgagcccgcagcgcatccttttgaaggttcacgtcatgcatcgccttttactggtacagattcactcgaatgccgcagattccagcgcgctgcatttcgtgcaactcatctgcggttactgtttctgggtcgatcacgccgattgcttttgtattgcttgt

SEQ ID NO: 8286 - DNA, 1100 bp, Emericella nidulans
ataaaagaaagaagtttaaagatatactataaaagcatatttaatgaagcctgttaaacttttatctcaaaagcaatcataaggccaaaggagacttcttaaagtatctcaccatagggttccaaccgcatgacctggttctagggaaaatggaaagggggtaacaatacacaaggggaggaaacttccaggacaaggtgaatggccaaccgcaagtcaaaggattaaggtcaggtaggctcattgaggaaaaggccaacacttgtttcacctctctccctccccccaacatgattgaaccgcctgccgccctataatcaatacctgctttggagtatacaatagtaaaaaccacaccacaacctcatgtaagtactaatgtcccattcagttatgcgatcacgggatctggaggctataactaggtggcagaccgctcactgtgcttgaccatatgtgcattgtggatcattcagccgtttactatgttctactatatagacaaccatatcgtgctaggtcatgcaatttcaacacttgttggcaacatgaaagaacaatggcattgcgattaaggtgatggcatacggcttattgttctagctactcatacccgtacaacaccaccaagattgctctctctgaagcatggatacccgcgactacgagtttccagatacttaaaggtttcgactgtgcaatcaccaatgtacaatggatacatgaccaggtacaggatattttcgctgatattgtccgccgtattttccttccattcggaagtctttgtaggaaggacgaaacaagaactttgatatatggctagaaagatgtttaatgatttggagaaacgcccttccatacataaatgtcatatatgctcattctttgtggagtcagagtatcgtcctcacaatcactacaccaatacaaggtcttgtggtcttccagtcagcgacctaggagtttatcagcctctccgaataaggtcattattggaagcctatgcgcctaacagcaaatgtctgcagttatcggggtagtgttcgcagacctaaatagcagggggggatcaatatttctgctgtcttcagcagttt

SEQ ID NO: 8287 - DNA, 1400 bp, Emericella nidulans
gtctaccaccgattgattctggtgcttcaggtctctaatccagctcggaccagtttgctgcatcttattagcccaaccctacccctgggttcgtggacctacattgagtgggttgaaagaaggcacacgcggaactttagcatcaggaaagaggtgagcatgacgaggagcagggatcggagcttgtggaggagtgtccgaagaatgaccgggatcttgctcaaaatgtggtgcaattggggccacagtcaggaaaaaaggtcgttccttatcttccaaagcatcgtccacaaagccgagagccttttcttcggtgacgtccgtcgtatactggcccgcatagctctttggggcctcatgattacgctgataactggagttccagtaagagtatgtgaatgggtccagcaagaagtccgagccattgaagcctttgacaaatggattattgtaagtcgtcacgctgtgcgcattgaatagcttcccgacgtagtaggtattgtatccagcatcctgcaaccacaggggaaaccagtcctcgttgaaaccttgtgatacaaacttcggataaccgccttgctttgtcagttctgatgtctgaatcaacatatgcaacttaccgtatggtggagcgacccatgtgacgttcgtgttgtgcgcttggcgaccagtccagaggctgactcgcgacgggcagcaaagcgctgtcgttacaaagtggtttgtgaaatcaagtcccctatcccgaatgcgacctgcgacatgtggcatatattccacagagttcattgtcaggtcttgatcatcggtgaacacgaaaacaaagttgggtttaggcctagggctggcctcggagagggccgagacccctacaagggcaaccaaactgctgagcttcatagtgcctcaatcgaaccgtaccactggcacccgaagtaccctggagcgagagttcggctttatgcacaatgggaagtccggataacgtcaccgtattcgctgctcttgggttgggagatcggcagttgcgaattgatcgggcctgatgacgcgatctgtcaacctccactctgttccaacttcagggatggaggtaattgtgagctcggctgtccaaccaatacttgataaagcctcgcagaggccgttgccgtaaatgtgcctggctagggacgtgacggccttgccctgaatcatggcgcctggaatggagacttgccaaggtcttattgtccagccaaggaagttaccagtataccagcaagtgaacaacatggaagtattattgctattcagtactgtcaatggagaatttgatactcagtggatactcagatacgtactaacgaagataactcatctccagctctcccttctataaattgactttaccccgcaaa

SEQ ID NO: 8288 - DNA, 761 bp, Emericella nidulans
cacccaaccctctcgaagacgatgtatcatatgcgatctatcaaaagcccgatacagatctcattgttcccagaacgccaaacccatgacctcgagaaaagcaatagggtataagtatacttcgcggtgagaaaatcaactcgtccgagtgaagagtatatcagggcgaaggtcgccccctcagtcggcgcccattggaaataccaggaggcggaacgttttccctcccctccatcatgccagccatcctcctagcgagcatcttgtttggcaacttagtatcagcaacaactgaatttgagcgtcgccttttggatggtggtccgttcatcccttctgcttctgtcgcgctatccgggctgacaactggggaaccatcctggtccgtggatttctcgcccgtgctatacacgagcggtcttgcggcgacgtttgcatcgacttccctaagtccagtgttggaagggttgacgttggtcacggttggtgcatgagttcctacctcgtcctcgacgtcattgtaaacgaagcctttcgacggagaacctccgggagagctggaagggccggacaactggtcgtcgctgtttattggaaggacttccatctcctttgttgttctcaggcgagacttgaggacctcatgagactccgtgctaggcaagacagaaatatagtcgtacttccgtttcttcggggtgacaccagtggcgacatactcctccagagaacgattttgaaaactggaagacaagtccgta

SEQ ID NO: 8289 - DNA, 735 bp, Emericella nidulans
  unsure (1)..(735): unsure at all n locations
aatgaccaacataatacacttaagcgcagaaaaaaaatgtcgctatccatcagctatcttaccctccccagaattctaattttctccttcatcttgacttcaacccaccaacctttcgaaacgctctcccgaataccctccctaatcttcctccaggagtgcaaaatcccccactcatttactttccttccaaaaagccactttaatatgccctcctctacaccaccgctggcctcctcaccgggtctcagaacatgcagtcccgcaaaccctgtgactgagtcaacggtttcccacgcatagctctgtgagtacgcgtactcggtcggggagccggagagggagaggagggtctctgcttcgtggggttcgagaaggacgtaatcaaaacgggaccagaaggtttgcattgcggaaagggatgcgggaggtggggatttatcgtacgaccatgatattgtggatgaaatattggatccttgttgtttgctgcgatcatcggagagttggagaaaacgcgtgacgcctgtttgacaggcgagatttcctaggtgcacagagacagtaattggttcatgctgtccgcgcgcgcttttcggcgtgcgctgaggacgtgattgtggagggcgttgaggcgtgtgcgccggggtagtttgctgatgatgctggaaggagtgcaactgatgaccttcggcccgctgcgggtgttgctttnaagctacctggcggcccctc

SEQ ID NO: 8290 - DNA, 544 bp, Emericella nidulans
cacatcatggtcacttgatatgttggcgagcccagtttcagtcttatggagataatgtgcaattacgccggaacagcaagcccggccgtcgaacgacgatctaagcagcaaacatactggagatatccccaatgagcgattcgcaagggtccaaaggtactgggtggccccgtcaaatgccgccgggagactcgtgaacaatctttggcgggacattgctgccagcgacgttgataacattttctctctccaaccctcgcattctttccatagcccgtctggactgcttcccggatctcgatatggcctggacgaggaatgccgtcagcagttgcaagcggttttcggaaaccttagacactacaaccaactacactccccgaatagtgcggtatcgcctacgtccagttcgacttttggaggccgtccaagttttcctccagctgagatactggacatggctcttgacttatactttcgcaatttccaccctcttatccctttcgttcatgtttcgactttttcggtgaagaatactcgtctc

SEQ ID NO: 8291 - DNA, 414 bp, Emericella nidulans
attcagagcgtcttagtgaagcctcttatgtaccgtccagggatagtccttcaatgccgcgcattactttcctcggtacagaagacaagtggtggagcctgtgtcgggaatgagatggatgcggaacgagtgctcgaccagacctagaacccgtatctcatagtcctctcgtgcgtccatttctacgtaagagccgcgagtatctgcgaatgactgggatatagctcagttatcgatgtcgtcacctttataccagagactgcggcatagacaggaaggatactgagtggcatgtctcgagcttctatgacttcgtcatcgaaatacatccaagcacgaataaggccgttcatcatgtgagttcctaaggcctacaggtgctcaatagcaagatctgtgcgaaagtttgtcgat

SEQ ID NO: 8292 - DNA, 109 bp, Emericella nidulans
ctagtaacggactgtagtctgaagttgagagccaaattagcatcccagccatctcagaagcggtaattgttgagccggtactagatgtagacagagatgaacggctgag

SEQ ID NO: 8293 - DNA, 577 bp, Emericella nidulans
  unsure (1)..(577): unsure at all n locations
gcttccatctccacccccgttcttccaacacagcccaccgtggccgtgacatgcattgccccatgcttcatctcagcgtcatcggcggacgggtcaagaagcttcacatccacctccacccccgtcaaccccagcccaggatgacaaagcggtacaatatccggcgtcttcttcgcggcggtgataccggcaatacgagcgatgccaaatacgtcgcctttgcggctgccggggccttgtctgaggagttcccagggacgtcggttggagaagcggacgtgacaggtggctgttgcgaggcgttttgaaatgggcttttcatcaatcagcgtcatatggacgttttgcgagcgattgagatgaggcagatcggggtcgtcggatgtagggagcgaagcanttttgagtccttgttgctgggttcctcgcacgaagttgtggtacgttcgcgatggtaaagtcggacttgggtagccattggcatcccgagaccgagtgaatgcgtcgatacgttcattacttgtcccttggacatcattgacgacatggaggcgaagtaccttatatttctctgggc

SEQ ID NO: 8294 - DNA, 512 bp, Emericella nidulans
atcgacattctagggcttgtttcagtttgaagcttctggctgttcaaaacatcactatgaaagtcgccttggcaaaaagcgatccggctgcgccgagatgggccagacggccgatcgcttagttttctccgcagtactgccgcagattttttagtttataggggctcgagtggtgtcattcagttgctgccttggcaaaatcttgtgtggccggacccagtggagcagttgcggtccaacaacgaaacgcttaaatcgcgtcaagggtcggttgctcagctgcccacccacggttgcgaataagacgaccccattctgacatcatgatcattcataatgatccctagttacactgtttctgctcagcttcccattgttttcccactgtttcccatagtcgggtcccgttcgttccatcagcgccctggtggtgcggtctcgtcgcccaggaaggattgggaaggaactcgggagctccgcgtcgaggtcagactgccgccgctgattggtgg

SEQ ID NO: 8295 - DNA, 737 bp, Emericella nidulans
tacaatttgcctttcacatcctgggcttctactgctcttccagttactacttcttttcgttcccctttctctctcataaccgtctaaccgtagtcgattcgtaatcgatcgcatcgaaacaatgagtgaaagtaaccaagccactttccaaggcaacgacccagctgctcatgctcctgatgccgctgcttacgacaagggtaagggaaaggcagttgaggatatggacgtgagcatggatgaagaggaggaggagagcgaggagagtgatgctgagattgtatgtgcccaggattcgctctttttaagcacggctactaatgtgtttttctctactttagatggttgaaggtaaaactatccgaaagcaagttcagggcccgcgcgactaatcaggactattcccagatgaggacgacgatggtgacagcaatctcgaacccgtctcgaccgagaacatcattagcggcggacgacgcacacgcggcaagaccatcgactaccaggaagctgccaataagattgacgcagacgagatggatgatgaagaggacgatgatgaggacttcaagccgagcgacaagtagtgatttatcgaatatctgacgacaccaacgaattgatctgggaccgggcaatactcgattacaaaaggcgcagggttattacgggctttgtcttttacttcatatttcggcaactcatgctgcacttatcgcagagttcgatgacaataa
